United States Patent Application Publication US 2004/0034888 A1 - sequence listing, part 10

SEQ ID NO: 22768 - DNA, 2777 bp, Zea mays
  Clone ID: LIB3591-108-E4_FLI
gctgcgcgcagaaaagctacttcagagaaagatgttgaactgaagccatcacatggtcacatcacttcagaggatgaagatcttgatgcttctcctgttgagattgatgatgctttaattcttgatgatgatgacgaggatgtcccagatgatgaagatgatgatcatgaggcggttctccgaggttctcttccttcctgtgttcctgagagagtgcatgatgtgaaattaggagatgctgatgattctagtgttgcctcattggcaaatgataaccaggcacagccctcatctggttctagtacaaaaaatacttctagcaggggattggacactgctgaatttagaagtccagccacatttggttcacgaggtgcaatgtcgtttgctgcagctgcaatggctggattaactccagtaggtggtcgtggaattagaggtagccgagatcggaatggccttccattgggtgctcgtgcaactgagcattacaacaaattgatatttacagctgctgggaagcagctgaacaaacatttgactgtatatcaagctgttcaaagacaagtagttcatgccgaggatgatgaagatcgattcggtggatctgatttacctgatgatggtaaccacttctgggatgatataaggggtgatgtgttcactataacgtatcagaaggctgataacacagcggagaaggggtctgttggaggttcagcttcagtgccaaaatcttccaaatcagattcttgcagaactttgtctgaaaaacagtgtacttctcttcttgatagtattttgcaaggagagcttccctgtgatttagagaaatcaaaccaaacctacaatatcttatcactattacatgtgttggagggtttgaatcagttatcacctcgtctgagactgcagtcagcctgtgatgattttgctgaaggaaaagttgctacattaaatgggctatacgatgttggagctaaggtaccctcaaaggagtttatcaacagtaagatgaccccaaaacttgctcggcaaattcaggatgttcttgcactgtgtagtggcagtttaccatcttggtgttatcagctgacgaaagcttgtccttttctgtttcctttcgaaacacgaaggcaatacttctattccacagcttttgggttgtctcgtgcacttcatcgtcttcagcaacaaccgggcaatgataataacactgcttttgaaagagaagtcaggattggtagattgcaacgccagaaagtccgtgtttctcgtaaccgtatcttggattctgcagctaaagttatggagatgttctctaatcaaaaggctgtcctagaagttgaatactttggtgaagttggaactggtcttggtccaactttggagttttatactctcttaagccgtgagctgcaaagggttgacttaggattgtggagatctcattcttcagataattctgggatgcaaattgatgcgaatgctgatgatttaataagaagtaaaaatcatgaatcagaatcacttactgagagcaggaacatagtacaatcacctcttggattatttcctcagccttggccacctactgctgctgcatcagaaggtagcaaattcttcaaagttgtcgagtatttccgcttagttggtcgagtgatggcaaaagcattgcaagatggaaggcttctcgatttgcctttgtcgacagcattttacaaacttttgcttggacaagaacttgatttatatgatatattatcttttgataccgagttcggaaagacattgcaagaattgcaaattctcgttgcacgtaaacaatttttggactcctgctctagtgagagccaaaagatagatctatgtttccgtggtgctcccgttgaagatttatatttggacttcactcttccgggctatcctgaatatgttctcaaggaaggtggagagaatgcagaggtcaacatttgtaacttagaagagtatatttctttggttgtggatgctactgttaagaccggcataatgcggcaagtagaggcatttaaggcaggattcaatcaggtgtttgacatatcatcactgcaaatattttctcctcaagaacttgattatctgatttgtggtcgctgtgaactttgggagccggaaacactgcctgaacatataaaattcgaccatggttatacctctaagagtcctgcaattattaattttcttgagatcatggcagaatttactcctgagcagcaacatgctttctgccagtttgtgaccggtgctcctcggcttccacctgggggtttggctgctctaaatcctaagttgaccattgttaggaagcactcttctgtggcaaataataattcaaatgcaactggagcgacagagtctgcagatgatgatttgcctagtgtcatgacttgcgccaactatcttaaactaccaccatactccaccaaggctatcatgctaaagaaactgctttatgcgatcaacgaaggccaagggtcatttgatctttcgtgaatctcaacactaacataggtattggtccacctagaaatctgcgtcattgttacccagagttagtttctacctcattcatgtatgacataggttaaactcagctctccggagtcccaccgaaggtttggagcccgtacctttgggtgtggatgtctatactctcttttcttcttggttgtatattcttgcggatctttatagtgaataatagtaataaattgttttgcgcttcttactatgct

SEQ ID NO: 22769 - DNA, 930 bp, Zea mays
  Clone ID: LIB3591-109-B6_FLI
ctctacttatatgctagttcgagtcagagcttacgtgcgtcacactagttcattccctctgatccatgacatgactctttgaatggtggtgggtaactaggttctcacgatgcaatgttgtctacagctcaaggacatggtgctcaagttctccggctccagcaagcagtgcagagggacgccggggggccagtcgttcaggagcagcggcgggggcaggtacctccgcccctaccccagcttcatcgacgtcaccggcttcacgccggcgaacaaggttctcggcaacgcattggcaggtgcaggcgccgccggtggtggggcgcgaaccgcgtcgtcggatacgttggacctgaccaggagcaaccgcaaaaccccccagagtagagcggcggcggccggggacgatgtcagggagtggacggcgcaggtggagcctggcgtccagatcaccttcgtcaccatcccgagcggcggcaacgacctcaagcgtatccgcttcaggtgtgtcgtcgttacgctgccactactgcttccctgctcaacgacaacgactcgctgcgacgaccattgattcttgcaactgaactgactcctaagtggtcgtatatgctacgtacgtcgtcgtagtcgggagatgttcaacaagtgggaggcgcagcggtggtggggcgagaactacgaccgcatcgtcgagctgtacaacgtgctgacgttcagcggccggcagcaagggtgctccactccggcgtcctccgtcgacgactccgcatccgcgctgagggactcgtcctactcccgtgtcggctcggcgagcaggggcagcccgatcacagtgccgccgccgccgccgccaccggtgtcaagcaaagaacggatcgcccggagcgcgtcgttcagggcaacggcggcagggtcctcctcggcacc

SEQ ID NO: 22770 - DNA, 700 bp, Zea mays
  Clone ID: LIB3591-109-G8_FLI
gagagagaaagagtgggatggcaatggagaggtcgttgtcgtgcgcggagaggggcagccagcgtcaccaactggacctccgccaaccgccgctccgtcaacctgagggggtacgccccgtccttcgccgcgatggacgacaccgccggcgcggtcccggcgcccaggaggaagctgcgggcgggggcggacgacgccgaggtgcagcggcggcggctggtcgtgtacaagacgtacggcgtggaagggaaggtccgggagtcggtgcgccgcggcgtcagctggatcaagggcaagtgctccggcgcggcctacggctggtggtgatcgatcgccagctccatcgccgtgcccaccggcctatcggagtggtactactacggtacggtctaccatatgagctggtgcactgcatgcccaccgccgcaccagtacctcctgttacttgttcttggagttaggagtttttttaatctttaggagatggatttggttgtatgtagtagcatactagcatgagctgtggagcttcttctcttggtgagtgatctcgtgtcttgtgagggaaggaggaagttcatgctgtgggtgtcctactcctctttacagaacagatatctggactctggtctatgtaaatataggtgctgcgtatgtatatatgtgtgtatagaataagatttctgtaaattattactac

SEQ ID NO: 22771 - DNA, 1934 bp, Zea mays
  Clone ID: LIB3591-109-H8_FLI
ctccgtgtgctgtggcggcggcggcgcccggctctgctcggacggactccaccgaaggctcggctcccctcggactccacctgcgacggccggccctctgcctgcaccgacggtgcccggctccctcggcatccaccagcggtgcccgactccaagaaatgtacaagtcacggctgcaggagctgtgccagaagcggcgatgggcgccgccgttgtacgagcctacccgagagggtcctgcccacgcgcccctcttccgcgccactgtcgtcgtgaatggcgagaggttcagttcccgggatgaaggggagaagtcactcaaggaggcgtacaacctcgcggcgatggccgccttcgacaacctcatcgcgctcccggccgcggcccttgcccctgccccggctgctccagcgccgccctcatccgagacccagcttccttacaagagtcagttacaaatttatgctcagaagcgaggcaaactcctgccttcatatcgtcccattcatggaggttctcttcatgcacctctatttaagtcagaagtaaccatagatggtcaaacatttgagagcccagagtactgtcacacaatgaaggaagctgaaacagttgctgcaaaagttgctctgatgtccttacctcaagaagcaaacccaacacagcaattactgcttccatctgtaaactataagaatcttctacaagaactagttcagaaggaaggctttcccttgcctatctataatacagcctcggatgtctcgaactattctgctgccttcgtatcaactgtggaaatccatggtgtaacttttcatggaaagccagggaacaccaaaaagcaagcagagatgaatgctgcaaagtctgcttttgaacatttcaaaaacataaatcatgatgctggatcatctggctctgctaacccacttcctgttgccgctacaaaacagtctgttgatggaaacactctacgtgcaaagctggaagttaacaaatcacaccttgcagagccaagcacagaagttgaagcaatatattcatctacagaagttgacaaactgccacttccagggccaagcatggatatcgaagtaatggactcaactcttgaagttgacaaactgccccttccagagcgaagcatggatgttaaagttgtgaattcgtctctgaaagttgacaaactgcactttgcagagccaatcacagaagctgaagtgatccactcatctctgcaagttgatgaaccgctcattccaaagccaggcatgagctcatctctagagaacacacctgctgtgaatggccactcagcccccatatccccaaccattactcctactctaataagcgtgccaacagcaaccatgcctgtcagcaatgacagatgcggttgctacatgtcaaccaacagaatccaagtctaccctcgccacactgatatggttatcccggaaggcgcggccgtgcttcccatcagcgataatcagtgggtagctgtcagcctaccttattccatggaacaaaggtgagacaaacccagggagacaaaaccatccataaataactaaatatcttatgcaaataatatctctgaaccccacgttataagtttactggatttgggtttcaaaataatatctctgggattgctcacaccgggaaaatgcagggatttctgttgccgtaatccggactgccacttaggaagataaaagcagacaaaaggatggatgctttgtgatgattatatagcttgtgatgctgagcattgcccgtgatgtactaaaatctagtgtaacaagactgccttgcgctggactacgattagtgtccctaatgcggagacttgtgtgactcctattgtatctagattaagctgtacttgtttgactatgtgcggaagtcttgagttacactcctatagt

SEQ ID NO: 22772 - DNA, 2050 bp, Zea mays
  Clone ID: LIB3591-110-A11_FLI
ccacatccatccatcaaacacggaagagagagaggaagggagggagggagaggagagattattttggaccagttccaccgcttaatttgcaggaccgccaccccccgcggcgccgacgatcacctcaggcgtgcgcggatatggggcgccgcggctcctacgaccgcctcgaggcgctctccctggagatcgagcgcaagctgcacaaggccctgatgtccaactcacagcgtcttcagatacttcagcaattgtttgctgacatcgcattgaaggtggatgatcgcgctcgagatgcaattatgagtgagagtgatgatggcattgctccagcagatgaacgggaggatggttggctatgcttctatgagattcttgccaatcattttgttagagtgcctgaaagtggcaggcgtatacttgagttgattgtgcaactctggagccagtccttcgcggccaacatatttgcacttcttttccagaaatggttgtttgaagcccctcttgatgaaaaagaaatatcgctacgatatagctctgctcttgttcaaggtgctacaaatgtattttggattgacatacagacaaatacaagacattttctctctttgtatcattatctccttgaggacgttgctctagtccctgaaagacttagtaaaatatcattacaggctggtagagaccttttccttctgctctctagattcatgttcttctatgatcaagatcacatgctttctagtttcctagagcattttcccaatttcccaaattccttcttggttggtggaccagcagattactttgtaattgaactcgctgatcagcttcaaaagctaaaaattgagccagtactactacactacctctcccgcatgagcatacttcaagggttggaactgaggttgagtacaagcaccagactaaaggcctgcctctacagcttcacttctcctggtggccctacctacccaacacgggcggtgcggcacgcagcctggaacaccttggatttgctgttccctgtgagtaccacattttctccaaccttagtacagttatgaatttacagcactattggttcctttggcagtttaccttgaaagtaaatatgattttattttatgcacctgtgttggtgattatctttttctagtggacacatatgtaccaaaaaaaaatctgaattactccttgttcggtttttcctaatccatgtggattggaagggactgtgatgaattgacatggattttaacttgctatgtatttaaaccgactcaatcctacccaatccatctggattaacatcaaaacgatggattaacatcaaaatgaacaagcccttagatgtctggacggtatactgtgttttgtgataccaaacaggcctggcgagtaaggccaggaatgccatagatgaacaggcagagagtcctcttgcgatcaaccaatcacggcttgcattctctacgttttattgcccataaactgtcaagattgctccacatactttgtttattcatccaccgctgtaatctggtaaaagggtaacacgatgcctctctcggttggtcattgggttgttggttggctacagatcggtcgttacccgaggcacgtgatcagcctgttcttccggctgctgtatccgtggtactggccttcctcttgctggaacttcgtgatgacctgtgccatgaccgtgtactactacatcctgaacctgctggtgtcgtgttgggagaacatgaggcggcggcccagtcaccggagaacgcacggtgaatgaagacgcggcggcccatccagtggcaccttgtgttgttgttgttgttcatttttctttcctttgcgcgagtggtgtagtagttagtagcagcggcttatgtgttcgtcgcgaaacaacattccctgtataatataaactgctgtacttgttcagctgttgttcatataggaagagccgaatgaagaggaacagctggtaatggagggagagcgtgtgcgcgcatttctcgcttcgtttctggggcatttactt

SEQ ID NO: 22773 - DNA, 919 bp, Zea mays
  Clone ID: LIB3591-110-D3_FLI
tccttcctgttggttgcttctttctactcgcgctcgcaccaaccagaggagcaaccgagcagtagcgactcctctgcgtgaggcctgccgtcatcccccgtgggccgtggccgtggccgtggccgtgcgcaaaaaaaaacaaaccatcctcgattcgaccggaggggaaggagacgcgccgggagaagggggaagagacgcggcgaccatgtctccgatctgggtgttcgggtacggctcgctgatctggaacccaggcttcgcctacgacgaccgcgtcgtcggctttgtcagggactaccgccgcgtcttctaccaagggagcacggaccacaggggcacgccgcagttccccgggaggaccgtcacgctcgagcaccagcccggagcgacttgctggggagttgcttacagaataaaggaggaagataaggagatagctttggagtatcttgaggtcagggagaagcaatatgatgagaaggtttaccttgacttgtatactgattcatcgcccaaagtaccagctgtcgaaaatgtgatggtatacttcgccaccagtaacaaggagaacaatcaaaactatcttggtcctgcacctctggaagaaatgaccaggcaaatttaccttgctcaaggcccatctggacctaacaaagagtatgtgttcaaactcgaggacgcgttacacaaattaggagttgtagaccaacatgtccaagaactggcaaatgctctgcgtgagtattctgacaccgagttatctaagtgaaagatcacatttaccccttgtttggagggtaaggatttataaataaagttagaattcattcatgcatgtcccaacatggatatattcttgtaagctgcgttttgagtgactacattacgattatattcctgtgcacatgtggtttgc

SEQ ID NO: 22774 - DNA, 1383 bp, Zea mays
  Clone ID: LIB3591-110-F10_FLI
cttttcttcccccgttcacctcgcgtgcgccacccacctagggtgaccgccgccgcccttcgcccagccgcccgggttgcgctttgccggcgacgagcgcccaccgcacccccaccatattggtcactggaggattgctgccgttggtaaggatgagcaaaggcccagttccgtttgccaacatcgggaagagagcaaaagatcttctgtacaaggactacaactttgaccaaaagttttctttgtcgacgtctagcggctctggtttgaatctcacagccactggtgtaaagatcaacgaagacttcattggtgatatacggacacaacataaaagcagtagaactactattgatgtcaccgttgatagtgattctaaagtgtcaaccacagtcactgttgatgaagcactaactggtttgaagacttcattcgccttcaaggttcccgatcacaagtctgggaagcttgatctgcaatatgcgcacaatcgtttttcattgaactcgaccattggtttgacatcagcacctttggttgaactggctgcaactgtcggcacaagtgaacttagcattggtgctgaggttgggtttgacagtacttcagctgctgttactaagtacaactcaggaattggatacaacaagtccgatttctcagcttccttactactggctgataaaggggagactttgaaggcatcttacgttcatttgttcaatccgaccaatggagctacagttgcagccgaggtaacacacaagctgaagaccagagagaactatttcacagttgggagctcccatgcccttgatccttcaacattgctaaagatgagattcagcaactccgggaaggtcggtcttctctgtcagcatgagtggaggccgaaatctcttgttactctttcagctgagtatgatctgaaggtggtaagtgcgccttcaagaatcggcatggccatatccctcaagccttgagctgggttaagtcaccttctataaaacagtacaagcataccgtctcccaagaacacaagctttggagcgatacctagaacaaccctccattttagccttttttattttgtaagagtcttttgcaaaggagtattgtcacttgtcagggagttagacttgttttgtggaacgtttccattagagccaactccacacgaaggattgaaaatacagaggtttgcattagaacagaagctccactgcgatattttcccatgttttgctagtcgacgcaaaaaatgattttttggaggtgatttgaacacctaacatcttgagtcgatggtggttttaacagctctggaaatcaacaagggccatttgtacccagcaacagcagaattagttctggaaattggtt

SEQ ID NO: 22775 - DNA, 1007 bp, Zea mays
  Clone ID: LIB3591-110-G10_FLI
ccctccggaccagcagcggctcatttttgccggcaagcagctcgaggacgggcgcacgctggccgattacaacattcagaaggagagcaccctccacttggtgctgcgtctcaggggtggcatgcagatcttcgtgaagacacttactggcaagacgatcacccttgaggtggagtcctcagacaccattgacaacgtcaaggccaagatccaggacaaggagggcattccaccggaccagcagcggctgatcttcgccggcaagcagctggaggatggtcgcaccttggctgactacaacatccagaaggagagcaccctccacctggtgctccgcctcaggggtggtatgcagatttttgtgaagacattgactggcaagaccatcaccttggaggtggagtcgtctgacacaatcgataatgtcaaagccaagatccaggacaaggagggcattccaccggaccagcagcgcctgatctttgctggcaagcagctggaggatggccgtaccctcgccgactacaacatccagaaggagagcaccctccacctggtgctccgcttgcgaggtggtatgcagatctttgtgaagaccttgactggcaagaccataaccctggaggttgagagctccgacaccatcgacaacgtgaaggcaaagatccaggacaaagagggcatccccccagaccagcagcgtctgatcttcgctggcaagcagctggaggatggtcgcaccctagcagactacaacatccagaaggagagcactctccacctggtgctccgcctccgtggtggtcagtaagccatggttcatttaagctgctgctgtacctgggtatctgcgtcgtcgtcgtctaataaacatctgtggtttgtgtgtcatgaatcgtggttgtggcttcgttggtttaatggacctgttgtgtcctctgtgttgtacccaaaactcttctgcagcagtatggcttgaatccttgtgaagtttgatgtttgaactt

SEQ ID NO: 22776 - DNA, 772 bp, Zea mays
  Clone ID: LIB3591-110-G12_FLI
tggcttctcctccccctcttaccaagtcctcctcgggttagggttccttagggttttgtggaggggcgatggcggcggctgatgtggagtaccgttgcttcgtcggcgggcttgcctgggccaccagcaacgagtcgctggagaatgccttcgcctcctacggcgagatcctcgactccaaggtcatcaccgaccgggagacggggaggtcccgcggcttcggcttcgttaccttctcctccgagaactccatgctcgacgctatcgagaacatgaacggcaaggagctcgacggccgtaacatcaccgttaaccaggcccagtcccgtggcggtggcggtggcggcggtggctacggcggcggtcgcggcggcggcggcggttatggtggcgggcgccgtgacggcggttatggcggcggtggcggctacggcggtcggcgcgaaggtggcggcggcggctacggaggcggtggcggctacggcggtcggcgcgagggtggcggtggcggctacggcggcggtggcggcggcggctggagggactgatgtgtgggcccatcctggcttcggccgagttatcttatctatctatagtatcgtgttaccgttcgcttctgtcaccgtgttagtgtccgttctacctttggattaggtgttggtaccctgttgttcgctttggttgctcccgctatgaaacgagacgagagaagaatgagcaaggtttttgttcgcagctatttttgtccaatgatattgatatattgttcccc

SEQ ID NO: 22777 - DNA, 2497 bp, Zea mays
  Clone ID: LIB3591-110-H7_FLI
aatacggcatcatctccaaactcccgaggggggacatcaccgctgctgagcacgcccgccgcctgcccttcctcctcccacccgtgccgcagctttcgattcctgcccgcctcattgctacctggtcgggccgcggaattaatgtcgcgcggaggaaatccgcaggtaaacaagtctagctgaagtgacgattgccagcattgttcgaccgtgcggcttctgtttggctggaaccgtgatggatccagaaaaacaaaatgagatgagcctgatcgacaagagagaactagtatacgaagttgcaagatggcctcaaggtgccatggagattcttcggtgctggacccgcagggaacttcttgagcttatttgtgttgagttgggcaaagagaggaagtataccaatgtcccaaaagctaagatgattgcttacctattgaaattagtttcacggaatagtggaaagaatggacaactcaagaatgataatccgaatgttatgttattagggcaggataacaaagatgaaatacaaatgaaggaatctgatgaacaatcacgaccactcaaaactgcaaactctgactcatcaataagcagagaggcttgtgccggtagttcagtggtgtgcagcaatgttgcatgccaagccacaccaaatgcaggagataaatattgcaaacgttgctcttgctgcatttgcaataaatacgatgataacaaagaccctagtttgtggttggtttgcagctctgataatccatacagtggttgttcatgtggtgtctcttgtcacctaaactgtgctctaaagaataaaagggctggcattgtcaagaatgggtgcaacaagttagactgtagtttctactgtgttagttgtgggaaaatcaactggctaatgaggtgtttgcagaaacaacttgcaattgctagggaggcaagaagagttgatgtgctttgtgagcggttgtcattgagccataaaataatacaagggtctgaacgttacaaggaaatagcgagcataatcagctcagctgtgaaaacacttgaaatagaagttggtagtgcattggatcaggtctctgtgatcacggggcgtggcatcgtgaaccggcttacttgtggtgctgaagttcagaagctttgttcaagtacattagaaattgtagactctaaagtggataacatcttggagttcgagtccaataatagtccaaaactcctaggtcctcagccccaaatcctttttcatgagatcactccattttctgtggttattgtgttgaactatcagcatgacatcggtaaggagcagattgatggttccaaaatttggcaccgaagtgccagggtttgcaactattcatcagagcccacatgccacatactgaggccaaacactaggagcctggtttctggtctgagcccttcaactgaatacttcttcaaggttttgccttttagcagcacacatgggtttactgagtgggagacaaaatgcagcacacgcagcctggaccatggcagcagccagtgctcaactcagaactctgagagcatgtgcctcaaagacgattcaatgcagcatcacaaaaaggatttgaatgtgcagaatcaccagagaaccattcaatatgattcacctaagggttctacaaattcaagtgagaacaatttatcatgtgatcggtattccaagcgggctaaggttgcaaggctagatggtgcaagcgacaacgatgaaagccagttgccgccaacttctgaagttttaccatttgcaagctccaactcttctccttccgaagctccaagtaaacctgacttgcttattggcaccccagattcggcctccaagaactatgtggagcagcagtacgagtactgcgtgagggtggtcaggtggctggagcatgaagggcacatggacaatgacttccgtgtaaagttcctcacttggttcagcctgaaggcaacaacacaggacaggcgaatcgtgggcgcctttgtagatgttctcatcggtgatcctgcaagcttggttggccaactggttgatgcattcaaggatgccatctgtatcaaggagaagccctctcaagcacaacagaaagatgcatgctgcaaggttgcatctgaattgtgtcgagacagacattgggcacttgagataaacttttaaggttataaaagacgataaaatgctgtagatgcttcattcggcattcaggtccatctgatctctcatttatttattccaattcagtcgatacgcggactattgatccatgaaggcaatcgtggtggaaccatgtgctgatgagacatggttcatggaccggttgagtttaggtttcaactagtgaagtagttggagtttgttagcagacaagcaattgtatgcatgtggaatgctatcttggatctgcaagctaactaatcatatcatgactttggtagatgtttattgttattagttgatagttgactc

SEQ ID NO: 22778 - DNA, 1566 bp, Zea mays
  Clone ID: LIB3591-111-C9_FLI
ccttctgctaacccccccggaccccgacgagttctcaccccgagagtaactgaccgacctaccggcatggagatgaagctgaccatcaggagggtgcccaccgtcgtctccaactaccaggaggacgccgacaagccgcgcgcgggctgcgggaggaactgcctcggcgactgctgcctgcctgcttccaagcttcccctctacgcgttcaagttgactccggcaaagggctcgcaggaggatgctgcttcaaccaagttacttgttgatattctccttagtgagtgggaggacaggatgactcgaggcttattccgctacgatgtcactgcctgtgagaccaaggtcattcctggcaaccttgggtttgttgcacaactcaatgaagggcgccatcttaagaagcgccctactgagtttcgtgtggaccgtgtgctccagccgtttgaccctgccaaattcaatttcacaaaagttggccaggaagaggttctcttccaatttgagaatagtggtggtgatgacagctatttcctgaacaacgctccaatcattgctgttgatcgggctccaaatgttattgctatcaatgtaagcccaattgaatatggacatgtgcttctcattcctcgtgttctggaccgcctgcctcagaggattgatccagagagcttcttgcttgcactgcaaatggcagccgagggaggtagcccatacttcaggcttggttacaatagcttgggtgcgtttgccaccatcaatcacctccactttcaggcgtactacttgtcagtgcctttccctgttgagaaggcagctacccacaagatcccactctctgaggacacgaagaagaatggggtgaccgtgtccaagctgataaattatcctgtgagaggcctggtatttgagggagggaacaccctggacgacctggccactgtggtttctaatgcttgcatttggctgcaagacaacaatgtgccttacaatgtgctcatttctgactgtggcaagagggttttcctgttcccccagtgctacgcagagaagcaggctctgggtgaagtgagccaggagctgctggacactcaggtgaacccagctgtgtgggagatcagtggacacatggtgctgaaacggaggatggactatgaggaggcatctgaaacctccgcgtggaaactcctcgccgaggtctctctctccgaggagcgcttcgaggaagtgaaggcgtacatcttcagcgctgctggcctggttcagtatgatgaggaagaggaggaagccagcgacggtgagggccctacggcctatgttcctgtcaaggttacccctctgcccgtcgctgaagggtgcctcgtcctcccgtgagtccgtggtcggttaaataaagggccgtatatgattgcgagccctgtgctctgccgctattttcttctcgtttgtgtcttgctgctctcgtggtgaactcgctactccagtactctgcaatattaagcagaagctattgtattgtttgggtcgtttgtcagctaaattgaaatgcgatggacatttactagt

SEQ ID NO: 22779 - DNA, 912 bp, Zea mays
  Clone ID: LIB3591-111-D4_FLI
ctccgtccatttactcacacggtcacaccgcctcaactcgcgctgcccgtcgcccccaagcctcggttccgccggcgcgcgaggggattcgagctgggtcttgggtagcctctcaccgtctcacgatgccgccagcacccaagtccggcgacgccctcttcgccagcgtggatcgcgtcaatgcggagctgttcacgctcacgtacggcgccatcgtgcggcagttgctcacggatctggaggaggtcgaggaggtcaacaagcagctcgatcagatgggttacaacattggaacacgattggttgatgagttcttagcaaagtcaaatgtatcaaggtgtgttgacttcaaggagactgccgatgttattgcgaagcttggcttcaaaatgttcttgggcgtgactgcaaccgtgaccaattgggatgctgagggtacaagttgcagccttgtcctggaagacaaccctcttgttgatttcgttgagctccctgacacttgccaaggccttcagtattgcaatttgttaagtggagttattaggggggcattggaaatggtgtctatgaaggcggaggtgacatgggtgcgtgacatgcttcgcggggacgatgcctatgagatgcgggtgaagcttatcaagcaagtcccggaggaatacccctacaaggatgatgactagttctactttagtgcaagattgcttgtttggattttgacatcgttttcgtcgatggtccgtagttctgctataacctgatatcatacgaggaaagctgcgtctgttttgcttgtgtattgtagaaatcatacataatctttcctgagttgcggctttgaattagtctgctggattcagggcgttcgctatgcaaattggtgttatctagaaataaagtattttcgatctt

SEQ ID NO: 22780 - DNA, 1186 bp, Zea mays
  Clone ID: LIB3591-111-G7_FLI
attgaagcagcacgaaagaagtccttgttccgctctgcttgtgaagtctgtgagaagatgattggctctgcctgcttccctaatggtgagaaggttggcaggattttgatttacctttgtgaggggaagaaggtgaagatggcacactcattataccttgcagtgaaggaaaaaaagattccagtcccaaaactagccttggatttccttgttggtgctttggcaaggaatgatgagaccattggtactgctctggagctgctggaagagtaccaaggggagtcgcttaagcatgcaggcaagtcctttgccacagttgtacatgctttgtgtaggctaaacaaaatggaggatgcaaataatttgttgatgaggatggtgcagcttgaagagtacaaaggggaatctcttaagaatgcaggcaagacatttgccacagttatacatggtttgtgtaggaaaaagaaattggaggatgcaaaagcattgttgatgaggatggtaaatgttgggccagctcctggtaatgcagtgtttaattttgtcatcacagcattgtcaaaacagggagaaatggaggatgcaaaaggtttgatgagaatgatgaagagccaagggatcagccctgatatctatacttacagtgtgctcatgagtggctacgcgaaaggaggcatgattgatgaagcccatgatctacttcgtgaagctaagaaaattcatccgaagctaaacagggttgcttatcacatacttatccgtggatactgcaagatggaggacttcgagaaggccaatgagtgcctaaaggagatgaagaaagatgggttgcagccaaatgtggatgagtatgacaaactgattcagtcattgtgtctcaaggctatggactggagaagagctgagaaactcctggaggaaatggaggatagtggtttatgcctaaggggtataagtcgcagcctcataactgcagttaaggagttggaaggggaggaaatgcagtcaaaggcgagccaagaagcatagtttctctaggatactcgaatccatatgtctgctaattaacttttggatagaacctttctttttgagcttttcagctctggtgagcttgcaagaaacatcatctttgtacctgtttttgtttgttgttatttactacaataattttgcatttatattt

SEQ ID NO: 22781 - DNA, 816 bp, Zea mays
  Clone ID: LIB3591-111-G8_FLI
ctcatcacttcgctccaagccagtgctagcccggccccttgtgtacgtgagagacggcatcgtaccgtagagcagcatccatggcggctcagggaagtggcagtgctcgtggcagcggcgccgccgccgcgcttgcgctggtcctcctctgcgtgctcctccacggcgagttggccgagtcggcggtgtacacggtcggcgaccgcggcgggtggagcttcaacaccgccaactggcccaagggcaagcggttccgcgccggcgacgtgctcgcgttcaggtacaacgccaaggcgcacaacgtggtgcccgtgagcgcggcggggtacaagtcctgcagcgcgcccaagggcgtgagggcgctcaccaccgggaacgaccgcgtcacgctgaagcgcggcgccaactacttcatctgcagcttcccaggccactgccaggccggcatgaagatcgctgtcaccgccgcgtgaggcccccggccgatcagccgcgccggcgacgacgaccgccggacacacgggctcgatcggtggccagctttttattatttttatttccctctccaaagtaaaagcgtcgcgtccttaacctgcgtgctggtaggcggtgttaggtgtgtggagaccggccggcactatagagaactaaatcgaatgatggtgtactcgatcactacgtactgacgtgtatgagtttgtgttgatgtggagaacaataaaggcatgtgtacgcgtttgtatatcctgtactcagttcatgtgcgatatatatatatgctagctatgcctgcttgagctacaataaaagaataag

SEQ ID NO: 22782 - DNA, 725 bp, Zea mays
  Clone ID: LIB3591-111-H1_FLI
cgttcatcctggtggttttgtgaggtcgaaagcggcgagcgaattagaagatgctggacaagctgtgggacgacgtggtggccgggcctcgcccggagacgggcctcgagaagctccgcaaggccaccaccgcccgcccgctcgtcatcaacaaagacgcggacggcggcagctacaagcgggcgcagtcgatgccgtcgaccccgacgacgccggtgacgccgtcgtcgtcgtcgtcgtcgacgacgccgcgcggcgccggcaacgtgtggcgcagcgtcttccacccggggagcaacctggccaccaagggcatgggcgccaacctcttcgaccggccgcagcccaactcccccaccgtctacgactggctctacagcgacgagaccaggagcaaccaccgctagatcgggcgagatggatggacagtgaagaggccatgtttgctggtccttgtggttatctaaaacgcacgcatgctctattatagctagtcatcactatatatatacttgtgtttgtgtattgttgttcttgttctgctggtgtctccgccgtttaatttgacctatgttatggagtgagtgatatatgtgccgtcactcctagtatatagtagtgagtgactagttggtatgtgtagtactgtactatcttttctccatatgcatgttttgccagcgcgtaatgaatgtaatgtcagtactgctactacgtgctctgct

SEQ ID NO: 22783 - DNA, 1220 bp, Zea mays
  Clone ID: LIB3591-111-H10_FLI
ctgttcttgcctcctggtctgtctcgccgctccacgctttaggcccaggattagctgttgtatcgcttcttagcttccatttgttcaggatttccttgctacatgtgttcttctctagatctgtttcccgtgtgtactgcgtagtctaatcttatttctgttacttgcagcgctgttccgtcggcgttccgatgatgccgtaggcgacctgagcctgtggttccctttccgactgggacatttggggggaggtatcaatttttcaactgtatgcactcaaatctttttgaagaatataagttcttccccaagtatcctgataagcagcttaagatagcagctattctgtttgctgattgatgcagttaaagagctggacgaatagatgagatggagaagaagcaggtctcttctttacgctataagttcatgacatttgcatctattatactgaaccatgcaatcttaagtttatggaaaggctataagaaaaaaacagaaattgtacttggaatagatgttttgacaacttagcatgataatgaaggaaccaatacaataagtaagcaacattatgttgagtaaatctttgtacatcattatctgtctataccagcagtcagttttgtatgattgaaacacatatttggtcgacgctgggccagcaggggtaggttttacacctcatgttatttttgtaaaagctacagagttatgaagaaggttctgaagattatcactattgtcttatcaggttgaacttcctctgaagcaactggaaaccatcttgacataataaaaccaagctctaatatcattgtaacaatctatgaaacccagaagatgcagatcatgtgcctgggcatgaagctgatgctgccggagtctcataaccagccgctcgaagcagcagcagcagcagagatccgctgagcaagacaaccacgattagcagaagtccaaagagatgatcaaatgtaattctccctccctgcaacaaagccactttagttgccatcatcagcaaaaatgaaatctgagcactacacaatattgtattaggaacagctcatgatgagctctggaaggaagaagacgacgattaggactaccactactgaaccatcgatcgccagctgcatacgtttgctgatttctctttaacagccatgtctacctcctatctgacgagctctctaaaggcattcagttcagcactc

SEQ ID NO: 22784 - DNA, 1930 bp, Zea mays
  Clone ID: LIB3591-111-H3_FLI
ctccgcttcctcctcctcctcctgcccctcccccacccccacccgtcgggacgcctccccactttcccctcccccggatccgcatggcgcctctgcagcccgcgccgctcggcctcccgtagccgacgcccggccccgtcccaggctcatctttgcacagagtcattggaggaagtttgatgtttcagcagtactgtgacctttattagatgtctttccgcagcattgtgcgtgatgtaagagatggctttgggagcttgtctcgaagagggtttgaggtgaagtttctgggccaccgccgaggcagatctcacggtgctgtccatgagctgcgtgatccagccccagtgatccagagcagttgctgggctaatttgccccctgaattgcttcgagatgtgattgagaggttggaggccagtgaagccacatggcctaacaggaagagtgtagtctcttgtgcagctgtttgtcggacctggagagaaatctgcaaagagatcgttaagaatccagagttctctggaaaaatcacttttcctgtgtccttaaagcagcctgggcctcgagatgtaaccatccaatgcttcatcaaaagggataaatctactcaaacctactacttgtatctgtgccttagcacagctgtgcttgttgaaagtggcaagttcctcctatgtgcgaaacggacctcccgcccaacctgtacagaatatacaatatttatgaattctgaaaatttatctaggtcaagcaaaatgtacattggaaagctgaggtcgaatctcctcggcacaaagtttgcaatatatgatacccagcccccatgcaatgcagcagaacccgggaaaacaagccgtcggttctactcccggaaggtgtcgccaaaggtctcctccagcacctacaacatagcgcaggtttcatatgagctgaatgtcttgggtactcggggccctaggcggatgaactgtgttatgcactccatccctacctcgtgccttgaggctggtggcactgttcccagccagctggacagcatccttgctcgctctactgatgagtcatttggcagcatttccttctccaagtcatctgttgtggaccggtctatgcgtttcagcagctcaagattctccgacatctcaatgagcagcagccgcaggattggagacacggcatcgggagacaatgatgagtgcaaggagaggccattgattctccggaacaaggccccaaggtggcacgagcagctgcagtgctggtgcctcaatttcaggggcagggtgacagtcgcatctgtgaagaacttccagctcgttgctgccacgcagcccgctgctggagcaccaaccccatcacaggctaccccagtgccgcccgagcacgagaaggtgatcctgcaatttgggaaggtggctaaggacatgttcaccatggactaccgttacccactgtcagccttccaggccttcgcgatctgcctgagcagcttcgacaccaagctggcctgcgaatgaagccaccagtcatggctcaaagtcaaggacgatctgtctgtttcacgaagacggtggccccaaattttgctgggccaccattctgttgtatgttgttgatgccttcttaacttacctaggaagctgcgtttagacattttgcacctgatctacagctgctgctgtgtttctgtcctgatcgcattgttttccatagctttgctctgtggagcggcaacttgatctgccctgcccttaactagccggcaggtttattaatttggttttccatactatggttgtattaactgagaagagactccgacactttcgttgtgcctacctaagttctgtctgcctttgccctctgggatatgcaaatgtgcatcttgtaaaatttctgaattgcttttgtggcaagtcatagtaat

SEQ ID NO: 22785 - DNA, 939 bp, Zea mays
  Clone ID: LIB3591-111-H9_FLI
cgattacaacattcagaaggagagcaccctccacttggtgctgcgtctcaggggtggcatgcagatcttcgtgaagacacttactggcaagacgatcacccttgaggtggagtcctcagacaccattgacaacgtcaaggccaagatccaggacaaggagggcattccaccggaccagcagcggctgatcttcgccggcaagcagctggaggatggtcgcaccttggctgactacaacatccagaaggagagcaccctccacctggtgctccgcctcaggggtggtatgcagatttttgtgaagacattgactggcaagaccatcaccttggaggtggagtcgtctgacacaatcgataatgtcaaagccaagatccaggacaaggagggcattccaccggaccagcagcgcctgatctttgctggcaagcagctggaggatggccgtaccctcgccgactacaacatccagaaggagagcaccctccacctggtgctccgcttgcgaggtggtatgcagatctttgtgaagaccttgactggcaagaccataaccctggaggttgagagctccgacaccatcgacaacgtgaaggcaaagatccaggacaaagagggcatccccccagaccagcagcgtctgatcttcgctggcaagcagctggaggatggtcgcaccctagcagactacaacatccagaaggagagcactctccacctggtgctccgcctccgtggtggtcagtaagccatggttcatttaagctgctgctgtacctgggtatctgcgtcgtcgtcgtctaataaacatctgtggtttgtgtgtcatgaatcgtggttgtggcttcgttggtttaatggacctgttgtgtcctctgtgttgtacccaaaactcttctgcagcagtatggcttgaatccttgtgaagtttgatgtttg

SEQ ID NO: 22786 - DNA, 1228 bp, Zea mays
  Clone ID: LIB3591-112-A10_FLI
cttcggttttcaggagcgtcggccattgctgctggaaaagcagaccattgggactccctcgtgcgttttccaaatcagtcaggttgatggcgatggagggaccagttttatgccgccctgcaatgcaagccaaatcgcctgctgctgcgctggtcaacaactccctgaccagattcgggcagcttgggaccatttcaaaatacaggaacgtttcaagattcatttctcccatctctcagccatctacgaagaacataggtccatgctgtagcttcagctcgtcttctgatggcaatggatacatggctggaaactttagcgacagtgatgaagattatgttaattctactgtgctagaagcagttgaggtgagaagtggatcggaaggatatgtgataaagatgcgagatgggaaaaacttgcgttgtgtccataacaattctcaagggagaaatattccagagagtgcaccccaacctgctattgttttgaggattgaagatggaagcgaaactttacttccaatcattgttttggagatgccaagtgtacttctgatggcggctattcgtaatgtccacattgcacgaccaaccatatatcaagttgtcaaggaaatgattgataaaatgggctatgaggtaaaacttgttcgggtaaacaaaagaattcaagaagcgtactgtgctgaactttgtctaacaaagattgatgattctacagacagcatcaccttcgatcttcggccttcagatgccataaacattgctgttcgttgcaaggttcctgtacaagtccatagaagtcttgcatacagtgacggcatcagaccagtcgagccagcaagaatggcagtagcagctggcctatcagatgggttgttatttacagagcttgacagacccgatggacaggcatctgttgaggctcaagagtttggattggtgaagaacatgctcattgcagccgtagaagagagatacaaggatgctgcatcatggaaggacaaactgatgcggctgaggtctaagcggaagaactgggcctgacagcgttgcatgtctggatggtgtaaataaagatgatgcccagctgaattccagtacgcattccagataattgatgctgggttatggctatgtaactagctgtacatattgtatggacccgaggatggtcttctgtaaattcagactaagctttgaagtgaaacactaatccttcggag

SEQ ID NO: 22787 - DNA, 1248 bp, Zea mays
  Clone ID: LIB3591-112-B6_FLI
ctgctgacggcgtccaaattgtcttctttctcctcctacctggctggctggctctctagatcgaatcacgggtcaggcgctccccctgaccaaggccatgagccactacaccatgcatgcagccatcaactacgccgcgctgccacccacgtcgccgctgcagctccccctcccgtacctccctccgcctcctcctccgccgttaccgctaccgctaccgccgctgttgtcgccgccgccaccggcggcggcgtcctctgacgcgggattccagaacaggatcagccccagcgtccttctcatcatcctgatcttggccgtcatcttcttcgtctccggcctgctgcaccttctcgtccggttcctgctccgcccggcgccgcgggatcccggcgacgcgtacgggggtgacgcgaacgctaccgccttccaggggcagctccagcagctgttccacctccacgacgccggcgtcgaccagtccttcatcgacgcgctgccggtgttcctctacggcgccgtggtcggcgccggcgggaaggatcctttcgactgcgcggtctgcctctgcgagttcgcggacgacgaccgcctccgccttctccatgggcaccgtgttgccatgtcggagtgcgactgccactccaagcgggaaggcttccgcggattcgatgcgccgcccaagcagcagcagcagctgtcgaaagcggcggtggacaagagggagagcttctccgtctccaagatatggatgcgcagcgggccgaggaggaaggacgtgccctccggcgcaacgacctcgcgccgcgcgtcgtcgttccggctctcctcggcgctccagcgcacggcgagcgacgttggggcgacgacggcgaagcgccgggcggacgtggtgagccccgtgacggagtccgagtacaacgtgtcggcttgggacaagagcgcgagcggcagcgtcgtggattgggacgtcgagtccgcgggcggcgggcacggcctcagctccagagccgacgaggcgccgtcgttcgcccggcggacgctgctctggatcagaggccacctgtgaattgaaccgaagcgaagcagagatcttggcttctaccaccttgttcttcccctctgctctcccgtgtaagttgtagtaactgtgtgtgcatggatgcctgcgatcttctcctgcagcaacagatcgcaggaaatttgcattgcttggcgagtggatgaaatggtggatatttgttcggt

SEQ ID NO: 22788 - DNA, 654 bp, Zea mays
  Clone ID: LIB3591-112-D5_FLI
ttggcttctcctcccccaccggttcgtgttcaggttctggttcgtgggcgagagggaagagatggcggcgtcggacgttgagtaccgttgcttcgttggcggcctcgcctgggccaccgacgaccactccctcaacaacgccttcagcacctacggcgaggtcctcgagtcgaagatcatcctggatcgggagacgcagaggtcccgcggcttcggcttcgtcaccttctccacggaggacgcgatgcgcagcgccatcgagggcatgaacggcaaggagctcgacggccgcaacatcaccgttaacgaggcccagtcccgcggcggccgtggaggcggcggtggcggatacggtggcgggcgccgtgatggaggcggctacggcggtggcggtggaggctacggcggtggtcgtggaggctacggcggcggtgggggatacggtggtgcaaaccgcggcggcggctacggcaacaacgacgggaactggaggaactgagcggtggggtccgctgaggcctagttatcttgttcgcttctgctaccgtgttcaccctagtctagagggggtttatcttcgtctgtggtcgtctcgtgtccgtatgtttcgtttcgtgttcgttgttgttgttgcccatctgtgtttttgaccgc

SEQ ID NO: 22789 - DNA, 578 bp, Zea mays
  Clone ID: LIB3591-112-E8_FLI
cggaacggagcgcaacgcaatcatgtcaggcgcgcaaggagctcagccgaagggcgccttcacggcgaccacctacacgtcggctgcggccaccggtggcggcgcggcccaggggcaggggcaggggcaagaggaccaggagagaaggcagactccgcggacggagctccggtcggccgaggacgagcgcgggctgcctgtcaggaagctggaggacgcggtcgaggatgccgcgggcaagggcgggccggtgttcggcgccggcacggaggacgggaagccggatctcggggtcaccggcaccggctgatgctagccggatgtgcttcttaatgtgctgcttagttaacgagcgagtcagaaagtgaaagtacaaggatgtgtccagcacacagtacgtacgatcagttatcgagttatacatcttagttgagatctttatacatgagaccacttctgtaaatttgtgtatagccacaaagagatgtgtgaattctccttgtacaggtttgaatggccctactatatcgagacacttgattgagagtggccttgtaatgggaattatgagatgtagg

SEQ ID NO: 22790 - DNA, 2412 bp, Zea mays
  Clone ID: LIB3591-112-F12_FLI
gccgcgccgccgccgccgtgaacgagatggcggcagcccttttgctccgcagtctccggccatcggtgagccgggcacatatccaccttctttcccatgcctcctccccgacggcgctggggtctccccttttaccccgcctctactcctctgcggcagcgtcaaccgccgcctctcctgttttcacgcccggcggcgtcatggacccatcccgcatccgcaacgtagcggtgatagcccacgtcgaccatgggaagacgacgctcatggaccggctccttcgacagtgcggggccgatatcccccacgagcgcgccatggattcaatcagccttgagcgcgagcgcggcattaccattgcctccaaggtcacttctgtctcttggaaggaaaatgaactcaacatggttgatacacctggccacgctgattttggtggtgaggttgaacgagttgttggaatggtggaaggagctgtcttggttgttgatgctggagagggacctttagcacaaactaaatttgtgctttcaaaagctttgaagtatggcttgcgtccaattcttctcctcaacaaggttgataggccttcagtttctgaagaaacctgcgatgaagtagagagcttggtttttgatctttttgcaaatcttggtgctacagaagaacagttagatttcccagttctttatgcatccgctaaagagggttgggcttccttaactttcaccaagagcccccctgataatgcaaagaatatgtcttcactgctcgattccattgtacgacatgttccttcaccaaaagctgatcttgaggctccattccaaatgttggtttccatgatggaacgtgatttttatctaggacggatactcactgggagagtaaggtccggagttgtccgtgttggtgacaaagtccatggtcttcgcagtacagatgatggagttcataaaattgaggatggaaaggttgtcaaactcatgaaaaagaaaggcacaaatatggtaacagtagaggctgcaggggctggtgatataatttcaatggcaggattggctgctccagcaattggacatactgtggcaaattcagagatattgagtgctctgcctacaattgagttggatcctcccacaatatctatgacgtttggcgtgaatgattcaccgttggctggccgggatggcactcatctaactggagcaaaaattggtaaccgcctgatggcagaggcagaaacgaatttggctattaatgttctccctggaccattatcagaatcttatgaagttcaaggaagaggagagcttcagttaggaatattaattgaaaatatgcggcgtgagggatttgagctttcagtttcacctccaaaagtgatgtataaaacagagcgtggtgaaaggttggagcctattgaagaagtgactgttgaggttggtgaagagcatgtgggattcgtcttggaaaccattactcacaggaagggtgaagtagttgacatgggcccggttcctggcacaactggaagaactcgaatcttcatgacctgtccatctaggggtttggtgggtgttaaaggaattttcagcagctttacacggggaactggatttatgcaccgtgcttttcaggcatatgctaaatacagaggtccactgggcagtgtcagaaaaggagttctgatatctgttggcaagggacttatcacttcacatgcccttatgagtttagaagctcgtgggatcctctttgtatcccctggaatggaggcatatgaagggatgatagttggtgagcactcacgtgacagtgatcttgaggtgaatcctgtgagaactaaagaacttacaaatatccgagcccctggaaaggatgaaaatgtccgtttgtctccaccccgattgatgagtttggaagaggcaattggatatgttgctgcagatgagcttattgaggttactcccaaggtcgtacgtcttcgaaagaagtacttggattccactaagcgtaagatgatgaaaaacaagcctatgaattagaactccagagacaacaaaattacatcaagcactgccagcactactatataagtttatcatgcaagactcttgcagcaagagtgttgctgtctcttgcagcaagagacagcatttatgtataggttggtgttcaatgttgcaacctgagctctttaccagcagcttcacccaggttttacgtgcacacaggattggctgacagaataagcccaccgtagcagctactggaggtaggatcctcgttggttatatctatttagacttttttatggtgaaatttcagacacccacaggttctttgaaggttgtattattctttggaagttcaagaaatgcaggccaatccccataggtattttgtttg

SEQ ID NO: 22791 - DNA, 1596 bp, Zea mays
  Clone ID: LIB3591-112-F2_FLI
cgcagacttctcttctcgccaaaccctaatcctgctcctgcctttctcgtctccaaccgttggccgagcagtagcggtggcgatggagggcaaggaagaaggtcggatcttcgtgggcggcctgtcgtggcaaacggacgagcgcaagcttgaggacgcctttggccgcttcggcaaggtcgtcgacgcccaggtacccgtgcccccagtccgtctacgttagtgctcatgcccgccccaggtagttttgctagatccatcgatttcgtgttgtccgcggtgcgatattgttgggtatgatggttggaagatcggtgggtgaggtggaaaggcggatctgtagattgtttttgcgttctgtcgaacagagatgtgtgttttgcgtaggaaggaggattgcgatttctgctcacttttatgtctttcgttgttcagcaagaggcgtaacttggtgagagaaaatatttttcttctctttagtttgcagtagcaaagttgaattctttggcatcactgagagcgaaattaaaatgatgaaacggtacttcttgttgcgatgaaccaagaaattagtatcctgtagacctgtacaaacatgcatccttggattccttgcttcttaaagagagtaaggacctaaatagtctagtgtcatttgtctattatggttcatgtttatttttctatgttgatagcttgctctcagaaattcatgaatactcactgttcttgtttttccatctttctttgcaactgggatctgttctctcggccattctttgtttgctgaggctgaatgagcggcagatttccagagttggaatgcaaagcgaataagcgatgcttgttgctttctagagctgaattgctgatgtggttcattacagttagatgcctgatttgagcactttgtctatgaaattggattgaacaaatggagaacagccattggtcctactgttgctggtgttctgctatttcttagttcagtttcatggtctgatgaaagagagggaatgttactgttgatttttttggctagaattggatgaacaacacctccttagtttctgatctgtgggaattctgctcggccagcacgagttgtgcacacctgcagagaactacaacagggactatgctcatgacactgattgatagatgaagctgtgtgactaattggcagatctgcacacgttactgctccagtgggttgaactgattttattggctgataagatgcaacagtaattatcaatttgttataagtgtttggttgtgttgactgccctgggcatgttttcagttgagttcattggcatccttgctgcagatagaatcatgactgcagttgacttcttttgtttttattgatatgacttgcctacatagctcctcgtcctgctacctttgtcagcatttagtgaactggcagcaattttttttcttttctcgccttttgtgttttgttagaactagatagagcttgcaatgatatatggctgcaactctttacgcaagggcttgtttcttaacagctccagcaaaatttgttttttgcacttttttctgtttaaaactcaagcaacttctttt

SEQ ID NO: 22792 - DNA, 1397 bp, Zea mays
  Clone ID: LIB3591-112-G2_FLI
cacaaagcaggcggcgacggcgcggatggagctcccggtggcggagcccggcacggagcgaggcgagggcccgctgatccagtgcccgtactgcgactcggaggcgatgcacaagctagcgcagatcctgctaccggggctcgccgccgtgtgcgtggacggcacgacgggggacccgttccacagcccgtcggtggtggccgtggacctgcgcagggagatggtggactacatcacgcagcggagcgagagcttcatcgcggacgcgctgatcgagtcggaggccaatcaggaggggcccgacgcggcggtccccgacgacccgttcgaggccgtgtccgtgttcatggacgacttcggcagcacgaagcgcaacatcatcggccacgtctccgggtggctgctgagcgacagccgcgacgacaagatcgacgacttggtgcaggagatggaggcgacccggttctggccgctggagcggcgggaggccgtcgccgagacgctgctcaagaacgtggacctcaggacccggttccactgccccgagaagtacgagagcgaggcgcgcctggcggaccacaagcagcagtgcagcttccgccccgtcgcctgcccgtacaagccgctccagtgcgagcagggctgcgagaagcggctgctcaggcgcgacatggacaggcactgcgtcaccgtctgccccatgaggcccatgaagtgccccttcggatgcgactcctccttccccgaccgtgacctcgagaagcactgcgcccagttccttcggccgcatttgatcaaggtgctcaaggcgattcataagaaggcgcgttcggaagatgagctcaaggacctcgctctgaagctggaaaaggttcgccttttgactcacaccttcgtgaatgaactaaacatacattgcttctgaatcgatccgagtttgcttcccagatattttgtgatgaaactgagttcgcaggccaatctggtctggtcactttgccagtcttttcatctggttacagaataaaccatagttcttctcttttgtcaaaaaatgggttccatttttgtttgatgacaaaacatactacaagtttactgcaactagatgcacgcacaggctgatctggtatcccttgccacgttttgaactgatgatggctgcgccactctctaccttcctgcagtacgatggagatggtaaactggctaaagctctggatgcaaggcctctcactaacgctgtcaaggacctcgaggccaagatgaaagctgaacactcgagtcgaagggctgttttacactgacagactttacagaatggataatgccattgtttagtatgaagggatgacgcagcttgtatacagagaagaatataagttttgttttcgttt

SEQ ID NO: 22793 - DNA, 945 bp, Zea mays
  Clone ID: LIB3591-112-G5_FLI
aacccctaccacaagtgcggtgaccaatgcaagagaaagggtggtggtgataggtagaccgtagacgaggaaggtaaatttttccgctcataactctcagtttcatcaaacggtcgtcggtcaattggtggcagcttgatggggggaaaagaaagaacattctctagttttttcgcgagcatcaagccaaagttaggtggatgtcaatttaagggtagacagacggtcatctggttaatccaaaacaaacacccccttatgcttactacaggctagtgaaagttcctctgccaaccgagtcagtcgttaactcatttgttatctttgagtaagagctgctgctatattgttagtggcgaaaaaaattgctattttgtctcttacagttttgttactatgtcatccgtgtgtctatgatttgtgagacatctgcttcaataatttgtgggtccgatggtaaatcgatgaagcccatagatagtaatggcacagaaagttgacagcttctatgccctttcattccggagatcatcttaaacgatgttcgtatgtgtctcaagaactgccaagctgcatctttctttcgccgtcttcttaaacgatgttcccctgatcgatctttcaagtcttgggctcttggccccatccacctcccaccccagaacgtgttgcagactgctgggtctctctctttgcagggaaaaagaaaaggggaagaaaaaagaggaaagaaagaaagaaaaggagaaaacctaggcgtatatagctgctgaataacggattgagaaaaagcatcgcggaacgcttgaccatctcggtggttggttgggatttcgaacgctaccatatctcacatgcttttcttcctttgattgatggacaggcaaggccggcaagacaggatctgtccggacggacgatcgacggcgggcgatgaagggaaag

SEQ ID NO: 22794 - DNA, 966 bp, Zea mays
  Clone ID: LIB3591-112-G6_FLI
ctcggatcagcgggatggagttgaggcgtggttcatcctgcgccggtgcactcccgcctccttcaacgtcgcctccaccgaccccaacaacgaggtctcgagcgccgttaccgcggacgcgctcgctaaggccgcgcccgcgctcttcgcttcgagggcgcccagaccatcgctcaagtacctggagctgcttctcccggcagaaatcgacttcgaccacattgacctaccgactgctgccgccgcagggcacatcgtcgcccaggtcaccggcaacaacgcggtgtccgtggtggaggaccaactcaggaggagcaaggattgtcaatgcttcctcacttgcgtcggagctgaagagaatgccaaatgagaagttgcgaaacgatttgagcaacattgacatctgggacgaggaccggatacaagcagtactcaacacattcttggaagacctgaggagcggtcggctggaagaggctgggtggcccgtgatgctaccagcctacagcctgtcgaaaatggtcatcaatctgtacaccaggatcatagcaaggaggtatccggagatgcgcatcaactgtgtgcgacctggatttgtcacgacggacatcagctggaatctgggggtcctgacgcctaaacaaggtgcgagagggccagtcatgctagctctcctcccagatgatggaccaacgggttggtacagagatgaaatgggcgataagatgggcagcctattatttttcaaaatggtcaagtattcatcactagtcgagggattttgtggtgtgcagttttcatttcctaatattcaattgtgcaagtcttggtcacaggagttagccaccaacacagaaagccatttactaccagaaatgctagaagcggccaatggttatatttgtcatgagcttcatcttatgcttacctctattggagtgacacatatgatcgattgtgttaaat

SEQ ID NO: 22795 - DNA, 721 bp, Zea mays
  Clone ID: LIB3591-113-D12_FLI
cctcgctcaaatattacacggcggggagaggcttagcggcaagagatcagcaggcaattcggtatgactggccgccgcagcagcttggtttatgggactgccattgccatatgtgtgtctattctcttgggatccctagcaatgactgcacaagcaggccgttcctctcatcagctgctgagcaaggcgaggtcgtcgtccacaacaagagcgctctatatagccagcaacacatcgagcggctaccacaccgaggtgcagtgcttcgatgaggccgcggacggcggcgacgagaggaggaagacggcggagctgctcacgctgatattctgcaccgcgaagtgctactgccacagcgacaacgccgacgacatctgctactgctgccagaagccgcccacgcaggtctgctacgagacgatcaaggactgccaggcccactgccccgtctgcaaccctaagtgcccggctgcttccggaacggcgggtggatcgcagcagctgcatgctgcagcgaagaacgccaccttatagattgttataagggttgcgattgtggtaataagatatgatacaaaatgttgtaattgttagaggatgggatggagccaagtaagactttgttaacgtgaatgatgcaatcccagctcattcctttttcaaaggttgcagtagtagttttgttctacctttattctttccaagtaaaacctttctatct

SEQ ID NO: 22796 - DNA, 1027 bp, Zea mays
  Clone ID: LIB3591-113-D4_FLI
cagatacagtacagttcacacactctcctgtctcctatccatccagccaccgaagctagccaagaccaagatgtctcagttgctgcacctgccggacctcgcggcgccgcggaccaggatgggctcggcgctggcggcgggggcccgcgtcaagcagggggaggcggggacggcgagggggcgggtgctcagggtcgccgaccccgtgcggcgggagtgcctggtgccggtcccgccgccgccggtcctcgccgcggggaggcgcggagacgacgacgacgtcgacgaggagaggcagcggtactacctcaacctgggctacgcgatccggacgctcagggaggagctccccgacgtgctctgcaaggaccacagcttcgacatctacagagaagacattgtcttcagagaccctctcaacacattcaagggcctgggaaactacaagaggctcttctgggcgctgcgcctcaccggccgggtcttcttcagggcgtcgtgggttgaagtggtcagcatatggcagcccgccgagaacagcatcctgcttcgctggaccgcccacggcgtccctcgggtgccctggggctggtgggacgccgcccacgcccgcttcgacggcgcgtccgtgtacaagctcgacaggaacggcaagatctacgagcacaaggtgcacaacgtcgctacgaacccgccggccaagtccaaggtcctgccggtccacgagctggtcaggtcactcggttgcccctccactgcccaacccacatgttctgacttctgaagctttcgtcgtcgcagtgatgtgccatcttatatcttattattcgagattaattagcatggataggatgctacgtcgagattaattatctggaagaaggattggcgtgggtttaacatgataccctccattttttttgtttttcagtgtgatttgatagcgcacaaagttacagagcactcctgcaggctgcagttgtatatatgtacagttatagaataagaacatcagttattgattgtt

SEQ ID NO: 22797 - DNA, 2259 bp, Zea mays
  Clone ID: LIB3591-113-F12_FLI
ctctccggcaaccagatcaagatcatctggtccggactcccggccccggacggcctcgactacgttgccatctactcgccgccgtcctcccgcgaccgcgacttcctcggctatctcttcctcaacggctccgcctcctggcgcggcggctccggggagctctccctcccgctcctcccgacgctccgcgcgccctaccagttccgtctctttcgctggcccgccaaggagtactcctaccaccacgtcgaccacgaccagaacccgctcccccacggcaagcaccgcgtcgccgtctccgccgacgtctccgtcggcgaccccgcccgccccgagcagctgcacctcgcgtttgcggatgaggtcgacgagatgcgggtcctgttcgtgtgcggcgaccgcggggagagggtcgtcaggtacgggctgcagaaggaggacgacaaggagtggaaggaggtgggcacggatgtgagcacgtacgagcagaggcacatgtgcgattggccggccaacagcagcgtcgcctggagggatccgggattcgtcttcgacggcctcatgaagggattggagcccggaaggaggtacttttacaaggttggtagtgacacaggaggatggagtgagatatacagcttcatttcacgtgacagtgaagccagtgagaccaatgcttttctatttggtgacatgggaacttatgtgccttataacacctacattcgcacacaatctgagagcttgtccactgtaaagtggatccttcgtgatattgaagcccttggagataaacccgcctttatttcacacattggggacatcagctatgctagaggttattcttgggtctgggatcatttcttcagccagatcgagcctattgctgccaatactccataccatgtctgtataggaaatcatgagtatgattggccatcacaaccctggaaaccatggtgggctacatatggaacggacggtggaggcgaatgtggaataccttatagtgtcaagttcagaatgccgggcaattctattctacctacaggtaatggtggcccagacaccaggaatctttattactccttcgactcaggcgtggtgcatttcgtctacatgtcgaccgaaacaaattttgttcagggaagtgaccagcacaacttcttgaaaacggaccttgagaaggtgaaccgaagtagaacaccgtttgttgtttttcagggccaccgccccatgtacacctcgagcgatgaaaccagggacgcggctttgaaacagcagatgctccagaatctggaaccgctgctggtgacatacaatgtgaccctcgcgctatggggacatgtccacaggtacgagaggttctgcccgatgaagaattcccaatgtgtcaacacttcatcaagcttccagtactctggcgctcctgtgcatcttgtgatcgggatgggcggccaagactggcaacctgtatggcaaccgaggcctgatcacccagacgtccctatctttcctcagcctgagcgttccatgtaccgcggtggcgagtttggatacgccagacttgtggcaacaagggagaagctaacactgacttatgtggggaaccatgatgggcaggtccatgatatggtggagatattttctggcctggtatcccccagtaacagtagtgttgctgaggcggtggatggaaccaaacttggcacaggagtcagcaccgtgcggaaaatttctccgctgtacttggaaatcggaggcagtgtgatgtttgcgctgctcctgggattttcctttgggatacttgtcaggagaaagaaagaagctgcacagtggactcaagtaaagaatgaggaatcgtagtagtgttgccaataccgtgagcctggtgcagtggtggtgatccaaacttgtgtgggtgtaattactggagtagaacctaacaaagtgaaggcatttctgacttcttggggggctccgcgtcctcttggtacaactagtgtattgatagtcttgggaaatgaaggttctgatcgcatatctgttgttgtaatagttcaatgtataagcatgtaataagtgatataatgttcacattgctttggttgacacaagtgtgtaacatgtgctaccacaagtgattctgggcgtcctttgtagttgaaccatatttgttttatgatcctgcttttctgtatcatctgcctgcttttgttagcagatgtacggaatcttctgtacttggagtttatacct

SEQ ID NO: 22798 - DNA, 1560 bp, Zea mays
  Clone ID: LIB3591-113-G12_FLI
cgccatggcaggaagcacaagctcgatgacgagccggccgacgacacagccgccgacgccgctgaggacagcggcaaccccaagaagaagggcgcgaacaccaaaaagcagcagccggtggcaaagtatggcgccgaggcgaagtcgaaggcggttcgcgagagggagacgggtgcggaggtggtccgcggggacttcgaccggccgtccaagttcctggtggtctgtctcaacgctatccgggatgcggtggcgcccgaggaaggcggtggcagcatccacggcgccggcgactggggcgtggagctctggcggtgctgctccgcccaggcgccgtccgacgtgctcgacgctagcggcgcgtgcgccacggtggcgcagaccgcgtggctcgtctccaccgcctgcgacatcgtcgctaggaaagagaggcatgggatggtcgtgtcttgccccttcctgctgtacctcgtctcgtcgcaggataaggccgcgcaggtgcgatcgatatgcaaacccctgaagcctcttgggattcattcagtgagcttgcatcctggcgcatccattgaacaccagatctctggactgaaaacttgtgagccggagtttcttattgctacccccgagaggcttcttgaacttgtttcgttaaaggcgattgacatatcaggtgtatcaatgttggtcattgatggactgaaatgtttcgtagaccacaatgttagtgacaaaatattttctattagagacgccatatcaaacaatcttcagattactatcttcaccgatccatctgataaaaatattgcaacaatggctaaaaatctactccgtggaagaattacaaagctttctatcaatgattctgtttcttcacgaagtgcatttatagcccagcatgtacacttctgtccatcggaggagctgaaaacaacaaaggttaaggaaattcttgagcagatattgcaagatcatcctaaaaagacatcaaaggtgcttctagtagctgcaagcgataaaaaagcacggctcatgtcactgtcgctgaagctggaaaattgcacagtgattgatgactcatgtggcaactcctttacaatatgcagcagtgtggggctgatgaatgtcattgtgaaagaccgggagaacatgtcagtgacagatgtagaggcattcgaaaccgtgctggtggtggatctgcctccttcagtcgacgaatacattgagatcctcactggggctgctcttcatgtgattggaggcgaagtgcatagcatattctgtaacactgatgcttctgttgcaaaacctctggctcagcttcttgcagactgcggtcaggtggtgcctgaattcctcaaaagcctgaagtcttcatagcagagacttgtgtacgcaatcagagtagtcagatcacaccgtggcgattcagatcatatcggagcagtgtgtgttctacatgttattctcatttatcagcacagcattggtattcaggcctcgtccttggtatgtactattatgtcgtgcattgtgaaatgtgaatgccttgaggcc

SEQ ID NO: 22799 - DNA, 1253 bp, Zea mays
  Clone ID: LIB3591-114-A12_FLI
ctgtgtcctgaccgtgatttgggcgtggcatcctaaggcggtcaagattcgagaggctggaagaaccaagcgtagggcctccgccaccacgtcgtcgtccgcgcgcgccgcccgccggcgcaaggaggcgccacagcctccgacgcctagggagatgggggccgattactacaaggtcctcggcgtcgaccgcggcgccggcgacgacgacctcaagaaggcctaccggaagctcgccatgcgatggcaccccgacaagaacactaccaacaagaaggaggcagaaaccaagttcaaggatatctctgttgcatatgaggtccttagcgatcccaagaaacgtgcaatctatgatcagctaggagaagaagggctcaaggggcagccgcccccaggagcaggaggttctggcgcattccccttcttccctggcggggctcattccaccgctccccattttaatcacaggagtgcggatgatatatttaaggagttctttggatcccctggcatgggtggcatgagagcggaaccaggattccagaggtcaatgtttggcaacgatatcttctcttcacgctttggcgctgagggttccaccagtatgcagcagccaccacgcaaggcagctgcaattgagaacccacttccagtcagccttgcagatctgtacaagggtgtcacgaaaaagatgaaaatctcaagagaggctatagatgccagcgggagaatctcaaacgcagaggatattctgacaatagaagtaaggcctggttggaagaagggaacaaagattacatttcccgacaaggggaatgaagctccaaacatgaaagctgctgatattgttttcatcctcgatgagaagccccatgatgttttcactcgggatgggaatgatcttgtggtgactgagaaaatctcgctggtggaagcgctgattggatatactgcacgtgtcactacgcttgatgggcggagcctatcattgcccatcaactcgataatccatccgagctacgaagaggtagttcctagagagggcatgccaatacccaaggacccctctaagaagggaaatctgcggattaagttcaacataatgttcccttctaggctgacgtctgatcagaaggctggtctcaaaaggatattgggttcttaggccgcctcaaatgacattttatagtgaaaggtattgtgaatatcgccagtaattggctaggtagattatttatttatttatgtaacat

SEQ ID NO: 22800 - DNA, 2150 bp, Zea mays
  Clone ID: LIB3591-114-C1_FLI
cgaagccattgcgccccgaagccgtcgcagatgctgttgcggaggcccgggaccgaaatttaactgcggttggtgaggtggcggcggaccgggtggcggcgggggcgggggcccagcgtggtagggcggcgccggcatcctgtttaggccaccgcagaagcctctaccactgcacgtccgaggccaccgacacatattctaccaaatctatgggagcgcgaggtagtcggcgtctcggcgatttggcgaggagctggaaggaaggaaggaaggggcgatgagaatttcacgacagcttgtgaatcctcgcctaggatgccgacgggcacggcgcccacggtggtcaccttctgcgcctcttcgaggtggtgctcatcggctccatagatctggcaccatgcttagccgaccatggcgaggccatcaaggaggacaccggccacgatccgtcagatgatggagcccacgagccattttcacgtaaacttcttgaagataagcctcggatcacagaagaaatggtccgtggatatatgagcaacactgagcttgagaccgctgtacatgcctttggaagtcgttgttccaatatctccagggtgtacagtatcaaatttacacactggcgaacacttctggttattcttgtagtgggtgattgaaatatcagacaagcccaagcaaagggaatctgaaccagcattcaagttcattggaaacgttcatggtgatgagcctgttgcaagagaggttcttatgcatcttgcaaattggctgtgtgataactatctgaaagattcactggcaactctcattgttgagaacatgcaccttcatatacttccgacaatgaaccctgatgggtttgctcttagatggcatggtaatgcaaacaatattgatctcaacagggattttcctgaccaaacagcctgaaactagagccattatgaattgggtaaagcaagaacacttcacgacttctgctagcttgcatgggggggctcttgttgccaactatccatgggatggaactagagacacaaggtctgttggcatctatcattttgcaaatttgcaccagcaacagaacatgtacatggcgaagacaaatcattaggtggcgacttttttctcaccacggtaacactgaatttcattatggcagcaacaaagttacaatattcaggtttcattaggtggtgttttttactaatatttgaagagtttgagttgggcgacaggggggtattgccagcaactggttaatgaactgttatggctgaagtgaaccattaatatagagtttgagttattctgtgttgtcacagacaaccgtatttacacacacagtatctcgcccgctcctccaagtctccctctctcaatataagcctatttctgaattctatttgtggtcgctttctttgatttgctgattgtcaccactggtttttagggctcaatatgactttgtttcacattgtaacatcctcaacaatgattttacttcttacaacaaacactactacggatgtcctgatgataagacattccagcacatggcatctgtgtatagtcggtctcactataacatgtctttgagcaaagaatttgaaggagggataacaaatggagcattctggtacccaatatatggtggtatgcaagactggaactatatacatggaggctgctttgagttaactctggagattagtgacacaaagtggccaaaagcagatgagcttcctatcatctgggaacacagtaggatgagtatgctcaatcttctagcaagcctaataaagattgcaagaacgggactgctaagcaagctaagatttcaatggcctattccttcatacacaggccattgagcgacgaggaacgccgtgtcacttgcaatgaccagagacgggaggtcttcgttgcccaggacatcgctaacaaggaaattgaccgcaccgttgcattcgacaaggtatcttcgaactcaagtcggcatcacagtagaccagaataatacgaaggttggtacagcgccgaaggtgtgagcaggaaagcttcggcgtagcagcaaaaagtgaaaccgacttaaagatgaaaaggctatttagacctcgacagattactatagaattattatc

SEQ ID NO: 22801 - DNA, 1552 bp, Zea mays
  Clone ID: LIB3591-114-C12_FLI
ctggtcgtcctcgcgccgccgcagcgacgccaccgccggtaatggcttccaccgttgtgctccggaacgcctgctcccgccgactcttctgctactccactctccgcgccgccgcaatattgggacccgccgcgccacctgatgcgcccgcggcggcgtcggcccagccgccaccgatggcaggaaccctctgggcgaggtccatggccactttcacgcgcacgaagccacatgtgaacgtcggcaccattgggcacgtcgatcacggcaaaaccacactcactgctgccattaccaaggttctggcagaggcagggaaggccaaagcagttgcttttgacgagatcgacaaggccccggaagagagagccagaggaatcaccattgcaacagctcatgtcgagtatgagactgctaaaaggcattatgctcatgttgattgtccaggtcacgcagattatgtcaagaacatgatcactggagctgctcaaatggatggtggtattcttgtcgtgtcagctcctgatggcccaatgccacaaacaaaggagcacattcttcttgcccgtcaggttggtgtaccttcccttgtgtgtttcttaaacaaagttgatgctgttgatgacccagagctactggaacttgtagagatggagcttcgggagctcctcagtttctacaagttccctggtgatgagattccgatcatccgtgggtctgcgttgtctgctttgcaagggaacaacgatgagataggaaagaatgccattttgaaactaatggatgcagttgatgagtacattcctgatcctgtaaggcagcttgataaggctttcttgatgccgatagaagatgtgttttctatccagggtcgtggaactgttgttactgggcgtgttgagcagggaacaattaaaactggcgaagatgttgagatcttgggtttgacacagagtggtcccttgaagactacagttactggtgttgagatgttcaaaaagatactggaccatggagaggctggtgacaacgttggtcttcttcttcgtggtctaaagcgtggtgatgtcgagcgtggccaggtggtgtgcaaacctggtagtctgaagacatacaaaaagtttgaggcagaaatatacgtcctgacaaaggatgaaggtggccggcacactgcctttgtcacaaattacacaccccaattctacttcaggactgctgatgtcactggaaaggttgagttgcttggtgagacgaagatggttttgcccggtgacaatgtaaccgcgaatttcgagttgatatcgcctgttcctcttgaaactgggcaaagatttgcgatgagggaaggagggaggacagttggtgccggggttgtctccaaagttattagctgatgagtttccactttcttgcccgtagcaatttagtaaagaaatgaatgctgacatgtttcttggaatgcatgggcaaaaaggcagagctggctggtctggccgccattcattctggacagtaccttgtgctttcttgttgaggtggctcatcataaagc

SEQ ID NO: 22802 - DNA, 1653 bp, Zea mays
  Clone ID: LIB3591-114-D6_FLI
caccctttctcggcggccggcctcttctcttcacggactcgcaggtcatcgagatgtcgtcggcggaggcgaaggccgcggcgaaggcggtcccggagtctgtgctgcgcaagcgcaagcgggaggagcagtgggcagcggacaagaaggagaaggccctcgcagacaggaaggaggcgcttgacagccgcaagatcatatttgctcgcgccaagcagtacgcccaggagtacgacgcccaggagaaggagcttgtgcagctcaagcgtgaggctcggttgaagggtgggttctatgtgagcccagaggccaagcttctgtttgtggtccgcatccgtggtatcaatgccatgcaccccaagacccgcaagatcttgcagctcctgcgtttgaggcagatcttcaatggtgtctttctcaaggttaacaaggcaactattaacatgctacggagggtggagccatatgttgcgtatgggtaagtttgtataaatttagctgccgtgagtgcatttttggagtgttgggatgcattttaacacaacactgctgtggctgccgcttcatcagttttgagaatgaaacactgaagtacggctgttgagaaggggctgtaatcagcagctgcacactcccttgtatcagttcccacctaagaatgtgatccttcccaagggatatctaagcacaaaaaatgccgcatcactcataagattatcaagaattcaggttgcttttgggttcaaagaatgcaacagttaatttaatttgtttagactgtttagctcctttattaactgtactataacctgcatattggtgtgatatttgcagtaacttttccagagttgcattaattaattcacattcacatgaatcagccctgtggcaccaaatccctgagttctgataattttcaaaccagaaattccacttgtttatcattatgatgtccagaagcatgaacatctacctttcatctctccagatacccgaacctgaagagtgttagggaattgatctacaaaagaggttatgggaagctgaacaagcagaggattccgcttagcaacaacaatgtcatcgaggaggtttttccatccacaactaccgtgctgaatctgattacatccacattccaatttccgccttatgtatattttgcttaccttctgttcattatagggccttgggaagcataatatcatctgcatcgaggaccttgttcacgagatcatgacggttggcccacacttcaaagaggccaacaacttcctctggccattcaagctgaaagcgccccttggtggcctcaagaagaagaggaaccactatgtggagggtggcgacgctggcaaccgtgagaactacatcaacgagctcatcaagaggatgaactaggctctcttgtatcctgtgagaatgcattcgatgtcggcatggatatgcaattttgttccatggctgtcatacgtcacgacttcaactaggaaatgggtcctgtttatgtttgcagttgcctctgtaggttttaatacatcaagacataaaccaacacgtgccccaagtgtcactcgctagggctaccaagattgttgcaaaaaagatagcactttttcccgtcactgattatatatttagttctagtttgac

SEQ ID NO: 22803 - DNA, 1111 bp, Zea mays
  Clone ID: LIB3591-114-D8_FLI
ccttccgtttccgttccattcgcctatcgtaccccctctccgtctctcgtcatcgtcggcccgtcgcagccacctccatcggcctccgatccctccacgagcctccggtcgaatccgaggagcaggatccgcggcggcgggcggcggtcgcccggcgatggcgcaccgtatggacaacgagtacgactacctcttcaagatcgtgctcatcggcgactccggcgtcggcaagtccaacatcctctcccgattcacccgcaacgagttctgcctcgagtccaagtccaccatcggcgtcgagttcgccacccgcaccctgcaggttgaagggaaaaccatcaaagcccaaatatgggatactgctgggcaagagaggtaccgtgcaatcacaagtgcgtactacagaggagctgtgggtgcacttctagtctacgacatcacgaagaagcagacattcgaaaacatacagaggtggcttcgtgagctccgcgaccacgccgactccaacattgtgatcatgatggttggtaacaagtccgacctgaaccacctgaggtcggttgcagaggaagacgggcaggcattggcagagaaggaaggcctatccttcctcgagacatccgccctcgaagcgctcaatgtcgagaaggcgttccagaccgtcctctctgatattcaccaaatcataagcaagaaggcacttgcagcccaagaggcagcaggcagtgggcctccaggtcaaggaaccaccatcaacatcgcagacccatctgccaacacgaagagagggtgctgctcttcataagtaggtgcaaacaaagacatgctgctgcttctgcgaaaagaaaaccccccggtggatcatacaacacttttgttatgtagttgaccccttttggcctgtaactctggtgggttgtaatcacaattcatactcctgcaaagaaattctcctctcgggtagatacgatgtgtagtttcgagattttggtagaggccaatgtttggctggcagacttcgggtggagtccagcctcgtgttttctttcaatgttcttctacctcggtagtcttctgctggaaaaaaaaacatgatcagatacgttcttgt

SEQ ID NO: 22804 - DNA, 421 bp, Zea mays
  Clone ID: LIB3591-114-E6_FLI
gcttccactagccacaggccaacgaaatcgcaaagcgaagctacggccaccgaccgacgttccaagaagcgaaacgaaacgaaaatgatgatgatgatgggagagagagcgcacgcgcctccgtggcagcgctcgccggcggccagcggcgtcacggacgcggacgacgcgtctccgtacgccctcctagcggcgctgcagcattacctgccgtcgaacgaggtggcggcgtacgacgaagacgacgaggaggcggccctggcggcggcgaccgccgccgtcgacgcgtacgcctgcgacgagttccgcatccgccaacgttgagggagcggcccccgccccggatgttggatgggtctccgacctcatcaactgagggaactcgtggaactaccagctcagaagttcaggggggaataac

SEQ ID NO: 22805 - DNA, 919 bp, Zea mays
  Clone ID: LIB3591-114-F3_FLI
aaggcccgcaactttgcgaccttccgcctcttcccgcgcgccggcgccgccgaccccaacgaccgcgtgttcgtacgcgtcgacaacaacgactacactgtccccgggttcgccgacgaggactccttcgacccatcccggtccgacccttccgccggcaatggaaacttcggctccgcatccggccccctcccggagcacgtccgccgcgagatcctcgagctcggcctccctgacgacggttacaactacctctcccacctccgcgagctccgtcccgccgccgccgcagcctcatccttcgtccccagctccaccggtcgcccggagcccctcccgctcgatgtcaaggcttatgatgcaagcagggtacgcattggtctcagcgagggtgaactggacgaggggaagacgatgtgtaaggtggctgccaagactgcgccagtgaggcgaattgagaaggctgtcgacccagatatcgccaggttgctcgatgagagcgatgtgtctcatgttgggtccgaggatgaggggctggaggaggattttgtcatcatagctaaccaagctgaggaggaggaggaggatgaggatggagacatggaagaaaagcaagagtggaatggtgtcttcagtgatgttgaagaggaggagttcgattttgaggaggatgagccaaagccaagagtgagacgattgctggatgaacaatttgatttggaatctccagagcgcggttccctagggttttccctggagaaacaactacaacaaatggcatcatcaagcttcatgggaaagagaaactgccagtagaatacctgccacagaggagaagaaatggtgaaaaggagaagaaagtaaagcctgtagaagcttctgtcactgataaatttaaaaaaggagctgagaaggaaac

SEQ ID NO: 22806 - DNA, 1198 bp, Zea mays
  Clone ID: LIB3591-115-B7_FLI
cccccacggaagaagccgctggtggtggtggcgacgactatgaccgcttgagcgagctgaaggcgttcgacgacagcaaggccggcgtcaagggcctcgtggacgctggcgtcacgaccatccctgccatcttccgcggccatctccttcaggaagggccgaagtcgcacgggaggaggtggtcgcccagttgaaggctgcagccgagacggtggggttcttccagctggtgaaccacggcgttcccagcgagctcctgtgcgagatgctgccgtcggtgaggcggttcaacgaggagccccacgaggtgaagcggccctactacacgcgggacgcacgtcgcaaggtgcggttcaactccaacttcgatctgttccagtcgccggcggccaactggcgcgacacgctcttctgcgaggcagcgccggagccgccgcgggcggaggagctgccggtcgccgtcaggcacgtgatgctggagtacggcggcgcggtgcgggaggtggcggcgcgcgtgctggggctgctctcggaggccctggggctgagccccgggcacctcgcagggatggggtgcgcggagggcctcagcctggtgtgcaactactacccgccgtgcccggaaccggacctcaccctgggctgcagcaggcactcggaccccagcttcctgaccgtgctgctgcaggactcgcatgcgcagggcggcctgcaggcgctcctcgcatccaggtggctggacgtgcctccggtggccggcgcgctcctggtgaacgtcggagaccttctccagctggtcagcaacgggcggttcaagagcgtggagcaccgggtggtggctaaccggagcagggacacggcgagagtgtcagtggcgtgcttctgcaacgcggacatcgcgagatccacgaggctgtatggacccatcgcggagctcatcgccgcggacgacagcgacggcgcgggaagggcgctgtacaggaacgtgacggtcccggagttcctagcgcactacgacaagaaaggcctcgacggtcgcccggcgctccaccgcttccagctgcttcaataattttacatcacatcagtcctgactctggtgatatcatgtcagtatgtcactgtgggctactccggtactctaatacagttatggatggatcagatcaatactaatctctggtaattttttttaagg

SEQ ID NO: 22807 - DNA, 1019 bp, Zea mays
  Clone ID: LIB3591-115-C9_FLI
aacccaccgagaggcgagaccggcggcggcaaaaggacgatacaaaagcagccagggttgctggcaacagcgtcggtcgcccgcccgctcgccatggggaggtcgccgtgctgcgagaaggcgcacaccaacaagggcgcgtggaccaaggaggaggacgagcgcctggtcgcgcacatcagggcgcacggcgaggggtgctggcgctcgctgcccaaggcccggcctcctgcgctgcggcaagagctgccgcctccgctggatcaactacctccgccccgacctcaagcgcggcaacttcacggaggaggaggacgagctcatcgtcaagctgcacagcgtcctcggcaacaagtggtccctgatcgccggaaggctgcccggcaggacggacaacgagatcaagaactactggaacacgcacatccggaggaagctgctgagcagggggatcgacccggtgacgcaccgcccggtcacggagcaccacgcgtccaacatcaccatatcgttcgagacggaggtggccgccgctgcccgtgatgataagaagggcgccgtcttccggctggaggaggaggaggagcgcaacaaggcgacgatggtcgtcggccgcgaccggcagagccagagccagagccacagccaccccgccggcgagtggggccaggggaagaggccgctcaagtgccccgacctcaacctggacctctgcatcagcccgccgtgccaggaggaggaggagatggaggaggctgcgatgagagtgagaccggcggtgaagcgggaggccgggctctgcttcggctgcagcctggggctccccaggaccgcggactgcaagtgcagcagcagcagcttcctcgggctcaggaccgccatgctcgacttcagaagcctcgagatgaaatgagcgcgcttctaccctctctgtgtagcttctcccccccgtcgtcctcgtttttgttttgccacacctcacatggatgatgaattgatgatacgtggttggttagttt

SEQ ID NO: 22808 - DNA, 576 bp, Zea mays
  Clone ID: LIB3591-115-D9_FLI
cctttctatataaagtcttacatctctcgtcttcccattgacccgccgcctctacgcctttcagtatccggaagaccggaagcttcttcctcctcgcctctgacatggccggcggcaacctattcggtcgagcgctgagctacgttgtcaacgagttcttcgtccagggcctcgccaacaaccgtgcagtccagaggtttgctgtgaagaccaacaagactcttgagagcctatcgtctaaagccaaggaaatgagggaggagttatcggaacaattcaaggatgctcgtggccagaaagatcacttcaagcagtgaagccgatccccaaagttgattcaacgacacgaatctagctatgagttttttctagttctcgtccgggtcctatttatgaatggcatttgaagggatttcttggtgtcgttcaatggacggatccgttgtataaagtttatctgcacttagattagtagatatattggtagacacatcactttctgctgcccctttttcataaatacatatatctcgatctctactgtattagcaaaactacctcagtttctaccgtttt

SEQ ID NO: 22809 - DNA, 1887 bp, Zea mays
  Clone ID: LIB3591-115-F3_FLI
ttccgaacgggtcgcgcccgagcccgatatgcccgcgaagcccaggcccagccagacccaaagcgatgcgacggagatcgtgagatcgcgcgccgcagcctcctcccccgcccccgccgccggcgatgacctccgcagtcctcgccggccggaatgaggtccaccaggcgcatcagcaccaccgccaatgggctggcgcccgcgtcccgctcatgcccaagccgtcctccaaccctaaccctaggcgccaccgcgcgggcccaaaccctatccccagtggctcgccgccggagccgcgggccgctccggccgtcgcggccgagccctcgccgtcgccttcggggcacctgaacttcaggccgtcggaaatgacccccgccgaggcccggcacctccgcgcgcggctcaccagcgagctctgccgcgtccgcgctttcctctcccgcatcgactcgtggcaggacgggcagcgccggcgccggggccccgagccccccgcgcgcggcccgtccccgccgccggcgctggtggaggcgatgcggaagcggtgcgcggacatcctgatgcggctgcggaggtcgaagaagagcgtgtggttcaactccccggtcgacgtggagggcctcaagctgcacgactaccgcgccatcatccggagccccatggatctcggcaccgtcaagcagaacctcaccgccggccggtacccctcgcacgaggcgttcgctggcgacgtccggctcaccttcaacaacgcgctgcggtacaacccgcccgaccaccacgtgcacaggtacgccggcaacctcctcgcctcgttcgaggggatgtacaaggaggccgtctcgtggttcgagcagcagcgccagcagctcgagccaccaatgcagcccgatttgccgccgccgccacagctcccggtcgtctctgtgccagtgcaagcgcccccgaggatgggtgggggcgggaggaggcccaagcccaaggcccgggagccaaacaagagggagatggacgaggaggagaagcagaagctgagggtagagatcgagaacttacccgaggagaagatgctgaatgtgctgcagattgtgcagaagaggaacagcgatccagcgttcactggggaggttgtcgagctcgatttcgacgagctggatatggagaccctctgggagctcgatcggttcgtggtcaattggaggaaggctctgaagaagagccagcggaactctatggtgaatggcgatgctgccgcggcggtgaatggagacgccatcgatgtgacagttgttccggacgacgacgacatggtcgaggttgctgtcaatccgtccgtggcggtcgagatcggagagtcggctgacgttccagagaaagaaatggaggccgagatggtcgacgattacgtggatataggcgacgagatgccgacagtgaattaccagtcagtggagatcgagagggattccccggcggctgccagcagctcaagcggatcaggaagtggctcgtcttcatccagcgattccgactcggactccgattctgacggggacgatgccagcgccccgcactaggtgtggctgttgttgctgttttatctgactgtactgtaggattagcgatgagtaggtgactgaaaaggttccatttgatgaggcgttttgaagaacggtatagagaagcctgtagggaactcttgttcatgcaatgcaagtggttgtgttcgtctgtgtatgtgtgggtgcagcatttaggttgtcggtacttgggtgatgggtaggtggtagatgcttgggtagattgggaggcttctgtaaagaggggaatataagctggaacaaagaggaaaagtagcaatgccggccggggcatttcttcatg

SEQ ID NO: 22810 - DNA, 1509 bp, Zea mays
  Clone ID: LIB3591-115-G10_FLI
ggctagagaagatcgagtgagaagttgcgcgtgtgaagccatcacaccaattaaagatcgagatcatccatggctagttctctacttcagcagctgctgtctctgctgctgctcctgctgccctctcctcttcgtctccgggagcatctatcaggaaaccatgctgtcagcgccaacaacttccaccccatctttctggtagctggggtgagctgcagcgacctggaggcacgcctcaccgaggagtaccggccgtcggtgccgcactgcggcgccatgaaggggaaggggtggttcggtctgtggaagaacagttcggagctgctgtctcgtgactacgtgcagtgcttcgaggagcagatgagcctcgtctacgaccctgccatcaacgagtaccggaacctcgccggcgtcgagacgcgagtgcccaacttcggctccacaagagccttcagccacaagaaccccctcaagtcagactggtgcctcggaaagctgagagccgcactggaagacatgggataccgagacggagacaccatgttcggagccccctacgacttccgctacgcgccgccgtcccccggccagacgtccgaggtgtactcccgctacttcaaggagctgatggagctggtcgaggccgcgagcgagaggacccggaagaaggccgtcatcctcggccacagcttcggcggcatggtcgcgctcgagttcgtccggaacactccgccggcgtggcggcgcgagcacatcgagcgcctcgtcctggtcgcgccgacgctccccggcgggttcctggagccggtgcgcaacttcgcgtccgggacggacatcctctacgtgccagcgacgacgccgctggccacgcgagccatgtggaggagcttcgagagcgccatcgtgaacttcccgtcgccggccgtgttcgggcgcctgcaggcgccgctcgtggtcaccagggagcggaactactccgcgtccgcgcacgacatggagcgcttcctcgccgccgtcggctccggcgaggccgcggagcccttcaggagacgggccgtccccaagatgggcagcttcgcggcgccgatggtgcccatgacgtacatcagcggggtcggcaacaggacgccgctgcggctggtgttctggggcgaagacttcgacgcggccccggaggtggcggcgtacggggacggagatggcaagatcaatttgatcagcgtcttggcgtttgagaaggagatgcgtcggcagccggagcagaagaagcagttcaaatccatcaagatcaataaggcccagcattctacgatcgtcacggatgattttgccctgcacagggtcattcaagaaattgttgaggccaataatcagaagattccatcctaaattattcatgtcatgtatgcattaccgagctgtgggggccaatagtgggttgggaagtgatggtttagacatcggtcgtggtgtggtcgcaattcaatcgattagttatttgttaacgtc

SEQ ID NO: 22811 - DNA, 1655 bp, Zea mays
  Clone ID: LIB3591-116-A11_FLI
cggaacgcacacaccgcccgtccccgatctccgatcccctcgtcgatccaaagatgcagatcttcgtcaagaccctcactggaaagactatcaccctcgaggtggagtcttctgacaccattgacaacgtcaaggccaagatccaggacaaggagggcatccccccggaccagcagcggctcatctttgctggcaagcagctcgaggacgggcgcacacttgccgactacaacatccagaaggagagcaccctccaccttgttctccgcctcaggggaggcatgcagatcttcgtcaagaccctcactggaaagactatcaccctcgaggtggagtcttctgacaccatcgacaacgtcaaggccaagatccaggacaaggagggcatccctccagaccagcagcggctcatttttgccggcaagcagctcgaggacgggcgcacgctggccgactacaacattcagaaggagagcaccctccacttggtgctgcgtctcaggggcggcatgcagatcttcgtgaagactctgaccggcaagactatcacccttgaggtcgagtcttctgataccattgataatgtcaaggccaagatccaggacaaggagggcatccctccggaccagcagcggctcatttttgccggcaagcagctcgaggacgggcgcacgctggccgattacaacattcagaaggagagcaccctccacttggtgctgcgtctcaggggtggcatgcagatcttcgtgaagacacttactggcaagacgatcacccttgaggtggagtcctcagacaccattgacaacgtcaaggccaagatccaggacaaggagggcattccaccggaccagcagcggctgatcttcgccggcaagcagctggaggatggtcgcaccttggctgactacaacatccagaaggagagcaccctccacctggtgctccgcctcaggggtggtatgcagatttttgtgaagacattgactggcaagaccatcaccttggaggtggagtcgtctgacacaatcgataatgtcaaagccaagatccaggacaaggagggcattccaccggaccagcagcgcctgatctttgctggcaagcagctggaggatggccgtaccctcgccgactacaacatccagaaggagagcaccctccacctggtgctccgcttgcgaggtggtatgcagatctttgtgaagaccttgactggcaagaccataaccctggaggttgagagctccgacaccatcgacaacgtgaaggcaaagatccaggacaaagagggcatccccccagaccagcagcgtctgatcttcgctggcaagcagctggaggatggtcgcaccctagcagactacaacatccagaaggagagcactctccacctggtgctccgcctccgtggtggtcagtaagccatggttcatttaagctgctgctgtacctgggtatctgcgtcgtcgtcgtctaataaacatctgtggtttgtgtgtcatgaatcgtggttgtggcttcgttggtttaatggacctgttgtgtcctctgtgttgtacccaaaactcttctgcagcagtatggcttgaatccttgtgaagtttgatgtttgaacttaaaagtctgctcattatgttttttttctggtt

SEQ ID NO: 22812 - DNA, 1528 bp, Zea mays
  Clone ID: LIB3591-116-C11_FLI
gaataacctgtgaagctgctgccatccactcatctttctgccttgattgcagtcattcctcccccaagtccatagagtgatagagaatggaggataatctaccagttaatgtccgggaatatcaagaacttgctaagaaagcactaccaaagatgcactatgattatatcaacggaggagcagaagatgaatatacactgagggagaatattgcagcatatggaagaattctgttacggccacgagtccttatagatgtgagcaagatagacatgtcaacaagcttattaggatataatatgccatcgccaataattgtcgcacctacaggggcacacaaattagccaatcccgaaggggaggtggccacagcaagagctgccgcagcatgtaacaccataatgatgctttccttctcatcaagctgcaggatcgaggaggttgcctccagttgcgacgctattcgcttttatcagttatatgtatgatgccttgccattgattttttttagtaaattccactttctggtgttacctgatttctggaagttttcatcgtgtaccttaggtgtacaagagaagggatgtttcggcaacattggtacggcgggctgaaagtttaggattcagggcaattgttttgacagttgacacgcctgtgcttggcaggcgtgaagctgatatcagaaataagtacagcgcttgtatcgttaatgaaatctcctaaaattgagggaaattatgttcatttacaaaattcataattccagtttcctaacccgttgctactgaaggttaaaattttaagctactatcttataccatattgtagatcgttgatacatttatgcggagcattgcagtagcttcaacatcagaatgttgcaaaaaaacaatcccattttcttttatcttgagatgttctgtaactgagctgattgttcatgcaggatgattgctccacctctgtcaaaccttgaaggtttaatgtcattagacgactttgacgatgctgaaggcggctccaagctggaacgattctcacgggagacgctggatccatcattgtcatggtgggcaggccggtgttctttgggctggcggcgcgcggggaagccggcgcgaggcacgtgatcgagatgttgaacaaggagctggactatgcgccggccaccatctcggcgctcgaagaggtggttaaggcggtggcgggggctgtgccggtgctggtggacggcggcgtccggcgcggcaccgacgtgttgaaggcgctggcgctcggcgccaaggcagtcatggtgtccagaccgagggcgaccggatcagggccctgctgtgacttataaataagcgaccatatccgaggccgaccaccgtgctgtctgggttgcgatatgatttatatgatacgtgagggcatgtgatcgattgttgcctccacacagataagcttactattgccagagcctgggctggactatgctttcagtgattatctaaatcaaatagactgaatgctaaagggaac

SEQ ID NO: 22813 - DNA, 593 bp, Zea mays
  Clone ID: LIB3591-116-G12_FLI
ggcttactgcgcaagaagaagggtaacaagaggacggcggcgatggcgaagaggctgctcccatctctgaaccgggtgctggttgagaagctggtgcagcccaagaagaccgccggcggcatcctcctcccggaaacatccaagcagctgaatgctgctaaagtggtggctgttggccctggtgagcgcgacaaggcaggcaatctgatcccagttgctctgaaggaaggtgacactgttctcctgccagagtatggtggaactgaagttaagcttgcagctgataaagagtacctcctcttcagagagcacgacattttgggcacacttgtggactgattcagagcatcagcaagcctgtcactagtcgttggttctagacttctagtgtgagatgcgtagtatcagattctgggatcaaaatccctaagaactctgaactgtcgtgatgtcatagattttgtgatgaaacatcataattgcctgcttcttgttgcaagcgaacttttgcgtttaaaatggttccctaatattgtgttcgccactctgtccctggttgcaatgctctctagtttacgttggctgttgattgg

SEQ ID NO: 22814 - DNA, 507 bp, Zea mays
  Clone ID: LIB3591-117-D2_FLI
cgagatcgttgccgacgccgtcgacatcgagcgtgagttcgtttgcgacgcgctccccgtcgcgctggtcggaatgaacggcgggctcatgagccagtacatcgagttcgtcgccgaccgcctgctcatggcgctggggcacaggaagatgtacaacgtcgccaaccccttcgactggatggagctcatttccctgcagggcaagactaacttctttgagaagcgcgtcggggagtaccagaaggcgtccgtaatgtccagcctcaacggcggcgctgctgcaaaccataccttcagcatcgacgaggacttctgagttgacagttgtgatcgcgtgcttaatttattgctccgataatctcataagtcataactcataaccttattgtgctttttcttgcttgctagttgtagtagaggtaattactgatctggatggagcaaggcagtggtttggcagccaccatatgatatatatataggtggatggatggtcttccattcgct

SEQ ID NO: 22815 - DNA, 1009 bp, Zea mays
  Clone ID: LIB3591-117-E3_FLI
gattttagccgccgccgctgctcatctcacatccctcgagaagacgcctgctcctcgccgatcgatacgatggccgtcttctccgacctccacaccgccgacggcctcaagtccctcgaggctcacctcgccggcaaaacctatgtgtctggtgactccattactaaggatgacattaaggtcttcgccgcggtgccgtcgaagcctggcgctgagtttcctaatgccgcccgctggtacgagaccgtctctgcggctgtagcctcaagattccctggtaaggctgttggtgtaaatctgcctgcgggatcagctcctgcggcagctgctcctgcggatgaggctgaggatgatgatgaccttgatctttttggtgatgaaactgaggaggacaagaaggcagctgatgagcgtgctgccgctgccaaggcctcttctaaaaagaaagaaagtggtaaatcctccgtccttatggatgtaaaaccatgggacgatgagactgatatgaagaagctggaggaggctgtccgcagtgtccagatggagggtctgacttggggagcatcaaagcttgtgcctgttggatacggcatcaagaagatgactatcatgttgacaattgtcgacgatcttgtgtccatcgacactctaattgaggaccaccttacgcaagagcccatcaatgagtacgtccagagttgcgacattgtggctttcaacaagatctagagttcagtttctgagtttgggcaacggcagcggctcagctcgtcaagtttgtgctgggatgccagtttatcccttctagtctattacagaaacgttgttcggagctgagtctattataaacatcttggtctgagtttattgttgagtggtgccagtttttttcaatatacatttatcttaaaaacagcggtactgatgtttttttgtctaaagttaatgagtttgcaatggttctgagtctaaagttcgagtcttcaaatctataccagagtgttaaatg

SEQ ID NO: 22816 - DNA, 1602 bp, Zea mays
  Clone ID: LIB3591-117-F5_FLI
cttatcctcttccacccgtcccttcctacctccgccacgcctcctcctccgcctcccgctcctgccgcgcgtcgccgcgttttgtcgcagtccgcgccatggcttcggggaacccctacgccgccgagctcgccgccgccaagaaggccgtcaccctcgccgccaaactctgccagacagttcaacaggatattatgcattctggcgttcaggctaaggcagacaaaagtcctgtcacagtggctgattatggatctcaaatattggtcggtttttccttaaagatggatgtatcatctggaccattttcattggtggctgaagaggactcagatgaattgagaaaagatggcgctgaagaaattttggaagatattactgaccttgtcaatgaaaccatctttgatgatggttcatataacatttcgtttacaaaggaaggtatactctctgcaattgatgatgggaagtctgagggaggtccatctggacgacattgggtgcttgatccgattgacggtactaaaggtttcttgaggggcgaccaatatgccattgcattggctctgcttgatgaaggtaaagttgttttgggtgtattggcttgtccaaatcttccattgtcatcaataaacaacatcaatggtaactcttcgggagataaagttggtgccctgttttctgctacaattggttgtggggctcaagtagagtccttagatggctctccaccacaaaaggttatagcttttattttgatcaataatcttaagttcttaacctaccttctctcgtactaaaacattttagtttctcttgatcattatttggttataatcttcaatttatgaattttttactgactcttggtgaactttaatttagattagtgtttgctccatcgacaatcctgtcaatgcatcattttttgaatcctatgaaagtgcacactccatgcatgatttgactggctctattgcagagaaacttggtgtccaagctcctccagttagaatcgacagccaagcaaaatatggtgctctggcccgaggtgatggcgccatttacttgcgctttccacacaaaggttatagagagaaaatatgggaccatgcagcaggatcaattgtcgtgacagaagctggaggcatagtaacagatgctgcgggaaacgacttggatttctccaaagggagatttctggatctcgacacaggcatcatcgcaaccaacaaggagttgatgccgtcgctcctgaaagctgtccaagaggctattaaagagacgaaccaggctgcctccctcttatagctgttgtagtggtcgacaaaaaagtagttgcaaaattttcgtactggcaaacaggtgtgcatcatttctccgtggtattacagagtctagcaaatttatagcatcaacctgattggtgatcagacgtccattcgttttactgaatcaccttcttggtgcagcattgctagaagtggacaacatgaataatttgagtgagtccatagttgcctgaactcagctttggcatttgaactggttatagaaattgtgaaataattaatggatatttggaagacaaacttgaacttc

SEQ ID NO: 22817 - DNA, 772 bp, Zea mays
  Clone ID: LIB3591-117-G10_FLI
gaagacgatgggcaaggacgacgtgatcgagagcggcgctggcggcggcgagttcgctgccaaggactacacggaccctcccccggcgccgctgatcgacgcggcggagctggggtcctggtcgctgtaccgcgccgtgatcgccgagttcatcgccaactcgctcgcctccggctactcccgcggcaccggcctcggcgccgagatcatcggcaccttcgtgctcgtctacaccgtcttctccgccaccgaccccaagcgcaacgcccgcgactcccacgtcccggttctggctcccctccccatcggcttcgccgtgttcatggtgcacctggccaccatccccgtcaccggcaccggcatcaacccggccaggagcctgggcgccgccgtcatctacaacaaggacaagccctgggacgaccactggatcttctgggtgggccctctcgtgggcgctgccatcgcggccttctaccaccagtacatcctccgggctggcgccatcaaggccctcggctccttcaggagcaacgcgtgatgagcggggcttggctgtggagcaatggcgggcgacctacgggcggggggccgtgagcgaggagaatgccatcattcatcgatcgacttgggtgccggtggttggttcgggtcgccttttttttgtttcagcagctgctgcgttgcgcgcgtgcgtgagatttggtttggtttcgttcccctgcaatgtaatcatgtcgtgactctcaagggattattccgctctgctctt

SEQ ID NO: 22818 - DNA, 2253 bp, Zea mays
  Clone ID: LIB3591-117-H4_FLI
cgaagagaggcatgcgctcgggaggtggttggctgcttcatcatagtccgtagccgcctgcgaggcccttcatatcttagaagaggaggaggaggagaagaagagcagggagaggagccaggcgcgcctctgcagcgatggaagtggcggacgaggtggtgcgggtgctcggcgccgggttcgacctcacgtccgacttccgcctgcggttcgccaaggccagcgaggggcggcgcctggtggagctcggcgaggacacaagggacgtgccgctccccggcggcggcggggccacgctccgcggggtgccgcgcgacgtcggcgtcgacaagggcgaccgcatccgcttccgctccgacgtcctcgagttcaatcagatgtcagaattgcttaatcagaaatcttcagtccaagggaaagttccttcaggctattttaacgctctctttgaattaagtggagcttggttgactgatgccaaagacaccaagcatctagcattcgacggatatttcatttctttgtacaacatgcacctaaaggcttctccattagttcttcgagatgaagtaaaaaaggctgttccatccaagtgggatcctgttgcattatcatggtttatcaagacttatgggacacacatcattgttgaaatgggaattggaggtcaggatgtcatatgtgttaaacaaagtcattcttcaacagtttcaactgctgatcttaagttgcacctggaggatcttggcgatttcttattttctgatgggaagaaccactccccaatacatcgtaagacaaaggatggcaagagcacggtgcctgatgtttttgtcaggatagtgcagcattctaataacctgcacctttctagctactctgaaacatcaaccaaggatggactgacagttacctgttctaagaggggaggagaagcatacctacccaaccactccaaatggctgcaaacagtgccaaagaaacctgatgccattatgtttaaatttgtccccatcacctctcttctaactggtattcctggcagtggttacctcagccatgccatcaatttatatcttcgctataaacctgatcttcaagacttgcaatatttcttggagtttcaagttcctctacaatgggcacctatgttcaatgagcttgtccttggacctcaaaagagaaaaggctcgtacccttcaatgcagttcagatttctcggccccaaactccacgtcagcacttctcaggtatccagctctcagaaaccggttgttggcctacggctatacctggagggcaggaagtgcaaccggttggccatccatgtccagcacctctccagtgttccaagcatgatcgcagactccatggcgtcttcaatgtcagaatggcgcgagtcccaggacagcgacccagggtacatcgaggcaatccagtggaagaactactcgtgcgtctgcacctccgccgtcaagtacaacccggagtggcacaagagagcccccggcggagtgttcatcgtcactggcgcccagctcgtctcgaagggggcctgggccaagaaggtcctccatctgcgccttctctacacccacatccccaactgcaccgtccagaggaccgagtggaggaacgctccggcggcgtctcagaaggggagcttcctgacgacgatcagcacgacactgagctcccctttcacgcagcgtgctgacacccaccaggcgaaacatgagccggcggtgcagctgaactcaggtgtctaccccgacggaccgccggtcccgctccggtccaggaagctcctcaagttcgtcgacatctcggaggtggtaaaagggccacacgacgtcccgggccactggctggtgatcgccgcgaagcttgtgaaggagggagggaagatcgggatccatgtgaagtttgcactgctgggctatgaagggcagtcgcagggtaacagtttcatgagctgaagcctttgtacataacaacggctggttctgatctttgtagatttcaggattttggaagaagcacaggattaggatttttaatactgggattttttttttttttgtggggagtcgacaggaactgtgtggagggcagtcggaaaatagaccaatcaccgctttgttaggaatgcctgtggaattcccgtggcagtataattagagcacgtagttgtaaattgctcctttgttgtacaaggtgtgttttatttcagtaggaaacacctcagttaag

SEQ ID NO: 22819 - DNA, 1519 bp, Zea mays
  Clone ID: LIB3591-118-C9_FLI
ctgcattttatccttcctggtgctctgtccacctctctcgctctgggccgccgccgccgccctaagccacgtgctgaggctttcgttggtctcttcgccggcgacgagcacccagttctgtagaaatggctgatggtgaggacatccagcctcttgtctgcgacaatggcactggaatggtcaaggctggttttgctggcgatgatgcaccaagggcggttttccctagcattgttggccgtcctcgccacactggtgtcatggtagggatgggacagaaggacgcatatgttggcgatgaggcacagtccaagagaggtattcttacgctcaagtacccgattgagcacggtattgtgagcaactgggatgacatggagaaaatctggcatcatactttctacaacgagcttcgtgttgccccagaggagcaccctgtgttgctcaccgaggctcctttgaacccaaaggccaacagggagaagatgacccaaattatgtttgagactttcaatgttcctgccatgtatgttgcaatccaagcggtgctctcactctatgctagtgggcgtactactggtattgtactcgactctggtgatggtgtgagccacactgtgcccatttacgaaggatatgcccttcctcatgccattcttcgtttggatcttgctggtcgggacctcacagactccctcatgaaaattctcactgagaggggttactccttcacaacctcagccgagcgagaaattgtaagggacatcaaggagaagctagcatatatagcccttgactatgagcaagagttggaaactgccaagaacagctcttcagttgaaaagagctatgagctacctgatggacaagtaatcaccattggtgcagagagattcaggtgccctgaggtcctcttccagccgtcgatgattggtatggaggctgctggaatccatgagacaacatacaattcaatcatgaagtgtgacgtggatatcaggaaggacctctatggtaacattgtgctcagtggtggttcgactatgttcccgggtatcgctgatcgtatgagcaaggagatcacttcccttgcaccaagcagcatgaagatcaaggtcgttgcaccgcctgagaggaagtacagtgtctggataggagggtcgatcctagcctcgctcagcactttccaacagatgtggatatcgaaggaggagtacgacgagtctggcccggcaattgttcaccggaagtgcttctagggtttcacaagttcctcgtcgttacctagtctcaaattatgtcccctccatttctcgagatatgtgtggcagatttgcatgatacgtttgtttgtttccatcggacctgaagtcttcttggggataggctcccccctttgtatgttgtggctccaatccatgtgcgagcacgctgtgtctgtcgtgacacctggttcgtgagatgggttgtcaaacttgattggtttgttgtgcgtggctggaagagctgatagttatat

SEQ ID NO: 22820 - DNA, 827 bp, Zea mays
  Clone ID: LIB3591-118-F3_FLI
ccgccggaccagcagcgtcttatctttgccggcaagcagctggaggatggacgcacccttgcggattacaacattcagaaggagagcaccctccacctggtgctgcgcctcaggggaggaatgcagatcttcgtgaagacattgacaggcaagaccatcaccttggaggttgagagctccgacaccattgataatgtgaaggccaaaatccaggacaaggagggtatccccccggaccagcagcggctgatcttcgccggcaagcagctggaggatggtcgcaccttggctgactacaacatccagaaggagagcaccctccatctggtgctccgcctgaggggtggtatgcagatctttgtgaagaccttgactggcaagaccataaccctggaggttgagagctctgacaccatcgacaacgtgaaggctaagatccaggacaaggaggggattcccccagaccagcagcgtctgatcttcgccggcaagcagctggaggatggtcgcacccttgcagactacaatatccagaaggagagcaccctccacctggtgctccgtcttcgcggtggttattaagccatcagtcgttgaagctgctgctgtatctgggttatccagtgtctctgccattgcccatggatggtactgtctttcaaagtatttgtatggtttgtgtcgtgagtcgtgactgagctggtttcatggaccagttgtgttctcgttacccaaaactatcgtgcggcagcatatggcttaatcatgaataaatgtggtgtttgaatttaaaatatgcgctgaatattgttgttttttgtcatgtc

SEQ ID NO: 22821 - DNA, 846 bp, Zea mays
  Clone ID: LIB3591-118-G4_FLI
ccctctctcacctcctcatcctcctccaactgtgagcgtacgttccacggccgccgccattagtgttgagagagggagagaagctacagggaccggacgcctccttccttgctgaccggcgagctttattttcaggcccctcgctcgctagggttccatcatcccgcccgctgttccttttcgtccatggatcagaacttcgggaacctcgggaccggagccgggagcagcggcgggtgcgggggctccaactccaactccaaggcggtggcggcggtgtcgtcctcgtccttcctgcagctgccgctgtcgacggcggcggcggcgtcccccgcgtactacggcgcgccgctcgcgctcctgcaccacggcaccaccgcgggcccgtcgtcgtcgcagcagcagcagcaccagtcgccgtacgccaagcacggcgccgagatgtcggcggcggaggccgacgccataaaggccaagatcgtggcgcacccgcagtactcggcgctcctcgccgcctacctcgactgccagaaagtgggcgcgccgccggacctgctggagaggctgacggccatggcggcgaagctggacgcgcgcccgccgggccgccacgggccgcgcgacccggagctggaccagttcatggaggcgtactgcaacatgctcgtcaagtaccgggaggagctgacccggccgatcgacgaggccatggagttcctcaagcgggtggaggcgcagctcgactccatcgccggcggcggctcctcctcctccgcgcgcctctcgctcgccgatggtaagtcatcagaaggggccggctcttcggaagacgacgacatggatccg

SEQ ID NO: 22822 - DNA, 1103 bp, Zea mays
  Clone ID: LIB3591-119-E1_FLI
cacacgcacagcacagagacgttggttcagccatgcctatcgccctcccactaaatctcatcgcgttcgcgacacctttctgcgaaaagatacggacatcatcaccgagcaccaagccaccatgttcgatgtttcccgtctatccaagaaactgcagaagcgcaattagcctagagattgcaggagaacagaattcaatcaggccgtcttccatctccaccttcctcgcctctctctctctctctctctaaccactgtactagaactatcattacctgagcaagattgcttctacctgtactgtgctgacattatacacctcttcccttcttgcccgtgccaatcgccattgccaggcaccacgtagagctgcattgcttcgaggccatggccatgggagttgcaacaagaatttgcttcgtagttcctgttctgatctgcacatcttccagaggagggagggccgcgacattcacgttcgtgaacaggtgcgcggcgacggtgtggccgggcatccagtcgaacgcggggagctcgaggctggacccgacgggcttcgcgctgcccgcgggcgcgtcgcgcgcggtgccggcgccgtcggggtggtccggccgggtctgggcgcgcacgggctgcgcgcaggacgccgctagcgggaaggtggcgtgcgccacgggcgactgcggctcggggtccctggagtgcgacgggcggaacgcggcgacgccggcgacgctggccgagttcacgctggaccccgccggcggcaacgacttctacgacgtcagcctcgtggacggctacaacctgccggtcgtggtggagcccgcagggggcggcggcggcggcgccacgacgacgtgcgccgcggccgggtgcgcggcggacctgagcgagcggtgccccgcggagctgcgcgccgagggcggcgccggctgccgcagcgcgtgcgacgccttcggcaggcccgagtactgctgcagcggcgcctacgccagccccagcacctgccgccccaccgcctactcgcagctgttcaagtccgcgtgcctcaggtcgtacagctacgcctacgacgaccccaccagcaccttcacctgcgc

SEQ ID NO: 22823 - DNA, 1550 bp, Zea mays
  Clone ID: LIB3591-119-E8_FLI
ggatcgcgccgccgcatcgccgcccgccgtggaggaacccgtcagggccacctccgttctcgacagcctcggcgcggaggtgctggcggtcatgtccccggtctccatctgcatggccctcgtcgtgctcctcatctccctcctctcgccgccgtcctccgggtccgcggcgggttcgcccccgccagtcaccgctgccacactcgtctacctcgagtcccctaacgactccccgggccagaagctcctcggggcgcttctcgacgccgccgtcttcgttgccctcgtcgccgctgtcaccttcgtcctcgtcgcgctctattactaccgctgcacgggcttcctcaagaactacatgcgcttctccgccttcttcgtcatcttctccatgggaggcgccatcgtagccgccgtgctccgccgcctcggggccccgctcgatgcggccaccgtgctcctgctcctcttcaacggcgccgctgtcggggtcctctctgtcttcgcctccgccgttcccatcctcgtccgccaggggtacatggttgcgctcgccgccatcgtcgccgcctggctctccaggctccctgagtggaccacgtggatcatgctcgtcgcgctcgccctgtacgacctcgtcgccgtgcttgcaccccggggaccgctcaggatgcttgtggagctagcctcctccagggatgatgagctaccggcactcgtctacgaatctcggcctactgtcggtccagccactagttcttcctcttatgcttcagtcatggggtctgtggagatgcaaaccatgtcagattctggtcagatctgtggcaatcgatatgaccgggtggagcaggaggaatatgccagccacgcctccttggaaatgagggatcttggaagaggccgatcaagcgttggtgagatgaaccgaccgagaggtcctgtgcttcaaatggagaaccttgaaagggaggtaccagcgacttcagcagagctgacggcaaatcaaggtgggggttcacagcatgccatcattcaaattgaacaacctgacgaagaagagacatcacctttggtgtctgcaccctctaccaacactgcagcattggatgtggaggagcatagacaaagttcatcgtcagagcctctggattttgagatgtttgagtctaccaggggcatcaagctgggccttggtgattttgttttctacagtgttcttgttgggagagctgccatgtatgatctgatgaccgtgtatgcatgctaccttgccatcattgctgggcttggttgcacccttatcttgctttccatatgccggcacgcacttcctgcactcccaatctctattatgctgggagtgacattctacttcttgacacggttgctgatggagccatttgtggttggtgcttcaacaaatttggtgatgttctgacttttcactgatctgctgttgcatttacatgtggatgaagccctcaaccaaaagaaagttgttggtcagcaactcagcattctatgtgagagtgactaatattttgttggtt

SEQ ID NO: 22824 - DNA, 966 bp, Zea mays
  Clone ID: LIB3591-119-H6_FLI
caggcaggcaggtcggcgaggagggcaggaagaccgaagaccgagccgtgcgggggctcgggacgggaacgggacaggaccccaaaatctcagatccttcctgcccgcccgcccgtgcccgtcgacgcgtcgttcttgccggccgcgccccacctccgccctctcctcctccagggggatcggatacgccacaggctgcgcgatggtgctgtgggtcttcggctacggctccctcatctggaaccccggcttcgacttcgacgacaaaatcctcggcttcatcaagggctacaagcgcacctttaatctcgcttgcattgaccacagaggcacaccggagcatccggcgaggacctgcacgcttgaaaccgacgacgaggccatatgctggggaattgcatattgtgtcaagggtggtccagaaaaagagctaaaagcaatacagtacttggagagaagagagtgtgagtacgaccagaaaatatccattgatttctacaaggaaggagatcccttgaaaccagctgtgacgggcgtcttagtgttcgtttccactccagatccaattggcaacaagtactatcttggccctgctcctctgcaggatatggcaaggcaaattgctacagccaatggccctactggctataatagggattacctgttctcaatggagaaggcattagccagcattagccacgaagatgattcgatcatagagcttgcaaacgaggtgaggaaggtgctcaacagaacaaaggagaccaagatcactggtgccaatgcttccctgaaatcacatgcccctcttgtgcacctgtccgcgcttccagaaggcaccgttgtggactcgagatagcgagagccttggacgttggacctctactcggaatttacttccagctcttgcatgtttgtggccatcatgtactgattttcccttttcaacagttgtcgtgaggctgt

SEQ ID NO: 22825 - DNA, 1707 bp, Zea mays
  Clone ID: LIB3591-119-H8_FLI
caaacgagcagtgcctgaacccaagtgcagtgcagcagccatgggagcagcagcagcaggtggccacgcgctgcgcgccgtcggcgacgtcgtctcgttccccgcgaccgtcgccgccttcgtggaggcgctgctccagggctgggccgaggccagggccgggctgctggtgccgctgctccgcgccgcggtgctgctgtgcacggccatgtcgctgatcgtgctggccgagaaggtgttcctgggcgcggtcagctccgtggcgaagctgcggcgccggcgtccggggcgggtgtgcaggtgcgaccccgacgaggaggcggctgcggcatcccaggcctatcccatggtgctcgtccagatccccatgtacaacgagagggaggtttaccagctatcaatagaggcagcctgcaggctcacatggccggtagatcgactaatagtgcaggtgctggacgactccaccgactccgtcatcaaggagctggtgaagggcgagtgcgagcggtgggccacggaggaggggatcaacgtcaagtacgagacgcgcaaggacagggccgggtacaaggccggcaacctcaaggaggggatgcgccacgcctacgtgcgcgcctgcgagttcgtcgccatgttcgacgcagacttccagccgccgccggacttcctcgtcagaaccgtcccgttcctcgtccacaaccccagcctcgcgctcgtgcagacacgctggaagttcgtgaatgccaacgactgcttgctgacgagaatgcaggagatgtccatggactaccatttcaaggtggagcaggaagctggctcttccttatgcaacttctttggatacaacggaactgctggagtatggagaacgcaagcgatcgtcgagtccgggggctgggaggaccgaaccactgctgaggacatggacttggcgctgagagcagggctcatgggctgggagttcgtctacgttggaagcataaaggttaagagcgagctaccgagcactctcaaggcgtaccggtcccagcagcaccgctggtcatgcggacctgccctcctgttcaagaaaatgttctggcaaattctcgctgccgagagagtgtcggtctggaagaagtggtacatggtctatgacttcttcattgcccggagaatcgtaggcaccttctacacgttcttctttttcagcgtcctgattcctctgaacattctgctacccgaagcgcagattcctgtgtgggagctcatctatatccccatagctatcactcttctcaactctgttgggactccaaggtctatacatctggttatattgtgggtcttgttcgagaacgtaatggcgttgcatcggtttaaagccatcttgatagggtttctcgaagctgacagggccaacgaatggatcgtgacgcaaaagctggggaatctgcagaagctgaaatcgatcgccagacttacaggaagctaccgtttcaaagacaggttccatttcctggaggtgttcattgggctgttccttttggcctctgcgtgctttgactacttatacagagatgactatgtttacctctttgttcttccccagtcgatcatgtatttcgcgattgggtttcagttcattggtctcaatgtctctgaagactgacctattgcaagacaactgaacgttttggttgcgatattatgattgctcgggtc

SEQ ID NO: 22826 - DNA, 1578 bp, Zea mays
  Clone ID: LIB3591-120-A11_FLI
ctctcaccccttccgcctacccacgcaaacggcacacgaactaacagccacctctcacgtcccccaccctctggttcatgtcctgctgctccccatgtcgcctccactcgagctcgactacataggcctctcgccgccggcggcagccgccgccgctgaaaacgacgaactgaagggtactgagctccgcctcgggctgccagggtccgggtcgccggaccgccgtgtcgtggctgccaccgcgaccaccctggacctgctcccggccaagggcgccaagcgcgggttttctgacgaggcgcccccgccatcgcctgttgccactgccggaaagggaaagaaggtggcagaagaggagtacgacgagaagaaggtggcagcgaccccgcagccggccgccaaagcacaggtggtgggatggccaccagtctgcaactaccgcaagaacacgatgactaccacccagctggagggcagcaaggaggatggtgatgccaagcagggtcaggggttcctgtacgtcaaggtcagcatggatggcgcgccgtacctcaggaagatcgacctcaagacttacaagaactacaaggacctgtcgaccgcgcttgagaagatgttcagtggcttcagtactggcaaggacggctcatctgagtaccgcaaggatggtgaatatgttctgacttacgaggacaaggatggagattggatgcttgtcggcgacgtaccatgggagtgagttacacccatctgtcttaattaaaacaatggaattggaactaaattaatcaccgattagggcatgtacagtgggtgtcttgagttatgtcttcgagtgtgtttaggggggtgaatgtaaaaaaactcaagatatgtatcttgacgaagacacagtgtcttagctctatgttcgagacatgagactagctgattggtcactttaatttattgaatgctctgattggtacaattaatatggtaagacacatgttttagacacgtccactgtattatgttgtgttttaggtgtgtcttatacttggagtaccgtgcaacagtgtctaggttgtacatgcccttaggtttcgtggctcattttttttctcaactaaatacatgtttagctgccacatcgtctttcgctccaattgtaggatgttcgccggctcctgccgcaggctcaggatcatgaaaggctcagatgcgattggactcgctccaagggcagccgataagtccaagaaccgcaactagaacggtggcttcctatccttacacagtccggtacgagggaggagatgcagtgacttgtagggatctgtacgaaaaccgaaaaagtctactaacagctatgacttgtgagaagaattctggcttatggtctgcactagaatggcttggtacatcgtctatggacaaaacacgctattcgattaattgttgttaattaagccttggggggggtacgagtgctattcatgtaaatggtttggtgcatcgtgtgctgctgctgcctgctgctgttactacgattgagctcccctataatactatgatttgaagagagatggcgatgtc

SEQ ID NO: 22827 - DNA, 803 bp, Zea mays
  Clone ID: LIB3591-120-C10_FLI
tgccgatggccggtggccacccggcgccgctgcggccggtggtggttgcgatgaaaggccacccagggtctggcaagtccacggcggcgcgcgccatcgcgaccgcgctttgctgtccgctcctggacaaggacgatgtgagggactgcatgttgcccctagagggcttggctgctgctgggatgctcaacgacctctcctacgccgtgctgtggcggatggctgagcgccaggtaaggctcggactgtctgtcgtcatcgattcaccgctgtcacgccgctctcacctcgacatgctgacacgcctagccggtgtgcttgtggtcgtcgtggagtgtcgccctggtgataacgaggaatggcgccggaggctggagagccgtgggtcggctgttgccaatggtggcggtggtgatggatggcataagccaaagacatgggctgagctggagaggcttctggaagggtaccaaggttgcacagactatgaaattggggatgtaccgaggattgtagtggatacaactgatccgacagttgatgcacaggtggcagctgaaaaggttgtggttttcattagatcccatcttgcttgtagccaaccatcttgtgggagacaggattcacctgtttgccattagaaaccaaaatgtacactagcttaagcattaggtaaagtttcgttgcaaaaggttgatctgttgtactgcaatgctcaaagttcttttttttatgggtgtaacctaaaggttctgttactgttgggacttcaaagggattttgttgttgttgttgtgtgatct

SEQ ID NO: 22828 - DNA, 1073 bp, Zea mays
  Clone ID: LIB3591-120-D2_FLI
gggttcatttgtggttgcttcggtggtgatttgcctccggcgcatcggatttctatgccggttaatcggtttgtgcgaggagagcctggatcgatcggatcgtctgcctattgttcctttctttgttgactgaaccatgagtgaaacagggcacactgtacaagtcactaacctctcgagcagagtatctgaaagtgatctttatgagttcttttcgttctctggccctattgaacatgttgaacttatcagatcaggagaatacggtgctactgcttatgtgacattcaaggagcgctttgccttggaaactgcggtattgctcagtggggctactattgtggatcagccggtatgcataacttattggggacaacctgaggagacttttaatttctgggacaggccaacttgggaggttgaagaggaaattgaatacacgagttatcaatcatgccagtacaacactactccgcaggaagctcttacagtggctcaagatatcgtgaagacgatgctagcaaaggggtacgtgctcagcaaggacgctttggctaaggctagagcctttgatgagtcccgcggattaacagctgcagctgcagccaaggctgcagagctgagcaagagaattggtttaactgacagggtcagtgctggtgtcggtgcaatgcgatcggtcgatgagacatatcgcgtaacggagacgaccaagacggtagctactgccactggaagaactgcagctaaggtggtaaatggtatcgtcaccagcagctacttctctgcaggagccatgatgttgtctgatgctcttactagggctgccaaggccgcggctgatctggccgctcatggcagacagagttaagtgaaaaacaaaacatacaatccatcctttttcagttactaaacatgaggacgaacaccttaataggatgcttgaagtgttgttgttcgatgtatatttataacagacaacattgttgatttgttgtataaattaaaaggagacgtacactgcgtttgcactaataagtttgattattgcaaatggagtcgagtgatcgtgc

SEQ ID NO: 22829 - DNA, 483 bp, Zea mays
  Clone ID: LIB3591-120-D8_FLI
ctcatcgttcccatggagaaccgcaaggaggggcagcagggcgccacggtcgggtggatgaccgtgccggcgttcggcgagtgggacgttaagaacggcgccgtgccggactactccatggacttctccaagatccgggagatgcgcaggcagaacaagcgcgagctctccagggccagcctcggcggcgacgaggacctcctccagcagcagcagcagcagagtgccaaggctcagccgcccaagtcccccgccgccgccgtcgccgacgacgacgaccaccaccgcctgccgctgcacgacgactcccctacgggaaggaagaagttcctgagctacttccagtgctgtatcagagcatgaagagttgcaaaccttcctgtggtgtcactgtcactgttagaattatagtcattttctgtattattttaattccatgaattaacattatgatgatgatatataacaaataaataaccatag

SEQ ID NO: 22830 - DNA, 2240 bp, Zea mays
  Clone ID: LIB3591-120-E1_FLI
ccaagttccaacatgacaggcacgaaggcaagtcgagcagacagcaacatctagcacgaagcaccggccttgtacgcatcctcccttcgcatcgaggaatcgcgggcccaccgcggcaccaaggccccccgcattccgtcccgccgcggcgtcgctcccttgttctctcccgagccgtccgcgaaccaacccgtgctacctccgattcttcgcctcgtcgttctttctagaacctccgctccgcctaatcccgaacgagactagggaggttccagcgccgccggtgggggagatggcgctggagctgagcctggcctcggcttcgccgccggcgggcggcggcttggcgcagccgccgcccctcgccccacccgggaaggagcagcaagtggccggcgtggggattctactgcagatctccatgctcgtgctctcgttcgtcctcggccacgtcctgcgccgccaccgcttctactacctccccgaggccagcgcctcgcttctaattggcttagttgttggtggcctcgctaatatttcaaatacagagaccaacacaaggacgtggttcaacttccatgaagagttcttcttcttgttcttattacctccgataatattccagtcgggtttcagcttatctccgaaaccattctttgcaaactttggggctatcgtaacttttgcaattcttgggacattcattgcttctgttgtaacaggagttcttgtctatcttggtgggctgacatttctaatgtacaaacttccactggttgaatgccttatgtttggtgctcttatatctgcaactgatcctgtcacagtgctatcaatattccaggaactgggttctgatgttaacttgtatgctttggtgtttggagaatctgttttgaatgatgcgatggcaatttctctttacaggacaatgtcatcagtcagaagtcatgcagcaggcggcgagaacttttttatgatgattctccaatttctcgaaacctttgttggttcaatgtcatcaggtgtgggagttggatttatctctgctcttctattcaaatatgctggattggacgttgataatctgcagaacttggagtgctgcctttttgttctctttccttacttttcgtacatgttagcagaaggacttggcttgtcagggattgtttctatattattcacagggatggttatgaagcattacacatattccaatctttcagacaactcacagcgctttgtttctgccttttttcatttactatcatctttagctgaaacatttgtgttcatctatatgggtttcgatattgccatggaagagcatagctggtcacatgttggcttcatcttcttctcaattatattcatagttgttgcaagggctgcaaatgtcttttcttgtgcatacttggttaacatgtctcggccagaacatcgccgtatacctgtaaaacatcaaaaagcactttggttcagtggtcttagaggggccatggcttttgcacttgctctccaatctgtgcatgaacttcctgaaggacatggaaaaacgatattcaccaccaccactgccattgttgttttgacggtacttctcattggagggtcgacaggaactatgcttgaatctttggatgttgttggagatgaaaacacatcaagagaaaattacgaggacaacaatggttacatgcctccaagttatgaagaaggaacatcctctggaggaggattgagaatgaaactcaaacagtttcacaaaagcacaacatcattcactgcccttgacaagaactatctcactccattttttaccagtcagacagatgatgataacgatgacgacttcagtcagcaaccccaaaaccgaaggctagctttttatgatcaatagcggaatttgatactctacatatcaagctaaatacacggagcagaactgacgtgcatgactgtctatgtgtgatttggtcgaacaaaatatagcaggagcatacttagttgagtagcatatggcagagcatatctgtataccgtaggacaaaaatcataagggttcgaatcagttgttcccatgggggacgaggatgatgatagccaggcagcatgtatatatttctaggcttccttaagaacttagtggggctccagatgaaaagcagtgtgttgttggaattttatagaccctaccttgtgttaggttaaattttaataaacccgaccgtttgtcc

SEQ ID NO: 22831 - DNA, 1029 bp, Zea mays
  Clone ID: LIB3591-121-D7_FLI
gaaactagggtgggggagccctgagcaggggaggaaaaataaactagtggccaaaccctagcccgccgagctcccgcgtgcgctctccgccgcccgcctactcctctctgtccgcgatgcgccgggcgaagccgcagcagccctcgccgtcgcccgagatccggtaccgcggcgtgcggaggcggccgtcggggcgctacgccgccgagatccgggacccggccaagaagaccccgatctggctcggcaccttcgactccgccgaggccgccgcgcgcgcctacgacgccgccgcccgatccctccgtgggcccaccgcccgcaccaacttccccggcgccgcggcttccgcgccgcggcacagggcccgctccgcctccgcctccgccgccgccgcagcccccgcggcggtgccggccacgtctagccacagcagcaccgtcgagtcgtggagcggcggcgcgccccgcgtcgccgccccgccgcggagcgccgccgcgcccatggaggaggacgacgacgaggactgccacagctactgcggatcctcgtcgtccgtgctctgcgaagacgcccgcggggacgacgacgacgacgcggcggcgtcccacgcgcccctgccgttcgatctgaacctgccgccgccgatcgacgcggctgctgaggccgatcagatgggtgcccgctacgacacgctactccacctctagctcgcgacgacggccaggaattagaggaaggaatcgagaccgtctgtccttcttcggctgctgatccggtggtgttctatcgctagatggataattcttgcctttttcccccttcttttcttctgctactttttttgttttcttctcttaccaccacgatgatgatgattcgatattatgtgaataattcagttatgtccatgtaagctgtgaggaaggaaatctgagcttttccttatcttcctatggtgtttctgctggtgctgctctttcatttgttggaaagataatggaagaaatcaagagaaattatttacac

SEQ ID NO: 22832 - DNA, 472 bp, Zea mays
  Clone ID: LIB3591-121-E11_FLI
tctgctttctcgcgggcaaataaaaacgtgtagaacgacggtgtagtaggcagatctactccttgtgccgctacgctagcccgctaccgaagatcgggcccgtttcaaccggttcgttggtctgagcggagctaagatggggcgcatttcattttttggtcctttcgtctgattggagaagtgcccattccggtatcgctccccggcctccaaatacgcaccgacacagaacgtgttcgtacgcacgtacacatggtatgcgcaccgtgctgctggccatagccgttgactcaccgggattcactcctctctcgcgtgtgtgtgtgtggcttccttgcagttgggtacgggccctacttcggcaagaaggtggacccggagcccgggcggtgccggcgtacggacggcaagaagtggcggtgctccaaggaggccgccccggactccaagtactgcgagcgccacatgcacc

SEQ ID NO: 22833 - DNA, 1474 bp, Zea mays
  Clone ID: LIB3591-121-E9_FLI
cgatcctaatagtcgtcgaccgttccatcgaccggccggccggccagcctagctcttggcaggctcttgctccgatcggatcgagcgccggacaaggcaaggcagccgtacgtacgacgatggcgcagggcagccgcagcgctgccgtgcccgccgcagcgtccttcttcgcccttctcgccgtggccccgctgctcctgtgctgcgcgccggccgccgcggagctggccaggctggagcacccggccaaggacggcggctcgctcagcctgctcgtcgtcggcgactggggccgaaagggcgcgttcaaccagtccagggtcgcccatcagatgggcagggtcggggagcagctcagcatcgacttcgtcatatccaccggcgacaacttctacgagaacggcctgacgggcacggacgacgaggcgttcgagcagtctttcaccgatatctacacggcgaagagcctgcagaagccgtggtacctggtgctgggaaaccatgactacaggggtgacgcgctcgcgcagctgagcccggtcctgcggaagatcgacagccggttcatctgcatgaaatccttcgtcgtcaacgcagaaatcgtggagttcttcttcgttgacaccaccccgtttcaactcaagtactggactcaccctaaggatgatcactacgactggagaggggtggcgcctcgggaaaaatacataaacaatctgctcaaggatttggacggggccatcaagagatcgactgcggcgtggaaggttgccgtgggccaccataccatgaggagtgtcagtgatcatggtgacaccaaggagctactgcagctactgcttccagtcctccaggccaacggcgtcgatttctacatcaacgggcatgaccactgcctggaacacatcagcagcaaagacagcccaatccagtacttcacaagcggaggcggttccaaggcatggagaggagtgcagaaccccaccgaagatgacctcaagttcttctacgacgggcaaggattcatgtccctccagctagaccgtagccaagccaagttcaccttttacgacgtcgacgggaaggcgctgtacagttacacacggtcgagcctgatggaaacaggccaccacctccaagcctccggctacgtcaacgaggaatgaagcaggggcgagtcagcatgcagcgctggagaactgagatcgatatatgcagttcaagcgtaaaaatagtgcaaatattcattatcaagcatctctcgatattttgatataattctcgagcgcttgatgtggttcatctgtcaagggcaacagttaagtttatatgtgtgtgcccttgcatctctcgacatctgtcactgccgtccggtactatttggggtcatgccatcgattcgaaaacatgacatggtaggggcagccataatgtagccaaaaaaaatagtgcaaatattcattatcgaggagtt

SEQ ID NO: 22834 - DNA, 1316 bp, Zea mays
  Clone ID: LIB3591-121-H10_FLI
cacactcactcgcggccattgtcctgcccgtgcgtgctctgccttttcaggcgatcgaccaaccaacttctcgtcactgccatggctctgctctccgacctcatcaacctcgacctctcgggccgcaccgggaagatcatcgccgagtacatctggagcaaagccaggacgctgtccggacctgttgatgaccccagcaagcttccgaagtggaacttcgacggctccagcaccggccaagctccgggcgacgacagcgaagtcatcctttgccctcgggccatcttcagggacccgttcaggaaggggcagaacatactggtcatgtgcgactgctacgagccgaacggggagccgatcccgagcaacaagcggcacggggccgcgaagatctttagccaccctgacgtcaaggctgaggaaccatggttcgggattgagcaggagtacacccttctccagaaggacaccaagtggcctctcggttggccgctgggcggctaccctggccctcagggaccttactactgcgccgtcggagcggacaagtcctacgggcgggacatcgtggacgcgcactacaaggcctgcctctacgccggcatcgacatcagtggcatcaacggggaggtcatgccggggcagtgggagttccaggtcggtcctgccgtcggcgtctcggccggcgaccagctctgggtggctcgctacattcttgagaggatcaccgagatcgccggcgtggttgtctccttcgaccccaagccaattccgggggactggaatggcgctggtgcacacaccaactacagcaccaagtcgatgaggagcgacggcgggtacgaggtgatcaagaaggcgatcggcaagctgggcctccggcaccgggagcacatcgccgcgtacggggacggcaacgagcgccgcctcaccggccgccacgagaccgccgacatcaacaccttcgtctggggcgtcgcgaaccgcggggcgtcggtgcgggtgggccgcgacaccgagaaggaaggcaaaggctacttcgaggaccggaggccggcgtccaacatggacccgtacgtggtgacctcgctgatcgcggagacaaccatgctgtgggagcccagccactccaacggcgacggcaagggcgccgcggctccttgatttgattctgcggagactgagctctgtgtgtgagccggcctgcgtagatggcaaatgggactgaccctgtcagaaacttgagatgaccataataatagctgcagtgtgctcgttctggggttggataagacccaagaactttttttagcttt

SEQ ID NO: 22835 - DNA, 1005 bp, Zea mays
  Clone ID: LIB3592-001-B7_FLI
gtgtctctttaccagtaccgccaggcgcaggcaggcatggccgccgccgcctttctaagcccggaccaggcgtcggcggcggcgagcaggagcgcgcagagcatctacgtccagaactccaggtacctcaaggccgcgagggagctgctggacgaggtggtcaacgtccaggacgcgatcaagcggaagggggacaagagccagcagggcaaggattccggcggcggcggcggtggcggcgagggcaaggacgccgagacgagcgacgagaaggctggcgagcacgaggggaactcctccgcgccggagctgtcgccgtcggagaggcaggacctccagaacaaagtgtcggcactgatggcgctgctggatcaggtggaccgcaagtacaggcactaccaccaccagatgcagatggtgatgtcgtccttcgacgcggtggccggcgccggcgcggcgaggccgtacacggcgctggcgctgcagaccatctcgcggcacttccggtcgctgcgcgacgctgtcggcgcgcaggtgcagtcgctgcggcggagcctgggcgagaaggacgggtccgcgcagggaggcgggctgccccggctgcgctacatcgaccagcagctgcggcagcagcgcgccatgcagcagttcggcatgatgcagcagccgcagcacgcctggcgcccgcagcgcggcctcccggagtccgccgtctccgtgctccgcgcctggctcttcgagcatttcctccacccgtacccgaaagattccgagaagctgatgctcgctaggcagacaggcttgtctaggggtcaggtgtccaactggttcatcaacgcgcgcgttcgactgtggaagccgatgatcgaggagatgtacagggaggagttcggggcggagatggactcgcactcgtcgtcggagaacgcggcgggcaacaagggcaaggacgaggcgatatcctcggaggaccacgaggagttccagagcccgtcgagcgccgcc

SEQ ID NO: 22836 - DNA, 1696 bp, Zea mays
  Clone ID: LIB3592-001-C10_FLI
caccaaatacgccacggcggcgcggcgcgctcgctacccacaatggcgctcaccaccgcctccacggtctcctctccctcccgaatcatccgccggttctcttcttctcaagactctcgccccccttcctcgctcctacatctcgccccgcgccgaggaaccgggaattccccgcgcgcctgtagctggcaccggctcgttgtgcgccggatgggctgggcggcgcgagcgctcctcggcggattatcggacgccggcgccagtgagagcgacgaggaggaggagcacgccctacgagtggggcagcgggagggcgagatcgacgacgccgtggagctctccgcgacggccgttgggccagagagatgggacgtgctgggcctcggccaggcgatggttgacttctcagggatggtggatgacgagttccttgacagattgggcatagagaagggcacgagaaaggtcataaaccatgaggagaggggacgggtcttgcgtgccatggatgggtgcagctacaaggctgcagctggaggctccctgtccaactcgctcgttgcgctggcaaggcttggtagtagccagtctgctggctaccctgagcttaatattgtgatgggcggcagtgtgggcagtgacccactaggtagtttctacagggcaaagttgcgccgtgctaatgtgcacttcttgtctaagccggtcaaagatggaacaactggaactgtcattgttctaacaacgccggatgcacagcgtactatgcttgcgtatcagggtacttcgtcaactctgagttacgattcagacttggccagtttagtgtctaaatcgaatgtactaattgtggaaggttatctatttgagctgcctcacacaattgaagctatcaagcaagcgtgtgaagatgctcacaagaatggtgcaatcattgctgttactgcatcagatgtatcttgcatcaagcgttgctacaatgactttcgggacattgtaagaaactatgcagatatactgttcgccaatgccaatgaagcaagggcgttgtgcgagctaccctcaacagacagtcccatgtcagccacaagatacttaagccactccgttcccctagtatctgtgactgatggcatgcatggctcctacattggggtgaaaggtgaagcaatatacatccctccaccacaatgcgtggccgtggacacttgtggtgctggcgacgcatacgcttctgggattctgtacggcgtcctccggggtgcttccgacctgaaaggcataggacttttggcgtcacgggtagctgctgtcgtcgtcgggcagcaaggcacgcgactgcgggtccaggatgcggacagactggctggatcgtttgagcaccatctggatagcttggagttctgctcagatgtttgaatagatcattctgcaaacgtctggtctgattgtatctgttttttttcccaagccttagaaatctatatgtacatacatcacttccctaggtctagtacatttcatcagggcatttagccgagctgggtaaatcttgtgcgcccatttgatattactttccatctttgagcattgccatgattggaattacgtagatttcattgggcatggaaaatacaacggtatagttcatttcctgttcccattgaaaatggatggatgctatgttggtctggcc

SEQ ID NO: 22837 - DNA, 1154 bp, Zea mays
  Clone ID: LIB3592-001-C3_FLI
cgctggtgcccgcccggcctcccaccctctccagcgccgccgcctcctcttcccggccgaaggagcaccgccccagccgatcttctctcccccacgccccatcaggccgtttctggctgctcttgggcctccctcgccctccctgacggccccgagctcgccctccatctccgccccagctcgcgccatctcggtgcctcgagctcgtcgtcctcgcttctgtggtcaccgccgggaagcatgaggaggaggcctgggatcgctggcttgcagaatgcggcggctactcgtgaccaattccggctggtcggggagaatgtggccaaggtgaggaccgatgtcatgaaggagcagcttgcgacgttccggtcacagctcgaggaattcgctcgcaagcataagagtgacatccgtaaaaacccagtattcagacagcagttccatgagatgtgcgcaaaagtcggagtagatccattggcatctaataaaggagtctgggcagaacttctagggattggtgacttctactatgaacttggggttcagatagttgacatatgcattggtaccagatcacataatggtggcttgattgacttactagatctccgcaaactgctcggtcagaagaggaaaactactcttgaatcattatctgaagatgactgtttgcgtgctataagcaagctaaaagtccttggtagtggttttgaagtaatttctgttgggaggagaaagcttgtgcgttcagttcctaccgaattaaataaagaccacagtgggatacttgggctagctcaggctgatggctatgtcacggtggaacaagttgaaaaggaattctcatggtctactgggcgtgcgattgatgctcttgaaactttgctgaaggaggggcttgctatgatcgacgatggccacagggatggcaagcgaagatattggttcccatgcgtcactgtcagctccgacacagcagctgttgaagtcaagtcataacctgtaagtaaaatgtcgattccacaatgtgttcacgtccccattccatgaggatgaggtggaaaccagtggcacggatgtgtgtaatgcttggtatgttaagaattcagttggaacatcacactttgaatatgaaaggtggcataattcttatt

SEQ ID NO: 22838 - DNA, 700 bp, Zea mays
  Clone ID: LIB3592-001-D2_FLI
ctttttgtcccgagtttgaatggtttcttagatcaaccaaggtctgttattacatttaccccctgagattaataatctaatcactgtctacttcctcctcctcgtcgtcttcttcgtagtattcctcctcctcctcctcctcctcctcctcctcctcctccaccgaggaagaatattccttcgccgtggaaaggacgttccagtgccgcacggcgaggtcccagccaaggacggaccccgtctcctccgcgtcccacctcgacgacaggaagccgtagtggaccccgagcagccccgccgcgaagagcacggcggagcccgcggcggcggcccatgccggcaggtccccgggctgcgcgcgctcgagcagccccaggaacgcggcgtccgccgccactgccgccgcgggaggcgccagcatccgccacgtcatgccgcgccgcaactcctccgacagctccagcccaagcccgcccgcgcgccactgcttcggggcgtccggcgacgacgtcgtcgccgtggtgtcgatgacctcggcgttgctggagctggcggctgccggcctggcgccggggccgcgaaaggctctggggctggctgcgcgtagcgggcgggcgctggcggcgcggcatgggacgagcagcagctccatggctggctgcctttagcgtgcgtgtcggtggggctcgtctccggcgtg

SEQ ID NO: 22839 - DNA, 1555 bp, Zea mays
  Clone ID: LIB3592-001-D7_FLI
gcgattcgctcgctcgatcctagcttcccttccaagaagcgcagcgcccatggccatggccacgcaggaatgaacggggaggtggaatgcagcgtgtgccatgcgaaggtgccggtgccgccgccggtgtcgaaagcgtacgacagccaccggagcactgtgtcgtcgcggcaacgtgcgctaaacgtgctcctcgtctccggcgactgcgtccttgccggcctccagcctatattagtgtacatctcaaaagtggatgggaaattcaaatttagcccaatcagcgtgaatttcttgacagagattacaaaaattatgtttaccattgtaatgctattcatccaggctagacgtctaaaggtgggagacaagccactttttacagtttcaatatttatgcaggctgctcgcaataatgttcttctttcagtacctgcttttctctatgctatcaacaactatttgaagttcataatgcagttatattttaatcctgctagcgtgaaaatgctgagtaatctcaaggttctggtaatcgcagtgcttcttaagatgataatgaggaggcgattttccgtaatccagtgggaggcccttgcccttttgttaatcggaatatctgttaatcagctgaaatcattgccagaaggttctagtgtgctaggtcttcctgttgcagctggagcctacctatatacattgttttttttcccgcattggcttcagtttacaacgaaaaggctcttaaaagccagtttgataccagtatttaccttcagaacttgtttctgtatggttatggtgcgatatttaactttattgggcttgttgtcactgctatcatccaagggcccagtagttttaacattctagaaggccactcaaaggccacgatgtttcttatctgcaacaatgctgcacagggcatattatcatcatttttcttcaagtatgcaggtatattatcagaaaaggggaaaacattagttcttattcaatatgctatttaaccacatacacgtatctcagaaaaagttgttatcttgcatgcatgtacccatagaagattaccttacatcttaccgaagtcttgcctaaatgctgaatatggacgtttattagcagttgaatgatttcacatttatttctggttggtcaaatatcctgtttgtagagtgcatgctctggcgattcagctttttcgtttttggtttgtgcgggttgtaatatggacggtatttttctttttagtataaaggtgcacattctgcttttttgaagaaaaaattgtacatgcacatgaataagctaaatcagtagcatttccatgttgattgctacacctatgacctatgtagtagtttttgcaagtgaagcaaatcaatggtgaatgcagatacaattttgaagaagtactcatcaacaattgcgactatcttcaccggagtagcctctgctgtgctgtttggccacacactgacgataaattttgttcttggaatttcaatagtaatcatatctatgcatcagtatcgatcaaatatcaatcgcgctc

SEQ ID NO: 22840 - DNA, 1281 bp, Zea mays
  Clone ID: LIB3592-001-H12_FLI
ctggtgctgggatccgtgtcttgtcatctgaaaaccttccccagtgtgcacttcaaagtgatgaactggtgcagatatctggagcaccatctcttgtaagaaaagctctatatgaaatatctactcgtctccatcagcatcctcgtaaggaaaatagacctcttgaacaaataatagatgcaagcacacaaaggaaacacgagtctccaacactgcaacatgaaaatccaatgttgccgcacctgcatagtcatcatccacctccaatacccctgcttgacccatacagaagtggacctcagtatcctgttagtgaaactgaagagttttctatcagaatcctatgtgcttctgagctcattggttcagttattgggaaaagtggggctaatgttaggcgggtagagcagcagactggtgctcgcattaaagttcaagagattgacaaagatgcttctggagaaaggctgatcattgtttcatctaacgagataccaactgaaccaatatccccaacaattgaggcactcattttgctccacgataaagtaagtgcatcctctgagaaacaccattcaagtacaaggcttgttgtaccatcaaacaaagttggctgtattcttggggaaggtgggcaggtgattactgaaatgagaagacgaactggggctgaaattcgagtttactcgaaggcagataaaccaaaatacttgtcttttggtgatgaacttgtgcaggctgctggacaaattcatggactggaggactatagaggactgccaagtgcttctggaaggttctcgagcactattgaactaaggattccaaatagttctttggagtctattgttggtgttggcggggtcaatttagcagagatacgtcagatttctggtgcaagactgaggctacatgaggctcatgctggttcttctgagtctgtggtggagatccagggcacactggaccaagcaaaagctgcgcagagcctcctggagggctttatcagcgcgaacagcaggcagcagcaatcccattcttctcgcatgccactttacccaagatggggatagcttctggttgtggcaggggaaaaccgagtcagcagggttggctggagttatctcagactgcagattagatgcatcgatgatgttaatggtagctgtttaaattgaccgtgcaagcatgataacttatattatgccataggacaagtaatgctgattctctcatgaaatactaagtgacaagctgtctctgtagttgtatttgtttctg

SEQ ID NO: 22841 - DNA, 1200 bp, Zea mays
  Clone ID: LIB3592-001-H4_FLI
gaaccctagctttgtctccggaggtggcatggccggggggcccggctgggagagggagaaggcggccatcgcggcgcacccgctgtacgagcgtctactcgaggcgcacgtcgcctgcctccgcgtcgccacccccgtcgaccagctcccgcgcatcgacgcgcagatagcggcgaggcccccgcccatggaggccgcggctgcggctgctgcggcgggcggagcacactcgggaggcgaggagctcgacctcttcatgacacattatgtgttgctcctctgttcattcaaagaacaactccagcagcatgtgcgtgttcatgcaatggaagcagtcatggcttgttgggagctcgaacaaactttacaaagccttacaggtgcatctcctggtgagggcactggggcaactatgtctgacgatgaagacaatcaggtggacagtgagagcaacatgtttgatggaaatgaggggtcagatggaatgggatttggcccattaatgttgactgagggtgagagatccttagttgagcgtgtccggcaggagctaaagcatgagcttaagcaggggtacagagacaaacttgtggatattcgggaagagatattgcggaagcgaagagctgggaaactccctggcgacactgcttctaccttaaaagcctggtggcaagctcattctaagtggccgtacccaaccgaggaagacaaggctcgactggtgcaggaaacagggctacaactgaagcagatcaataactggtttatcaaccagcgtaagcggaactggcacaacaattcggcgtcatcctcgtcggacaaaagcaagagaaaaaggaacactgcaggtgatggaaacgcagaaccagcctggtagggcatggtcggggaacgaagtttatgtaaataatgccttctactgtgaagagtgccatcatatttgttgctccagaaaagaccctcaggccggtgtttcctgaacccatccatattcatacaaagacatcacgcgatgaataatgttgcgagtagtcaaataaaataaataacttgtatagtgaataactagaaactagcattcgtcgttttggtattgtatagcgctagagtgtaattgtttggtcggactgtcttgtataatggtgtaaggttcaaatgcattttgacctagcattcgatattgtattttgtgatgtt

SEQ ID NO: 22842 - DNA, 637 bp, Zea mays
  Clone ID: LIB3592-003-C12_FLI
ctctccatctagctccctaactgcaccggccgccacaccaccccgaccggaccctccacaacaatggccaccgtcctgggcagcccccgcgcgccggccttcttcttttcgtcgtcctccctccgcgccgcgccggcgcctaccgccgtggcgctgcctgcggccaaggtgggcatcatgggccgtagcgccagcagcaggcgcaggctgcgcgcgcaggccacctacaacgtgaagctgatcacgccggagggggaggtggagctgcaggtgcccgacgacgtgtacatcctggaccaggccgaggaggacggcatcgacctgccctactcctgccgcgcggggtcctgctcctcctgcgccggcaaggtcgtctccggctccgtggaccagtccgaccagagctacctcgacgacggccagatcgccgacggctgggtgctcacctgccacgcctaccccacctctgacgtcgtcatcgagacgcacaaggaggaggagctcaccggcgcataatcatgcccatccatctctctctctatatatctctgtgtgtcgttgtgtgtaatttgagtacgcgcgtacgtactgcttgggtttcatttgagcgcagttcatgtaagcgtggagttttcag

SEQ ID NO: 22843 - DNA, 628 bp, Zea mays
  Clone ID: LIB3592-003-E5_FLI
gcggcggcgttgtctctgacgatgaacaccgccgtcctgggcttcttgggagcgggcgggcacgccaccgcctccgccggtatcctccacccttcccccctcggcgtcacgggctcttcctcctcctcgccgtcctcggtggccgccgcgtgccgtcggcggccggccttgacctcgacgcgtacgggcttgagctggtgcagcggcagggcggcgatcccggcgccggacaggcccagcacccaggcctcgctgccgtcttggtggtggtgcccgtgacgatcttcccctcgcgtgctatgcacgagccgcttcttcttcttctgcttcacctccggcagccccatgatcatctgcttcttcttcttctcctcctcctctcacctctctgcctgcttgttcttgcccaaccaagaatgcaggcaatggaaatggagtgtagggtgcgtgtgtgtatgagagtgagtgagagctttgttggagcacacaaagaaagaggggtgctactggaggctaaataagcgaggctttaggctttctgagctctgccttcttttgacaaagctcaaggggttactcttactctagtttgtgtgtgtgtgcgcgcatgtataatatatacatatat

SEQ ID NO: 22844 - DNA, 2062 bp, Zea mays
  Clone ID: LIB3592-003-E7_FLI
tttgccatactagtgtccactttatctcttgatagccaaatccttcattgaaaacttttgttagttgatgatacttttcttctagctttcagtgaatgtagaaaacaaaattgtgtttgttttttagagatacatctctattttaagaagtatcgggccttcttcgttctattcatttagccttacctgcaggtaaagtgctgatgaagctagggaaggcccaatttgaactacaaaagtttgtggatgactatcgtacaaatattataaatacaatcacaaatccatcagagtcccttctgaaagagctacaagtcgtagaggaaatgaaagaccaatgtgatcaaaaaagagtggaatatgaagccatgcgagcagcctatggggagaaaggagggcgattgaggcacctaaaaaaatgaatcattctcattgggacaactgcaaacttcatttcttgagtaccaagaggaggcggcattgtttatttttcgcttgaaatcactaaagcaaggtcaatttttaagtattttgacacaggctgctcgtcatcatgcttctcagttgagttttttcaggaaagggctgaagcatctagaggctttggagccttgtgtcaaagcagttgctgagaagcagcacattgactaccacttcagtggactggataataacagtgatattgatgattacagctcttaccaggataatcatagtgatggcagtgagttaagttttaactatgagataaatgacagggacaaggacctccccactttcagaagtccaatggatatggatcaagctcatccagtgagttccccaagacctctgaaggaacagcaggaaaatgctgaagaaataaaggcgactttaggagttcctcatatgaagcctgagattggtacccaatcagcaccaatttttgctgagaatgttcctgatccatctatgagattccggaaaatgaacttgttaaccagaactgttcactcctacaaactcccaacgccagctgatgacaagaaccctgcttcagtaattgccaacaaatcgcctcattcagatcaacccgagagtaaatctcacgtggcagtaaatttgtggcattcctctccactggctaaagattttatgccgaattccatgcacagtggacctgttaagatgccatcaagtaacgaaggggtatcactagcttattcctactccacgacagattttaagaaagtgaagagggaagctttttctggcccaatcccaagcaaggtaggattgagcacccccctgatttctgcgactgatcgcaaaccgtcagggaagcggccttcctatgtgttgccaacaaggcctcctggcccaggttggcagtcatctgtgcctccaaaagctacgcccagggtgacctcgctcccaacaacgactcccaggataagcgagctgcatgagctgccccggcctccagcaaatgctggtttggttggatattctggccctctggtttcaaggcggccgatgcctactgctgtatccaccacccgtgtctcacccccatcacatacggcgtcgccactcccacgaccacctgctgccatgactcgtagctactccataccttcaaacagtcaacggactcctattattaccgtgaacaaattgttggaggctaggcatagcagggagagtagcgaagtttcctcccccccagtaacacctatatcactggcagacgtttcccgcagaccaacaacagaagcagctgtttgacaagaaaaggataaaggaatccttgtgagcagttgcgcaactgaacatgttgataatcttaggaaattttgtatgtggttgactgtattctatgattccctccataatctctcgtgttccctgcgaaaggaaaaaaatgtaaataaggttccattatgttatcgccttgatatgcttgtccgaactacctcttggatatagtgtaatagtctacaagagagagtttagatatggacgctgttgattcagtggtcatctgagctaattttttggactctggtgtgtagctctaccc

SEQ ID NO: 22845 - DNA, 815 bp, Zea mays
  Clone ID: LIB3592-004-H5_FLI
ttatatttttttcgaaatcatttcatttcttgccgaatgttttctgggcactgaagctccctgagttatctgatttacttcattgagctattcgtatttcctctttgatagaagctagtaacattttggaaccctaggtaaactagtttcttttcctggatctctgaactgaaatgtggaggtcaggtcacgtttatgcatacaattcttcatatggtggtagaattatcaattgttggtcgcgaagctttggaaaaagagcaagttattctagaacagtatgagagagcagggtttgttatgtttgcttgtatggcatctgtgcttttctttctcttggtggagtcaaagtactaatatgtccaaattcataattactgaagtgcgtattagttgtacttatgctgcatagtactgtggcaatagccaaacaatgagactgaaagtggtactgtaaatgcaacaaaccaagtaggggaaattgtggtaatagtagacaactatgcagggcaggccgttccaaaatgacaagtggtcggtgtttgtaaaagtagcctgggatctaggtctttccttcatatggaactgcaagcttcaaacatcttgttttcttatatatgcagtccatatggatcattcattcaaatggtaaatatgatgagcaatcatagttctttgaagtgaaactatagttttactctttttcatatacattgtttgaaccattcctgccttttttttttggggagataaagagcacactacagtacgatcattttagacggcttgccgacgaaaatagatcatatgatgct

SEQ ID NO: 22846 - DNA, 1156 bp, Zea mays
  Clone ID: LIB3592-005-A1_FLI
cgatctccatctcgaccgtcgctcaccgggaagctacgctacgacgaagcatggcgtccgtcaccgcccgcgccccggtcgcggccctgcgcccgtcggcgtctctcaagtcgtcgtcgtcgtcggcggcggccttccttggccactctagccgcctcggccgcactgctaccgcgtcgccgacgaggcgcagcctaaaggcggaggccaagggcgagtggctcccgggccttccctcccccgcctacctcgacggcaggtcagtagtgtttcttttcctgattaactctggccagcgacgccgactgacacgcacccatggccatgtcagcctgccgggtgacaatggcttcgacccgttgggcctggcggaggacccggagaacctgaggtggtacgtgcaggcggagctggtgaacgggcggtgggcgatgctgggcgtggccgggatgctgatcccggaggtgctgaccaaggccgggctgatcaacgcgccgcagtggtacgacgccggcaagtcggagtacttcgcgtcgtcgtcgacgctgttcgtgatcgagttcatcctgtttcactacgtggagatccggcggtggcaggacatcaagaaccccggcagcgtcaaccaggaccccatcttcaagagctacagcctgccgccgcacgagtgcggctaccccggcagcgtcttcaacccgctcaacttcgcgcccacgctcgaggccaaggagaaggagctcgccaacggtgagttgcattgcattgcaccatctcatctcaccgccgcccgccggtcgtcgtcggccacttccgatccttctctgacgttattaattctgcagggaggctggccatgctggcgttcctggccttcctgatccagcacaacgtcaccggcaaggggcccttcgacaacctgctgcagcacctgtccgacccatggcacaacaccatcatccagaccctgtcgggttgagtcgacggtccatcaggtcatgtggtccgagctgaaaggccgagactcgaagacagttcgtgtgatgcgttcttaatcgactgagggctaaggaatgtgacgtactggtatatgtacattagttgaagcggaggctataaagggtgtagagattgtttcatcagtatatatcatctgtcc

SEQ ID NO: 22847 - DNA, 796 bp, Zea mays
  Clone ID: LIB3592-005-C3_FLI
ctccgacatcctactttcgtcctcacgagtgaccgataatccgccggcgctaagatgttggtttatcaagatctcctatctggcgacgagctcctgtcggattcattcacctacaaggagctcgagaacggcgtcctgtgggaggtcgagggaaagtgggtcacccaaggtcctgttgatgtagacattggtgccaatccatccgccgagggtggtgaggacgaaagcgttgatgacacagccgtgaaggtggttgatattgttgacacattccgtctacaggagcaacctccttttgacaagaaatcatttgtctcttacattaaaaaatacatcaagaatctcactgctgtgttggagccagagaaagcggatgagttcaaaaagggtgtcgagggtgcaaccaagtttctccttagcaagctgaaggaccttcaattttttgttggtgagagcatgaaggatgatgcgtccgtggtattcgcctattacaaggatggtgccactaatccgacattcctctatttctctcatggtcttaaggagatcaagtgctaggcttgcggcgagattagttacccatgttgggtactatctatgtactattgttatatccacaactatagttgtcctggttgaattgaactcaaaagggtttgtttgagaaaaaactgtccaagattggattgcttgttaaagctctattgttattgaagtgttattgcttagttgtgatcgctgacttgtttatgacgtaagtagacgtgagtttattattagtatttctatttggact

SEQ ID NO: 22848 - DNA, 698 bp, Zea mays
  Clone ID: LIB3592-005-F2_FLI
tggaggagcagccatggcttcatcggtggccgccgcggcgagcacattcctgggcacccgcctggcggacccggcgccacagaacgggcgcatcgtggcccggttcgggttcgggtcctcctacctgggccagccgctgccgttctccatctcgacgctcatctggatcgaggtgctcgtgatcggctacatcgagttccagcgcaacgccgagctcgacccggagaagaggctgtaccccggcggctcctacttcgacccgctcggcctggcggccgaccctgagaagaaggagcggctgcagctggcggagatcaagcacgcgcggctcgccatggtcgccttcctcggcttcgccgtgcaggccgccgccaccggcaaggggccgctcaacaactgggccacccacctgagcgacccgctccacaccaccatcttcgacacgttcggagggtcctcttaagcccgccattgctccgccccgtccatcgaccggccggaacgtgttcttggattaattaactacgatctctatgagcctggggatggatcaacccgtcgtgcgtggtctcgttttgtgatgagtgggagagagaggatggcaagatcgatcctttgttaatggagatctcgttaattaggagagctaccgctgggacttggtggtttgtaatatatgatccaaccagtgatgaatc

SEQ ID NO: 22849 - DNA, 823 bp, Zea mays
  Clone ID: LIB3592-005-H2_FLI
agcagcagcagcagcataaccagagtgcagcaagccgtttcgagagacagctttaggctactgctagcagtatggcttccgctgcgcgcttcctggccgtggccgtggtcgtggcgtgcgcactcctggccagcaacaactgccacgcggcgcgccacttggccgacacggccgcggctcccgctgctgctggtgccgtccctggcctccccgccgtgccgaccttgccaacggtgcagccagtgccacaggtggcgctgccacccatgccggccgtgcccgcggtcaccgtgccccagatgacgctgccgcccatgccagcggctcccaaggtgaccgtgtcgctgccgccaatgcccgccatcccgtccgtgctgcccaagctgacgctgccaccgatgcccgctgtcgttccatccgtcgtccccaaggtggtggccttgccgccaatgccgtcggtcccgaccgtgaacgtgcccatgccgttcgcggcaccgcctccatcggcgtagagacgcatgtgctcctgcaggtttgcggtgaccgatgtacgcgagagtgatgtcattgtttgtgagtactctttgtacgtgcgtcgcgtgctttttttgtgcgtaacgttgtactattgtacgtacgtatgtatatcttttgtgtttctaccacattcatttatgctgtgtatatgtctggtcaacactcttctccttttttttgttcttctgttcaaatctgaacttttgcttccaccgtacacagggccggtcctgacattttggtagccctaaccaaaaacctatatggaagccctatatgaacgttt

SEQ ID NO: 22850 - DNA, 1878 bp, Zea mays
  Clone ID: LIB3592-006-G3_FLI
aaagaaaagactgtagctagctagccaccgcgcgcgcgcacgagtagtctagctagaatacactcgcgttcaaaacaaacacaccaagcagctgatggcggccaccgtatcttcctgcctgagcctcgtccccaccgtgcaccaccgggccggcgggttccccagtgtggcactgacgaacacgcttcagcgccgtcgtcgttctcgccgctatcttgtcgtcgcctcggcgacgagagccgaacaggaggccgcccctgtgacgatcgaggacgtggacctcagctctcatcaggccgcggccgacgacggggagctcgccgcgcggtggcgggaggtccacggcagcaacaactgggagggtctgctggaccccatcgacggcgtgctcctccaggagctcatccgctatggcgagttcgcccaggccacctacgacagcttcgactacgaccgcttctccccctactgcggcagctgcaagtacccggcgaagaccttcttccacgacgtcggcctcggcggcatcggctacgaggtcacccgctacctctacgccacctgcaacgacctcaagttccccaacttcggcatcaagacggccgccaacgccaagatgtggagcgagtccggcacgttcatcgggtacgtggccgtgtccaccgacgaggagacggcgcggctcggccgccgggacatcgccgtggcgtggcgcggcaccatcacccgcctcgagtgggtggccgatctgacggccaaccagatccccctgcgcgagacgggcgtcccctgcccggaccccgacgtgaaggtggagcgagggttcgcggcgctgtacacggacaagggcgccggctgccgcttctgccggtactcggcgcgggagcaggtgctggccgaggtgcgcaagctggtggatctgtaccacgggcggggcgagcaggtgagcgtgacggtcacgggccacagcctgggcagcgcgctggcgatgctgtgcgccttcgacatcgcggagacgcgcgcgaacgtgtcgccgggcgacagggtggcgccggtgtgcgtgttctccttcgccggcccgcgcgtcgggaacgtcgccttccggaggcggttcgagcgggagctgggcgtgcgggcgctgcgcgtcgtgaacgtgcacgacagcgtgcccaaggtgcccggcgtgttcttcaacgagtcggcgttcccggagctcgtcctgcgggcggcggacaggctgggcctcggcggcgtgtacacgcacctgggcgtgctgctgcagctggaccacaaggtgtcgccgttcctcaaggagaccctggacctctcgtgctaccacaacctggaggcgcacctgcacctgctggacggcttccgcggctccggcgcggggttcgagccccgcgggagggaccccgcgctggtgaacaagtccaccgacttcctccgggaggaccacatggtgccgcccgtgtggtaccaggcggagaacaagggcatggtgaggacggaggacggccggtgggtgctgccgccgcggcagagggtgctcgacgaccacccggaggacactgaccatcacctccagcggctcggtctcaccgcgtgaagctcagcaatactctgatagtagcgttaattagtgcgtgtggcgttcgcgtacgtgcgcggggcagtcggttactctgttgccgcgcgcggcagctcagtggcgcgttcatgccgtgcatgatgcgggtgacgtgcgggatgggcacgtcgctgcctgagaagctcgcaccgttggcgttcgtgtggctgcagaaaggtcgtcttggattgtaattctctctacttatttttgtaaattgacccagaaaagctgctgcttgcagcgcc

SEQ ID NO: 22851 - DNA, 720 bp, Zea mays
  Clone ID: LIB3592-006-H2_FLI
atcctactttcgtcctcacgagtgaccgataatccgccggcgctaagatgttggtttatcaagatctcctatctggcgacgagctcctgtcggattcattcacctacaaggagctcgagaacggcgtcctgtgggaggtcgagggaaagtgggtcacccaaggtcctgttgatgtagacattggtgccaatccatccgccgagggtggtgaggacgaaagcgttgatgacacagccgtgaaggtggttgatattgttgacacattccgtctacaggagcaacctccttttgacaagaaatcatttgtctcttacattaaaaaatacatcaagaatctcactgctgtgttggagccagagaaagcggatgagttcaaaaagggtgtcgagggtgcaaccaagtttctccttagcaagctgaaggaccttcaattttttgttggtgagagcatgaaggatgatgcgtccgtggtattcgcctattacaaggatggtgccactaatccgacattcctctatttctctcatggtcttaaggagatcaagtgctaggcttgcggcgagattagttacccatgttgggtactatctatgtactattgttatatccacaactatagttgtcctggttgaattgaactcaaaagggtttgtttgagaaaaaactgtccaagattggattgcttgttaaagctctattgttattgaagtgttattgctt

SEQ ID NO: 22852 - DNA, 1208 bp, Zea mays
  Clone ID: LIB3592-007-B11_FLI
cgagctgtcttgtccccctcttggcctcttctttccggcgatgggcgccggcgtcctcctcggcgacgccgccggcctgggggcccacctcgccgtacgccgccggaggacgcgcctctaccttcgcaactgggcctccaagcccctgcgcccctcggtctggctcggcgtggccgcctgtgtttcacagaatcgcgaccgccgtggccacgtgaccaggttctccgcctccgcctcgagcggcagtgacgagcccggggagctgtccgaggatgaggcgcagagggagtgggaagcggagctgaatcgccgactgaaggaggccgaggagatggaggagttggagcgcaccgccgagcagctgcaaagccaggccgccgccgaggcccccgaggagtcggaggaggagaagcgcgagcgtgtccgccgcgagctccagaaggtagcgaaggagcaagcggagaggagggagacggcgaagcaaatgtttgagttgggtcaaaaggcgtacgggaaaggaatgtatggacgatcaattgaattcttggaggctgcgctcactatcatacgtccctcctctctactcggtggcgagatccaaatttggcttgcaatggcatatgaagccaataggaggcacaaggattgcattgcattgtacaaagagttggagagtagccaccccatgatcaacatcaggcgccaggcagctgagcttagatacattttagaggcacccaagttgaagatatcaaatgacgaggtggtcacaataccacaaattgggagcagctgggattggtatgctggaacatggagtgacaaaatcaaggaacaagaggacaagaaaaggaagatgagtgctgctagcaaccaagttcaaccttctccaaacatctttggagacctctctttcttgcgaccgccaaatgaatggaagaagagtgcatgggtggttgttaccttgtggatccttttgataggaacagcaatctatctgcaatcatgaatggctcctgcagctctgaaacaagccattcacatctctgcgaggcactggtccatggttcaacagaacccagagatgtcgctaatatggccgtgtctcagactgttgcatttgttgtttttttttgctgcagtgtaaatactaactactgtaactagcaatacaagcagatgccatctagttcaattgattagaaatc

SEQ ID NO: 22853 - DNA, 553 bp, Zea mays
  Clone ID: LIB3592-007-D2_FLI
cccgcgcagaccgcagagagaagagagcgaggcagcctaggaggagcaaccgcgtgagtcgatgaaggcagcggtggccgcggtcgtcgtcggcggcggaggaggcgacgaatggaggtgccggaagcaccctgccgcgagatccggcggcggggtgtgcccccactgcctccgggaccgcctcctccggctctgccccaactgcgcgcacgtgcggccctgcgcctgcgccgcggcgtgcgcctcgccgtcctcctcctcctcggcctccggcgacgcggtcggccgcgtccacagcctcatcgagcgggagcaccggatcgcgcgctccaggtccgtggccacgggctcctccgccgcgctcgccgccccctcggcggcgaccgcgtccgggggcggcaggcggaaggcgcgggtctgggggtggccgccgttctggaagcccgcggcgcgggaggggggcgcggagccaggggaggaggaggacgacgacgaggggatggggctgccgcgctcgagctccgtgtccgccacagcggtggaggccaagagc

SEQ ID NO: 22854 - DNA, 1226 bp, Zea mays
  Clone ID: LIB3592-011-C12_FLI
gcgccttcccctgctccctcttatcgccttcgcgctctaaaatggcctcacactccgccacacagtaaacaaaacgacgggcccactccccgacggctgacgccctcccacggccccttccatgaggcagctgcacctctcgccgcagctctccccctccccggtcctctcctctcacttctcgccgccgccggcggaggccttgtcctggcggcggcggctgcaccggggacgggccttccaaccgccgctctcctcgctgcgggatcccaacaaggccacgctccgcaaggcctcgtccaacgtccccttccgcctcggcggtggcgggagcggcagccccaaggaccgccgccccgccgacgacgacaaggaggaggaggaggccgagggcgagggcggcgcaggagcactcacggggacgctggtcgcaggagcgctactggttggtttcgtaggggggtttggggcggccggatacgtgtacaaggaccagatcaacactttcctcacgcagttctcagggttcattgacggctatggtccagccggatatgctctgttcgtacttgtatatgcaggattggaggttctcgctattcccgcaatacctttaaccatgtcagctggtctattatttggtagtgtgaccggtacaattattgtttcaatcagtggaacactagctgcagcggtggccttccttattgctagatacttcgccagagagagaattcttaaattggttgaaggaaataagaagtttctggcaattgataaagcaataggtgaaaatggattcaaggttgtcactttgcttcgtttgagtcccctgttacctttctcccttgggaactatctatatggcctgacttcagtgaagttcttgccatatgtcttgggcagttggttgggaatgcttccaggttcatgggcttacgtcagcgctggtgcattcgggcgagctataattcaagaggagtcggaaattggttggggaggaaatggacagctatggacattgagtgttgggttattgtttacggccatggctgccgcttatgtaacaaggctcgcaaaggatgctgtaaaggagatcgatgactagaatagtaggattctctagtagaaagggccctctggagtctgatagtatactagcacatcgtacatcactggcacctttggtgcaatcaaatctaatagaaattcagagcaattttctg

SEQ ID NO: 22855 - DNA, 635 bp, Zea mays
  Clone ID: LIB3592-011-E1_FLI
ccactccgcgctagctgaggacggtacagcggcacagaggtgcgacgtacgacgacgacgacgcaggcgccacacatggcatcccagctctccgccgccgtgccccggttccacggcctccggggctacgccgcgcccaggtccgcggtggcagcgctgccgtccgtgagggtgggcaggaagaggtcgtcgtcgcagggcatccgctgcgactacatcggctccgccaccaacctgatcatggtgacgacgacgacgctgatgctgttcgcggggcggttcgggctggcgccgtccgcgaaccgcaaggcgacggcggggctgaagctggaggcgcgcgactccggcctgcagacgggtgaccccgccgggttcaccctcgccgacacgctggcctgcggcgccgtcggccacatcctcggcgtcggcatcgtgctcgggctcaagaacaccggcgccctcgaccagatcatcggctagatccctacgtcgccgttgttaagatcagactcagcagcctcgatcgcgccgccggccggcaggtgcaggtggtgactttgtaacgtgtgtgcgtgcgtacgtgtacattgcatccatcttggttccaatggacatatagctcctgttgctcctct

SEQ ID NO: 22856 - DNA, 797 bp, Zea mays
  Clone ID: LIB3592-011-F5_FLI
ctccggcctcggctcctcgagcaagctgccatggctgccgccgcgctgagggagcaactcaacgctctcctctcctccatgttcgcctcggtgagtccggtcgctctctgttcccgtgctgattgatcgaattgggatgaaggatttagcgatttttttgtgtgtctttatatgtcgcggttgccgtgtagggtctggtggacgagcagttccagcagctgcagatgctgcaggaagacgggggcacgccgggcttcgtcgccgaggtcgtcaccctcttctgcgacgacgccgacaggatcatctccgagctcgccgctctgcttgaccagcccatcgtggactttgataaggtggacgcctacgtgcatcagctcaaagggagcagcgccagtgttggcgctcagaaagtgaagtttacttgcatgcagttccgtcagttatgtcaggataagaacagagacgggtgcatcatggcattggctgttgtgagaaatgagttctatgatctgcgcaataaattccagactatgcttcagcttgagcagcaaatccaggctcaacaataaatcgaagcagaaagcgtagctgcatgtggcctcacatgataagtgtatctttaaagatgtagaccatgttctctgtgttcctacaattgtgacaaaatcatcgtcgttgaggtcggctcacatgcatgtaactgttagctataacaattattgtctaacgttgtccttgttactccacccgtttgtgttggattgccatcgaccatcatatgaaaactttttttttcc

SEQ ID NO: 22857 - DNA, 847 bp, Zea mays
  Clone ID: LIB3592-011-H6_FLI
gcgggggcggcaagcaaccacgggcggagctcggagcgtcctcctcctcccgtctataaattcccctccttttcttcctccatatataggggccatcagatccaagaagagggaagagcaccaaggaccttcggcgcccgttcaggatccacatcttcccgagcgagttcttggttgacctcttcctcttcggaccacctccaaggctcttggtgtagcttgccactctcaccaatcaagttttcatgtctgatctcgacattcagatcccaactgccttcgatcccttcgctgaggccaatgctggggactctggtgcggcagcagggtcaaaggactacgtacacgtgcgcatccagcagcgtaatggtcgcaagagcctgactaccgtccagggattgaagaaggagttcagctacagcaagatcctcaaagatctcaagaaagagttctgctgcaatggtacagtggtccaggacccagaacttggacaggtcattcagctccagggtgatcagaggaagaacgtctcgaatttcctcgtccaggccggcattgtgaagaaggagcacatcaagattcatggtttctgagcaaccgccgggtccatagcaaaccaaccctgcatgcagggccagcttattatatataatatctgaggtggagcatatctatctggctgtgtactacaagcaggcctagtacgccgcctgcgcgttcctcctattacacataacacatatagccccctccctgcgtgtatgcttgttgccgtcgtgtcgaatcttgtactacgaggctccgtcgaacctcgatggcttgcttctttatcagaacatgtttgaat

SEQ ID NO: 22858 - DNA, 639 bp, Zea mays
  Clone ID: LIB3592-012-A8_FLI
ccactccgcgctagctgaggacggtacagcggcacagaggtgcgacgtacgacgacgacgacgcaggcgccacacatggcatcccagctctccgccgccgtgccccggttccacggcctccggggctacgccgcgcccaggtccgcggtggcagcgctgccgtccgtgagggtgggcaggaagaggtcgtcgtcgcagggcatccgctgcgactacatcggctccgccaccaacctgatcatggtgacgacgacgacgctgatgctgttcgcggggcggttcgggctggcgccgtcggcgaaccgcaaggcgacggcggggctgaagctggaggcgcgcgactccggcctgcagacgggtgaccccgccgggttcaccctcgccgacacgctggcctgcggcgccgtcggccacatcctcggcgtcggcatcgtgctcgggctcaagaacaccggcgccctcgaccagatcatcggctagatccctacgtcgtcgttgttaagatcagactcagcagcctcgatcgcgccgccggccggcaggtgcctgcaggtggtgactttgtaacgtgtgtgcgtgcgtacgtgtacattgcatccatcttggttccaatggacatatagctcctgttgctcctct

SEQ ID NO: 22859 - DNA, 1587 bp, Zea mays
  Clone ID: LIB3592-012-B10_FLI
aggaggaagaattcgagtccaagtcttggagctctcgctttaggtgaagtggatctgacctactgtaggggaaagagcaaagtacattatcttgtacaaatgtgcattacgctacctttatcataaaccaaatcatctctgtttctgggaacagcaaccagtaatttcccatgcaacctcttggttgatggatgttcttcctgttgggtcagaaagagaaagtcaaacagatagtcaccctttactcatggagcatgcgattggcatcccaaggcatgatgttgcttctacttcgacacctcatcgagacaataatgatggcatggatcaactgccccgtgattcagaaagttcttctggaacaactgatgcatcttactctccgaatgctcctctagcaaggagagatgataatcgccttcggcgtcagcaaagtctaaattctggcttctggatatcaattgaactagctgtaaatcttagccagattatagctgctatctgtgttctgtctgtgtcaaagaatgaacatcctcatgctccattgtttgagtgggtcattggttatacaataggctgcattgcaactcttcctcatctatactggcgctatctccagcgcaaccagctggccactgtgcaagggtcaaatcagaactacgttccagacaacagctttgagagtagttcttttactgggatttcgccccctcctgtgtctgaagctggtgttgtaactgtatcaaatggagtcttgagaaacaacgtggttaccacaaatctgagggcccaagcttttgctgatcacttcaagatggcgctggactgtttcttcgctgtatggtttgttgtgggaaatgtgtgggtgttcggtggacattcttccgcccatgacgcacctaacctgtacaggttgtgcatagccttcctcactttcagctgcattggctatgcgatgcccttcatcctctgcgcgctgatatgctgctgcttaccctgcataatctccctgatgggcttccgggaagatctggacgaaaacagaggtgctacttcggatgcgatcaacgccctgggcacatacaggttcaggtcaaagaagccccgtaacggggaggcaaacgaaggtagcggtggagtctttgctcctggaacggacaaggaacgcgctgtttctgctgaagacgccgtttgctgtatctgcttggcgaggtacgtggataacgatgatctccggttgctcccttgcgggcacttcttccacaaggactgtgtcgacaaatggctcaagataaatgcgctgtgcccactctgcaaagctgagatcgacgtcgtcccgaggaccgctcctccagccattggctttgggcgccgcgacagccacaggagggtaggaaacgacattgaatcacaacggcttccatgatgtatagtgagacagcaacttgccttgggcgtgtgtgtggcttccagaagagcaccttgtaaattatatagtgagagatagaaagagattatgtcatggaccaacgagtccttacatgatccagcaagtaatcgcctgactgaaaatatgtcgttgttgtc

SEQ ID NO: 22860 - DNA, 913 bp, Zea mays
  Clone ID: LIB3592-012-D3_FLI
tgagtgaacaccagccgtattgtcccgaccccgaccgatcctcgcctgctgcagccatggcgacctccgcggcgctctccaccgccgccaatcccacccagctctaccggtcccgcgctttgctgggcaagccggtgaaggggcttggcctgagcatgggccgcgagcgcgcccagcggagcattgtgtgccaggcggcgagcagcatctccgccgaccgcgtccccgacatggagaagcggaagctgatgaacctcctcctcctcggcgccatctcgttgcccaccgtcggcatggtcgtcccctacggcgccttcttcgtccctgccggctccgggaacgccggcggcgggacctacgcgaaggacaagctgggcaacgacatcacggtggaggcgtggctcaacacgcacggtcccaacgaccgcacgctcgcgcaggggctcaagggtgaccccacgtacctggtggtggagcaggacaagacgctggccacctacgggatcaacgccgtgtgcactcacctcggctgcgtcgtgccgtggaacggcgccgagaacaagttcatctgcccatgccacggatcccagtacaacaaccagggcaaggtggtccgtggaccggcgcctctgtcgctggccctggttcacgccgacgtcgacgacggcaaggtcctcttcgtcccgtgggtggagaccgacttcaggaccggcgaggacccgtggtggaaggcatgaggatgatccgaaaccagcggtgctcagtgctcacacatgagacctacgtatgcctccgttccttgtgatgaggaaatatgcttgcgttcgttctccgtgggcgttgttcctacaaattcacttgctttctgtctctctctctatatacacactgtataaaacaagaacagctgttt

SEQ ID NO: 22861 - DNA, 1055 bp, Zea mays
  Clone ID: LIB3592-013-B10_FLI
caacctcagctagtcagctccgccgcttttgctttctctctccaggctctcggcttcgtccacaagctacagccgcgcgctcctccttgacccggcctgaccccgctagttcgccgcctgccgtctgccgccccagcatggccgccgcgtcgtccgccacctccgtccacgacttcaccgtcaaggattcgagcggcaaggacgttgacctcagcgtctacagggggaaggttcttctcatcgttaacgtcgcatcccaatggtatgagccatttgtccctccttgatatagaatattagtttttatctgtgctacttatttcaccgtcagagacatagacatcttttgtttacgctggatagaaaacattattgctgtacactgctaatcgctgcactgttttcgattgtttcagtggcttaaccaactccaactacactcagcaggcccagctctatgagaagtacaagaaccaaggcttgttcttgattcattgctcttgtatattcttagggttgtagtgcttatctggccttatgcaatattggcttatctttatccaactatcggttgttcaccaatttaaacaattccagttgttggggatgctaattgctaagtataattgtcaatttgtgatatatatatgcaggctttgaaatcctcgctttcccgtgcaaccagtttggtgggcaggagcctggtaccaacgaggagattgcccagtttgcctgcacacgcttcaaggctgactaccccatctttgacaaggttgatgtcaatggtaacaatgctgcgcccatctacaagtttctgaaatctagcaagggtggccttttcggcgacagcatcaagtggaacttttccaagttcttggttgacaaggaggggcgtgttgtggatcgctatgctccaaccacttcacctctgagcattgagaaggatatcaagaagctgcttgggagctcttaaacgatatctggctgcaaaactgtagaaaaaactgtatgaacattgctctgagagctgaagtatataacaatcttgtcttaat

SEQ ID NO: 22862 - DNA, 917 bp, Zea mays
  Clone ID: LIB3592-013-B2_FLI
cgcgcgacaacgccgatggtgttcttccttccccggcacccgcaacccgccagctccgcgcgagccgccggcgggatacccctcccccgcgcccccgacaactccgcgcgagccgccactgcttttactaatccaggagaaacactgctggagatcaagaaatccttccgcgacggcggcaacgcgctgtacgattggtccggcgacggcgcgtcgccgggctactgctcgtggcgcggcgtgctatgcgacaacgtcaccttcgctgtcgcggcgctcaacctctctgggctcaatctcgagggtgaaatctcagcggccatcgggagtctgcaacgtcttgtctcaatcgatttgaagtcgaatggactctctggacagatccccgatgagattggtgattgttccttgcttgaaactttggatttgtcatctaacaatctagaaggagacataccattctccatgtccaagctgaagcaccttgagaacttgattttgaagaacaacaaactggtgggagtgatcccatcgacactctctcaacttccaaatttgaagatattatgtgaagaccaagtaggagaacaactcatggggtgtaagcagattttctagaagaggagagcagcacttgatgactttgataggttcaaagtcatgctggcaaagaggggtggtgctatcaggcaagagctcgctaagttgaagaagacacccatgacttaatggttatcttttagtggatgtcatgttagagtttttggttctaagttggatcagcaattcgattgagtgtcgataaagacagaagtactaatatgttccctgtgaatacattttaaactttatcaagcatgggtgtgctctagatattttatcgtgaatgatatataatatataaggtagcttgcgtc

SEQ ID NO: 22863 - DNA, 1318 bp, Zea mays
  Clone ID: LIB3592-013-B8_FLI
aaaggccgcgcggctgttggataaccaaggcgtcggaggatttgcctgccgtgtagttcttcctcgttggcacccggctccgcactggtaagaaatccatggccaaattctcctttaacgacgccgatgaagaccctccaaccttctcttccgagggtgaaaagagaaagcgcgatgacggcccaggcgaagcggcggcaagcggaggaccctctaaggcccgaattctgacggtcgagggcgaagagcaggatggaggtgcggtggtaggggcggggagggctgaagggaacggcagcaagggggtggagacggtagttggcggagaggctgacgggattagtgtgcgcatcgacccggatgtgctcgattgctccatctgcttcgatcccctccaaccgcccctctaccagtgccaaaatggccatgtagcgtgcttttcctgctggtctaggctcaccaacaaatgccacatttgttctagtgatgctaactttgtaagaaacattgcactggagaaagttgttgagtcagttaagtcatcctgctcatatgccaaatggggctgtaacaagttggtcagctatgcatgcagaaacgctcatgaagaatcctgcctttttgctccatcgatgtgtcctattcctggttgtgggtacagaggatttactggatggtggtcaggacatttccttacaaaccataatagtgatgggctgcgcttctcatatggtcagtgttttgatgtgagtttggaaatgtcagttccttttctggttcttctagcagaggatgatcacctattcattttcatcaacaagaacgtgattccctttggccatgcgctttcagtgtgttgccttaggactggcaatctgaattggaatttcttatacgaaatgagagcaactagtaaaggaaacactaaaaacagtctgcaattgaaggcttctgtcacaaatacaagggagtggcgaggtctcaatcctacagaagttttccttttggttccatatgccttcagcaaatctagcaaacttacactgaatgtctctattgagagggttgctgatgtgaagtgaatatctgcagtttgtaatgtgttgtaaaatgtaaaaaaggtggcagtgtaagtttgtctttagaaactggttttccactgaggcatctctgacccatttggtttgctaaacccttgactctattcttgtgattcagatgatgccatcaaggtttgtaactgtatgtgtatactcccatgtactaaaatctgtaactgagatgcttgacgtaggaactatatgaaatattcaatttg

SEQ ID NO: 22864 - DNA, 1086 bp, Zea mays
  Clone ID: LIB3592-013-H2_FLI
ccgcctgccgtagtgctgctcccggccctccctctaattgctcttgccgctttatgtatttgccgcgcgcggcgacagagaatatacacgagtatatacagtagccgccgccggtggagtctctatctggcagccggccggtcggtcggtactctgctctagaagctagagagatactactctgcaggctagctagctagctagaggtagtagaagaggccggcccggcccgattgaagaataacatagagctgtcagctgctgagcgacgacggcgatggtgctctacttcaaggcgcgtccggacgccggcgactacaccatctacatgggcgccgacaagaacgagaacgaggagctcatcaaatacggcctccccgaggacgtctggttccatgtggacaaggtatcctcggcacacgtctacctgaggctaaagaaaggcgagacgatacacaccatcagcgaggccctcctggaggactgtgcgcagctcgtcaaggctcactccattcaagggaacaagatgaacaacgtcgaggtgatctacacgccctgggctaatctcaagaagtccccatccatggatgtcggccaggttggcttccacaacccgcggatggtacatgtgcttatagtcgagaagcgtgtcaacgagatcatcaacaggctgaataaaacccgggtagaacgccgggcgccagacttgaaagcggagaaagaggcatcaaatgcagcagaaaaggccgagaggaagatgcagctgaaagagaagaaacggaaggaggagatggaaaggctggagaaggagaaatgggcggagatacggagctacaagggcctcatggtggccgagaagatgacgtccaaccgccagatcgcctccgccggcaagtccatgcaggaaatggaggatgagttcgtctgaagacgactgtcatcgtcactggagtctacatctctctctctctctctctctgtctgtgtgtgtgttgtgtgtgtacgtacatatgtccatgctcgcgtgataacgacgagtcgaagcaaccaaaagatctcatggatcgattattcgatccgttcctg

SEQ ID NO: 22865 - DNA, 1678 bp, Zea mays
  Clone ID: LIB3592-013-H7_FLI
ctctccctcggctcggtccctctccggctctccctcacggcctcgcccactgcgccttcgaggagctccgaatcccgatcgcctcggtccccgcgagctcacatggtgggggcgcgcaccagaggctagggttcccagttcccatcattctcctgctgattaaaaccgtggggttttggagagcctgaggctgtggcggcggcaggaatgaacggggaggtggaatgcagcgtgtgccatgcgaaggtgccggtgccgccgccggtgtcgaaagcgtacgacagccaccggagcactgtgtcgtcgcggcaacgtgcgctaaacgtgctcctcgtctccggcgactgcgtccttgccggcctccagcctatattagtgtacatctcaaaagtggatgggaaattcaaatttagcccaatcagcgtgaatttcttgacagagattacaaaaattatgtttaccattgtaatgctattcatccaggctagacgtctaaaggtgggagacaagccactttttacagtttcaatatttatgcaggctgctcgcaataatgttcttctttcagtacctgcttttctctatgctatcaacaactatttgaagttcataatgcagttatattttaatcctgctagcgtgaaaatgctgagtaatctcaaggttctggtaatcgcagtgcttcttaagatgataatgaggaggcgattttccgtaatccagtgggaggcccttgcccttttgttaatcggaatatctgttaatcagctgaaatcattgccagaaggttctagtgtgctaggtcttcctgttgcagctggagcctacctatatacattgttttttgtaacagttcccgcattggcttcagtttacaacgaaaaggctcttaaaagccagtttgataccagtatttaccttcagaacttgtttctgtatggttatggtgcgatatttaactttattgggcttgttgtcactgctatcatccaagggcccagtagttttaacattctagaaggccactcaaaggccacgatgtttcttatctgcaacaatgctgcacagggcatattatcatcatttttcttcaagtatgcagatacaattttgaagaagtactcatcaacaattgcgactatcttcaccggagtagcctctgctgtgctgtttggccacacactgacgataaattttgttcttggaatttcaatagtaatcatatctatgcatcagtatctttctaaccaaattaaggacgaagtgcctagcagcaaagttgaaatggctgaagctcatgatcacagcagaaaagaacctagttatgtcaacgtgcctgattcaggggcaagtgagtctaaacaccgccatggatctgacgagaggcagccacttcttcccgtatgattttgtagaagaggcgcactgtttcctcaacagagcagcatgtaaagagagtatttttagcgggtatttgacctaattgtctctgaagcaacattggtgccatgctgttggcggggtaaagtatatgcatattcggcggcagtgacgagcttcgtgaagtacactaatagagtaatggtctttggatgaatgagtcgatacctttagcctaatgggtggtaaaactagtgtgataagatcagcgaggaataaagtccccaccattttttcc

SEQ ID NO: 22866 - DNA, 841 bp, Zea mays
  Clone ID: LIB3592-014-A11_FLI
atcctactttcgtcctcacgagtgaccgataatccgccggcgctaagatgttggtttatcaagatctcctatctggcgacgagctcctgtcggattcattcacctacaaggagctcgagaacggcgtcctgtgggaggtcgagggaaagtgggtcacccaaggtcctgttgatgtagacattggtgccaatccatccgccgagggtggtgaggacgaaagcgttgatgacacagccgtgaaggtggttgatattgttgacacattccgtctacaggagcaacctccttttgacaagaaatcatttgtctcttacattaaaaaatacatcaagaatctcactgctgtgttggagccagagaaagcggatgagttcaaaaagggtgtcgagggtgcaaccaagtttctccttagcaagctgaaggaccttcaattttttgttggtgagagcatgaaggatgatgcgtccgtggtattcgcctattacaaggatggtgccactaatccgacattcctctatttctctcatggtcttaaggagatcaagtgctaggcttgcggcgagattagttacccatgttgggtactatctatgtactattgttatatccacaactatagttgtcctggttgaattgaactcaaaagggtttgtttgagaaaaaactgtccaagattggattgcttgttaaagctctattgttattgaagtgttattgcttagttgtgatcgctgacttgtttatgacgtaagtagacgtgagtttattattagtatttctatttggactaaagaattggatgagttaattgttaatagataattattatctgtagagatcc

SEQ ID NO: 22867 - DNA, 718 bp, Zea mays
  Clone ID: LIB3592-014-D5_FLI
ccagtgcaaacaagctcgctcgcaagcgcaacccacccacgtctacggtctaccacacgaagcatcgtagccagccagccagctaaacccacaccacacatggccgggatcgtggtggtgttcgacttcgacaagacgatcatcgacgtggacagcgacaactgggtggtggacagcctcggcctcaccgacctgttcgagcgcctcctccccaccacgccctggaacacgctcggctgcgacctgcgcgtgctcagcgacgccaacgccttcttcatccacaccgtcctggaccaccacggcctgctcgcctgcttctcccaggtcaacaccaaccccagccgcgtcgacgcccacggccgactccgcatcgggccctgccacgacccgcgcgcgacgccgcgctgccgccgccgccgccgccgccgctcgactgcaagctcgagtccatgcccgtcgccgcgcaggacggtatgcccatcgtgccgctgggcggcaagaactgatactgtctctggttcagaattgaggtcgccggttagagctccaacaaattccgggcgaggcacggcgtaccgttagtagcgtttcactaattttgtgcgtctgtggtgtatccgtcctgatcgagtctgttgctgctgaattggttacgactcgttgtatcttactaaaaaaggtaaagttaataatggattagacatggtactatttgttt

SEQ ID NO: 22868 - DNA, 1319 bp, Zea mays
  Clone ID: LIB3592-014-H1_FLI
ccagcacagattcgttccacgcctacctcctgccctcgcccgtgctctcagatctcgcgcgcgccccgcaaagggtaactttgagccatgggcacagttgtggatgctccagcagttgtggctgaagaggtggtcctggaagtggaaaaggcacacagtgtgccaacattgtggaacactttggattcacccatcttagtgctggagatcttttgcgtgcagagattaaatctggctctgagaatggaaccatgattgaaaacatgataaaggagggaaagattgttccatcagaggtgactataaagctgttgcaggaggcaatgataaaaaatgaaaatgacaaattcctgatcgacggatttccaaggaatgaggagaatcgtgcagcatttgagaatgttaccaaaatttctcctgcatttgtgctattctttgactgttctgagaaagagatggagaaacgtctcttgggacgcaatcagggaagagttgatgataacattgaaactatcaaaaaaaggttcaaaacctttgttgagtcaagtttgcctgtcattgagcattacaactcaagggacaaggttaaaaagattgatgctgcaaaaccaattcctgaggtgtttgaagacgtcaaaaccatttttgccccatatgctccaaaggtaattaggtttcacttttttgagcaaatgtagcatttccagatggatctcttaatctcatatttgatttagcactatctgcattgcattgaatatgttgttttccatctttgaatgtacgtctgcaaacattaaattatgttcacctttaaaaacctttgtccattatttttgcatgactaaaaatctaaaatactagtacaaatatactcatcactttgccttctctatcaggctgaatagagcagtctaaaagggacatgataaaggtgtcataggtatactccctctatattgcacctgtcctaaatgatttcgtctggttcttgccaccataagtgagattctcatagaatcttcataatcattttgcaggcaacacacaaacatatatgtgattatgaacccttcaatatagaacagaagttttggctcatatgagctaccagcgcatcagtaggcaattcgatttgttatcagcaatatttagatctgattctcaggggtcctgctagagtaacattttaccactgttgtttatgtatatcctttgatgttgtgttgtaccaatgtggaatttactttagggctagtttggacatggaaatacaggggatccatcaggcctgaggcaggaatccccttgttatttat

SEQ ID NO: 22869 - DNA, 1200 bp, Zea mays
  Clone ID: LIB3592-035-C3_FLI
cgtcttcgcttccactccccacgttccccgcctgcttcctccaggccccggccagatccgcgcgcccgcggggaagagggcctcctctcctccctcctcccttggctcgcgctctggtcgaggaggcggaggccggtgccggcgggcgggcggggaggtaggtagcagcttgcggttgcgggagggaagctgcgcgcgctaggctgccatggcggtggagaagacgctgcccggcgcgagtgcggggaggaccgtgctggtcacgggcggggcgggctacatcggtagccacgccgtgctgcagctcctcctcgcgggcttccgcgccgtcgtcatcgacaacctcaacaactcctccgagctggccgtccgccgcgtcgccgcgctcgcgggggaccactcccgcaacctctctttccacaagattgatctccgtgacaagggagcactggaaatggtttttgcttctacaagatttgaagctgtcattcacttcgctggattgaaagctgtgggtgaaagcgtacagaagccattactttattatgacaacaacgtcattggcacgataaatcttctagaagttatgtctgttcacggttgcaagaagttggtgttctcatcatcagctgcagtttatggatcacccaaaaactcaccctgcacagaaaattttcctcttactccaaacaatccatatggcaaaacaaagctcgttgttgaagatatttgccgggatatctaccgttcagatcctgaatggaagatcattttacttaggtacttcaatccagttggtgctcatcctagtggatatcttggcgaggacccacgaggaattcccaacaatcttatgccctatgttcagcaagttgcggttggtaggaggccagctctaacagttttaggaaatgactatgcaacaagagatgggactggggtccgagattacatccatgtggttgaccttgctgacggacatattgctgcattgcagaagctttttgagaactctagcatagggtgtgaagcgtacaaccttggaaccggaagaggtacatctgtgctggagattgttaaagcatttgagaaggcttctgggaagaaaatacctctgatttttggtgaaagacgcccaggtgatgcagagattctgttttcagagactactaaagcagagagggagcttaactggaaagc

SEQ ID NO: 22870 - DNA, 367 bp, Zea mays
  Clone ID: LIB3592-035-D3_FLI
caaagctaggcctaacttgaaggtgggcatttgtggagaacacggtggagagccttcctctgtggccttcttcgcgaaggctgggctggattacgtttcttgctcccctttcagggttccgattgctaggctagctgcagctcaggtgcttgtctgaggctgcctcctcattggcaaccggattgcctgctgctggtggatgtggtgatcaacagtattattacagagccatgctatgtgaacattactagtagcagtgctcataaaagctacaatcccatgtcctttttttccccagtcatgtaaaacttccaaactgctccatggttcaaaactctgttcttcaatacatcatcaattatcgatt

SEQ ID NO: 22871 - DNA, 1643 bp, Zea mays
  Clone ID: LIB3592-035-F10_FLI
taaacatccgatccgaccatggcggcagacgcacttcggggccttctccccggcgtttacgccgtgctgatggtaatcgccgtcgcaagcgctgcctccagcgacgtgtcctcggtggtcgtcgggctcgccaaatgcgccgactgcaccaggaagaacttgaaggccgaggcggcattcaagggtcttgaggtggcgatcaagtgcaagaacagcaaaggcgagtacgagagcaaggccatgggcaagattgatggctctggcgccttcagcatcccacttagcacggacctccacggcgctgactgcgttgcacagctccacagcgctgcggggaacccgtgccccggtcaagaaccttccagaattgtgccacaatcgtcaaagggcaacttcgtcgtggtccctggaaagacagactacccatcgaaggaatgtgcgtccgcaaccctgtgcgggtcgatcaagaagcacctactagaccatttccacaagaaacctgtgccaccaaagccaaagccagaacctaagccagagccggagccgaagccagagaaccacccacctacaccaacatacggatcctcaactccgatctaccatcctccatccaggcagttgtttgacaagaaacacatgtttgatcacttccacaagcaccacgactaccatcacttctttgaccacttccacaagaaaccagttccaccaaagccaaaaccagaacctaagccagaaccaaaacccaagccccagccagagtaccactctccaactccaacatatgggtcgcccacaccgatctaccaccctccggctaggcatttgtttgataagaagcccttgctagatcacttccataaggaccatgactatcaccacttcttagaccacttccacaagaaacccgtgccacaaaagccaaagccagaacccaagccacagcctaagcctgagtaccaccctccgacacccacatatgtttctccaactcccatctatcacccgcccgctgagacagaaatgaagtatgacaagaagcacttctttgatcactttcacaaggaccatgactaccaccacttctttgaccacttccacaagaagcccgtgccacccaagccaaaaccggagccagagccaaagccaaagccacaacctaagccagagtacaagccccccatgcccacatacgggtctccaactcctatctaccatcctccagccaagaaagaagtggcatttgacaagaagcacttccttgatcacttccacaaagaccatgactaccaccactttttttaccactttcacaagaagcctgtgccaccgaagcctaagccggagcccaagccagagctcaaaccacaacctgagcctgagtaccacccccctacaccgacctatggatcaccgactcctatctaccaccctccggccaagcattgatcgatggagttgaatggtggtcagtgatcgacgtcgctagctaagagttgcatgtgtggtctagctagcgtggtttgcagtcccgcctttttgtttctacagaataaattatagctttatttgggtatgtatacttatttgtgtatcggttagtatcatataaatgtatgatttgagtgtgcgttgtttttaat

SEQ ID NO: 22872 - DNA, 561 bp, Zea mays
  Clone ID: LIB3592-036-G11_FLI
gttggataggctaccgccgctaggtgccgactgccgaggccctcaccggcggcgaagagcgcccgccagcaatggcagcaaggtgtagtagcctttcctcgccatccttgtcggtccatggacccctccgccgcaataaacccagcaagagactcgctccatgcctgccatcgtcgccaagaccaggagccgctgctctgagagcgcgtgctgcgaaacttcctccaggggttgaagcgcccagggtgcaaccgaagctgagcgagcccttcttggggttcacccagaccgcggagatttggaactccagggcctgcatgatcggcctcatcggcaccttcattgtggagctggtgctgaacaaggggattcttcagatgattggggtggaggtgggcaagggtctggaccttcctctttgaagggtgaccaaacagtaacattatcgtttgctggtgtattatgctggccgaaaaacatgaggggtttcacttgcttttgacttggtggctacatatgcatgttcatcatgcatgtccttggatatccggatgttacaac

SEQ ID NO: 22873 - DNA, 736 bp, Zea mays
  Clone ID: LIB3592-042-A10_FLI
gcaccggccgccacaccaccgtaccccgacccctcgacaacaatggccaccgtcctaggcagcccccgcgcgccggccttcttcttctcgccgtcctccctccgtgccgcgccggcgcccaccgccgtggcgctgcctgcggccaaggtgggcatcatgggccgtagcgccagcagcaggggcaggctgcgcgcgcaggccacctacaacgtgaagctgatcacgccggagggggaggtggagctgcaggtgcccgacgacgtgtacatcctggaccaggccgaggaggacggcatcgacctgccctactcctgccgcgcggggtcctgctcctcctgcgccggcaaggtcgtctccggctccgtggaccagtccgaccagagctacctcgacgacggccagatcgccgccggctgggtgctcacctgccacgcctaccccacctctgacgtcgtcatcgagacgcacaaggaggaggagctcaccggcgcataatcattcatgcccatccatctctatctctgtgggtcgtcgttgtgtgtaatttgagtacgcgcgtacacgtactgcttttgtttcatttgagcactgttcgtgtaagcgtcgagttgccctgccatcgtctctctctctctcgatctctactatttctgtgtgtgcgcgcttctatttttccaatgttgagttacgcatatttgtccagtaaccttgttttgcttaatcacacacagctccc

SEQ ID NO: 22874 - DNA, 590 bp, Zea mays
  Clone ID: LIB3592-042-D2_FLI
tgcgagcgacccacgtccacacgacacgaaccaccaccaccaaccagcagccgcaccacgcacccagcgcaaagcgatggcgtcgctcaccatgatggcgtccttcgccgccgtggcggtggccgcgccctcgcgccgcggcaccttcgccgtggtcaggtccgccaaggtcgaccgctgccaggagcccgccacgctagcagcaaccgaggccaggcccgccgccgacggacgccgcgccgtcatgctcgcggctgctgcggcggccgtggcagccatcggcggcgccggcgccgccatggcgggccccaagaacgggacccccgaggcgaagaagaagtacgcggccatctgcgtcaccatgcccaccgccaaggtctgccacaactgagcacgcccgcgttgcagctgcagggccggggggtggtatataattaatgtacgtgccacggtgttgttgtccctattgttggttcgagctttagatgcatgcctgacgtgaggccgcttaattgctttctgacggcctcggagctgtaagaatatcaagtgcactgcaaaactgaattcggttgaaaccgttcttattt

SEQ ID NO: 22875 - DNA, 1612 bp, Zea mays
  Clone ID: LIB3592-046-C5_FLI
tacaacttcctccagggcgaggtccccggcacccgcgcgttgcgacggttccccgcgagcgcgttcgaccacaacctcaggctctgtggcgaggttgtgaacgccgactgccgggaccaggaggggctgccgtcatccggtgctccagcgtatggaagcagcagtccggtcgtgaggccggctggcgacggcggtcgggcggcacggaagcacttgcggttcaggctggcggcgtggagcgtcgtggcgatctgcctcatcgcggcgctggtgccgttcgcagctgtgttcatcttcttgcaccacaagaagaagagccaggaggtccgtctcggtggccgtgccagtgccagtgccgcagtgacggcggcggaggacatcaaggacaaggtggaggtggagcaaggccgagggagtggcagccgcagcacggaatccggcaagggggccgagctgcagctcttccgcgctgacggggccagcttcgacctcgacgagctcttcaggtccacggcggagatgctcggcaaggggcggttggggatcacgtaccgggtggccctccaggccggccccgtcgtcgtcgtgaagcggctgcgcaacatgtcgcacgtgccgcgtagggacttcacgcacaccatgcagctcctgggcaagctccggcacgagaacgtcgtcgacctcgtcgcgtgtttctactccaaggaggagaagctggtcgtgtacgagcacgttcccgggtgcagcctcttccagctcctgcatggaaacagaggcgaggggaggacgccgctgccgtggccggcgcggctgtcgatagcgcagggcatggtgcgtgggcttgcgtacctgcacaagtccctgccgtacttccaccggccgccgcacggcaacctcaagtcgtccaacgtgctcgtcttcttctcggctcccaacggcaagcagcagaagcaggcggtgccgaagctgacggaccacggcttccacccgctgctcccgcaccacgcgcaccggctggcggcggccaagtgccccgagttcgcgcgccgcggcggcaggcggctgtcgtcccgcgccgacgtgtactgcctcgggttggtgctgctggagctggtgacggggaaggtgcccgtggaggaagacggcgacctggcggagtgggcgcgggtggcgctcagccacgagtggtccacggacatcctcgacgtggagatcctgggcgaccgggggcggcacggggacatgctccggctcacggaggtcgctctcctctgcgccgccgtcgagcccgacaggcggcccaagctgcaggacgtcatcaggatgatcgacgatatcgccggcggcgacggatcagagctggatcgccgttgagctagctccactgtccacgacggcgaagggtgtgggctggtcgacatgatcttcttgatttcagatttatttgatttctgtgtcataatcgtttcgctttcagtttagcttcccttttcaattgtaacattgcaatcgatgctccctgatcgattgccctggtgcagtcagagaaaaggatgtgaactagtgaacttcatatatgtatgtaagcacaggcagaggcccttagagttgc

SEQ ID NO: 22876 - DNA, 550 bp, Zea mays
  Clone ID: LIB3592-049-H4_FLI
ctctcgtccgcgcttgtttgttcgcgtcttctccctgtagggaactccgttacccggccccggctgtgcgtggcgtcagcacgccccgcgggcaggagggtgaggctgctgagcgtgaggtgcgagcagggagccaagggcggtggcgggctggacgtgtggctgagccgcggggcgatgctgggcttcgtcggagcggtggccgtggagctgaccaccgggaaaggcgtgcttcagaatgtgggattgaccgcgccggtgccgacgctggcgctggcgctcaccggcgcggtcggcgtcctcacggccttcctcatcttccagtccgggacgcgggactgatgggtgaattgtcaaagctcccaaaaggacatgcataaagtctgtcagagtcttgtgctgtgtatgtctatgctgttgtagttgccttgccttcacaggaagctgaggagtaacacagtgcgaaaaggataattattattttttacaaaatgtgtttacagtactcttccttgaaggactaaactgcatttatgttgaagttgtcaat

SEQ ID NO: 22877 - DNA, 730 bp, Zea mays
  Clone ID: LIB3592-051-A1_FLI
ccctccaccagagaacccgcagcgcccgccatggccgtctccgattccctcgcgcatccagggctggcgatcgtggtcatgggagtcagcggctgcggcaaatcaaccgtcgcggcaatgctcgccgaagccctgggctgcagcttcatcgaagcagacgactaccattccgaggcaaacaaagccaagatgagcgcgggcgtgccgctctccgacgccgaccgcgcgccgtggctggagtcggtgcgggacgccatccgggggcggctggacggcggcgaggacgtggccgtcagctgctcggcgctgcggctcgggtaccgggatgtgctccgcgcggccgaccgcgcctacgagccggggcgctacgccgcctgcagggtgaggttcgtgtgcctgagggcgccggcggaggtgctcgcggagagggtgctgcggaggtcggtggaaggggagcacttcatgccggcgagcctgctgcggagccagctcgacctgctgcgggtcgaccccgcggagggggtcgccgaggccgacgcgacggcgcgccccgacgacatcgtccgcgacaccgtcgccctgttcagggacgagctagcggtgtcgtccggcgtccctgcttgacttgtttctggatgcgaacgcggtgcagtttcatggtttcatcccatgatgcagtcagtattcattcatccaccattaaagaacctccgtgcagtcggttcgaatt

SEQ ID NO: 22878 - DNA, 731 bp, Zea mays
  Clone ID: LIB3592-051-A3_FLI
caccactccgcgctagctgaggacggtacagcggcacagaggtgcgacgtacgacgacgacgacgcaggcgccacacatggcatcccagctctccgccgccgtgccccggttccacggcctccggggctacgccgcgcccaggtccgcggtggcagcgctgccgtccgtgagggtgggcaggaagaggtcgtcgtcgcagggcatccgctgcgactacatcggctccgccaccaacctggtatatatgtatacatgtgaagtctgatgagtacgtacgtgaggaaaagaccgacgacgatcactgacgacggcatatgcacgcacgcagatcatggtgacgacgacgacgctgatgctgttcgcggggcggttcgggctggcgccgtcggcgaaccgcaaggcgacggcggggctgaagctggaggcgcgcgactccggcctgcagacgggtgaccccgccgggttcaccctcgccgacacgctggcctgcggcgccgtcggccacatcctcggcgtcggcatcgtgctcgggctcaagaacaccggcgccctcgaccagatcatcggctagatccctacgtcgtcgttgttaagatcagactcagcagcctcgatcgcgccgccggccggcaggtgcctgcaggtggtgactttgtaacgtgtgtgcgtgcgtacgtgtacattgcatccatcttggttccaatggacatatagctcctgttgctcctct

SEQ ID NO: 22879 - DNA, 1567 bp, Zea mays
  Clone ID: LIB3592-053-D6_FLI
tcctaatgagtcatgcataatagcagacacaggcaacagtgccccgtgagcacatgcaggatcagcagtacgacctccgactccgagctactgctcaccctctcgggctctcggcccgcccgtatgccagtctgtctctggtacactccttcatttcatcgcctagctagctactatatagtacgacctgcctgccttgctcttgccctgtgagcagcggcgtgcgatcgatcgaggcagtcgtagtaataagccaacaaacaaaccggccggaacgccatgctggaggagtacaaaccgtgtgcggccatggtggtgacgcagtgcatctacgccgctctagcgctcttgtccaaggcggcgttcaccggcggcatgagccccctggtgttcgtcgtctacaggcaggccgtcgccaccattgtactcgtccccgtcgtcatcgcggccaacaggaagaagatgaaggagatgacgacgggccttggactgacgggcttctcgctggtcttcgtcgcctcccttgtcggggcaacggtgaaccagtgcatgtactaccaaggggtgaatctgggctcgtcgtccatggcaacggccatgaccaacttgatccccgccatcaccttcgtcatggcggcatcagtcggcctagagagggtggaggccaggaggccgaggagcctggccaagatcttcggcacggccgtctgcgtgagcggcgccatggccatggctttcttcaagggcccgaagctgctcggcgacggccccaacgctctccagctcctcctccacgcgggcggcggcaggtgggtggccggcgcgctcttcctcgtgggcagcagctcctgctggtcgctctggctcatcctgcaggtgcccatctgcaagtcgtacgtggagccgctggctctgtcggcgtggatgtgcgtcctgtccacgctccagtccgcgctgctcgtctccttcctcctgccggaccccagcgcctggaggatccactcgctcttcgagctctcctgctgcgtcttctcgggcgtgttcgggtccggcgtcacgttctacctgcagtcgtggtgcatctccgtgaggggcccgctctactccgccatgttcaacccgctctgcaccgtgatcaccaccgtgttcgccgccgccgtcctccgcgaagagctgcacgtcggcagtttgctgggcgcaatcgccgtcatcgcggggctgtacgtggtgctgtggggcaaagcgggcgacgccaataagggcggggtggagccagagcaccactcggacgatctggagaagacgtcgtcagcgcggtcggatcacaattcgacggccgacgtcggcagtggcatcgccgagcccctcctggcgggcggcgatccaacggagaagtagatgggattttgctgctcctcagtgttctgtgcgtgcgcgcgcggtgttttcagggtcggtatgctagtgctactgtaacagtgccgtcccagttttgtcatgtacactagtggcagcttcaaatgactccgtgctgccgatgtgtattatccgcacaattttgttaagc

SEQ ID NO: 22880 - DNA, 1826 bp, Zea mays
  Clone ID: LIB3592-053-F11_FLI
cttcgtcttcgccggccagggctccggcatggccttcagtgagtcctccgctgtccgctcctacccatgtgcatgcaacacaggctcgatcggccctcgtcttgccttcaacgagcagctagctagttagcctgccctgtacacggcacgccccaccaacagcttcacgacttcttctaagctgttctttaaacaccttgtttaaacaccttgtctaagctagttagccggctcttttgagttcgtcaccgaatgactgaaacgaaggggcagaaaaaaaaagatgtccttttcgtcctactagctagtaccaggctttcggtaggtatttctttaatacaaggccagtgtttaatagaagctcgcagaaatgtctttttgaaaaggtcaaaagcgaggaaagcgaagccttttaggtgaaatgattagtgcaaatgacagatttagacctgtcatcatgttagagggctgcagaagatgggaatccttggcagaatcagtagtaccttctattcgcgtattacttgtgatgccacaaggcccagttcccatgtgcagatgtgctgctgctccccagaactactagcaaaaatgctccacctccactgacacgaaggcctcctgtgtcctggaaaaagaaacatgctgtagtttttataatagtatcaggaaaagaagaatgttacagacgggccagaaaaaaaaatatcagacagtgcttgtgcttgatactagtagttcaaactgctccagttaagtaggtaatgctagctatgattagtaaacaaagaacagttacagactcaacagtgacagtaaaaaaatcacagcagtaaagcagaaggcagggaaaaaaagaaaccctgaacatgtttttttttgtacagtagttgtcagtatttgactgttactcgtacctgcttgtgtccccctcgcgcaggcaagctgaccggcggcggcccgacgaccccggcgggcctgatcgcggcggcggtggcgcacgcgttcgcgctgttcgtggcggtgtctgtgggcgcgaacatctccggcgggcacgtgaaccctgccgtgaccttcggcgccttcgtgggcggcaacatcaccctgttccgggggctcctgtactgggtggcgcagctgctggggtccaccgtggcgtgcttcctgctccgcttctcgacgggcgggcaggccacgggcaccttcgggctgacgggcgtgtcggtgtgggaggcgctggtgctggagatcgtgatgaccttcgggctggtgtacacggtgtacgccacggcggtggacccgaagaagggcagcctgggcaccatcgcccccattgccatcggcttcatcgtgggggccaacatcctggtgggcggcgccttcgacggcgcgtccatgaaccccgccgtgtccttcggccccgccctcgtcagctgggagtggggctaccagtgggtgtactgggtcgggcccctcatcggcggcggcctcgccggcgtcatctacgagctgctcttcatctcccacacccacgagcagctcccctccaccgactactaaaagccgaagccgaccgacctaggggtgcgcagcgcagctagcgcatccagctctctctccccgctcgccgccgtttagtttctctcgtgcacgtgcatgcatcgtcgactgtctcaggccgccgctgcgccggcgccgctcgcatcgtttgcttccttggaccagcagtcgtcgccgtcaggctgaactgcttgtaaccgtgaattccggacccgtttgcttctgtaagatttgtgcatttgcctgagtacacctcgatctgcagc

SEQ ID NO: 22881 - DNA, 759 bp, Zea mays
  Clone ID: LIB3592-054-B12_FLI
ccgtcggtggctaccaataaatggactcccacgccacgccgcgctcctactagcacaaggttgaaaccagcgttgccgagcgagagaaacagagcgccccctgtccaagtggtcaggtccaggacaccctccacgcacgcactgatggaacccctggtgttcgtgctgctcttggtggccatgccactcagaggatcagatggcgcgtggtgcgtgtgccgcccggacgtgtccgatgcggcgctgcagaagacgctggactacgcgtgcgggcacggcgcggactgcgccgccgtgctcccgaccgggccgtgctacagccccaccactgtgcgcgcgcactgctcctacgccgccaacagctacttccagcagaacagccaggccaacggcggcgccacctgcgatttcggcggcacggccaacctcaccgacacagacccgagctctggaacttgcaaataccctgcaacaccaagcgaagcagggacaagcggcaacgccaccggcacgggcacggcaccgccaggctcgacgagtaacccagctacgacgcccagcatgggagggagcgtcacgacgacacctgtcggcgcgtttggtcccgcgcctagcaccttcagcgcggccaccgccactgccgccgcgtttggtggtcgccgtgccctcctcctcgccgtcgtctccgtcctgtctttcttggcgcgctaacttgctcgatcagaagaaatccgtagcatcgtcaccctatgtgtaatt

SEQ ID NO: 22882 - DNA, 898 bp, Zea mays
  Clone ID: LIB3592-054-F4_FLI
tccgctgccgtttcttctcgagtgtgacaatggcggctcagggatccctcgtcatgtggagggcggtcttcgcagtgctgggcttgctcatggtggccacgctggtgtacaccttggccaccgacggctcgccgttccgccttgagctgtttacgccgtggatggtggcaacactggctgatttttatgttaatgttattgcaatctcggcttgggttatctacaaggaagcaaactgggttagttctgctgtgtgggtggttctgttgttttgctttggcagtgctgtcacttgcgcttatattgttaagaaacttcttgaagtaacatctgcagggtcatcccaagatcctcttgaccttctatttatcaggcaaggtaatctatcccaaagaaagtgctcttatgttgtaattggaagggttattttcagcattttggggatattcatggctgcggttgtcacatatactgtcatcactgatggactaccttttaggaaggaattgttaacaccgtggatggcggcaaccttaattgatttctacataaatgtctttgcgatatcggtctgggttgctcacaaggaatcatcatggatatcaactaccatttggattgtcttgctgatatgctttggaagcatcacaacatgcggctacattgtcatccaacttttcaaagtatcatatcaagatccaatctaccacgtgctattgaactcccacagcaagtaccacaattaaggggacaggaggatagcaattagacaagttgttttactttgaataaaataactcatgtgctgagttctctgctaaatgaactgtaacgtgaaatcctttattgtatttctgattgaaattgcttgaacaataatctcctttgttatggtttc

SEQ ID NO: 22883 - DNA, 1028 bp, Zea mays
  Clone ID: LIB3592-054-H11_FLI
gtgttttctctaccaaattttttctccaaaatggtgagaaacagacagctgcaagactcgtcaggaaggaaaatcaccaggagaaagtgcttcctcctataatttctgactgtctagtcgcaaagtgcctgacctatgaaatgtcgaaatacaagaaacaaccaggagaggctattgcccaccggattatgggacctcgtcaccactctcaggattttattgatggtcttaatgcatgcatggatcgtaaggatgaccaatctttttcaacatttaaagagcgacttcggtatttacagaaaactgaaaatttgagggtctcgtgtggtcgatctggaattcatggatgggggctcttcgccgcaaggaatattcaggagggtcaaatggttattgagtaccgtggcgaacaagttagacggtgtgttgctgacttgagggaagcacagtaccatagagaaaaaaaggattgctatttgttcaagataagcgaagatgttgtcatcgatgctaccgacaaaggaaacatagcgcgcctaattaatcactcgtgtatgccaaactgctatgctaggatcatgaccgtcagcgatgacaggagcgagatcattctgattgccaagagagacgtctctgccggagaagagctgacgtacgactacttgtttgaccctgacgagtccgaagactgcagggttccatgcctgtgcaaggctcctaactgccgtgggtacatgaactagaagactaaccaacctcagaaatagggactaaagactaacgtgacctcagaaacagggaccaaaggctggccatttttcccggaattctaccgttagcttctcggtttatatttactggaaagtttattagttctcgtggctgcccaagttttgaaccattttgtttagatattgcgattgagggcagccacaccattgtatattctttcattgttgtaataagacaccagtataatcaagaatgctgactttgaaatggaaagaagaagaaactcaacttgatgc

SEQ ID NO: 22884 - DNA, 465 bp, Zea mays
  Clone ID: LIB3592-055-A1_FLI
ctctctcccaccccgcagccgccctagcacccgcgacgagcaggatctgcccagttgctcttgcggtagttcccccaactgtcaccatgcagaacgaggagggtaagactgtggacctctatgtccccaggaagtgctcggccacaaacaggatcatcactgccaaggaccatgcctctgtccagatcaacattggccacttggatgcgaatggcctgtatgatggtcacttcacaacgtttgctctctctgggtttgtccgtgctcagggcgacgcagacagctccttggacaggctgtggcagaagaagaaggctgatatcaagcagtagattttacatctagtttaccaagaattggacactgccttagctatgttttgaattcatgtcactatatgcaattgcagtgttgtgatttcagctggtaccttaaatctgaagatttagtatctttgttgggttc

SEQ ID NO: 22885 - DNA, 644 bp, Zea mays
  Clone ID: LIB3592-055-G2_FLI
cagcgagcgagagcagcacacactgcacgcagctagctaggagcagcagcagcggcggcgatggcggcctccatgatctcctcgtcagctctggcggtggcgcctcagggcctgccgcccctcggccgccgcgcctcctccttcgccgtcgtctgctccaagaagaagatcaagaccgacaagccctacgggattgggggtggcctgaccgtcgacgtcgacgccaacgggagaaagggcaagggcaagggcgtgtaccagttcgtcgacaagtacggcgcgaacgtcgacggatacagcccaatctacaacgaggatgactggtctcccaccggcgacgtctacgtcggtggaaccactgggcttctgatctgggccgtcaccctcgctgggatcctcggcggcggcgccctcctcgtctacaacaccagcgccctctccggctaaggatatccaatgcatgcgcttcttgcgattcgtcatgtaaaatcagggtgtctgtctataatctagcctccatggatgctcaaccttcgtcatgtaacaataatcagtgctactcttcattacataattttgatgctatatatatataccccatccctccctaataattcgttctatctgcgtagcgaggttaattc

SEQ ID NO: 22886 - DNA, 1184 bp, Zea mays
  Clone ID: LIB3592-055-H10_FLI
gttcatagctagttcgcctcccaaaaacacctgccctcgtgcgtggcaggagcacgggcacgatgatcagcacagcgcacagccggcagcagcaccatgccttcgagaagagccctggcaacagccacatgaagagcatcgacaggaagctgcagcaggccatgagccaggcggccagcaagtacatgcagaggatctaccctctaggcatgcagaggagcagctccagcctcacattgtcgtcgctctcgctgtcgcagaactccaacgactcctccatcagcagctccaacgccagctgggagcccaaggtgccgctgctctacgccggcaccttcagcccctggggcgacgtcatggtgtctcgggagatgaggcgggaggacgacgacaaggtcagtgaccatgacgtcgaaggaggcgaggaggacttggactgcagtgagccggggagcctgcgtaggtgcagctggatcaccaagaacagtgggatgctgatcgaccacaactggacggagatactgaagcggcgggacatgtacagggaggcgttcgccgacttcgaccccagcgcggtggcgcggatggaggaggaggacgtggcggagatcagcggcgacagggagctgaggatcgccgagtgcagggtccggtgcatcgtggagaacgccaggtgcatccagagggtggccagggagttcggctccttcagcggctacatgtggggccacgtgaaccaccggccggtggtgggcaagtaccgccaccacaagtacatcccgttccggacgcccaagtcggaggcggtgagcaaggacctcgtccgccggggcttccgcctcgtcggccccgtcatcgtctactctttcatgcaggccgccggcatggccatcgaccacctcgtcgactgcttccgcttccacgactgcgtccgcctcgccgagcgctcctggggcatcaccaacgtcgccgcgtaggcgtagccagccgggccctcaatatctgtgcatgcatgcctctccaactttttccttttcacaccttcttcttggtgttgttattttttttttttgtttggagatcgaaattgtgtgtgaaattacgtagagtatgtagtactctactaagttatgatgtaatacttctattaactctttgccaatgaaaagtagtactgaactaat

SEQ ID NO: 22887 - DNA, 1356 bp, Zea mays
  Clone ID: LIB3592-057-C5_FLI
gccagggctcgcctcgggggaccgcgtgttgctagcgagctcggtgctgccggctgccgccccagtgcgaggcgatggggaggaggctggacgtgctgctggggcggacgacgaagcagacggcgcggctcaagtcgctgctggggctggcggcgacgcgcctcggcgtggtgcggggccaccgccaggtgcggtgcgggcaggcgcgcggggacgtggagcagcttctccgcctcggccacgcggaccgcgcgctggcccgcgccgagcacgtcgtgcgggagcagaacgcgctcgacgtcctcgccgagctcgaggcctgctgcaacctcatcgccgagcgggccgcgctcgtcgacgacgcgcacaggggggagtgccccgaggagctgcgggaggcggcggcggggctggtatacgccgccgccaggtgcggggaccttccggagctgcaagaggtccgggccatcctcgccgccaagttcggcagggagttcgtctccgccgcgtccaacctccgcagcgggtgcggggtcaaccccaagatcgtgcagaagctgtcgaccaagcagccgagcctggagagccgacagctggtgctacaggagatcgccgccgacaaagggatcgccgtgcgcatctacgagccgcctcctccctacgaggactcggggagctccaaccacagccataggaagacggagcacgatggcgagaggatcagtaggacgccaccagttgatggccgcgacgaagacatctccggccactcggcgcagaggtacaaggacgtggaagcggcagctcaggccgcgttcgagtcggccgcctcggcagccgccgccgcgaaggcggccatggagctctcgcgtggggagcccagggggcccggtgacaggaggagggcagggaggacgcaaatggatgatcctgagatcgagaaacaagatgaggtgcttcatggaaacaaacccgagaagattgggcatggccggaattacagttcagatgttgagatcacgccggaggacgacgaggcaaaccacggcaacgttgcagtggacgaaccgaaacagcgggagcctgccaggggaaagccggcatcggtcagaacaaagtggggattttagcggcatccagatcgcaacggaggagatggtttcttcgtcttgtcaatatattggcatggaagttgttttttttcactgtagtagtatgtaattaacgacggttaccaaaaaaacacatgagcgatttgatttattgccaacagtttgcacactagtacactatgcctgtactaatgctatgttctgttaatgtgtagcgttaattgtagtacatgttctttggagg

SEQ ID NO: 22888 - DNA, 1179 bp, Zea mays
  Clone ID: LIB3592-058-C3_FLI
aggaaaagggcaaaagccaaaaggcatcaccgccgcgacgacgatggcagcctcgctccaagccgcggccaccctgatgcagccggccaagatcggcggccgggcgccctttgcctcgctgccgtcccgcccgtcgtcgcaactcgcctgcagggcgttcggcgtcgacgccggcgccgccaggatcacgtgctccctgcaggacgtcgccagcaggtgcgtcgacgccgcgaagctcgccggcttcgcgctcgccacctcggcgctcctcgtctcgggcgcgagcgcggagggcacgcccaagaggctgacctacgacgagatccagagcaaaacgtacatggaggtgaagggcacgggcacggcgaaccagtgcccgaccatcgacggcggcgtggagtcgttcccgttcaaggccggcaagtaccagatgaagaagctgtgcctggagccgacgtccttcaccgtcaaggcggagggcatcgccaagaacgccccgcccgagttccagaagaccaagctcatgacccgcctcacgtacacgctggacgagatcgagggcccgctcgaggtcggctccgacggcacgctcaagttcgaggagaaggacggcatcgactacgccgccgtcaccgtgcagctcccggggggcgagcgcgtgccgttcctcttcaccgtcaagcagctcgtcgccaccggcaagcccgagagcttcggcgggcccttcctcgtgcccagctaccgcggctcctccttcctcgaccccaagggccgcggcggctccaccggctacgacaacgccgtcgcgctccccgccgggggcagaggtgacgaggaggagctccagaaggagaacatcaagaacgccgcctcctccaccggcaacatcacgttgagcgtcaccaagagcaacccggagaccggcgaggtcatcggcgtcttcgagagcgtgcagccgtccgacaccgacctcggggccaaggcgcccaaggatgtcaagatccagggggtctggtacgctcagctcgagtgattcgagtgtctaactgctaggtgtccgaccgccgtcatggatcttgggaaggtgtatgtataccatggaaaactttggagagcagaggaggaatcgtgtatgtaatgtacttgttaatgcaaattcgggctgtcgcttttttactc

SEQ ID NO: 22889 - DNA, 730 bp, Zea mays
  Clone ID: LIB3592-058-D8_FLI
gaagaagaagaacccagccaaatcctcagtcttcaggctgctcacagctcgtgccgtccactctcccccgaggcagtctcttgcgttcgctgctcgacatggcgctccaggcggcgacgtcctttctcccctcggccctctccgcgcgcaaggaggggtcggtgaaggactcggcgtcgttcttgggtgttcgtctcgcggcggatggcctcaagctggacaccaccgcacggcggtcatcaccggcgcgtcgtccggcctcggcctcgccacggcgaaggccctcgcggagacaggtggtgagcgaccccagcctgaccaagtccggcgtgtactggagctggaacaagaactccgcgtccttcgagaaccagctctctgaggaggccagcgacgccgacaaggccaagaagctctgggagatcagcgagaagctcgtcggcttggcgtgatgcccaccgtggccggcgccggcagccggcgacagtttttcctacctaggacatgctcattagttggtctcactctcagtcgagtagtcgacgtgtggtgcgcccgtgtcagagtgccaagccaagacagaaagtgagtacaaacgtgtaaaatatgtgctactgcgacgtgatggtttgggcagtggactgtatgtatctctactctctaggcttctgctttgctttgcatatttaattttctgctaataagaggacagcaaatgcctttcgagctt

SEQ ID NO: 22890 - DNA, 1294 bp, Zea mays
  Clone ID: LIB3592-058-F5_FLI
tccctacccctacgagtatccaagtccaaccagcaagaggggaggcgctgcacgcaggtcacgcggcgatggacatatgcgatgtttgagcaggcggtggcagatttctgctggcatgcgagggaagtagtgtcgtcagggatggggctctggggttggccgtgggggcgacgtgggccgtcgggcttcggctccgcgtccaccgccgaggaggtcaccgccggcgtcgacgcaagcaacatcactgccatcgtcacaggagcgacgaatggcattggaaaggagacagccagagttctagcactgaggggagccaaggtaatcataccagctaggacactggagagtggcctcaagttgaaggagagcctcgcagatgaggtcccaagctccaaggtacacgttatggagatggacctgagctgtctcagctccgtccgcgacttcgcacggtccttcaattcatcccacaagcatctgaacctcctcatcctggagtgatcgtcaccaatatcattcgctatgttgctggaaacagtgcgctgatttcggctctctcccctgtagcaaatcttgttctgaagagcgtgccccggggggctgcaactacttgttacttggcattgcaccctaatgtcaaaggtgtatctggtaaatacttcgctgattgcaatgaagcaacaccgactgctgtcgcgagagactcagagctggcgaagaggctatggtcgttcagcgaagaacttgtcaagatctatgctgatatgtcacagacgacacaggcaagcgaagaagaggaaaccacggttacgaaagacgttttccaagacaagtagcgtaatatatgttgctgcgttttctacgttttgtacctgtcctctgggcccgaatggccagtgactgtaatagcacctaagtgcccgagactggtaagacaaggggtattcagacaatcaagaaaccacggtgcggctgaggcctgaggcagtcctctccgtcgttcacccaaatctgagatcactcgtgtgctcacgtcgacggtgattagccggtggccccgggtgttgcaagatagaagaccaaaattatacgatcatatggaaacaagatgtgcctgcaatcatatgatatgagagtactagtgttggataatttttattcttcagaaagcgccaaaatcataaacgtttgatagttttagcattaagagcagccttggttgtttatttgtttccatgcttcttgaattgtcaggaagatcatgacttgtgacgacattaacagctattacact

SEQ ID NO: 22891 - DNA, 689 bp, Zea mays
  Clone ID: LIB3592-058-G7_FLI
cccgcgacgagctgctccggcgcgtgcgcgcgctgggcccgcaggtggtgaccctcgtcgagcaggaactgaacaccaacacggccccgctggcggcgcgcttcacggacgcgtgcgcgcactacggcgccatcctcgagtcgctggacgcgacgctggggcgggagactgcggagaaggccagggccgaggcggccctgtcgaggaaggcggcgaacgcggtcggccgggatggccccgaccggctggagcggtgcgaggtcttcggcaagtggcgcgccaggttcggcatggcgggcttccgcccggtgtcgctcggctcgagcattgcggaacagatggtcgccccccgcgtcggcccggtgcctcccgggttcacagtcaaggcggagaacggcgtgctccgcctctgttggatggggcgcgtggtgaccgtcgcctccgcgtggcgctagaccaccaccgggacggcgggcggcgcaccgcccgggcgcgccattattgccgtcactaaatcgtcagttacataattcgcgctattgctttcctcgttctcttttttaccttggttgggtgaggagtgatgagtttgtcattgatctggtaaaatccttcctagttggtagcggctcataattcttataactgctcatagtagtatatggaaaagagtaagttatatcgcgatc

SEQ ID NO: 22892 - DNA, 1088 bp, Zea mays; identical to SEQ ID NO: 13948
  Clone ID: LIB3592-058-H5_FLI

SEQ ID NO: 22893 - DNA, 774 bp, Zea mays
  Clone ID: LIB3592-059-A9_FLI
cattcctcctccggatttcgcagtcagcggtggtgaaggtagcgggcgcggaggaagatggggctcgcgttcgggaagctcttcagccggctcttcgccaagaaggagatgcggattcttatggtcggtctcgacgccgccggtaaaaccaccatcctctacaagctcaagctcggcgagatcgtcacaaccatccccaccatcggtttcaatgttgaaactgttgagtacaagaacattagcttcacggtctgggatgtcgggggtcaggacaagatcagacctctctggaggcattacttccagaacacacagggtcttatctttgttgtggatagcaatgaccgtgaccgtgttgttgaagccagagatgagctgcacaggatgctgaacgaggatgagctacgtgatgctgtgctgcttgttttcgccaacaagcaagatcttcctaatgccatgaatgctgctgagatcactgacaagcttggattacactccctgcggcagcgacactggtacatccagagcacttgtgccacaactggcgagggtctgtacgagggcctggactggctgtccagcaacattgcgagcaaggcttgaatatcaaatgcgaactgactaggagctccggatgtatcatggaaacttaggacagaatcgcctctacaacctgttaggtgtcttctaccggcacaatatattttttgtttggaatatgtaatgatgttacggttcaacgtttattctaccctactatactgttggatgttc

SEQ ID NO: 22894 - DNA, 1012 bp, Zea mays
  Clone ID: LIB3592-059-H3_FLI
tcgggagacagcggctgcccaaccatataactgtaggggagactaggagagcaggagtacattacaaccgcgcgcggagcacgcggtgacagaagagagacgacggtcgacggagagctgccatggccgcaggagccgcgttgtactactaccacccaggcgccgggaaggtgagcctcgaggcggtcgccccgtcctctccgtcgctggccctgaggccatcgcagagcaaggtgctgtgcgtcagcagcagccggtggtggatgaggcgaagatgggaggggaaggcgagcagcgtcagcagcagggcaagggcaagcgcaaggcctgccttgttctcccctgtggccatggactggcaggagtgcactaccgagcttgaagttgatgttccatgctcggtggcctatcagtgttactcagaacgggagagtattcctcagtggatgccattcatctcgtctgtcaagatccttgaagataaacctgatctttcacggtggactctgaagtacgaggtgcttgggcgggatgtagaattttcttggcttgcacgtaacatgacacctattaaaaaccagaagatccattggcgatctcttgaaggtcttgctaatagaggtgctgtccggttcttccccaaaagctcatcctcctgtagagtacaactgacggtggcatatgaagttcctgaaattttggccccagttgcatcagcactgaaaccgtttctggaaagcttgcttctcaaaggtttagagcgctttgccacatttgccaaggagcgtaatagcaagatacctcaggcttaacagcgccattactagttccattctagtgaagccacatcacaatgcatgtaaagaatgatgtcattatggatgtgcccaaataatgtacccaaagagaagtgaatacaaatctgtcaaaagttggaagtaagcttcttgctgtatgtcattgtagtgttataacgccattataaatcttgaatataattattggtagcatc

SEQ ID NO: 22895 - DNA, 686 bp, Zea mays
  Clone ID: LIB3592-060-A10_FLI
ctccagctccacttcttccccgcacaccacagtcacacgcgcagtgctagacgacgaacaccagagggcaggcagaggatgatggcgtccgttctcgccgtctcacggtggtcgtcgctgcttctcctcctcctggtggcgacggcgtcgcaggccctcaacgtcggcgacctgctcgggacagcagcgccatcggggagccagggctgtagccggacgtgcgagtcgtcgttctgcatagatgactacctcaacacgcggtgcaacgagaacctgctgagctgcctcgacggggtgagcccggcggggccgacgttcccggggaacgagtgcgacgtcggccagacggcgtccgtcatacgtggggtcatcgagtcggcggtgctcgcgggcaagatccttcacaagcgcgacgacggccagtagccggcgtcctgggctcctcctggcagtggcaggacatgcaggagcgggccgacctgagtcagtgaggctagctcgcggttggtacagacagtataaagccgcttgtgctggatttcaaggtcatgaatggccggaccacctgttggagttcgtttacgtattaggtttagttcatttactttaaaaaaataaattttagaataaatgtcaaagatccgctcatgaatctgaattcgtcttgtgcaacaaatttaaaactc

SEQ ID NO: 22896 - DNA, 1035 bp, Zea mays
  Clone ID: LIB3592-060-C4_FLI
cacgcatactgcatacacaacgcagagcatcagaagcagctgcgatctgatcgacatggctgccgccaccatggctatcacctcccgcgcgctcgtcggcaagccggcggctggcacgagggacgtcttcggcgagggccgcatcaccatgcgcaagaccgccgccaagcccaagccggcggcgtccggcagcccatggtacggtgccgaccgcgtcctgtacctgggcccgctgtccggctcgcccccgagctacctgaccggcgagttccccggcgactacgggtgggacaccgcggggctgtcggcggacccggagaccttcgccaagaaccgcgagctggaggtgatccactgccgctgggccatgctcggcgcgctcgggtgcgtgttcccggagctgctcgcccgcaacggcgtcaagttcggcgaggcggtgtggttcaaggcgggctcccagatcttcagcgagggcgggctcgactacctcggcaacccgagcctggtccacgcgcagagcatcctggccatctgggcgtgccaggtggtgctcatgggcgccgtcgaggggtaccgcgtcgccggcggcccgctcggggaggtggtcgacccgctgtaccctggcggcagcttcgacccgctcgggctcgccgacgacccggaggcgttcgccgagctcaaggtgaaggagatcaagaacggccgcctcgccatgttctccatgttcggcttcttcgtgcaggctatcgtcaccggcaagggccccctcgagaacctcgccgaccacatcgccgaccccgtcaacaacaacgcctgggcttacgccaccaacttcgtccccggcaagtgagcgagggcatgatgcttgcatgcgtgtaccgtagacgtaccgtattcctacgtactgcaggttgcaccagtatttgtgaagggagctgtgcgtgggagccagagattgtaccgctagtgtatttttgtatgcacgctgtggagctgatcaatgaaatatgctgtaaatatattatgtcttcattt

SEQ ID NO: 22897 - DNA, 1139 bp, Zea mays
  Clone ID: LIB3592-060-D3_FLI
gaggagcagccatggcttcatcggtggccgccgcggcgagcacattcctgggcacccgcctggcggacccggcgccacagaacgggcgcatcgtggcccggttcgggttcgggttgggcggcaaggcgaagcctgctccgaagaaggtggcgaagacatcgacctcctctgaccggccgctgtggttccccggcgccgtggcgcccgactacctggacggctcgctggtcggcgactacgggttcgacccgttcggtctcgggaagcccgtggagtacctgcagttcgagttggactcgctggaccagaacctggccaagaatgaggccggcggcatcatcggcacccggttcgagtcctccgaagtcaagtccaccccgttgcagccctacagcgaggtgttcggcctccagcggttccgcgagtgcgagctcatccacggccgctgggccatgctcgccaccctcggcgccctctccgtcgagtggctcaccggcgtcacctggcaggacgccggcaaggtggagctggtggacgggtcctcctacctgggccagccgctgccgttctccatctcgacgctcatctggatcgaggtgctcgtgatcggctacatcgagttccagcgcaacgccgagctcgacccggagaagaggctgtaccccggcggctcctacttcgacccgctcggcctggcggccgaccctgagaagaaggagcggctgcagctggcggagatcaagcacgcgcggctcgccatggtcgccttcctcggcttcgccgtgcaggccgccgccaccggcaaggggccgctcaacaactgggccacccacctgagcgacccgctccacaccaccatcttcgacacgttcggagggtcctcttaagcccgccattgctccgccccgtccatcgaccggccggaacgtgttcttggattaattaactacgatctctatgagcctggggatggatcaacccgtcgtgcgtggtctcgttttgtgatgagtgggagagagaggatggcaagatcgatcctttgttaatggagatctcgttaattaggagagctaccgctgggacttggtggtttgtaatatatgatccaaccagtgatgaatcaatgcattcacttgtgt

SEQ ID NO: 22898 - DNA, 952 bp, Zea mays
  Clone ID: LIB3592-060-F12_FLI
ggaaaaaaatggcagtggttggcctatccagtgctttcgctcctctcagaggttcttggatagccgtaaggatcaggcagggtggccaacgtgcagggatcagcttgtgtccatctccaaggagcaggaggagctgcgcggcagtggttcgggcggaggtgagcttcgtggacgccgacgaggcgaagaggctcgtgggcgaggagggctacacggtgctggacatcagggacagggcgcagcgcgagagggcacacatcaagtcctccacacacgtgcctctcttcattgagaaccaagacaacgacattgggaccatcgtgaagcgccagctgcacaacaacttcgcggggctcttcttcgggctgcccttcaccaagctcaacccggacttcgccctgacagtcaaggacaagttctcgccggaaagcaagctgctggttgtctgccaggaaggtctcaggtcagcagctgctgcagatgcactggagaaagaaggcttccaaaatattgcatgcatcacatcaggtcttcaaacagtgaagccaggaacgtttgaatctgtggggaaaagtgagctgcagaacgcggggaaagctggccttgtgaccatccaagggaagatttctgtagtccttgggactgtattgattagtgcctacctgtttataacattcttcccagaccaggctgagaagctttttgacttggctggcatcagcttgtgatcagagctgatgttcttcggtactccacttcataatcaggatggttgatcaagtcagattcactcagatgtttccagactgaaaaggaatttttgctctgtgtactattagggaattcttgagagattagcacttaaattctttgaaacatcccttttctcgatgtacctcctatatatatcgtatgcttgattcatctacatgtttgtgttgctttttgaagt

SEQ ID NO: 22899 - DNA, 900 bp, Zea mays
  Clone ID: LIB3592-061-A12_FLI
ctccttcgccatgcccgccgccgcccgtagggcctcctccccttcctccgcctcattgagcttcgccacgtcgcagctcgccggcctctccctctccgccggcgttgcaactccaaccgccgtcgccctcctccccaagaggcagcagctccagcccattgtcgcgcgtaagtcttcgatttgcctttgctttctacgagcgcgccttcagctttcgtggttgctccgctcttatctgaatcttcagctggtctcggctgttccattctttttctccgcttctgctagtaattgattcagtcaatcttcagagcacttaagatagattcccatccgactgattgacgagatgatgatggagtgtgctgtgtgactgttcagggcgtgtgtgcccgttcacggacaagaagacgaaccgggcgaacaaggtgtcgttttccaaccacaagacgaagaagcagcagttcgtgaacctgcagtacaagaagctgtggtgggaggccggcaagcgcttcgtcaagctgcgcctttccaccaaggccctcaagaccatcgagaagcacggcctcgacgccgtcgcgcgcaaggccggcatcgacctcaacaagaagtgagcaagaagtgagcccatccgatgagcagccaaactagtgtggggtggcactagcttagcattcacgttcgcagggtcgtctcgtctgtctgtctgcctgcctgcctcctgctgttctttcgcaatcaaaccatatcattatatttcctccccgttttgatttgtgtaccataccaatcagtgtaggcagatcgaggttgcacatatacgtttttggtcccttgttgggtcctctgaatcgatcgtgtctccatttcacagtcgtgatcaatggcagaaagttaagt

SEQ ID NO: 22900 - DNA, 926 bp, Zea mays
  Clone ID: LIB3592-061-B4_FLI
ctcttaccaatcccctcctgctcctgctcctgctcccgctcccgcgtcaggtggttgcattgcatatatacacacacgcggtgggagtgggagagggagactctgccctgaccacaagaaccaaactcctctttcctttcctttccatccatcggaccatcgatcacaattttcatggcggtcaaggactgcggcgggcacaagggctgcgagtgcgagcgggagcggctgtaccggcggtgctgcgcggcggtcgtggctctgatcctcctggtcctcttcatcgtgctcgtcgtgtggctggtgctgcgcccccacaagccccggttctacctgcaggacctgtcggtgctgtgcctgaacgtgacgccgccggcgtccacgtacctgttcacgacgatgcaggcgacggtggcggcgcgcaacccgaacgagcgcgtgggcgtgtactacgaccaggcggacgcgtacgcggagtacaagggcgtggcgatcacggtgccgacgcggctgcccgtgcagtaccaggggccccgggacgcgtccgtgtggtccccgttcctgcgcgccccggacggcggcgtgcagctcccgccgcagctggccgtggcgctggcgcaggacgagacggcgggctacgtgctcgtcgacgtccgcgtcgacggctgggtccgctggaaggtcggcaccagctggatctccggacactaccacctccgcgtcaactgccccgcgctgctcaccgtcaacgacggcaggggcagctacggcgccaacaccggcggcggcaccggatacttccgcttccagcaggcagcggcctgcgccgtagacgtctagcagtgctctctctctctctgtaccagctagctgtgtttgccaattcgtcgatcgaatcaaaggacgatgcttccttcgtcggtgtt

SEQ ID NO: 22901 - DNA, 1493 bp, Zea mays
  Clone ID: LIB3592-061-C9_FLI
cctctttccatttccgattgcgtgctgtagagccgtctagattcaggcaacacagaacgagagcaagttgctggccatggcggcaagaagcaggagcatggccgtggcggcgctggcgctcctcgtcctcgcgctgcccgcggccctcgccgtgacgtcgccgtacgtgcgcccgccgccgagggacacgctgtcgtcgctgctcgaggacgacgccggcgccgacaggcagacgccgcagcaggtgcatggtagggccagacaaggtgcgggtgtcgtggatcaccgcggccgacgcgccggcgactatcgactacggcacggccccaggccagtacccattctccgcgaccgggaacacaacggcctactcctacgtgctctaccgctcgggcagcatccacgacgccgtcatcgggccgctgcagcccagcacaacctactactaccgctgcagcggcagcgcctcgcgggagctctccttccggacgccgccggccgcgctgcccttccgcttcgtcgtcgccggggacctaggccagaccgggtggacggagtccacgctcaagcacgtcgccgcggccgactacgacgcgctcctcctcccgggcgacctgtcgtacgccgacctcgtgcagccccggtgggactcgtacggccgcctcgtggagccgctggcgagcgcgcggccctggatggtgacgcagggcaaccacgaggtcgagcgcctgccgctgctggagccgcgacccttcaaggcgtacaacgcgcggtggcgcatgccctacgactacgccgccgccgatagcgtcgccgccgcgccgccgtcggacgacaacctcttctactccttcgacgtggccggcggcgccgtgcacgtcctcatgctaggctcctacgccgactacgccgcggggagcgcgcagctccgttggctccgcgccgacctcgcggcgctccgccgccgcggcaccccgccggccttcgtgctggcgctcgtgcacgcgccgtggtacagcagcaacaaggcgcaccagggggagggcgacgccatgcgggacgccatggaggcgctgctgtaccacggcgcgcgcgtcgacgccgtgttcgcgggccacgtccacgcgtacgagcggttccagcgcgtctacgccggcaaggaggacccctgcggccccgtctacgtcaccatcggcgacggcggcaaccgggaggggctggccaacaagttcatcgacccacagccgtcgatctcggcgttccgtgaggccagcttcggccacggccgactcgaggtggtcaacgccacgcacgcgctctggacgtggcaccgcaacgacgacgaccaacccgtggttgccgaccaagtgtggatcaacagcctcgcggccaacccagcttgcaaccgaagcgacaagatgtagtaatgtgtctgtttactagtttggggttaatttattattgaaagcatatcatataagactctattgtat

SEQ ID NO: 22902 - DNA, 389 bp, Zea mays
  Clone ID: LIB3592-061-D6_FLI
cacactgggtagcggcggctggagcactgggcacagtggggcactggagcactgggcactttccaaaagctgaagccgttcgccatgggcctcctcgactcgctgtaccgcgtggtgatgcgccgcaacgccgtctacgttaccttcgtcgtcgccggtgcctttgcgggcgagcgggttgtagactacggagttcacaagatctgggagatgaacaacctcgggaaaaggtacgaagacataccagttttggggcagaggccagccgaagaatgatatactttggtcgccatttagctccggtttaaccgtttcattttcgcacaataataagctgtgtaaacttcttactctgctgctgagagctgcttcccattcattttactctg

SEQ ID NO: 22903 - DNA, 3460 bp, Zea mays
  Clone ID: LIB3592-062-C11_FLI
ggcaaaagttgaaggggaaagctatatgcctggatattatgccacaggggatctcaacgtggaagcaagtggtaggtggtctccatactatgaggagatgacatcaaatggccagttatgcaatggcttcgcaacaaaaccaacaagtggttattcagaatttgacaaagaaatactcaagcatcaaattcttgaacatgaagctgtgttcagacaacaggtgagtttaccctaattctaagaaacaaagtacatcatatcataattatttttttcttatcatatgttttttttcctgtcaagcctcacaacccactcgctatccaggtgtatgaactgcaccgagtttacaaaatacagaaggatatgatgaaacaacatcaaagaaaagaggtatattcatacccaactttggcaggtgcatcacatactaattcaccatcacaagtgccaccaaacggtgcaaagatgatgtggcagatgccagttcctcctgtgtctacaacatacaggaaagctattggagagcataatgatacaaaccagtcctgcatgaagttccttagagaaggcagtgtgcagtcttctccaaatggatttctatcaagtgatgctgctccaagaaccagacaaggcacttttgaccttcaacttccagccgatcattatatagatgacgatgacacatcagataacaagcccatagatttccttggtttggcatcagatgcaaaaccccagaatgatgctgagcttacattagttagtgcagaacgcttgggcaagttcagtgataatagttcatcctcaggtttgcggactacaaataatcttggaagccgacaagttaccaacctgaatgaatcaaatactggcttctttatgggtagagcaaatggatctgtttccagaggccttccgcataccctcgagaactcgtggcaccaaccgatattgagatcaagcacaactactttcaatttcagtaaagaatactccaaagaaaagcacacaaatgaaggtacaagctcaattttttttgacacaagtgcgaaactaacacatgacgacaagccaacaatcaataaaggtaaacaagtcagcagtataacttttttagcacccagatataatgatgctgatcccccaaaatacttcaaagctgctgatgggaggcctgccagttataaccaatttctttaccaaggtcagaatagttcagctggatggattgcacgaagtcctctggaaccttctgttatcaataattttgctagagttgaccgtccacatcattcgaatctgggtacatttactgtccccatctctattcctcaaatagacaatccttcaattgtctccccgatgggttcttgcacagcagacccaaggagcagcattgtcaacaatcctgctttaattccaagattcaatgggtcgtcaaccgtgaattcgtacgccagtcttagtgctgtgacacagagcattggaacttcaatcccaaagctgaaaaatgtggataacttagataaacgctatcctggttttccacttgattcgttttctgtgtcccactcacgacatcaggtagcaatttcaagtaacctggagcaaaagaactcccagaagtttgaagattcagatcaacagtcccatggcaagggtatgaagaacttcaatttgaatgagacactgtcagattgtcaggaagatggtcttgtagaacaagatgggagatgtgctgccagttttcagcatggtaaagacggagggtcagtattcgggatctcttggctcaaaaataaagctgtgtctgctgatccaacagctttggagaaggcagggaagatttttggccattcgtttggaactacaatggagctgaaaaatgctaaagaccagaacgaaccagctgtgactattcgaaatttgtcagactctgcttcgacatctcttggctgtggaattaagaaggatgggccttcagaagacattgccactggaactttgctggtttgtaataaagcccaagaggacgctacatgtttacccctttcatgccagaaacatgtgcctaaagatggacaagatgctgatggagtcatcaagataagtggtgcctccatcaggaatttcatcgatctcaatgatgctgtgccaaacgatgacaattctgaagaatcagtagtgtcacatgaatgccaggcggaaccttcacggaacaaccatcctaaacgagcatttgtgattgatctagaggtgccggcttgtgaagaggatgctgcttgggattttgatcaagaatgtgcacagcctaaacctgatgcacaccaggaagttgacggcagatctgatacatctgctctagctgcagctgagaacatcgtagcgttgtcaaggattattccaacagctctagaggcatctgatgatatgttgcagtggtttgcagatctcgctgtattgaacatcaaggaccttgctgagcaagctgaactccaagcttgtaccaatgattccagtaacgacgagtcagattcattcgaatccttgacactgaagctggaagagaccaagattgatgagtactggagcaggccactggaacctgaaatcacaaccgatgaacaattaatttcaactgctcaccttctcaccaagcccagaaggggccagcaaaggaggcgacggcagaagcgggatttccagaaagatatcttgcctggcctttcgtcactttcccggcctgaaatcatagaggatgtccagttgcttgaggggttagtccaggcttctggtggatcctgggagtcgagtttaactaggcgaggacgttatggtgggcggactcgaggtaggaaacctcggaaaactgtagtaactgtaattgtagaagaggaggtcgaggttagcccaccgccgaaacctgttggcactggcgacctcgaagccgatggtaggggtatggttggatggggcagaacaacaaggcggtgtcgcagagcgagatgtccgtcaggtaacaacttggctgctgcgtcttgagaaagggtattgccagcaagcattggacctgattaggtacttggtggttcacaattgttatagactccgatggatggactggtataaggtgatcacagtcatgagtgtacatactctgtcggcgtattggcctcaccccaactttcatgcttttgggttgaaacatggtttacgttcttataataagttccgtaaattagctggtaagacatttctgcgacagcattgtattaagctgttccaggttatgaggtccggtataaattcattgtgagaaaaaaaactgcaatgcctgtaaaccaccttgatctctgaagattagctcatcgcatgcgcaacaaagggtgtgaaagacttcgggtctgtattcttttttagcttatatatgctctgcctaattggctagtacatattc

SEQ ID NO: 22904 - DNA, 1316 bp, Zea mays
  Clone ID: LIB3592-063-F4_FLI
cgcttcctcccgccggctcctccccccgcctccgctctcaccgcgaccgaccagccatggagcaaggccaggggccgccgccgccgaagccgcctgcgacggagcgcgacatcggattcgccgagcgggccgtggcggcggcaggcgcggccgtcgtgtccgccgtcctcgtcaaccccctcgacgtcgccaagacgaggttgcaagcacaagctgctggagttgtttataacccgatatggtcagattttaggtgctatccatcatgcagcactggtggaatcaatggtttaggcccatgctcgtcctgcagtcctgaatgctttcagtacagaggaactatggatgtgttttctaaagtcactagacaggaaggaatttttagactatggagaggtactggtgcaagcctggcattggctgtaccaacggttggaatatatctgcctagttacgatttattgcgcaattggattgaagaatactcagaccgcaattgtcccaagcttagaccatatgctcctcttatttctggctctattgcacgatcattggcatgcataacttgttgccctattgagttagcaagaacacgtatgcaggccttcaaagaatcaaatgttggagggaagccccctggaatgtggaagactttgataggtgtgctttcatcaagacagagcatcaagagccctgaaaacgtgcgaggataccacctcctatggactggtctgggagcacaactagcacgcgatgcgccctactcagctatatgctggacagttcttgaaccaattagacgacatgtgacgcgactattcggtgatcaaagcaacgcgacagttatattgggggcgaacttttctgcaggctttattgctggggttatctctgcgggcgctacctgccctcttgatgttgccaagacacgcagacaaatagagaaggatcctgaaagggtattgagcatgaacacaaggcgcatattgcttgaggtttggaggaaggaaggtgtggaaggtctgttcagaggcgcaggccctcgaatggggcgcgcaggcccgtcggtgggcatcgtcgtctcctcctacgaagttgtgaagcacctcatgcacaagaacacgagcaatgcagcagacctatgattcgatgagctcgattagcacgccctaatggcacaagtaggattaggaatgtcgctattcaaagaaacacatttttttacggtagtccatgacagataaatgttatccctccattccattacaaactgttacttctaagatgggtttttatgcatctagtggctagcttat

SEQ ID NO: 22905 - DNA, 846 bp, Zea mays
  Clone ID: LIB3592-064-H10_FLI
cacggagcatcaccaccgcggcagctgagctcggccccaacattcagattcttcgaggcgcggcgacggcggtcggcgaaatggaggccgcggtgcccagccgtgttgcgctctccgcggcgagccgccttccaaatccccacgccgtgacaggagatagatctttcatttacaagggaagatgccaaagtcttgcaattcctatggctttgtcagcagctgcgccaggcaaaggtggtggtgtgcttgattggccagttgagaaaactactcctggtcgccagtctgaatttgatgtgaagaaatcccgcaaaatgtcgcctccataccgtgtcatcctgcacaatgacaactacaacaggcgcgagtacgttgtcaaggtcctgatgaaagtgatccctgggatgaccgtcgacaacgctgtgaacatcatgcaggaggcgcacgtgaatgggctgtcagtggtgattgtctgttcccagtccgaggctgaggagcactgcacgtcgctcaggggcaacggcctccggagctcgatcgagcccgcgagtggtggctgctgaggttcgagacttgggggtataccttcagcttgttcgctgcagcaatccaaacagctgcaacagtgtcggcttgtagccagccgaacacgccccttgttttgccagcgtatagtttgtaaatacccagcgtatcaagctaaagctgaaacggattggttatatgcacttatcgatacaacgaagctgagtacccctctcgggtaggtgtaaatcgtgcaagggtaccctgtagaagaagaaacatagtattttcggttttgatttataaaatatttagttgcac

SEQ ID NO: 22906 - DNA, 1151 bp, Zea mays
  Clone ID: LIB3592-065-B12_FLI
gcgcacttgcgcagcatctgctcctgaattcctccgttcctgaaccagtagatcattttgtttaacagcagggtgcagggcccgtttctgttgctcggcacccgtcccatcccacccacctgctcacgacgacaggccagcacgacacggagggaggaagtagccaggccacctcgcctcgcctctactctcccgcggtcccgccccataccatgtccgactacaaccgctacggccacagctacagctacggcggcgggtacggccaagggccagcgccctcggccccgccggcaccgcacatgcccaccgctacatccgccgccccgccctcctcctcctcatacggcgcgtacgccgggtacccgcccgcctaccctccgccgccctcgcaggcggcgggcggattcggtcccgctggctccggctacggcttcgtccccgtcgcgttcccgccggggacgcacccggacgtcgagcgcgccttccgggccgccgaccgcgactgcagcggcgccatcgacgagcgcgagctgcagggagcgctctcctccgcctaccaccgcttcagcgtccgcaccgttcgcctcctcatgttcctcttcaacgacccctcctcctccacgccgtcacggatggggccaacacagttcgtatccctctgggattgccttgggcaatggcggggaatttttgacaggtacgacagggaccggagcggcaaaatcgactcccgtgagctgaccgaggctctccggagccttggatatgctgttccaccttctgtcatcgagcttcttatagcgaattacagcaatggtgtgcccagcaatggcgcgctagactttgacaactttgtggaatgtgggatgattgtgaagggtttaaccgagaaattcaaggagaaggatacgcgctacaccggctcggctactcttacatacgatggtttcttgtcaatggtgatccccttcatcgtcccttagctgtgctgtatgtagttcggtaacttgatagtagtcatcaaccatggttctagtaggagtgctctcccctagtctgtgcgaaaggttttttttttctcttcttcgtttctgagtcttgtctaccttgttcgttttgtacattaataacctcgatttgtttgtttc

SEQ ID NO: 22907 - DNA, 1302 bp, Zea mays
  Clone ID: LIB3592-065-B6_FLI
gaccatgagattcatgatcgaatgaaggacatgttttggtctccagacaaatttgtgagggcaccaggagggtcttcatccaatgttgctctagctttagcagcgattggtggaagggttgcattcatgggaaaattaggtgatgatgactacggtcaaagtttgctgtatcacttaaacatcaatggagttcaaactcgagcagtttatatggacccttcagcaccaactgctgtgtctttgatgaaggtcagaaccgaaggaagtctgaagacaaactgtgttaaaccttgtgctgaggatcgtttcctgccgtctgatatcaacccggcagttctaaaagaggctaagatgttttactataattcttcagctttgcttgagcccactacagagtcatcattgttgaaagctattgatgtttcaaagaaatttggtggtacaatattctttgaccttaatcttccacttccactatggtcatccagcaaggaaaccaagtcactcattaaggaggcatgggaagctgccaatatcattgaagtcacaaaacaagaacttgagttcctttgcggcatcaaaccttctgagaaatttgacacaaatgataatgataagtccaaattcacacactatagttcagaagttattatgaaattgtggcacagtaatctcaaggtcctctttgtgacaaatggtacctccaagattcactattacacagaaacacacaatggctgggtccgtggtacagaagatgcaccgatcactcctttcaccggtgatatgtcacaatctggcgatgccattgttgcagccctcatgaggatgctggtaattaaccctcacctgatcacagacaaggtttacttgcacaaggcagtcaaacatgctattaaatgtggtgtcatcgaccagtgggtgctcgcgcgagaacggggcttccttcccaaagagagagcagatccaaccggcgagcagtacgaagtgaggtccatcacagagagggaataccgcacgcttcctgatgccatgcaatcagaaaactcgtcaaccagtgaacttgcatatgtggagtgaaaggacaggccattggtgtctatacactggatttctctatttatttatggaaactgactggtgctgcagttggtattcagaagaattagtttaaacatgcagattttaggtttgtcgagtgtaggttaatagcccccaaagtaagactaacatattgataacatagagacaatgcaaatctggctgatgccaggaatttttcctacaatgcaatatttgttc

SEQ ID NO: 22908 - DNA, 1116 bp, Zea mays
  Clone ID: LIB3592-065-G6_FLI
cttgttctttcttcgacgcgcccccgggcatggcgaaccgcagtgttgccatgggcgtggccgtcgcgttcgtggccatgaccgcgctctgttgcgcgccgggcgccgcggagttgcccaggctggaccacccggccaggagtgacggatcgctgaagctgctcgtcgtcggggactggggacgcaaggggactcacaaccagtcccgggtcgccgaccagatgggaagggtcggggagaagctcgatatcgactttgttatatccaccggggacaacttctacaagaacggcctcaagggcgtgcgcgaccaggcatttgaagaatcgttcatggatatctacacagctcaaagcttacagaagccatggtactcagttctaggaaatcatgattacaggggcaatgcgctcgcacagcttagcccagtcttgaggaagatcgacgaccgattcatttgcatgagatcgttcatcgttaacgcagaacttgtggacttcttctttgtcgacaccactccgttccaactggagtattggactcacccgggcaagcatcgttatgactggagaggggtggcgcctcgaggcaagtacattgccaatttgctgaaggatctggatgtggctatgaagaaatcaactgcaaggtggaagattgtggttgggcatcacaccatgaggagtgtgagtgagcacggggacaccgaggagcttctggaattactacttccagtcctcaaggacaatggcgtcgacttctacatcaatggacacgatcactgcctggagcacattagcagcagagacagtccactccagtatttcacgagcggaggcggttccaaggcatggagaggagtcttccatccaaacaaggacaagctccggttcttctacgatgggcaagggttcatgtccctccagctgcaccaagaccaggcccacttcatcttttacgacgttttcgggaacatattgtaccgatggagctcgagacatccccagtcctccatgtatctcgatgaggaatagattagattgattttgcaccattgatatgtacaaaacaccgcatgtcaactgtcatgtatgtgaaatgatgagtgttggacgc

SEQ ID NO: 22909 - DNA, 1035 bp, Zea mays
  Clone ID: LIB3592-066-B4_FLI
ctaggttttttgattttagccgccgccgctgctcatctcacatccctcgagaagacgcctgctcctcgccgatcgatacgatggccgtcttctccgacctccacaccgccgacggcctcaagtccctcgaggctcacctcgccggcaaaacctatgtgtctggtgactccattactaaggatgacattaaggtcttcgccgcggtgccgtcgaagcctggcgctgagtttcctaatgccgcccgctggtacgagaccgtctctgcggctgtagcctcaagattccctggtaaggctgttggtgtaaatctgcctgcgggatcagctcctgcggcagctgctcctgcggatgaggctgaggatgatgatgaccttgatctttttggtgatgaaactgaggaggacaagaaggcagctgatgagcgtgccgccgctgccaaggcctcttctaaaaagaaagaaagtggtaaatcctccgtccttatggatgtcaaaccatgggacgatgagactgatatgaagaagctggaggaggctgtccgcagtgtccagatggagggtctgacttggggagcatcaaagcttgtgcctgttggatacggcatcaagaagatgactatcatgttgacaattgtcgacgatcttgtgtccatcgacactctaattgaggaccaccttacgcaagagcccatcaatgagtacgtccagagttgcgacattgtggctttcaacaagatctagagttcagtttctgagattgggcaacggcagcggctcagctcgtcaagtttgtgctgggatgccagtttatcccttctagtctattacagaaatgttgttcggagctgagtctattataaacatcttggtctgagtttattgttgagtggtgccagtttttttcaatatacatttatcttaaaaacagcggtactgatgtttttttgtctaaagttaatgagtttgcaatggttctgagtctaaagttcgagtcttcaaatctataccagagtgttaaatgacgttgtgggttttc

SEQ ID NO: 22910 - DNA, 753 bp, Zea mays
  Clone ID: LIB3592-066-C1_FLI
catctagctccctaactgcaccggccgccacaccaccccgaccggaccctccacaacaatggccaccgtcctgggcagcccccgcgcgccggccttcttcttttcgtcgtcctccctccgcgccgcgccggcgcctaccgccgtggcgctgcctgcggccaaggtgggcatcatgggccgtagcgccagcagcaggcgcaggctgcgcgcgcaggccacctacaacgtgaagctgatcacgccggagggggaggtggagctgcaggtgcccgacgacgtgtacatcctggaccaggccgaggaggacggcatcgacctgccctactcctgccgcgcggggtcctgctcctcctgcgccggcaaggtcgtctccggctccgtggaccagtccgaccagagctacctcgacgacggccagatcgccgacggctgggtgctcacctgccacgcctaccccacctctgacgtcgtcatcgagacgcacaaggaggaggagctcaccggcgcataatcatgcccatccatctctctctctatatatctctgtgtgtcgttgtgtgtaatttgagtacgcgcgtacgtactgcttgggtttcatttgagcgcagttcatgtaagcgtggagttttcagacaccgccctgccatcgtctctctctctctctgtgcgcgcttctatttccaatgttgagttacgcatatttgtccagtaaccttgttttgcttaatcacacacagctcccaaattccagtc

SEQ ID NO: 22911 - DNA, 1172 bp, Zea mays
  Clone ID: LIB3592-067-G11_FLI
aaaagccaaaaggcatcaccgccgcgacgacgatggcagcctcgctccaagccgcggccaccctgatgcagccggccaagatcggcggccgggcgccctttgcctcgctgccgtcccgcccgtcgtcgcaactcgcctgcagggcgttcggcgtcgacgccggcgccgccaggatcacgtgctccctgcaggacgtcgccagcaggtgcgtcgacgccgcgaagctcgccggcttcgcgctcgccacctcggcgctcctcgtctcgggcgcgagcgcggagggcacgcccaagaggctgacctacgacgagatccagagcaaaacgtacatggaggtgaagggcacgggcacggcgaaccagtgcccgaccatcgacggcggcgtggagtcgttcccgttcaaggccggcaagtaccagatgaagaagctgtgcctggagccgacgtccttcaccgtcaaggcggagggcatcgccaagaacgccccgcccgagttccagaagaccaagctcatgacccgcctcacgtacacgctggacgagatcgagggcccgctcgaggtcggctccgacggcacgctcaagttcgaggagaaggacggcatcgactacgccgccgtcaccgtgcagctcccggggggcgagcgcgtgccgttcctcttcaccgtcaagcagctcgtcgccaccggcaagcccgagagcttcggcgggcccttcctcgtgcccagctaccgtggctcctccttcctcgaccccaagggccgcggcggctccaccggctacgacaacgccgtcgcgctccccgccgggggcagaggtgacgaggaggagctccagaaggagaacatcaagaacgccgcctcctccaccggcaacatcacgttgagcgtcaccaagagcaacccggagaccggcgaggtcatcggcgtcttcgagagcgtgcagccgtccgacaccgacctcggggccaaggcgcccaaggatgtcaagatccagggggtctggtacgctcagctcgagtgattcgagtgtctaactgctaggtgtccgaccgccgtcatggatcttgggaaggtgtatgtataccatggaaaactttggagagcagaggaggaatcgtgtatgtaatgtacttgttaatgcaaattcgggctgtcgcttttttactccgct

SEQ ID NO: 22912 - DNA, 1009 bp, Zea mays
  Clone ID: LIB3592-068-A4_FLI
cgatcatcatcatgtgtcctaaatccaaagccagcgaagaagagattccgccggtgccgtagccgctgagctaaccaccagccggttcttgtcgcgttgtctgcaactttgcaagtaagcaactcgtcaccggtcagccaccaacaaggcaccttggttatcgtcttgcacgtccaagaaatcgagaactcaggcaggcgtcgcccacttgccctcctcctcctcctcccgtcgtgaattccacgctggttcagggatgtcgatcgagctcctgacgaaattcctcacattgctgttcgggtatgccatgccagcgctggagtgcttcaaggcgatcgagcagcggcccggccgggcagatcagctccgcttctggtgcgagtattggatcatcctagtcctcctcgtcatgttcgacgaaattgctggggttctcatttctaagatcccaatgtactacgagctgaagctagccttcctcgtctacttgtggtacccaaagacaaggggaacggacatcgtgtacgagaccttcctccagccgctggtgatgcagtaccagcccaacatcgaggccaggctccagtacctgcgcgccaatgccggtgacatcctcgtcttctacctcaagaacttcaccgagagaggctacgagctcttcctccgagtgcttgactacgtccggtcgcaggcgtccagagggtcaagaacacggagtttcttctcgttccgaggtgaacgttcggagaggccaagcttcaccgatgactatgtcactggcggcgaccggagggacgggggaaggcaccgtcgaccacgcagtggctactagtagaccaagtagtcactggatgtataggatgtgcacagaaacatatacgattactggtatagtgttaggtaggagtaggatcaaatcaagcaaaccttacggacagaacttgtaggatccactggaaaaacagatagcttcttataaattttctattcatattgtcactttgtcagc

SEQ ID NO: 22913 - DNA, 1829 bp, Zea mays
  Clone ID: LIB3592-068-A9_FLI
cttttagctcgccccttgcgttcgcggaaaaagctcatcttttcaggtggaaggagcgattcgtctgtgcctgcgcctgcgcctgcgcctcgccgggctcgtgccgctgtaccctccttctccaggagacctgtacggtgaaggggcgctcccgcgccaaacgggaagcaaagctcgctcgcgcccttttttcggatcatataacgccggcgcctagctcaaacaccacagctcgctgcctagatctacgcggcagcggcgtcggcagaggagagggacccggagctgcgccatggggcctaccgccggctccggcgaggacaaggctatgttagagctccggaaaaaacatcgtgtggacctggagagactaacaattacatcacgaccgttcaagacattgtcattctttgtgttagccatcgctcagaatttggaaagaacatgttcatctgttctgaaaaaaggttaccagttaaaaaccgcaatgcttttggttgttgctacttgggttctgctcatgttcactgatggcctgaatgaaaagcatctgcaggagctactttggtatgtcaggtttggattgtggtggattatactaggggtcgcttcatccattggattaggttctggtttgcacactttcataatgtatttggctccccatgttgccctgttcactatcaaagcggttcagtgtggtagggttgatttgaaaagtgctccttatgacactattctccttgaaaggagaccatcctggttagagaaagactgtctgcaatttggacccccaatttatcatgaaacaattccattcagcaaaatactgcaagaagtttatcttgaagctattctttggggcattggaactgcacttggagagcttcctccatattttctctcaagaacagctagcatgtcaggccgcataattgatgagttagaagatttggatgcttccatttcagaaggctttctatcttcagctttacgtcaggccaaacgatggctcatgtctcattcacagtatttaagcttcactctaatattgctacttgcttcggtgccaaaccctctatttgatcttgccggtatcttgtgtggacaatttaacatccctttctggaagttttttctagcaactttgattggaaaggctattgttaaagtttgtatccagactacattggtgattactctctgcaataaccaacttcttgatttggtggagaaaaggcttatatgggcatttagcaatgttcctggagtggcatctgtccttccatcttttgtttccaaactgaagatggccaaaaataagtttttatcagcccatgttgctgcatcagcttctacttctgttaagggaaagaagtggaatctgtcattctctttggtctggaataccctggtgtggctcatggttgcaaacttcattatccagatagttacttctacagcacagggttatctcaggacacaacaggagcgagagatcagtaaaaagttggaaaccgagctttctgcctcttaacgttcttctggcgcaccaaaatgattcgccctgggaaagtccaatcatacattgtacataaccatgcatcaaccatcagctcaaggctaaaggctctcctgcagtattgtggtgcactgactattgatctatttctttcgaaagagagagagaggaaagctattagctagtgctagaaatataatgctgccccagctacaattgtaagtttgtggccttgtacatagcatcaaatattattaggggacaaaaatatctaatgatataagttaatacctgattttgtctccgc

SEQ ID NO: 22914 - DNA, 1523 bp, Zea mays
  Clone ID: LIB3592-068-C8_FLI
ggaaacgggcacgacgcgggcggggcggggagccaaaatggcgctcccgggcccggcggcgacccgcgcggcggtgaggctctgccggatcgcggcgagcgcttcctcgtatttgccgtctgcggcggccgacggaaggagggagctggagctgccgttcgcgctggtggcggagcgggggatggtggtgggcggccaccgcgggatggggatgaacgcggtgggggcgccgcccggggcgcgcttcggggccgccagggagcgggagaacacgctgctctccttcggccgagccgccgcacatgctgccgtcgccttcgtcgagttcgacgtccaggtcacaaaagatggctgcccaataattttccatgacgatttcatcctaacacaagggaccggggctgtatatgaaaggcgtgttactgatcttctcttggaagatttcctctcttatgggccacaaaaagaatcttgcaaggtctccaagccattacttagacgggcaggagatggtagagtccttaattggactacagaagatgacgattccctttgcacattgcaagaggcctttcaacgtgtcagtcctcgcctgggatttaacattgagctgaagtttgatgacagcattatgtatcacaggaaagaccttcagtgtgctcttaaagctgtattgcaagttgtttttgagcatgctaggaacagaccagtctttttttcatcgttccatcctgatgcagcacagatgatgcgggaactccagagcttgtatcctgtacttttcctaacagaaggagggacatcgaaacaccacgatccaaggaggaactcgtttgacgacgccgtccgggtatgcctagagtacgatctgcacgggatcgtgtcagaagcgagaggcgttctcaagaacccatccgcggtcgccagagcacaagaatctaacctcgcgcttctcacgtacgggcagctcaacaacgtgtgggaggcagtctacatccaatacctgatgggcgtgcacggcgtcatcgttgaccgggtggaggagatctcggacgccgtggctggttttggtctggggaaaccaggcctcggccggggcggtgctggcgtggacggagcgaaaacgcatcaggctgaggccttctcgcagcagcagctggggttcctgctccggcttatccctgaactgattgagcagcggcacagaaaggacggtacaccatatgtaacatcccagtttttgaccctggaagcggatggcaagaattcgtctttggggtcaacccttgtcccgactgactgactgattgataggtccgatttgacagcgtatacttgtgctgcgtgcacacactcttctgtatagtctgaaaactcgcggttccttgttggttcagtacaggtacagccgaccatggaccgtggtcgatctcttgttgtttcaagtaggctcaccagaaaaaggtcagcaatgtattgttggaaacttgtatgattgtaacgtgtgttgttgacaaccaggg

SEQ ID NO: 22915 - DNA, 1244 bp, Zea mays
  Clone ID: LIB3592-068-F11_FLI
cttgtgagtacgtgtagaatataaaggattccacatctacaggaggggagttgcgtaagaaagcttggagactaaaaatcgttctttcgctacgtccattgcctttcttcatcaagcaacaaacaaaacaacaacaggagaacaggcaaaggcctccctcccttcttccctccctcaaatcaggaaaccatccaacttgtcgatcggccttgcttgccttggtactcctgcttccgccatggttcagatcaaagagttccggatcgtcatgcccatgtccatggaagagtacgagatagggctgagctacaccatcatgaagatggagcagcagaacaccaacagcaaggagggcgtggaggtgctgcagcaggccccgttccacgaggatgccaagcttggcaagggccacttcacttccaaagtttatcatctgcaaagcaagattccgtcatggatgaagggctttgcacctgccagcgccctcgcggtgcacgaggactcgtggtgtgcgtttccaaagagcagaacagtgatcaagtgcccgctcttcagcaagtgctcactcaccattgacactgtcaccaggcccgacaacggttgctctgaaaatgcgcacggtttgagcggcgagcagttagccgcgagagaagtcgagatcatcgacatcgcatccgtgtcgcgggactactggagcaaggcgatcggtgctccgagcgtcgacctgactgccttcaagtcacagcggacagatcgaggcccccttctcaagggatggatggactcgtgccatccggtgatgaccacgtacaagctggtgaccatggacgctcccatatggggcctcggcgaacgcctggaagactgcatcattgcgggggagagggcgctgttcttggcatgccaccggctgtgcttcgcgtggatcgacgagtggtacggcatgaccgtggagcagatccgcgagatggagcggcagacggacatgctgctcaagaagacgctgaagaaggccgggagcaagcacgagggcaacaggaagacgctcaaagacgagctagtggccgtggggagctagtggccgtggggcatcaaacatgtcacagattaggcatgtgtaagtgtaatgtgtccacaattaactgaagaaaatatgcatcgctgtatgtatctatatacaatcaaggcaggcaggcatctgtggtttgtctttaaccccctaaaactagcaagcttgctcgttc

SEQ ID NO: 22916 - DNA, 952 bp, Zea mays
  Clone ID: LIB3592-068-F6_FLI
agtacaggttcattgtgtgctgtgctcccagctccatcactgacacaagagagcacgctactactcatcactcgccaacgtgcagagatcagggaggcggcacactccatccactgaccgctcatggcgaaggtccacctctacgtcgccgcggcctgcgccgtcgtcctcgcgctcgccgccccggccctcgccggcgaccccgacatgctgcaggacgtctgcccggctgactacgcctccccggtgaagctgaacgggttcgcgtgcaaggcgaacttttcggcggacgacttcttcttcgacgggctgaggaaccccggcaacaccaacaacccggcgggctccgtggtgacggcggccaacgtggagaagttcccgggcgtgaacacgctgggcgtctccatggcgcgcatcgactacgcgccgggcggccagaacccgccgcacacgcacccgcgcgccaccgagatcatcttcgtcctcgagggcacgctcgaggtcggcttcatcaccaccgccaacgcgctcttcaccaagaccgtcaccaagggcgacgtcttcgtcttcccgcgcggcctcgtccacttccagcagaacaggggccacggccccgccgccgtcgtcgccgccttcaacagccagctccagggcacgcaggccatcgccatgacgctcttcggcgccgtgccgcccgtgccctccgacatcctcgccaaggccttccgcatcagcagcggcgaggtggaccacatcaaggccaacttcgcgcccaagtagagatccaatgtctgcattcccttgattttctcaataataaatccccgcggtgtgcagttcgatttgttcgtcttcggttggtttggttcgagacattgctgaccacgcttgttactgctaatttgtgcggagcggagttgcttgtgctccgataaataatcaattctatcgt

SEQ ID NO: 22917 - DNA, 834 bp, Zea mays
  Clone ID: LIB3592-068-G2_FLI
gaagttgcagaaggccatggccagtcacgagcacaagatcgaccagccctactacgggcgcccgcccatccctcccgaagcaccggccgccggcgtccgcccgctggcgcgccgggacgcgtcgtacgcgctcctctgccacgccttccgcgcgctgacgctggcgctcatcgccgtcggcgtcgtggcgctggtgctctggctcgtctaccagcccagcagcctcaaggcgtacgtcgactcggcgcagctcacccgcttcgacctcgacaacagcggcacccagacccaccagctgcgctacaacctcaccgtgggcgtcagcatccgcaacccgaaccggaagcaggccgtgctgtataggcgcctggacgccgtggcgctctacggcggcgagcggctcgggtacgtggacttcccgcgggcgcggcaggagcgcaggagcacgatggaggtgcggcccagcttccgtggacaggccgccctcgccggcgccggcgcggcggcggcgctgttcggcagggagaagggcgaggggttcttcagcatcaacgtcaagctccacacgagggtgcggctgaaggtggccgtcgtggacagcgccgagtacaggccggacgtggactgctacgtgagggttcccgacccgggcaacgccacggcagtggcgctggggttcacgccgacgcagtgccatgtcgacgacttctcgtgacacagagagcggaaactgcgaggaataagtttgatgttacgtggacgaattgatctgtcatttcctgtttttatttaaatctaaagccaactaatcgtagctaggacgattgttctatt

SEQ ID NO: 22918 - DNA, 1541 bp, Zea mays
  Clone ID: LIB3592-069-B11_FLI
ctatatgggcagggacatgcatggtcctccgacgatccatccgcatgctgaacgatcaccatctcaggttgcccgaacttgcccgctcataaagaagaatgcgcacgacgcgttgcatgctcatggtcgcccaagctcttgtcgtcgtcgtctccgcgttgctggccgccaccgccaccaccaccactactgcggcagagtatgtccggcctccaccagggcggatcatcctcacagagcacaccgagcccgccgcccatcctcagcaggtccatgtatcggccgtcggggagaatcacgtgagggtgtcgtgggtcaccgacgacatgcgcgcgcagtccgtggtggactacggcaaggcctcccggaactacaccgcgtccgccaccggcgagcacacgtcataccgctacttcctctactcgtccggcaagatccaccacgtcagcatcggcccgctggagcccagcaccgtgtactactaccggtgcggcaaggcagggaaggagttcagcctcaggaccccgccggccgcgctgcctatcgagctcgccctcgtcggcgacctggggcagaccgagtggacggcgtcgacgctggcgcacgccagcaagacgggccacgacatgctgctggtgcccggcgacctgtcgtacgccgacacgcagcaggccctgtgggactcgttcgggcggttcgtgcagcggcacgcgagccggcggccgtggatggtcacgcagggcaaccacgaggtggaggcgccgcccctgccggtcccggccggctcgccgcccccgttcgccgcatacggcgcgcggtggcggatgccgcacgaggagagcgggtcaccgtccaacctctactactccttcggcgcggcggggggcgccgtgcatgtcgtcatgctgggctcctacgcccccttcaacgccagctcggaccagtaccggtggctggccagggacctcgctgccgtggaccgccgcgccacgccctggctcgtggtgctgctccacgcgccctggtacaacacgaacgcggcgcatcagggcgagggcgaggccatgaggaaggccatggagcggctgctcttccaggcacgcgtcgacgttgtcttcgctggccacgttcatgcctacgaacgcttcgcaagggtgtatgacaacgaggcgaacccgtgcggacccgtgtacatcaccataggcgacggcggcaacagagaaggccttgcattcaactttgacaagaaccacaggctggcgccattgtcgatgacgagggaggcgagcttcgggcacgggcggctgagggtggtcaacaccacctcggcgcactgggcgtggcaccgcaacgacgacgcggactcagtggttcgcgacgagctctggttggagagcctggccaccaaggcctcgtgccggcagcacgccggtcccgccgtcgtcgattcatgggacgatgagttgtagcgggccatctcttgttttgcccaaagtgtgagcaatcttagggattgtcatttgaataagacataatttttt

SEQ ID NO: 22919 - DNA, 811 bp, Zea mays
  Clone ID: LIB3592-069-C6_FLI
caaggggcccttcgacaacctgctgcagcctgccgccgcacgagtgcggctaccccggcagcgtcttcaacccgctcaacttcgcgcccactctagccgcctcggccgcactgctaccgcgtcgccgacgaggcggagcctcaaggcggaggccaagggcgagtggctcccgggccttccctcccccgcctacctcgacggcagcctgccgggtgacaatggcttcgacccgttgggcctggcggaggacccggagaacctgaggtggtacgtgcaggcggagctggtgaacgggcggtgggcgatgctgggcgtggccgggatgctgatcccggaggtgctgaccaaggccgggctgatcaacgcgccgcagtggtacgacgccggcaagtcggagtacttcgcgtcgtcgtcgacgctgttcgtgatcgagttcatcctgtttcactacgtggagatccggcggtggcaggacatcaagaaggagctcgccaacgggaggctggccatgctggcgttcctggccttcctgatccagcacaacgtcaccggcaaggggcccttcgacaacctgctgcagcacctgtccgacccatggcacaacaccatcatccagaccctgtcgggttgagtcgacggtccatcaggtcatgtggtccgagctgaaaggccgagactcgaagacagttcgtgtgatgcgttcttaatcgactgagggctaaggaatgtgacgtactggtatatgtacattagttgaagcggaggctataaagggtgtagagattgtttcatcagtgtatatcatctgtcc

SEQ ID NO: 22920 - DNA, 715 bp, Zea mays
  Clone ID: LIB3592-069-D5_FLI
tcgctcgctcgatcctagcttcccttccaagaagcgcagcgcccatggccatgtccacgcaagcctccgccgccacgcgccacctgctggccgccgcctgggcgccggcggcgaagccgcggcagctgagctcgcagctcgcgctgccgtcgtcgtcctcccgcgggccggccccgctccgcgcgtccaccgaggaggcggtggaggcgcccaaggggttcgtggccccgcagctggaccccagcacgccgccatcatgcgggagggccccaacctcttgaagctggcgcgcaaggagcagtgcctggcgctcggcaccaggttgcgctccaagtacaagatcacctaccagttctaccgcgtcttccccaacggcgaggtgcagtacctccaccccaaggacggcgtctacccggagaaggtcaaccccggcagggagggcgtcggccagaacttccgcagcatcggcaagaacgtcaaccccatcgacgtcaagttcaccggcaaggccaccttcgactaatcacacttcacgtacgccgcacgccccagccgggatccaaattaaagaacttcttcttctattaattacagtatattgtaatttggctgctggtacggtggtggcatgatttgagatgtgcatgatgatccttgtgtaattttattaccaagtctcttcttatatttacatgttcatttgcttgcttcttgc

SEQ ID NO: 22921 - DNA, 1044 bp, Zea mays
  Clone ID: LIB3592-069-E8_FLI
aggaatccagccgacccagcacttccccggttcctcccagcagagtcttcttctctgcatccgttccgttccccggcctctcgcacatccaccgccaccgagccgcgtgcgtcttccatgaaggacccgttcgaggcggacgtcgaggagcaggactcgccgccggagtcgccggcgccgcccgaggatgaacccggcgccgcgggccctgcggaggaccccgaggactacgacggcggcccgcccccgcgccagccgtctgccccggcgtctcacgcagccggtgccaaggccaaggcccgtgtccatagggagcagcaggaggatgacgacgaggacgaggaccagattgaggtcgacctcgagaagcttcccagcagcactggcgacccagacaagctcgctaagatgaatgctatactgtcccaatttacacaacagcagatgaaccgttatgagtcattccgaagatctggatttcagaaatctaacatgaaaaggctgttggcaagcatcactggaagtcagaagatttctatccctacttcaattgtggtatcgggaatcgccaaaatatttgttggtgagctaattgaaacagcaagagtggtcatgagcgagaggaaggattcaggacccattaggccttgccacatcagggaggcatacagaagattgaagcttgaagggaagatcccacggcgatctgttcctaggctcttccgctagaattgaagcatgtatattacacatgtgtctggagtcctgacagatgtgtgccatgaggtgaggagtttctagtaccagcttgttgcagtttctggacagaaacctgaccagactctcacagcttctgttgagaaatcctgtcaaatgtcatatcatctttaagatggaattagaaagagttaaaacgtccctaccacggggcctaaaatcgcctggggttgttatttgtactgagggctactttgaaaacctcaaatccccttcgggattggaggggattgaggtggaaatgaactaattttctcttgagtttcc

SEQ ID NO: 22922 - DNA, 742 bp, Zea mays
  Clone ID: LIB3592-069-F11_FLI
ctattttcaaaatttctcaagtggtagctgatccatttattgctttggcctttattttctccccctttggcatcaagcaccaaaacgggatcaatcttggccctttaaccccattgcgacaccaaaatcttcaattaagagcaaatggcaataagagttcatgagatgaacttggagtaagttaccctctcatcggagtgcagtggaagtctttcatggtccaagtccaccttttctctttcaattctcctttgagactaaatcaagcaaactcaagcatatggttagtctcagagggtcaagttgtaactcatctccccctatacatgtgcatcactttgcaacggatttgtgaggtccacggagtgtttgtacaacttgagcaccacaataagcaacaaaatgcagaatgaacatgatcaaaggcataaacacatgtatgctacaattcaatccaagttccgcgaatctaagacatttagctcactacgcatatatatgtgtgtgaatatgtttgtatggattcgagttagggaaggagaagaaagcgaagtagaaaagaacccggatgtttcttaggttttcagaggattgtggttgtattggatgtgtgttgaaaatgcctcctcgcaaagagtgtatggtcccatgcatgcgatgtgtgatttttgttggtgaatgcgaaataagtttagtgtttcaaaacggttaattgatagtctctgttagtgctattgtgttg

SEQ ID NO: 22923 - DNA, 206 bp, Zea mays
  Clone ID: LIB3592-070-C8_FLI
tcccatgttccattacttccatatgataatggtaaaaggtaggaagctggagtacgcggtcagaactgtttggaggagatatggcatcacgacttaaatgtctgtacattccaaaaatgcaagctcctattatttcggtaccttctgtactggtaccaacgatcattgtaaatgcataacgtactttggtgtatgtgtgatgtctc

SEQ ID NO: 22924 - DNA, 1659 bp, Zea mays
  Clone ID: LIB3592-070-G1_FLI
agagacaggcgtcttcgtactcgcctatctccgcgactcaaagctttccccaattcccccccttctcccatttctcaccaccgccgccgctccccccgttcaacaacaccatgagggagtgcatctcgatccacatcggccaggctggtatccaggtcggaaacgcgtgctgggagctgtactgcctcgagcatggcattcaggctgatggccagatgcccggtgacaagaccattgggggaggtgatgatgctttcaacaccttcttcagtgagactggcgctgggaagcacgtcccccgtgctgtttttgttgaccttgagcccactgtcatcgatgaggtgaggactggcacctaccgccagctcttccatcctgagcagctcatcagtggcaaggaggatgcagccaacaacttcgctcgtggtcactacaccattggcaaggagattgttgacctgtgccttgaccgcatcaggaagcttgcagataattgcactggtctccagggcttcctcgtcttcaacgctgttggtggaggaacgggctctgggcttggttctctcctcctggagcgcctgtctgttgactatggcaagaagtccaagctcggtttcaccgtgtacccatccccccaggtgtccacatccgtggttgagccatacaacagtgtcctgtccacccactctctcctcgagcacactgatgttgctgtcctgctcgacaatgaggccatctatgacatctgccgccgctcccttgacattgagcgcccaacctacaccaacctcaacaggcttgtctcccaggtcatctcatccctgacggcttccctgaggttcgatggtgctctgaacgttgatgtgaacgagttccagaccaacctggtgccctacccgaggatccacttcatgctttcgtcctacgctccagtcatttctgctgagaaggcctaccacgagcagctgtccgtggccgaaatcaccaacagcgccttcgagccatcctccatgatggccaagtgcgacccccgccatggcaagtacatggcatgctgcctcatgtaccgtggtgatgtggttcccaaggacgtgaacgctgctgtggccacaatcaagaccaagcgcaccatccagttcgtggactggtgcccgactggcttcaagtgcggaatcaactaccagcctcccagcgtcgtccccggcggtgacctggccaaggtgcagcgtgccgtgtgcatgatctccaactccaccagtgttgtggaggtcttctcccgcattgaccacaagttcgacctcatgtacgccaagcgcgccttcgtgcactggtacgtcggtgagggtatggaggagggcgagttctccgaggctcgtgaggatctggctgcgctcgagaaggactacgaggaggtcggtgctgagtttgacgagggtgaggacggcgacgagggtgacgagtactagacgctctactggcgcggcgtcgtcgggcttgtgtgccactgctatcctgtgatctgccctgagtggctcctatcgtgttatgtttctgtcggttcttatctatctgtcgttgtgtggtttacaacttacgttgtaagactttattcccccgctttgctactgggttattaagtttggcgttattgttttcttg

SEQ ID NO: 22925 - DNA, 1745 bp, Zea mays
  Clone ID: LIB3592-070-G12_FLI
cgtcttcgtactcgcctacctccgcggctcaaacctttcccccttctcccaattccctccgtcggccgccgctccatcccgtacgacgacaccatgagggagtgcatttcgatccacatcggccaggccggtatccaggtcggaaacgcgtgctgggagctgtactgccttgagcatggcattcaggctgacggtcagatgcccggtgacaagaccattgggggaggtgatgatgctttcaacaccttcttcagtgagactggtgctgggaagcacgtgccccgtgctgtttttgttgaccttgaacccactgtcatcgatgaggtgaggactggcacctaccgccagctcttccaccctgagcagctcatcagtgggaaggaggatgcagccaacaactttgcccgtggtcactacaccagtaagtaatctgatctgatcgtcagttttcactgctccttgatatttgctctgtaatgaacatctcatttaaacctgattccttgttttgcagttggcaaggagattgttgacctatgccttgatcgcatcaggaagcttgccgacaactgcactggtctccagggcttcctcgtcttcaacgctgttggtggaggaacgggctctggccttggttccctcctcctagagcgcctgtctgttgactacggcaagaagtccaagcttgggttcactgtgtacccttccccccaagtttctacttcggtagttgagccatacaacagtgtactgtccacccactccctcctcgagcacactgatgtggctatactgctggacaatgaggccatctacgacatttgccgccgatcccttgacattgagcgcccaacctacaccaacctcaacaggcttgtgtcccaggttatctcatcccttactgcctccctgaggttcgatggtgctctgaacgtggatgttaacgagttccagaccaacctggtaccctacccgaggatccacttcatgctttcttcgtacgctccagtcatctctgctgagaaggcctaccacgagcagctctctgtggctgagatcaccaacagcgccttcgagccatcttccatgatggccaagtgcgacccacgacatggcaagtacatggcctgctgcctcatgtaccgtggtgatgtggtccccaaggatgtgaatgctgctgtggccaccatcaagaccaaacgcaccatccagttcgtggattggtgcccgactggcttcaagtgcggcatcaactaccagcctcctagcgttgtgcctggtggcgacctggccaaggtgcagcgtgctgtgtgcatgatctccaactccaccagtgttgtggaggtgttctcccgcatcgaccacaagttcgacctcatgtacgccaagcgtgccttcgtgcactggtacgtcggtgagggtatggaggaaggtgagttctctgaggcccgtgaggacctggcggcgctcgagaaggactacgaggaggtcggcgctgagttcgatgagggcgaggatggcgacgagggtgacgagtactagagaagtttgctgatgacgcagcatcaggccagtgtgctgcccttatcccgtgatctgccgtgagttgctcctgctatcgtgttatgtgtgtctgttctgaagtattgtgtggtttacaacacctgatgttgtaagagttgttaattcccctgcattgctaccgggttattgagaataattatggctgtttacgttgttgcttc

SEQ ID NO: 22926 - DNA, 1675 bp, Zea mays
  Clone ID: LIB3592-070-G5_FLI
ctgtgttcttgcgcgtacgcgtacacagccccgatccgaatcgtcctcctcgcgagcctcgccgatcccccactcccctcccctcgcttcaagatgcagatctttgtgaagaccctcaccggcaagactatcaccctcgaggtggagtcttctgacaccattgacaatgtcaaggctaagatccaggacaaggagggcatccctcctgaccagcagcgccttatcttcgccggcaagcagcttgaggacggccgcacacttgctgactacaacatccagaaggagtcaacccttcatttggtgctgcgccttaggggaggcatgcagatctttgtcaagaccttgactggcaagacaatcacccttgaggtggagtcctcagacaccattgacaatgtcaaggctaagatccaggacaaggagggcatccctcctgaccagcagcggcttatcttcgccggcaagcagcttgaggacggacgcacacttgctgactacaacatccagaaggagtcaaccctccacttggtgctgcgccttaggggaggcatgcagatctttgtcaagaccttgactggcaagacaatcacccttgaggtggagtcctcagacaccattgacaatgtcaaggcaaagatccaggacaaggaaggcatcccaccggaccagcaacgtctcatctttgccggcaagcagttggaggatgggaggacccttgctgactacaacatccagaaggagagcaccctccacttggtgctgcgtcttaggggtggcatgcagatctttgtgaaaacccttactggcaagaccatcactcttgaggtggagtcttcagataccattgacaatgtcaaggccaagatccaggacaaggagggcatcccgccggaccagcagcgtcttatctttgccggcaagcagctggaggatggacgcacccttgcggattacaacattcagaaggagagcaccctccacctggtgctgcgcctcaggggaggaatgcagatcttcgtgaagacattgacaggcaagaccatcaccttggaggttgagagctccgacaccattgataatgtgaaggccaaaatccaggacaaggagggtatccccccggaccagcagcggctgatcttcgccggcaagcagctggaggatggtcgcaccttggctgactacaacatccagaaggagagcaccctccatctggtgctccgcctgaggggtggtatgcagatctttgtgaagaccttgactggcaagaccataaccctggaggttgagagctctgacaccatcgacaacgtgaaggctaagatccaggacaaggaggggattcccccagaccagcagcgtctgatcttcgccggcaagcagctggaggatggtcgcacccttgcagactacaatatccagaaggagagcaccctccacctggtgctccgtcttcgcggtggttattaagccatcagtcgttgaagctgctgctgtatctgggttatccagtgtctctgccattgcccatggatggtactgtctttcaaagtatttgtatggtttgtgtcgtgagtcgtgactgagctggtttcatggaccagttgtgttctcgttacccaaaactatcgtgcggcagcatatggcttaatcatgaataaatgtggtgtttgaattt

SEQ ID NO: 22927 - DNA, 1113 bp, Zea mays
  Clone ID: LIB3592-070-H10_FLI
cagcgctcgtcgccacgcaccctcgcgttccccagcgtaacaagtgtccttcctccgtcttcctcctctgccgactgccctcatccactccactcccaagtccccaccacccccaaccccgtctctccactgcggcgcaggcttcgcttcggctccgctcggctcgagcagaagaaaatgcaacgggcagtgcagaccgtcaggtcacacggcaatgttcttaaatatgctgttctacaacacatcagcgctcccaagccagcaatgcttcctgctgccttttctcgtttcatgtcagtttcatctgctcgcctagaggatcgtggatttgaaactgccactgtagcagatgtcttgaagtctaaagggaagagtgctgatggatcttggctctggtgcaccacagaggatagcgtctatgacgctgtcaaatctatgactcagcacaacgtgggagctttggtggttgtcaaacctggacagaataaatcaatcgctggcattgtcactgagagagattatctccggaaaatcatagtgcagggaaggtcttccaagtcaactaaggttggcgacatcatgactgaagagaacaaactgatcacagtgaatcccgacaccaaggtcctgcaggcaatgcagctcatgacagaaaaccgcgtcagacacatcccggtgatcgacggcacggggatgctggggatggtctccatcggcgacgtcgtgcgcgcggtggtggccgagcacagggaggagctgaaccggctcaatgactacatccagggaggctactaggacggcgtgtgcagcgacgaccccctccgatcccgccagtcagtgaagtccgcctttgaaatccaataactcggaacaatgatgatatgacgaaataggccgtgttttcttggacaatgatgttaagttcggcaaggttttcctttctttttttttttctactgcgtggtctatgtgtatattgccaaaggcatgcgtgagccatgcgcccggtgctgtgctagggcgcagagaccatctgatggtggaaacaccggaaataagagcgtgccgctgtgtgtttcctttgaaggaatgaaaatggtgtttgtgttgtgc

SEQ ID NO: 22928 - DNA, 569 bp, Zea mays
  Clone ID: LIB3592-071-B8_FLI
catggcctccctctcctctgccgccgtcaccgccccttccttcgccgcaccagcgccagcccgcgccgtggtcagaaggaggtccttcaccgtgcgcgcctctctccgcaaggccaccggcaccgccgccgtggcaatggctgccagcgccctgcttgccggcggtgccatggcccaggaggtgctgctgggcgcaggcgacggcgggctcgtcttcgagcccagccagttcaccgtcaaggccggcgacaccatcacattcaagaacaacgccggcttcccgcacaacgtcgtcttcgacgaagacgaggtgccgagcggcgtcgacgccaccaagatctcgcaggaggagtacctcaacgcgccaggcgagacctactccgtcaccctcaccgtgccgggaacctacggcttctactgcgagccgcatcaaggagccggaatggtcggcaagatcaccgtcaactaattaagctagctatcgatcgatatccattcatgtattagctgttgcttcctgctttgtactccgccgatctgtccatctctacatgttttcgtcttcacac

SEQ ID NO: 22929 - DNA, 650 bp, Zea mays
  Clone ID: LIB3592-071-E1_FLI
gttggatcgtagggcgaaggaaggaaggaaggggagccatgggaaacgcgtcgtccatgctgacccagtacgacatcgaggaggtgcaggagcactgcagctacctcttctcgcagcaggagatcgtgtcgctgtacgagcgcttctgccagctggaccgcagcgccaagggcttcatctccgaggacgagttcctctccatccccgagttctccctcaacccgctctccaagttatattcaaggtttatgacatcgatggcaagggaaaaattaccttcaaggatctgctagaggttttacgggacctaacagggtcattcatgtccgaggaacaaagagagcaagtggtaactgaagttctggaagaagcagggtacacaagggattacgcattctcgcttgaagattttatccagatcatcgaccatcctggccttaagatggaggtggaagtgccaatcgactagtgaaatgtggaaaacaagcttccggttttgtctgcagaacatggttagtgtcatgtagcagggcaatgaccgttcactttcgtcatcttatttgtttccggtccacttgcctaaacttttgtaatctttgttggcttggccttttcgaatatatccaaaacaaaacaaaaaatgccctgcg

SEQ ID NO: 22930 - DNA, 684 bp, Zea mays
  Clone ID: LIB3592-071-E8_FLI
catcagtggtcctttcgataatggaggtaccagcaccaccagcatgggcgtcccccctcgcgacgacgacgacgatcctgctggtcacggccgccctcgtcctcgtgacgacgaccgtcctccgccggcgtgcccaccgccaccggaaacgacaacgacaagcgccgccgggccctcggccctggccggtgatcccaacgtgtgggggcccgacgccggggagttccggccggagcggttcctggacgggagcaagcgtagcaaggtggacgtcaggggccaggacctggagctgctgccgttcggcgccggccgccggatgtgccccgcccacggccttgggctcaggatggtccagctcgtgctagccaacctgctgcacggctacgtgtggaggctccccggcggcatggcgccggaggagctgagcatggaggagaagtttgggatatccgtgtctcgcatgcaccagctcaaggctatccctgacccaaggcttccgcatcacgtctacttcgggccgtgatgctgcataatatccgtgtatgtggtggttggtaacgaagaagagtacgtatagaagccaaccaacgaaataatctttgatgttgatgtatccgtctcagtttattcatggcgtgtgagttgaactgatttaagtataaaattcaaagtgtattctac

SEQ ID NO: 22931 - DNA, 1137 bp, Zea mays
  Clone ID: LIB3592-071-H3_FLI
agagatcttctagcctagtagtagcatctacttactagtgagtgagtaggagtacttggctaggacgggggggggcgtgacgacggtagcagcatgagctgcaacgggtgccgggtgctgcgcaaaggctgcagcgaggcctgcgtgctgcgcccctgcctccagtggatcgacgccgccgaggcgcagggccacgccaccgtgttcgtcgccaagttcttcggccgcgcgggcctgctctccttcatctccgctgtcccggacgcgcagcggcccgccctgttccagtcgctgctgtacgaggcggcggggcggaccatcaacccggtgcacggcgcggtggggctgctcggcacggggaactggcacctctgccaggccgccgtcgacaccgtgctgcggggcggcgccatcggcccgctgccggagctcggcaccgggaccggccacctgtacgggccccccgccgccaccgacaagcgcgccggcggctggtccaccttctccacggcgaagcgggcgcggaaggccggtgccggtgcgccgcccgcggcggaggcggcggcggcggcggcatgctgcgacctagggctgtgcctcagcagcagccccgggtccccgccagcggcggcgggcaggagggatcccctcctgcggcccggcacgccgtccatgagctcggacgagtccgtcacgaccacggccggcggcgacagggagcccgtgctgctcaacctttttgcctgatgaagccgccggtcgacgacgcaggccaaaccaaaccaaaccacacgcgcagcggctctcttgattggccgccgtgcgatgtgatgtttgtctggacgatctgtcccggcggccaggcgttttctctcgtcgccggcgacggcaaggccgtttttcattcgtttctggctgctgcggccttagttttttcttttttggttgcgtagtagcggtagtagaaaagaaactaccagtagcagccggcctcgaagccccgtttgcgtgtgggcgaagatgagagcgccggtggccaccccaccaaagtataactatttttccccctgttttttttcttcttctctcctttattgaacaattactataatataaataaaatactatagcaccacc

SEQ ID NO: 22932 - DNA, 1491 bp, Zea mays
  Clone ID: LIB3592-071-H6_FLI
tcatccttatcttggcggcggcgcaggcgcaggcaagcggccgtccagtcgcgcgggcagcagggggcggccgtccgtccaggcgcaggcgagcggccgtccgtccagcgcaggctagcggccatccgtccaggcgaactacgagcaggcgtccgtccaaacgaactgtgagcgtccgtcctggcttccgtccagcgagcggcacaacttttctacgcacaacacattccaagaaccgatggacaaggcgaccaagcttttgatttatggtgcttcagcacacatgttgttgtccatgatggccatggttattgagtctagaaaaagaaaaagagatagtagaagagtcggtattacttatgggccaatggaggaaagggataggatgagacttgattatcttaacactaaaatatggatgagtgatacaacatgtgtgaacatgcttagacttagtaggtctagtttctttcgcttttgtaagggctttagagaccggggtttacttgaagatacaatacacatgtgtgttgaggaacaagtggccatgtttttgaacacagtgggacacaaccttaggaataggttggtgggaacaaattatggtagatccggtgagactgttagtcgctacttcaacaaagtgcttcgtgctattggagagctacgagctgaacttattaggccaccatcattagagactccatccaaaatagcaggaaatccaagatgggatccctactttaaggattgcattggagctattgatggcacacatataagagcttcggtttccatagatatggaaccttcatttcgtggtagaaagtcttatgcctctcaaaatgtaatggcagccgttgattttgatcttcgattcacatatgtcttggctggttgggagggttcagcacatgatgctttagtactaagagatgctttagagcgagagaatggccttcgtgtaccacaaggaaaattctatctagtggacgctggatatggagccaaacctggatttttgcccccttttcgtgctgtccggtatcacttgaatgaatggggaaataatccggtacaaaatgagaaggagttgttcaaccttaggcactcgtctcttcgtgtcaccgtagagcgtgcatttggttcactgaagagaagatttaaaatacttgatgatgccacaccattctttccattttctactcaagtagatattgttgtagcctgctgcattattcacaactgggtcatacaagatggaggcgatgagctgatcattgaagaatctaattggccaattcataatcatgctacaacatcaagtggccaagctagtgaacatgcattcatggttaatttgaggcaggaaataacaaatcagatgtgggaagatcgtcaaaaccactatgcttcctaatttgttattgtttttcttgctgtaatttttatttatggacattaatatatggacttaattaatgtattcat

SEQ ID NO: 22933 - DNA, 1156 bp, Zea mays
  Clone ID: LIB3592-072-B12_FLI
gagagtacgtggaggagcagccatggcttcatcggtggccgccgcggcgagcacattcctgggcacccgcctggcggacccggcgccacagaacgggcgcatcgtggcccggttcgggttcgggttgggcggcaaggcgaagcctgctccgaagaaggtggcgaagacatcgacctcctctgaccggccgctgtggttccccggcgccgtggcgcccgactacctggacggctcgctggtcggcgactacgggttcgacccgttcggtctcgggaagcccgtggagtacctgcagttcgagttggactcgctggaccagaacctggccaagaatgaggccggcggcatcatcggcacccggttcgagtcctccgaagtcaagtccaccccgttgcagccctacagcgaggtgttcggcctccagcggttccgcgagtgcgagctcatccacggccgctgggccatgctcgccaccctcggcgccctctccgtcgagtggctcaccggcgtcacctggcaggacgccggcaaggtggagctggtggacgggtcctcctacctgggccagccgctgccgttctccatctcgacgctcatctggatcgaggtgctcgtgatcggctacatcgagttccagcgcaacgccgagctcgacccggagaagaggctgtaccccggcggctcctacttcgacccgctcggcctggcggccgaccctgagaagaaggagcggctgcagctggcggagatcaagcacgcgcggctcgccatggtcgccttcctcggcttcgccgtgcaggccgccgccaccggcaaggggccgctcaacaactgggccacccacctgagcgacccgctccacaccaccatcttcgacacgttcggagggtcctcttaagcccgccattgctccgccccgtccatcgaccggccggaacgtgttcttggattaattaactacgatctctatgagcctggggatggatcaacccgtcgtgcgtggtctcgttttgtgatgagtgggagagagaggatggcaagatcgatcctttgttaatggagatctcgttaattaggagagctaccgctgggacttggtggtttgtaatatatgatccaaccagtgatgaatcaatgcattcacttgtgtacacat

SEQ ID NO: 22934 - DNA, 681 bp, Zea mays
  Clone ID: LIB3592-072-G9_FLI
gccgctgcacacccacccggcgggctcagagctcctcttcgtgacccagggcaccgtcgccgccggcttcatcagctccggctccaacaccgtctacaccaagacactgtacgccggcgacatcatggtgttcccccagggcctgctccactaccagtacaacgccggcaccggcgctgccgtgggcctcgtcgccttcagcagccccaaccccggcctgcagatcaccgactttgcgctctttgccaacaacctcccgtccgccgtcgtggagaaggtcaccttcttggacgacgcgcaggtgaagaagctcaagagtgtgctcggcggcagcggttaacttgtttttcgagacaatacagtgcaggctgggtatgcatcgtcgtcgtcgtcgtcttggtccgtcgtcatcgaatggaacgcgtgtgcttgctgttgctgctgcatgcgtgcgtgcacctgtcgtcgcgtgtcaaagtactcgtggtctatttcatcttacccttatttattcatctacttttcatatattcagggatgaattcagtttccatattgcattttgttgcaatgaaagagtaacatgtgcatctgattggttcaaattagctttgtggtcgatgtcgtttgtaaagctatatgatcgcttaaggttacatttcgctgtttgttcagtgtttt

SEQ ID NO: 22935 - DNA, 1480 bp, Zea mays
  Clone ID: LIB3592-073-B8_FLI
accgccgccgacctcgccgccggcaatggcgtggctcgcgcgctccatcgccaactccctcatcgctactgaggaagaacccgaagcaaccgaccggggcccctcggcctccccgggctcgtcctctcccccgcgcggcgtccgcgagggcctctccgagctaaccggcgcgctcgcgaaccgcttccagggcatcgcctccttcctcgcgcccgcggcgcctgggggcggaggcgccctgcgccggccggacccggccgagatcgcgggccggttccgcgccggcctcgcgcggctcccgggccgccaggccgtagcggatctcgccaggatcgcgtcctcgctcctgccccctgagggcgatgcagactgggcggaggaggcagcgggggtcaccgaagaggtggtcgcgttcgcgcgggacgcggcatcgcggcccgagctatggctcgacttccccctcctccccgacgacgcggactcggatgattttgacatgactgatgcgcagcaagatcacgccctggccgtggaaagcttggcgcccgagctggctgatctgaggatcgagctctgccccagccacatgagcgaggactgcttctggaagatatacttcgtactgctgcatcctaagctcaggaaggatgatgccgacattttatccactccacagattctggaagctagggacaagttgtcgcaggaggtgcggtaccggacggagttacaaggcagccacggcgacaccgtacctgtggctctcggcgatgaaggtggcgtttcaggttctcttgtagagggtttgggcgtattgaagggccaagacgactccgccatgctcacgtctttcagcaacacggactacggcaagccacaaccgatcgaacaggacaaggatattgtatcggttcatacgatcggcgagactggagctgtttcttcggataataccggtagcagcggtgtacctgtacagctagtgcccgtgtcgagagacaccaccaccgtggcgccactatctaggacggaagaaagtacgcacgatctctctacggaagacgaagcagcagcagaagaagaagaggagcagggtctgcagatgtctgagatacctttgacggacagctctccccctaaagatggtcaacagaaacaaccactggctgccatcagtgagcgatcaggagctgactatcagaaaagtgataatgttgaggatggcggcgacggcgtcgaagatgacgacggggatgaatggttggaagaggaagcatgggacccgggaaacacgcaaattccgatagcagatgatgaagacgtgtctttcagtgatctggaggaggaagacgatggtgcggcctgacatcgcctgtaggcttggcttgaccgtactgcttacgtagtctgtgcttcctgttccgttatacgattggtacaattgtcttggttgatgtctaatacacgctctcatagtctc

SEQ ID NO: 22936 - DNA, 914 bp, Zea mays
  Clone ID: LIB3592-073-B9_FLI
cacactcgggtaaagctatctcgagctagctagctgctgtaagccgttgccatggccaaaatggtattgctctgcgtgctcgtctccttcctcctgatgcccttggcctccctagccctgacgcaggacttctgcgtcgccgacctgacctgcagcgacacgccggctgggtacccgtgcaagtccagcgtcaccgccaacgacttctacttccacggcctggccggccagggcaaaataaacccacccggcgggctcagagctcctcttcgtgacccagggcaccgtcgccgccggcttcatcagctccggctccaacaccgtctacaccaagacactgtacgccggcgacatcatggtgttcccccagggcctgctccactaccagtacaacgccggcaccggcgctgccgtgggcctcgtcgccttcagcagccccaaccccggcctgcagatcaccgactttgcgctctttgccaacaacctcccgtccgccgtcgtggagaaggtcaccttcttggacgacgcgcaggtgaagaagctcaagagtgtgctcggcggcagcggttaacttgtttttcgagacaatacagtgcaggctgggtatgcatcgtcgtcgtcgtcgtcttggtccgtcgtcatcgaatggaacgcgtgtgcttgctgttgctgctgcatgcgtgcgtgcacctgtcgtcgcgtgtcaaagtactcgtggtctatttcatcttacccttatttattcatctacttttcatatattcagggatgaattcagtttccatattgcattttgttgcaatgaaagagtaacatgtgcatctgattggttcaaattagctttgtggtcgatgtcgtttgtaaagctatatgatcgcttaaggttacatttcgctgtttgttcagtgttttat

SEQ ID NO: 22937 - DNA, 1352 bp, Zea mays
  Clone ID: LIB3592-074-C7_FLI
tctgccaggcttcccagaagatttgattgattccccccaatccagtgattccatccctgttctccacttccacgggaacttcccagagacttccagaaggctctagcgacccccgccgctttagagctacccgcggcgagattcaggagctgcctgccatggtgaaggacagcgcctactacgatgtcctggggctcagcgtcgacgcgtcccccgccgagatcaagaaggcgtattacattaaggcgaagctggtgcatccggacaagaatcccgggaaccctgacgcggcactcaagttccaggaacttggagaggcttatcaagtcctaagtgatcctgggaaaaaggaggcgtatgataattatggaaaggagggtattccccaggataacatggtggatcctgctgctgtctttgggatgctttttggaagtgactattttgaagattacgttggccagcttgctctagcatctatagcttcagtggaggttgaggaaaactcaaatagtcaagaggcaagagcaaaagttcaagaaaagataaaagaattacaaagagaaagagaacaaaagcttactcagagtctgaaggaccgacttcaatcatatgtagatgggagaaatgatgaatttgtgagctatgcaagcgcagaagctaggcgtttatccgaagcagcatttggtgaggctatgcttcacaccattggttatatttatgtccggcaagcagcaagagaactcggtaaaagtagaatttacatgggtgtaccgtttatagctgaatgggttagagacaaaggacaccacattaaatcacaggttaatgctgcttcaggtgctatttctctaatacaacttcaagaagggatgaaaaagatggaggggagtgaggacagcgaggagcaacttatgaagagttttgaggagaaaaaagatgccatgctcagctcgctttggaaaatcaatgtggttgatatcgagtcaacgctctcacgtgtctgccaagcagttctgagagatagcatggtctccaaagatgtcctgaagctgcgagccaaagcgttgaaaaagctcggaacgatattccaaggcgcagaatctatgtaccatcgtgaaagcagtctgcgcgttgaaacgagcacagaccaacaagccgctccgtcacactgaagccgcctgtggaccaccgtgtaggaagggatttggtgtttttttttgtgtgtggctttcttctttgtttgtaattgtgtatgctatattaattttcctgtagaagatgtgaaacatttaacacaaagattttaactgctattgatgcagaaatataacctgcagctgctttttttc

SEQ ID NO: 22938 - DNA, 638 bp, Zea mays
  Clone ID: LIB3592-074-D2_FLI
cccgccacgaaattctccacgctccgatccaatcgcaacaatgaagttcggcaagagcctcaacaaccagatcgtggagacgctcccggactggcgcgacaagttcctgtcctacaaggacctcaagaagcggctgaagcagatcggcgccggctctggcgagcggcggagcaagcgccagcgggtgggggacgggcgcggcggatcctcgccgcctgcgatgaccccggaggaggccggattcgtcgcgctcctcgacgccgagctcgacaagttcaacgccttcttcctcgagaaggaggaggactacgtcatccggctgaaggtaattgattgaccatacccattcctgtcgtgatccgattccatccccccctcgtgttgtccgctccctcgcggcggcgcgaatagaatagtggtctgattcgtgtctcggtcgtcggaattgagcgggcgcaggagttgcaggacagggtggtgagcgccgcggaggtggggtcggcggaggagctgctgcgggtgcgcaaggagatcgtcgacttccacggcgagatggtcttgctggagaactacagcgcgctcaactacaccggtgagacgcatctcactagggatgagagagtttttatttttatttc

SEQ ID NO: 22939 - DNA, 1786 bp, Zea mays
  Clone ID: LIB3592-074-H6_FLI
tcctctcccgcccagtactgccgtcaccgctcgcttcctcgccgcccccgccatccgcgtgatcagcccatcgcggcccgcgctgccgctcctctcatccgcctccgcaggcggcttccctcacgcctctcgcgctccctgcagtgccgcccgcgagcaccgccgcggcaccgtgcgggaatgctctcgagctgatgctgctggagcagctccattatcaaagacactgttagacctcaaggattcctgctggagatttttaaggccacatacaatccgaggaactgctttaggatccatagcattggttgcgagagccttgatagagaattcccatctgataaactggtggttgatattcaaagcattctatggacttggggcattgatatttggcaatggttacatagttgggattaatcagatctatgatgttgctattgacaaggtaaacaagccatatttacccattgctgctggtgatctctcaattcagtcagcatggttgttggtgatattatttgcagctgcaggtttttcaattgttatatcaaactttggacctttcattacctctctatactgccttggcctatttcttggcactatatattctgttcctccattcagactgaagagatatccggttgctgcttttcttatcattgcaacggttcgtggtttccttctcaactttggcgtgtactatgctactagggctgcactaggtcttacattccaatggagctcccctgttgctttcattacatgcttcgtgacactatttgctttggtcattgctataaccaaagatctccctgatgttgaaggagatcgcaagtatcaaatatcaactttggcaacaaagcttggtgtcagaaatattgcattccttggatctggtttattattagcaaactatattgctgctattgctgtagcttttaccatgcctcaggctttcaggtgcactgtaatggttcctgtgcatgctgtccttgctggtggtttaattttccagacatgggttctggagcaagcgaagtacagaaaggatgctatttcgcagtactatcggttcatctggaatctcttctatgctgaatatatcttcttcccgttaatatagagaggtgagtttcctgattagcattcagcatccatgaccctttgcttctgacatttgtctgcacaaaaaaatgtcagatcttgtagttcatcttgatcttgggctacagcctaattcatggtgaaaagagggagaagttggcaaagtgaggtctgtcgtgcatattttcaacggaaacaatggagtagcaatattgctatgctagggttctgaagttgtaggagcttttctaagcttttacgatgttgaaggcgttgttggagctgtggaagctgttttccttttttttccttttgtatcaacagtgtcgcgttctgtacggtcttacttggaagtgctttgacctttgagcacatgggttgaagcttgagatctggtcccgaacaggtggcggtggaacggccaagacaagcttgtttcatgccactcgaggtcgaggctaaaccactacggcgtgctcttccatgaaacgcagaaaactagggaaatgactatatatatggtgcaatacgttgtatattttctgagtttcagctcgtatatatagtaggaacctcaacttttaccccatcgattggaagactgaaacttcttgcatgcgtatgtatgcctgtgggtatgtaaaaaccttggcccgcacaaagctacatgttacag

SEQ ID NO: 22940 - DNA, 718 bp, Zea mays
  Clone ID: LIB3592-075-H10_FLI
gcttctcctccccctcttatcaagtcctcctcgggttagggttccttagggttttgtggaggggcgatggcggcggctgatgtggagtaccgttgcttcgtcggcggacttgcctgggccaccagcaacgagtcgctggagaatgccttcgcctcctacggcgagatcctcgactccaaggtcatcaccgaccgggagacggggaggtcccgcggcttcggcttcgttaccttctcctccgagaactccatgctcgacgctatcgagaacatgaacggcaaggagctcgacggccgtaacatcaccgttaaccaggcccagtcccgtggcggcggcggcggcggcggcggcggtggctacggcggcggtcgcggcggcggcggctatggtggcgggcgccgtgacggcggttatggcggcggtggcggctacggcggtcggcgcgagggtggtggcggcggctacggaggcggtggcggctacggcggtcggcgcgagggtggtggtggcggctacggcggcggcggcggcggctggagggactgatgtgtggccccatcctggcttcggccgagttatcttatctatctatagtatcgtgttaccgttcgcttctgtcaccgtgttagtgtccgttctacctttggattaggtgttggtaccccttttgttcgctttggttgctcccgctatgaaacgagacgagagaagaatgagc

SEQ ID NO: 22941 - DNA, 914 bp, Zea mays
  Clone ID: LIB3592-075-H12_FLI
tcgaggcgagagacaggggaggaggaggaaaacggaagaaatcttcatcaagcaacaggaagcgagagcgtgcgatttcttttttcttcctttccggtgacgccaggtgaatcaccagccggccggtgcgccaaaggctagggttccgcggggcgcgggtgcgggctcgactttcgtagcctcgccgccggcgcgcgggaaccggatgctgctaagctgcgggtcgctctcctcctgggtgcgccgcttcgtcgcctgcgttggagcagtggttgttttggttgtgcccagcctactccgataatagctgttgatgagcccacaaaaggtttaagaattcaagggcgctcagtaaaaagacacaatttatctgacgacttttggagttcaagcccgcacgaaatggagaacagtgccttgcaatcccgacacagtatgtcctcaatcagcactgctgcacaacctaatgatcagcatgcttctggaagtagcagctccccaaatgaatttgtaaatcaaggtcttctactatggcaccagactagacagcagtggattggaaaacgaagacataattctcagggtcaacaaagtcaaggaccaaaaataagttgtaatgctacatacgagagcctgctcgggagctcgaaaccatttccacaaccgatccctcttggtgaaatggtgggtttcctcgtgatcagctgggagcaggaaggcctatacgattagagttggttattggaagtgtgctgtttcaagtcatgaatcgctgaaatgtacgcaacttctaggctgcgaaagcttgtgacctcatggatgtggactgtctcggagacaggatgacatccctcttatgcaaatgtaaaatattctttgttattttattactagtaattgtgtttacagcgttc

SEQ ID NO: 22942 - DNA, 800 bp, Zea mays
  Clone ID: LIB3592-076-A4_FLI
cggggctacgccgctacgggcacagccgcacccgcagcggcgcaggtgcacgtcggccgccgcccgttcgcctgttcgcttgtgaccgttcggccgttccattgacgccgcgcgccgccgtagtttcgcaccgtcggccgtcgcaactcgcagcctcgcccctcacaggcttgcggtgctgcgcacttgcgccgccgacccttccgactccgagctcgtccccccgccgtcgctcgcgtgtcgcggattcgcggtgtcgggtgatcgggtcggcctcctcctcctgacatcttccatcgaccgcctccgaactccgtcatctgcaaccgcaagcggcaggagacatatcaagttgggtgataatggatccaaagcattcggctgaagtgtccaagcatttagacaatcaaaaccaagcactaatggaaacatatcgagcaatgtcccatgagttgcataaactgcaggtagaagaagagacagtcatgcgcaagttgtatgaactgatgtccgcggaagggcttcttccaaagcgcaagaaagaaaagcaacatggggaaaatatagtgggatcagctgagagcaaagaacaggaaccataaattcttatgcgacgtgtaatgtgatatgacagcaatgccattttatctggagagttcgtgcttgttaacttctgtatagcagttctctatcatcacaactctgcgaccactacatttaacttcacagttgaaaatttaacctgagtattagttccgtgaggaattacttacagacaaacataatcattcctttcgctc

SEQ ID NO: 22943 - DNA, 1576 bp, Zea mays
  Clone ID: LIB3592-076-B7_FLI
ggcgattgagcggcagctggagcagcagctgcaggagcagcggtcctccctcgccgcggtcgaagaggccctcgccgccgacccctccaacgccgacctcctcgaggttcatgaggagcttcttgctgcgattaaggatgccgaggagggtcttctccatttgaagcgctctaggctactgaagcaagtagatgagatctttccagatagggaatcaatgtcccaatcacccgaagttgctagtgagtcattagatccagatgatgttgagccagaaccactggagtcacatgatttttcagttggatcaaagtgtagattccggcacaacaatgggcgctggtataatggatgcattataggctttgaaggttcaggcgatgcaaggatctcatttctgacacctacatctgaaaatatgtcggtattgtaatgccttctaaagccttgaagcgattcactccaactaggtgggagcagtccttggtaggctccagcatactggcaacttctgggtataactctggcctttggaggagagcagagcttgagtcatgggatgataatctgaagattggccaaattgtttttcaagatgatgggagttctgcgagtctgccaagtgattctctttctgtctcggaatacgctcacatgagtgacgaagatgaaggaagcttaagtgacgaagaatctgagttcagtgacgatgctgatcaagaggacggaagtgttcatcagggtcttggccttttagaattcacaaattttagtggcattcagacagataccatgatcttcgcaaaatgggagcaccacaccaggggtgttgcctccaaaatgatggcaaaaatgggttaccgagaggggatggggcttggtgtgtctggccaaggcatgcttgatccaattccagttaaggtactacccccaaagcaatcacttgatcatgcacttgcttcaagcgaggctgacggaggcagtgggaaaaagcgcagtaggggtgggaaaaggaagcgtgagaagaagtttgcagaactggccagggctgctaaagctgaagaagctgagagatctgtctttaattttatcaacagccatctagtaagccaagaaggttcgaccaccaaggttagaaagggttcatcagttgagaccaatggactcgctaagaaggaggacagaagatccttggttgcatacggtgaggaagtgaaggagctgaggattcgagttgagaaactggaagagatgaagaaccgtaactgcaaagacaaggcattctttgaagcagcttcaaggaaactggaagagactcggaaggcactcgctgatgctgaagctacccacgcttcagcgacgagtgcagttactagaaaggagaaagagaagaaatggttgaaattctgatgtcaatttcatgtgtgccaacgcttctctgtctgtgttctgacaagaacgtggcgtgatgtatgcaacttacaattgttccccatgtcagctcttagcctgctacacttgtatgtctatcaagttttagatctgttgtagaagcagtaacactaataattattcg

SEQ ID NO: 22944 - DNA, 1142 bp, Zea mays
  Clone ID: LIB3592-076-D6_FLI
gaaagccaaaaggcatcaccgccgcgacgacgatggcagcctcgctccaagccgcggccaccctgatgcagccggccaagatcggcggccgggcgccctttgcctcgctgccgtcccgcccgtcgtcgcaactcgcctgcagggcgttcggcgtcgacgccggcgccgccaggatcacgtgctccctgcaggacgtcgccagcaggtgcgtcgacgccgcgaagctcgccggcttcgcgctcgccacctcggcgctcctcgtctcgggcgcgagcgcggagggcacgcccaagaggctgacctacgacgagatccagagcaaaacgtacatggaggtgaagggcacgggcacggcgaaccagtgcccgaccatcgacggcggcgtggagtcgttcccgttcaaggccggcaagtaccagatgaagaagctgtgcctggagccgacgtccttcaccgtcaaggcggagggcatcgccaagaacgccccgcccgagttccagaagaccaagctcatgacccgcctcacgtacacgctggacgagatcgagggcccgctcgaggtcggctccgacggcacgctcaagttcgaggagaaggacggcatcgactacgccgccgtcaccgtgcagctcccggggggcgagcgcgtgccgttcctcttcaccgtcaagcagctcgtcgccaccggcaagcccgagagcttcggcgggcccttcctcgtgcccagctaccgtggctcctccttcctcgaccccaagggccgcggcggctccaccggctacgacaacgccgtcgcgctccccgccgggggcagaggtgacgaggaggagctccagaaggagaacatcaagaacgccgcctcctccaccggcaacatcacgttgagcgtcaccaagagcaacccggagaccggcgaggtcatcggcgtcttcgagagcgtgcagccgtccgacaccgacctcggggccaaggcgcccaaggatgtcaagatccagggggtctggtacgctcagctcgagtgattcgagtgtctaactgctaggtgtccgaccgccgtcatggatcttgggaaggtgtatgtataccatggaaaactttggagagcagaggaggaatcgtgtatgtaatgtacttgttaatgc

SEQ ID NO: 22945 - DNA, 577 bp, Zea mays
  Clone ID: LIB3592-077-A11_FLI
cacttctccaggtaaggaaagggttcgtactcatggcgccgccgcagccaaagtcgggcctcttcgttggcatcaacaagggtcatgtcgtcaccaagcgcgagctgcctccccgcccgtgccaccgcaaggggaaatcaacgaagagggtgtctatggtcaggggcctgatcagagaggttgctgggtttgctccttatgagaagcgtatcactgagcttctgaaggttggcaaggacaagcgtgccctgaagcttgctaagagaaagcttggaactcacaagagggcaaagaagaagagagaggagatggcgggcgtcctcaggaagatgaggtcggctggtacgcacactgacaaaaagaaatagagagcatttcaagttcatggagctggctgccagagattatgttccagtgtctgattttccatacatgtagaacctaatagacatgtcaaagtattatgtatcgaaccagctcatgggattttgctccttccaatgcatccagggtttatgtatcgaaccaatttatgggatcttgctcttattctaatgcatccatggtttgtgaatct

SEQ ID NO: 22946 - DNA, 1399 bp, Zea mays
  Clone ID: LIB3592-077-A6_FLI
cgccacccaaattcatcaagctcaacacgatctcaattcgattccagttcatccatccaacgcctcccgcctgtacgtatagaagaaagaaggaagaaccgtcaccgtacgtcctcgccagtacaaataatggccctgctcaaagccgcgcgcgtcgccgatgtgcccaccctggacgtggtggtggcccccggcctggtggcggttgccaaggcgaggagcgccgcggctgtgggcggccggttctcggtgatcggccaccgcggcaaggggatgaacgcgctggcgtcggaggacccgcgtctgcgggatgtgcgcgagaacacggtccgctccttcaacgacgccgggcgcttccccgtcgactacgtcgagttcgacgtccagatgttgagaagagaaccgtgaataccgattttgcaggtcaccaaggacgggtgcccaatcatcttccatgacaacttcatcttcacacaagacgatggtaagatttcacaaaagcgtgtggccgatattcagctggaagacttcctgcagtatgggctccagaacgagcaggggaaggttggcaagcccctgcttcgcagattgaaggatggcaggatggtgaactgggacgtgcaatcagaggacgctctttgcacactcgaagaagcgttcgacaaggtcaatccaaggttgggcttcaacgtcgagctgaaatttgacgacagtcttgaatacaccgaggaagagctcactcgcatcctccaggccatccttaaggtggttttcgagtacgccaaggacaggcctatacttttctccagttttcagcccgacgctgcgcagctcatgcgcaaattgcaaggcacataccctgtctacttcttgacgaacggagggacggagctatacgccgacgtgaggaggaactcgctggaggaggccgtcaagctgtgccttgccggtggcctgcaaggaatagtttcagaagcccgcgggatcttcaggcaccccgccgccgtgccaaagatcaaggaagctaacctctccctgctaacctatggaacattgaacaacgtgccggaggcggtttacatgcagcacctcatgggagtgaacggggtcatcgtcgacctggtgccggagatcaccgaggcagtctctgagctcatcgccctgcccctgcccgagcccgacctggaagtgggcagcttgagcaaccaggcggcagctagaggagccacaactccgaatttctcgcagcgcgagatctcgttcctgctgaggcttattcctgagcttgtccaataatgcctagacttcctggtgttctgtctgtctatcatggatgaattgactaatgtgttactgatgtactgatccgcatacaagaaaagaagcccttgtgcagggt

SEQ ID NO: 22947 - DNA, 402 bp, Zea mays
  Clone ID: LIB3592-077-B10_FLI
ccacgccgagcacctccctcacggtgtcctcctccttcccccatggccgtcgtcttctcccttgttctctggtggccgagctcctccccacaacagcagggctcgacgttccccatccatagcgtctaggtgtgcgccatctgctctggccatcctcaaagaaactcagtgtcagcactccagctcaacaaataaagcaaaccaaggatggaggcatggaggagaaggaatctggacacggcaaggaagcaaggcccaaacgtgtgccgaagcccaataccaggatcatgggccctgagtgggtctatatgtaattcaggggctgggtgtgtgttgcgagagatataagattctgtattaagaaaaagggagacaagaaagaaatacaatcaatattcccgt

SEQ ID NO: 22948 - DNA, 1061 bp, Zea mays
  Clone ID: LIB3592-077-C10_FLI
ccagtgcaaacaagctcgctcgcaagcgcaacccacccacgtctacggtctaccacacgaagcatcgtagccagccagccagctaaacccacaccacacatggccgggatcgtggtggtgttcgacttcgacaagacgatcatcgacgtggacagcgacaactgggtggtggacagcctcggcctcaccgacctgttcgagcgcctcctccccaccgcgcgtgcccgccgccgtcagggccgcgcacgcgctcggctgcgacctgcgcgtgctcagcgacgccaacgccttcttcatccacaccgtcctggaccaccacggcctgctcgcctgcttctcccaggtcaacaccaaccccagccgcgtcgacgcccacggccgactccgcatcgggccctgccacgacccgcgcgcggcgccgcacggctgcggcgtcggcacctgcccgcccaacatgtgcaagggcctcgtgctggaccgcatcctccgcgaggccgaggccgaggccgagaccgcatcctccgcgaagccgcgcgtcatctacctgggcgacggccgcggcgactactgcccggcgctgcggctggcgcgcacagacttcgtgatgccccgcaggggttaccccgtctgggacctcatctgcgaggaccccgcgcgcctgcaggcggaggtgcacccctggaccgacggcgccgagctggaggagacgctgctgcgcctcgtgcggagggcggtcgtggaggacgccgcgctgccgccgccgccgccgccgccgctcgactgcaagctcgagtccatgcccgtcgccgcgcaggacggtatgcccatcgtgccgctgggcgtcaagaactgatactgtctctggttcagaattgaggtcgccggttagagctccaacaaattccgggcgaggcacggcgtaccgttagtagcgtttcactaattttgtgcgtctgtggtgtatccgtcctgatcgagtctgttgctgctgaattggttacgactcgttgtatcttactaaaaaaggtaaagttaataatggattagacatggtactattt

SEQ ID NO: 22949 - DNA, 1171 bp, Zea mays
  Clone ID: LIB3592-079-G5_FLI
cttcacgcgaaccagcacacagcacagcacgactcgggtgcgccgcgcacacggacggcagtgcacgcctcgccggctcaccaatcgacaccctgtccaaccagcaccacccggcgtcgtcctccctggcggggggctaggctagctagagctgtacagcgcgagagcgacgaacggcaggtcgatcggcggtcgcacgtacgtcgtcgaccgagagcagagcagacgaccgcggcgccagagatagttcgaatccgattccgacccatccatgggggttcacctgctgaagaagcagcactcgtcggcgccgtcgtcgctgggccgcggctccgggtccgggtccgggtccgcatccgggtcgtcggcgtcggcgtcgtcgatgccacccaaggggtgcatggcggtgcgcgtggtggggccttcctccgccgccgccggcggggggcgaaaggaacagcaggaggaggaggaggaggagcggttcgtggtgcccgtggggtacctgaagcacccgctgttcgtggcgctgctccaggcggcggaggaggagtacgggttcgagcagaagggcgccatcaccattccctgcggcgtggaccacttccgccgcgtgcagggcatcatccaccaccacggctccggcggcgggcaccaccatggtcaccacagcagcagcagcaaccacttccacatcgccggctgcttccgcgcctgatcggtcggtcttccatctacaccacgtggatgatggatggaaatagagaccgatccatgccccgctgggctcctctctagcgccgacgggacgacggatcgatcgaggaacaacaacaatatttactagctctaccgcttaattttctagggttttcttcttcttggttaggatttagacgcatggcctctctctggactggaccgaccgaggatcgaaggaccatggttggctcctgcctgcggccgacgcagtctaccagaggacggactggtcgctctcgcttggtcatgcggtgcgcgcggatcaatcgatcggtggatgatgatatgttttgccatgtgttttttttggagtttttaatatcttaggagtaatttggattgttgttgttgttgttattgttgttgaggatgatgaaaacaaattaaagcggaggaggaaagggaaacc

SEQ ID NO: 22950 - DNA, 481 bp, Zea mays
  Clone ID: LIB3592-080-C10_FLI
ctctctacctagggcttgcttgctatcctgatccaacgtcacactgatactatatactcatcgactgctgctagtatatactagctgcgcagtttgaacgacgaattgaaatcttcagctttttatttattattgattgactcgatccaccagcagcagcagcaccaccaccagcagcaaggccacggccacctgcagattgccgtcagcggcagcggcgacgccaatcatgagctcctccagcaaccaatcatggggggagcgcttcccgatggaggaggaggaggtggtggcggggggcaggttgggggccccgccaagcccatgtccatggcggagcgcgcgcgcctcgcgaggatcccgctgccggagccggggctcaagtgcccgcgctgcgactcaaccaacaccaagttctgctacttcaacaactactccctcacccagccgcgccacttctgccgggcctgccgccgctact

SEQ ID NO: 22951 - DNA, 1772 bp, Zea mays
  Clone ID: LIB3592-080-D8_FLI
ccttctttctcaaattctctctccgcctccctgctccgatgccgcggtgacgcgtggtgcatgcgtgcgcgcgcgccttttcccctgcctggatcccccgtcctctctcgatcggttccagttaacactcgcagcctcgttctcgagtctcgactctcgacttgagtcgccagtggccacgcgcgccgggacacgggcgcgctttctcgctgccgcgccaaagcaggaaacagagcaacggccaggaaggactcacgcgcgaggcgaaaagcgaagcgggtgggagaagcgtgggcgcctgggctagtgctcccgcagcgagcgatctacggtagagttccggccgggcgcgcgggagaggaggaggtcggggggaggatccgatggccgggaacgagtggatcaatgggtacctggaggcgatcctcgacagccacacctcgtcgcggggtgccggcggcggcggcggcggcggggaccccaggtcgccgacgaaggcggcgagcccccgcggcgcgcacatgaacttcaacccctctcactacttcgtcgaggaggtggtcaagggcgtcgacgagagcgacctccaccggacgtggatcaaggtcgtcgccacccgcaacgcccgcgagcgcagcaccaggctcgagaacatgtgctggcggatctggcacctcgcgcgcaagaagaagcagctggagctggagggcatccagagaatctcggcaagaaggaaggaacaggagcaggtgcgtcgtgaggcgacggaggacctggccgaggatctgtcagaaggcgagaagggagacaccatcggcgagcttgcgccggttgagacgaccaagaagaagttccagaggaacttctctgaccttaccgtctggtctgacgacaataaggagaagaagctttacattgtgctcatcagcgtgcatggtcttgttcgtggagaaaacatggaactaggtcgtgattctgatacaggtggccaggtgaaatatgtggtcgaacttgcaagagcgatgtcaatgatgcctggagtgtacagggtggacctcttcactcgtcaagtgtcatctcctgacgtggactggagctacggtgagccaaccgagatgttatgcgccggttccaatgatggagaggggatgggtgagagtggcggagcctacattgtgcgcataccgtgtgggccgcgggataaatacctcaagaaggaagcgttgtggccttacctccaagagtttgtcgatggagcccttgcgcatatcctgaacatgtccaaggctctgggagagcaggttggaaatgggaggccagtactgccttacgtgatacatgggcactatgccgatgctggagatgttgctgctctcctttctggtgcgctgaatgtgccaatggtgctcactggccactcacttgggaggaacaagctggaacaactgctgaagcaagggcgcatgtccaaggaggagatcgattcgacatacaagatcatgaggcgtatcgagggtgaggagctggccctggatgcgtcagagcttgtaatcacgagcacaaggcaggagattgatgagcagtggggattgtacgatggatttgatgtcaagcttgagaaagtgctgagggcacgggcgaggcgcggggttagctgccatggtcgttacatgcctaggatggtggtgattcctccgggaatggatttcagcaatgttgtagttcatgaagacattgatggggatggtgacgtcaacgatatcatctttgac

SEQ ID NO: 22952 - DNA, 836 bp, Zea mays
  Clone ID: LIB3592-080-G4_FLI
cagcccaccaaatgaggtagggtttccgattgcttccgcggttcaatcaccgcctacgtagaacccctccgctccttccagctcgctctctacctgcaccagcctcgcccgcccttcgctcgccgccgccatggggaggggaaagttcaagggaaagcccaccggccgccgcaacttctccacaccggaggagatcgctgctggtacttcaggtcgccctcgcacctttaagaagaaggaggaagaggaagaggaggaagaagaaagagaagagtcagaggaggaagaatctgaagacgagtctgatgacaaacctaaacataaaggtactgagggtattattcagattgaaaatccgaacttagtaaaagtgaagaatataaaggccaaggaagttgatcttggaaagacaactgaactctcaaggcgtgaaagggaggagcttgagaaacaaaaagctcatgaacgttatatgaaacttcaggagcaaggaaaaacagaacaagcacggaaagatttggaacgtcttgctttaataagacagcaaagggctgatgctgcaaagaaacgcgatgaggagaaagctgccaaggagcagaggaagtcggaagcacggaagtaactgcaatatcatggacgatgagaccacgaaggcatgatctgcgttagttggatatttatttctaatgcatcagttatcttgttataaacctggtccctattctgtatccccataaaatatgcattgacaaaattagtaacagtcttgtgggcgtgtcttcctgtaaacttgagcttgacaaaattagaaagtagtattaaggtcagcttatgcg

SEQ ID NO: 22953 - DNA, 594 bp, Zea mays
  Clone ID: LIB3592-081-A11_FLI
ctagcgtgcccacacaagttcatgtctgcccatggcagattggcagcagcagccagcatatacaggtagctagcgttgcaacgctctccactggagcagaccaactgctttggcctttggttgggagtatagtcggtctcggtcggcgtcagcccctcccttgcttgccgatccctaccgctccaaacacccgccagggctgagagctcgactccgactcgagatatggccgactggggccccgtggtggtggcggtggtgctgttcgtgctgctctctccgggcctgctgctgcagctgccggccaagggcgccggccgcttcgtcgagttcggcaacttccagaccagcggcgcctccatcttcgtccacgccatcatcttcttcgccctcgccgccgtcttcctcatcgccatcggcgtgcacatcactacgtactagccttggaatcttacttcatcagtctgcctgcacacccttgtgcagacctagcaagtggtttatatggctgtgggctagctgcctgtactcgtgtgtcgatgcatcaactgtgatccagttattcagtggcgcggcaagaaaccctgattattt

SEQ ID NO: 22954 - DNA, 246 bp, Zea mays
  Clone ID: LIB3592-081-C10_FLI
tcctttccccctccatttcatttcagcgtcgcgaaaaatggtagtcgttgatccgaaagccgtcgcctcggcgcaccagttcaccgtggtcatcgacggcgtcgagacgaccgtccacgagggcgtgctccggcgcaacggcggcacggtggccgtggtcggcccgggcgtcctcgaggtgagccgtctccagcacgtggtggtgcgcggcgggggcgggggcgacgtgcgcttctcccggtgcct

SEQ ID NO: 22955 - DNA, 2207 bp, Zea mays
  Clone ID: LIB3592-081-E1_FLI
aatctgcgagctggggggagatcgagaccctagaacggagggcgggtgtgcggcgctgagggccttagacgaatggcggtggaggagaccgcggagagctgcggcagccacgccgcgaccgctgcgtccggcggcggcgcggcggggcccgcgacgtcctcgtcatcggccgccgcggcggcgcaggcgcggaagcagcaacagcagcagcgccataagctcgaggtgtacacggaggttcttcggcgcctccacgacgccggcctgcccgacgcgcgggcgcccgggttcgacgacgagctctggaatcacttcaaccgcctccctgcccgctacgccatggatgtgaacgtggagagggcggaggacgtgctcacgcacaagcggctcctggagcaggccaaggatccggctcatcgcccggctttcgcggtgcggtccgtgcaggtatctccaattcttgatgggaatcagactgattctgattcgaacactgcaggggaggaagtcgcttcaagactgttgaacaggcagcaaagcatatatcctcctcctgccttcggttcttctacaaatcttgaggcccttgctcttgaagctagcaagtctcatgatcacgatagcacttctgataatggccgatctctatacaggcccatgcatgaaatcaccttttcaaccattgacaagccaaaacttctcagtgagctgacatctctgcttggtgagcttggtctaaacattcaagaagcacatgcattttcaacaaatgatggctactcacttgatgtcttcgttgttgtcggttggcatgatgaggaaacagaggatttagtagaagcagtgcagaaggaaattggcaggattgaagagacacaagcatggtcttcatctcattcatggtctactccagttgaaaaaaatgcagattgctgagaattcagcagctgaccgtgttgagataccaacagatggtgctagtgaatgggaaattgatgtaaagcttctcaagtttgggaataaagtagcatcaggatcatatggtgacctttaccggggtacatattgcagtcaagatgttgctattaaagtgctgaaacctgagagaataaatgcagacatgcaacgagaatttgctcaggaagtatatattatgaggaaggtccgtcacaagaatgttgtgcaatttattggggcttgcactaaacccccaaacctatgtatagtcacagaatttatgtccggtggaagtgtgtatgattacctccataaacataaaggtgttttcaaacttcctgctttagttggagttgcaacggatgtgtcaaaaggcatgagctacttacaccagaataatattattcatcgtgatttgaaaactgcaaaccttctgatggatgaaaatgggactgttaaagttgctgattttggtgttgcacgtgttaaagctcaatctggagttatgactgcagaaactggtacttaccgttggatggccccagaggtcattgagcacaaaccctatgatcacaaggctgatgtttttagttttggaattttgatgtgggaactactcacagggaagattccttatgagtacctgactccactacaagccgctgttggtgtggtgcagaagggattacggcctacaattccaaagcatactcacgcaaagctttccgagcttcttcagaaatgctggcagcaggaccctacccaaagaccagacttctccgaaatattagaaactcttcagagaatagcagaggaggtcggagaggagcacgatgggaagcacaaggacagaacactgggtggtttcttttcggctttgagggggcggagccattgagacacagttgaagacttttaataataaaaatgtatgtacatggcctcggtccgtcctttgaaggacctgagctacaaccagtgcagtgcctgttcctcgcacgtcagcaccagtacacagaaatacagacctgctgtgcagctgcagttgactgaagcggcaatttttatttagctgcagccatcgctttccgcatatccgcttgttattcctgagttccattacgcaatgtataacataggtgaggaagcttgggaactgtatcatcagtctgatttccctgaaagtgcaatcctgctgtagatgaaaaaaataataataagccagattcaggccgtggcgtgattctttt

SEQ ID NO: 22956 - DNA, 708 bp, Zea mays
  Clone ID: LIB3592-081-G12_FLI
cacgcatactgcatacacaacacagagcatcagaaggagctgcgatctgatcgacatggctgccgccaccatggctatcacctcccgcgcgctcatcggcaagccggcggctggcacgagggacgtcttcggcgagggccgcatcaccatgcgcaagaccgccgccaagcccaagccggcggcgtccggcagcccctggtacggtgccgaccgcgtcctgtacctgggcccgctgtccggctcgcccccgagctacctgaccggcgagttccccggcgactacgggtgggacaccgcggggctgtcggcggacccggagaccttcgccaagaaccgcgagctggaggtgatccactgccgctgggccatgctcggcgcgctcgggtgcgtgttcccggagctgctcgccatgttctccatgttcggcttcttcgtgcaggctatcgtcaccggcaagggccccctcgagaacctcgccgaccacatcgccgaccccgtcaacaacaacgcctgggcttacgccaccaacttcgtccccggcaagtgagcgagggcatgatgcttgcatgcgtgtaccgtagacgtacgtattcctacgtactgcaggttgcaccagtatttgtgaagggagctttgggagccagagattgtaccgctagtgtatttgtatgcatgctgtggagctgaacaataaaatatgctgtaaat

SEQ ID NO: 22957 - DNA, 2876 bp, Zea mays
  Clone ID: LIB3592-082-H5_FLI
tgcgagatgtgaggaattccatatttgtgtggcgaggcaagccgtgcgacaagtgccagatgtacgatgaaatgattgaatcggagagcgtcaccgtttgtgtggattatcaagtcaggcaaataacggtcacttggtcgtggaagggcttcttattgcagtcatagtgttccagctctccaggaagagttacaaaccaccaaagaagccactcactgaaaagtgccgctggaccacatacgattgttgatggtaaagaagttgtgaactttgcatcagcaaactacctcagtttaattggcaacgaaaagattattgattcttgcatcagttcattggagaaatatggtgttggttcttgtggtccatgtggcttttatggaacaactgatgtccatcttgactgtgagtcaaagatagctaaatttttggggactccagactccattctttattcatatgggatttctacaatattcaatgtgatacctgccttctgtaagaaaggagatatcatagtcgctgatgagggtgttcactgggcagtgaaaatggtctccatctatcaagaagcactgtggtgtacttcaagcacaatgatatggcttcacttgcaagcactttggaaaaacttactcgtggaaataaacgtgctgaaaagattagacgctacattgttgtagaatccatttaccaggcccatttgactctagtctccggtctctctctccactctaactacagccggcccgcgtctcctcgaccatcaccaccttgacggtctccgtgaagatgatgagggtcatggacaagctcaaagggaagaagcgcggagattgtggtgactcctcgaggtcacggtcgactaggggttcaggtggtggggatacctcctctatgttgttccagggctctacagcgtcaaggcagcggctagagcagctccttggttgcatggaggagcaggggcgcgaagtggcaagccatagtgcacctgggcaagagcgcgaggtggcaggccatagtgcacctgggcaagagcgcgaggtggcatgccacaatgcacttgagccggagcgtgaggcgataggctcaagtggacctatgctagagcaggaccacaatgcatttgagcaagcgagcgaggcggcagaccacaatgcacctagtcaggaggacgagctggcacgccaaggttcaccaatgcgtgatgatgatgactatggggaggactacgatggagaggccgatggagaggccgatgacgaggttgttacaacgacacaggcaacaaacttcaggtttcggcggtcccttagagttccaccgacacaacccttggaccaacgtagggtcataaaccctgcaggagagaggagctgggtggaggtggcatggagtggcaaaggtcaccggacacccgttaacacagtgctgggatctatagctcgttttcactatccaggggtggtacaattcaacggggcagagacaggggcgtatcactgggctcactggggcctcaaaccatatggacccgaccgtactcaccaagacgcagtgtggtcatcattttgggaacaatttagattggacgaaactgcaaacgaagaacatgcaaaacgtgtattccacaatgctgctagaaaagttataaatggttcaatgtcagatgcacgggtcaaagctgttaccgtgtacttcaagaaagtgaagggtcaaagaatgaccaacaagcaggcatgtgaaatccacttgacagctgaggagtacaaacaaagtgaagtggactggctcactgctcatcctgaagcttgggtcaagctctgcgagtactgggcctcagatgagtacaaagtaatttcagatagaaatcgtttgaaccggaagagcaaaccgggcctccatcgatttggagcagatggatttattgggaaatcacaacgaatggaggctcgtgatggtgttgaaccccgattcattgacgtttacatggagggacaccgaggtccagatccagatcatcctgaagttttatgtgatgacagcgcgacagaaaagctgactcgttatgccgaggaggttaggaggaaagcaggagacgatgatctagattggagggaggcacctttcgatccggatgcagcatatgttgctggtggtgggctaccacatgggaggttggggatcggtgatggggttgtgagtcacgatagctttggtcgtcggtctgtttcctcggtggggagtagatctcgaacttcaacttcgagggaatcagagcttgatgagcaactaagacaacaacaacaacaagttcaacaactatctcaacaagttcagatgatgcagggaatgctgatgcagatgtatagtgctcagatgggatctccaatgggaccccagttcacccgtccgtcacaatctggacaaaccccaaacaccaacgaaacacagggttctgaaaccggacaaggaaacccacagatggacattcagtggtcgatgcctcctagaggacagattcttcctcctccacaaccaggtatgggatattggccgccaccaccatggggatatcctacacatccaatggggccttggggacgccccccatggccaacacagccacttccatcaccagcggattctggctctcatcaagtgactcctccccctcacgttgactttgcagacagatgtctcaattccagtggtgaagctacgaacaacaatccgatgtcctgatcgagagcgatggagctaatgtttgaacttgtgaactatggatgtgaacctgtgtgaatttgtgaacttatgtatttggacttatgtgaatttgcgaatttatatttggacttatgtgaatttgtgat

SEQ ID NO: 22958 - DNA, 1165 bp, Zea mays
  Clone ID: LIB3592-083-E5_FLI
aagccctcgctgaggccggcgtgttccgcctcccggcgcagtacatccagccgcctgagcacagaccgaccccctcgccttctcctattgccgcggcgctctccgtgccggtcgtcgacctctcaacctccaccgccaccgacgccgtccgcgccgcgtgcgcggactggggcgcctttcacgtggtcggccacggcgtgccgggggagctcctcgacgcggtgcgcgcggcagggctcgcgttcttccgcgcgcccatggaggacaagctccggttcgcctgcgacccggccaggggcgccgcctcggaagggtacggcagccgcatgctcgccaacgacgactccgtgctcgactggcgcgactactttgaccaccacacgctcccggagtcccgctgtgatcccgcccgctggcccgacttcgtccccggttacagagatactattgcaaaatacagccacagcatgaaggatcttgctaaaaaattgttgtgcatcatctcagaaaatctgagcctgccaccatcttatatacaagaggcggttggagaagttttccagaacattactattagctactattctccgtgtccacaacctgatcttgctcttgggttacaatctcattctgatatgggcgcaataacacttctgatacaagatgatgttggtgggcttgaagtattaaaggatggaatgtggatacctgtgcctgctttgcgtgatggcatccttgtgattctcgctgatcagacagagatcatcaccaatggaagatacaagagttcagttcatcgagctgttgtcaatgctgagcgtgcccgcttatcagtagcaacattttatgatccatcaaaatcaaggaaaatatgcactgccccgcagcttgtgagtgagaatgaaccacaaaagtatcgggatgtaatttatggtgactatgtctcatcttggtatagcaaaggtccagagggcaagcgaaacatcgatgccctcctgattcagcactagagccataggtatgccttaaaacagggttgggccactcatctgtttcctaaacttctaatgcatgtacaatatatcagtttccaactttaaacaatcaggataaggaaaccaacttgtatactggatgcagtgcaataaagtaccttttcattgtc

SEQ ID NO: 22959 - DNA, 426 bp, Zea mays
  Clone ID: LIB3592-083-E7_FLI
ttgcacacgtgcaaaaagcacactcgaggttggacaagcacgagcaggaggagcctgaatgagcagcgatccagcccattcagggatgcaaataaagagaaggcagccaccgtgtcgagcaacctagcaaagctgaaggacttgtacggtgacataactgcaaagaaggaagacagtgatgctgaaaagcttcaccgtgattcatgcgctgaggaggtcatcaggctgggaggccctcgatggaggtaactttgagacctgtagaactctggtttccgctttgttctgccagcctctctgtaggccttcttgaaaatgctctttatgttcccaaacttgatagagtcgactggtacttcggtatcttgacttgttgtcgcctgacatttgccattaatgtatgttgtttggtatgttattcctaag

SEQ ID NO: 22960 - DNA, 1952 bp, Zea mays
  Clone ID: LIB3592-085-D2_FLI
gcgtccaaaataatggctttttcccaacaaggcccgcgcactacatgcataatttcggcaaatggtgctctgtgcacggcaacactgcggcaaccagcaacctctggtgggatagtgacatatgaggtacattcaggttcaactgcccagagcgcagggtgatgcttttattttactgctgggtcatttttgaagcaacaacacatgtttaaaattgaagctgatttatttctgttttcttacattttttgctagacaaaactactatttttttttctgttagcatgtttttcctgggatgccaatcgagtaaagcatgactgtgcaattgagtagggtcggagtcaggacctttttgtgctgtcacttgacagcattagattctacgaattcatggctatattactgttgagctaacagaaaacaatgataataatcatgtttcttacactggtgacatcaataattatcaactctggatccgccctgcagttgaccatggagaggccttgcaactatcagcaatctattttcagttgcattgtgccctagtaaaatttctatgaagttaattaccgtatagcattatccacttgcatattttcattatttttctcttggctatacatgtttacatttgtctgcattcttccttttttaaaataaaaatatgccctgctttttaggaaaacacatataaggtagcttgcctgctttctttgtcaacttggtttggcaaatatatggctgtatttgttatcagttttcatctcatctaggcaggataaaacagggaacttaggagcgcatattcgttgatgcctgagtgcaatgtgcaagagcacgtcacctactgaattttacatatttctattagttttctctttgggggttccatttgacttcaatcgttgtcgacttgatttctgatgaaaggaagaatgactatgttatattataagctttccttctcagctaggaagataatacaaaaaaaaaactgaaaagaaaggtttggatagcctcttactctgattcattgcaagtaactaaatgcgatgcaacagttcatttgtgaatcaacgatgacagactgcaaaacccatccacaatattgaaacttttattttcagaatgtcgtgataaatttattcattcacatgatatgaatccttttatggtgacttggtgcagggccacttcgatatactctctctttcgggctcattcttgcttgcagaggatggtgacactcgcagcagaacaggtggtttgagcgtggcactggctggaagtgatggacgcatagttggaggttgtgttgctggaatgctgatggcagcgacacctgtgcaggttgtagttggcagtttcattgctgaagctaaaaagccaaaagaagagcaacccaaacgtgagccaacatcggtgccaccgcacacagctgtctttggggcggcctcgactgccagccccccatcggatggcacatcaagtgagcactccgatgatcccgggagccccatgggaccaaacggcagtgcattcaccagcgcggggcttcccctgcactccacatatgctgcagttggttggtcactatcagaggaccaaagccgttatgatccagatctaaagatgatgaccgactgatgggtgccgtttcgcagcttccttgttagcagttgacttagctgagtaggctcaataactaaggaatcctgagagtggtaaaaccttcaggaaggagtagatcacgagtaataattagtaccagtgcatgcctttgtcttgttatatcgtagttagcagtttgtatttgtatggtttcactgtcagaaagtctatgcagcattccttctggtttccatctgtatccacgtagtgcaacaattctcatccatggattggtattgctcaccccacatcatcgtatgcttgtattgcaattc

SEQ ID NO: 22961 - DNA, 767 bp, Zea mays
  Clone ID: LIB3592-086-G9_FLI
agcgcccatggccatgtccacgcaagcctccgccgccacgcgccacctgctggccgccgcctgggcgccggcggcgaagccgcggcagctgagctcgcagctcgcgctgccgtcgtcgtcctcccgcggccggccccgctccgcgcgtccaccgaggaggcggtggaggcgcccaaggggttcgtggccccgcagctggaccccagcacgccgtccccgatcttcggcggcagcacgggcgggctgctccgcaaggcgcaggtggaggagttctacgtcatcacgtggacgtcccccaaggagcaggtgttcgagatgcccaccggcggcgccgccatcatgcgggagggccccaacctcttgaagctggcgcgcaaggagcagtgcctggcgctcggcaccaggttgcgctccaagtacaagatcacctaccagttctaccgcgtcttccccaacggcgaggtgcagtacctccaccccaaggacggcgtctacccggagaaggtcaaccccggcagggagggcgtcggccagaacttccgcagcatcggcaagaacgtcaaccccatcgacgtcaagttcaccggcaaggccaccttcgactaatcacacttcacgtacgccgcacgccccagccgggatccaaattaaagaacttcttcttctattaattacagtatattgtaatttggctgctggtacggtggtggcatgatttgagatgtgcatgatgatccttgtgtaattttattaccaagtctcttctt

SEQ ID NO: 22962 - DNA, 1121 bp, Zea mays
  Clone ID: LIB3592-087-H1_FLI
catcatcatcagtaactaataattactttagattagaagcaaagggaagcgaagcaagaatcgatcgagtcgagaagatggtgcagttcggcaagtggctgaggaggcagatcgagcggagcctcccggagtggcaggaccagttcctgcgctacaaggagctgaagcggtgcgtcaaggcccgctccggcggctgcccgccgttgcccgcggaggaggccgagttcgtggccgagatcgacgcggagaccgagaagatcaacgccttcttcctcgaccaggaggaggagttcatcatccgccaccgggagctgcagaaccacatcgagcgcgcgctgggccgcggcaggccggcgccggcgccggcgctgcacgaggccgaggtcgccgccatccgcagggagatcgtcaacttccacggcgtcatggtgctgctcctcaactacagcagcatcaactacataggctgctggctgcttgcaggcctggccaagatcctcaagaagtacgacaagcgcaccggcgcgatgctgcggcttgccgtgatggagacggtgctgcagcagcccttcttcaagacggagacggtgtcgcatctggtgcgggagtgcgagtccttgatggaggccgtgttcccggaggcgcgcgatcggggccaggccgccgccgcggcgctcgccgtcgcggaggcggagcagggcatcttccgcaacaccgtggccgcgctcctcaccatgcaggacgtccgcgcggggagctccaccagaggaagccactcgctgccgccgctcaacctgccggactccgactggctccggtccttcgacccgccgtttccgatcccgacccgatgacacttgttgctcgccgctcctagttggcttgcgccagcctcctcgatctcccttccttttcgtctagcttcttggcccgcccggtcccggcccggtacatgctgtgcactgtgcttgccttggttttccattttcccgctttctaagttctaattaactaatgtatgtagagtgcagtagtgagactacagtaaataaatgtaatttactggaatgacagccgagagaacgtacaagctcatactcaatttggttccaattttgtgg

SEQ ID NO: 22963 - DNA, 1015 bp, Zea mays
  Clone ID: LIB3592-088-D9_FLI
aggatcagcggaagcagcaatggtgatggcgtcgtcgagcgggctgaggagctgcagcgccgtgggcgtgcccagcctgctggcgccgtcgtcccggtccggccgcctggcgccgttctgcgccaacgccaccacctctggccgcgtcaccatgtccgcggagtggatgcccggccagccacgccctgcccacctcgacggctcctctcccggggacttcggcttcgatccgctgggcctcgcgaccgtgccggagaacttcgagcggttcaaggagtcagaggtgtaccactgccgctgggccatgcttgccgtccccgggatcctggtgccggaagctctgggcctgggcaactgggtgaaggcgcaggagtgggcggccgtccccggcgggcaggccacgtacctgggcgccccggtgccgtggggcacgctgccgaccatcctggtgatcgagttcgtggccatcgccttcgccgagcaccagcgcaccatggagaaggaccccgagaagaagaagtaccccggcggcgccttcgacccgctcggcttctccaaggaccccgccaagttcgaggagtacaagctcaaggagatcaagaacggccgcctcgccatgctggccttcgtcggcttctgcgtccagcagtcggcgtaccccggcaccggcccgctggagaacctcgcctcccacctcgccgacccgtggcacaacaacatcggcgacatcatcatccccagatcaatctccccttgagctcagctcagctgctggttgctgtttcctgtgtacgactaggccctgcctgtacaacgagcgacgacggtgacttcccgcccggaaattaaaccctcgtaatgtaaagcttatgttattaagtagcggctactcttgtagtcttgtctgtatcaaatataaactggtttgttagctgaatcccaaggttatttctgagcctaaccaggggaaatttagctcaaaacggagaaaatacatacgagacctttgataact

SEQ ID NO: 22964 - DNA, 1117 bp, Zea mays
  Clone ID: LIB3592-089-G1_FLI
cggcggcggagagccagccagtagttgcgactggaggcgggcatgggcgcgggcgcgtcgggcctggcgggcgcggagcccggcggcaaggtggcgcgcggcgccgggctgggcgacctcccggagctgtgcaccgcggaggtgctgctccgcctcggcgcgccggacatatgccggctcgcgcggctcaacctagcgttccgcggcgccgcgggcgcggacttcgtgtgggaggccaagctgccggggaactacgcccggctcctgcgcttcgtggacgaggccgaggaggagggagggagtgggcgggattggagcgcggtggggaggaaggacgtctttgcgaggctcgccagacctgtgccgttcgacggtggcaaaagggaattctggctggagaagaacgaaggtgggatctgcatggccttgtcgtcgaaagcgctggtcattactgggattgacgatagaagatactggattaacatgccaacatctgaatctaggttccactccactgcatacctgcagcaaatctggtggttcgaggtggtgggagaggtggacttctgcttcccggcggggacggcctacagcctctacttcaggctccacctcggcaagtcctccacgcgcttcggccgccgggtctgcagctcggagcaggtccacggctgggacaagaagcccgtgcggttccagctctccacgtcggacggccagcacgccgtgtcccagtgctacctggacgagcctggacgctggatcctgtaccacgtcggcgatttcgacgcgccgccgagctctggtcagccgaccaggctcaagttttcgttagcgcagatcgactgcacccacacgaaaggtggcctctgtgtcgattcggtgctcgtgtatcccaaggggtttcagccggaacgggtggtcagggctcggaaatgaccgtgtgtgggcatttggtagctatagaggcactgcgcattagagcgagctgtcgagagatatgagtagcctgccatttttttttagcttgggctaattgtattctgaaagcgtttatacatagcatagtagcacactggactttttttttgtttgatagcattagtgtgtgcgcgtt

SEQ ID NO: 22965 - DNA, 1319 bp, Zea mays
  Clone ID: LIB3592-089-G6_FLI
tctgctccggcgaccgcttgtcatcggtatgtttcttcctccctgggctttcccttcccaccatctcagcggacggcttgaagtttcctctaagtggtgggcgctcgctacccgcagctcccatggtctgcttgaagtttcctcgccctaaaccctaaccctaaatgtggctcccatgtctgcttgatctccttttagctgctgtagtgatggcgccatggccatggtctgcttagtttcctcgccctatccaacacgaaagctgccgccgaagcacggtcggtcacgtcgttcctgctgacatggtcttcttgagtttggggacaaagaaacaagaagaattagactagaaggttcagactttagcctctcctacaccggtggtcatggaaacagatggtttgactacctgacagttagctgccctagcgttctgaaagaactgttctccaaatttgttcccagttgaactgaaaagaggcggcttgtaacagcaaatcttcccaaagtactaactatatttagttttaatatagtcaagccaagaggatgcatgataccccagccgttgtatccttaatatatgtagggctattttgacggctagctgcgaagaagcttgtatcagtgagtttagttgtgtgcactgaactgaaactgctaatagattgcttgctgcatgtcccataaagttctggcgagcattgcatggatatagaataatctgtggggctagaatgtgtgtgtgttttggcctttgaggggcgagcaagtaggattgggcactttttttttgtttttaatattcagttttggtttccaatatttgtctgtatcggtactcagttgcagtttcagttttagatggaaaccgaaccaaacactggttcaaacccaaacacgaagcattagataagaatgcggcaattagcaactgaaaaggacatataatcagttgatttgtcgtgctttgccagtgtaaaaactgtttggtgtttagttcagagtacatattttttacttgtaattgtctagacgtatttctaacaaaaacctattatatttctagattatccctacatcggtttgacttggagaagacgagcttccaccatcttgggaccctataccctctcctttagagagctgcacctgaagaaaccaatgaacattaggtattacaaataagggctgtattgtattaatgtggttcttgtaaactaatttttcctttgaattttgtaattgaatcatccacaggtgtgcgacttgcttttgtttatgtggatctattaattatgttcaaacagttgcttcat

SEQ ID NO: 22966 - DNA, 1175 bp, Zea mays; identical to SEQ ID NO: 15873
  Clone ID: LIB3592-091-A1_FLI

SEQ ID NO: 22967 - DNA, 945 bp, Zea mays
  Clone ID: LIB3592-091-C9_FLI
cgaactctctctagacgcttcctcggtctctctgttcaccgccgccccgtaccatactcctcttcgcgccgtagaaatggcgctgccgaatcagcagggcgtggattaccccagcttcaagctcgtcatcgttggcgacggtggaactggtaaaaccacatttgtgaaaaggcatcttactggcgagtttgagaagaaatatgagcccaccattggtgttgaagttcaccctctggattttagcactaactgtggcaaaattcgcttttattgctgggacactgctgggcaagaaaagttcggtggccttagggatggctactacattcatggtcagtgtgccatcattatgtttgatgtcacttctaggctgacatacaagaatgttccgacatggcacagggatctgtgcagggtctgtgagaacatccccattgttctttgtggtaacaaggttgatgtcaagaacaggcaagtcaaggccaagcaagttacattccaccggaagaagaacttgcagtactatgagatttctgccaagagcaattacaactttgagaagcccttcctttacctcgctaggaagctggcaggggatcagaaccttcactttgttgaagctgttgctctgaagccaccagaagtgcagattgatatggccctgcagcagcagcatgaagctgagcttgcagctgccgctgcgcagcccctccccgatgacgatgatgacctgatcgaatagatatgttatacatggcccttgttgatgactcttgttaaaaatctgtggtggttcaatccttgttagtgttaggcggtacctgaatgttctcttgatgtatccgaagagttgagaaggaagttaatgactcagtatcctgttggcttgttgacttggttttttggtgaacctgtccttgagggaatacagaggtattgtcaggc

SEQ ID NO: 22968 - DNA, 1165 bp, Zea mays; identical to SEQ ID NO: 22958
  Clone ID: LIB3592-091-E5_FLI

SEQ ID NO: 22969 - DNA, 777 bp, Zea mays
  Clone ID: LIB3592-091-E9_FLI
tccatccaaccacctcatccctctccgacacgggccgcggccgaccgccggctccgtggccttgacaccagttgacgaggagcatctctactctacagcgcaaatcggcagatgcttggtcaatatccggcggcggcatatgtcaactctccccttatgcgatggaactgccaactcgccgtgctggtcggagtgctctggatcgaggcttgctgctgcgcgccgtgttgggagggaagctgccgtctcctgccgctgggagaagccggggaccctctgtttgctgagggcaaaatctccttccttgcgcaggcactcgaggaaggtgcaatgggctatcagaaccatgtccgacgacagcggtgaccaatcaggcaacagcactcgcctcttcagcgcgatccgttcattctggaaccagttgtctgccaagctgaagaaagcaaggagagggttgccagtgaagatcctattctttctgatcgggttctactgcgctaccgcgttcgctaccgtcatcgggcaaacgggtgactgggacatattgtcggccggacttgctgttgccatcgtggaggttatcggtgcgctgatgtatagggcctcctttgcattcctcggtaggatcgggaacatgattaccgtgtttaattactggaaagctgggcttacacttgggctgttcttggactctttcaagtatgaagtggatgaatttcttgaatcgtgtaacccattcaactttcagattaatatatttactgggttttgttggtg

SEQ ID NO: 22970 - DNA, 607 bp, Zea mays
  Clone ID: LIB3592-092-A11_FLI
cgcgctagctgaggacggtacagcggcacagaggtgcgacgtacgacgacgacgacgcaggcgccacacatggcatcccagctctccgccgccgtgccccggttccacggcctccggggctacgccgcgcccaggtccgcggtggcagcgctgccgtccgtgagggtgggcaggaagaggtcgtcgtcgcagggcatccgctgcgactacatcggctccgccaccaacctgatcatggtgacgacgacgacgctgatgctgttcgcggggcggttcgggctggcgccgtccgcgaaccgcaaggcgacggcggggctgaagctggaggcgcgcgactccggcctgcagacgggtgaccccgccgggttcaccctcgccgacacgctggcctgcggcgccgtcggccacatcctcggcgtcggcatcgtgctcgggctcaagaacaccggcgccctcgaccagatcatcggctagatccctacgtcgccgttgttaagatcagactcagcagcctcgatcgcgccgccggccggcaggtgcaggtggtgactttgtaacgtgtgtgcgtgcgtacgtgtacattgcatccatcttggttccaatggac

SEQ ID NO: 22971 - DNA, 907 bp, Zea mays
  Clone ID: LIB3592-092-B9_FLI
ccaatctcccacattaagccatccgtcaccactcaccagccacccaaccagcactcactcactcactagctccgtctccgctccgtccaactcgtacacaacccctctttctctctatcttctctccatccatccatcctctcgcccttccacagctagctaagcagtacgacgtagtactagcatttagcagttcatcaacgcgctcaacctagcacgacctacggcgatgaggcgccgcggcagcaactcctcgccgcttgcggctgctgcccagctgctccttctcctcctcctcctcgtcgccggctgcatccacagcgcagcagcggcggctcgccacctgccttctcctggcgccccagtccaagcgctggatcaccaagccgagaccggtggcaaggctgcatcagctggtgcagacggcgccggcggccttgtgctccaggaaggtggcacgggcaacggcgacgagctctcttcctccaccctcctcgagacgacgacgacgacgatgggagcggaggcgtgcgaggaagggaacgacaaggacgagtgcttgctgactaggcggctgctcgtcgacgcgcacctcgactacatctacacgcagcacaagggcaagccgtgaccgtcagcgacgaggacggtgccgcggctgcagctgcagaaagtgaggagcgagaaattgaccacctcattcctcaaactaaacatcttataaattcataccaagggcgatggtaatctcatctgctgctactagctaccagtacatgcatcgatccaccttctgcgtgtgctgtatatttctgccactgtctattagcatgcatcatcatctaggactaggactaggactatgatggtttcctgtatttgtaaacactgatgaacagttcctctc

SEQ ID NO: 22972 - DNA, 756 bp, Zea mays
  Clone ID: LIB3592-092-G8_FLI
ctgcgcttcagcgcgctcttcgccgagctcacctcgcccatcaaggccgtcgcgctgtcgcgggagcgcgacaaggacgccgagaacatccgccgcctgctggaggagggcgacctggtcatctgccccgagggcaccacctgccgcgagcccttcctgctgcgcttcagcgcgctcttcgccgagctcaccgaccgcatcgtgcccgtggccatcaacaccaaggagaccatgttccacggctccaccgtgcgcggcttcaagctcatggatccctacttcttcttcatgaacccgcgtccgacgtacgagatcacgttcctcacccagctccccaaagacctcacgtgcagcggcggcaagtcgcccatcgaggtggccaactatatccagaagacgctcagcggacagcttggcttcgagtgcacgtccatcacgcgcaaggagaagtacggcatgctcgctggcaccgacggccgtgtcccgtccaagaacaaggagaaggagaaggataagaactaacggccaacgtcgctctcttgctgctgcccagcagactgccgtttaattactgctcaaatttattccaatttattgttccttgtcgacaagttggccagtgtgatgtgggccgtgtactagtacaagcttgatgatgattagtatatctacaattcttcctttccggaagaagggcggaagagttgttagagccgtcttaatacaaagtttcgtcacatcagttcgcttgacttt

SEQ ID NO: 22973 - DNA, 693 bp, Zea mays
  Clone ID: LIB3592-093-C6_FLI
tctgggaacacatgcgcaggctcggcatcgaacccaacctctacgcgtacacgatcctggcgtcgatctacatcggcaagggcgaccacgccatggcggacgctgttcttcacgacatgctgtcgaagcggatcgcgccgaccgtcgtcaccttcaacgcgataatcagcgcgtgcgcgaggagcggttcgggtgggaacgccttcgagtggttccacaggatgaagacgaagggcattgagccgaatgagatcacgtaccaggtgttgattgaggctcttgtgcaggatgggaagccaagacttgcctatgagatgtacatgaaggcttgcggccagggtcttcagcttcctgcaaagtcgtatgacaccgtgctggaggcgtgtaaggcttatggttccgtagtagatgtagctactctgggtcctcgaccttccaaaggggtggaagtggaacccatcaggatagagaatagcttctccagtctctctcagttcaaggatgtgcatggcagctctcatcgttttgcaggcgttggaatgtatgggttttacggatacagaatggcaaggtaaacaaaccaagcatgtaacctactatcaatccccctctccctcttgtaatcaccctcccaaacccaatgccacattttaaaacatttgacttgtgtatttgtaagctcactaagttgcg

SEQ ID NO: 22974 - DNA, 333 bp, Zea mays
  Clone ID: LIB3592-093-D2_FLI
aacaacgccggcttcccgcacaacgtcgtgttcgacgaagacgaggtgccgagcggcgtcgacgcctccaagatctcgcaggaggagtacctcaacgcgccaggcgagacctactccgtcaccctcaccgtgccgggcacctacggcttctactgcgagccgcaccaaggagcaggaatggtcggcaagatcacagtcaactaaagctagctatccattccatgcatctcgatctgtatgtactccgcccgtcgatggatgatgcatccatctctacttgttttcctcacatgtacaacaattaatgcaacaaattaagtacgtacttgagag

SEQ ID NO: 22975 - DNA, 1541 bp, Zea mays
  Clone ID: LIB3592-093-F11_FLI
gaggggagacccattaccaatgccaagaacaagaaaccagagaggacagccgcgaatacaatccgaatcccctccaaaaacccaccataccgtctcccccatctgcaagaacaagatcaggagagcatcctagggggaagaaacaggagggggaaaaagaagcccagaaagaccaactgaccaaacaaaaaggtggcatctttgtgtcaccgaggcaccgccgatcacagaccaaagcccgctcctctggtccatcccaagcccttgagtcgctgagaagtttcgagaagggtggtgtgagtgtcggatagctcaagatggatccggcgttgctggacgacgtcatacgccggcttctggaggtgaagaatctcaagcctgggaagaacgcgcagctgtcagagtcggagattaagcagctctgcgctgccgccaaggagatcttcctgcagcagcccaacctgctggagctcgaggcccccatcaaaatctgcggtgatgtccatggccagtactctgatctcctgaggctatttgattatggtggctatccgcctcaggccaactaccttttcttgggtgattatgtggatcgtggaaagcaaagcctagaaacaatatgtcttcttttggcttacaaggtcaagtacccggagaacttctttcttctaaggggcaaccatgaatgcgcatcagtaaatcgcatctatggtttttatgacgagtgcaaacgcagattcagtgtaaagctgtggaaaacattcacagactgttttaactgcttgccagtgtcagcattgatagatgaaaagattctctgtatgcatggtggtctatctccggagttgaacaagcttgagcaaatactcaacctgaatcgccccacagacgtgcctgatactggattgctctgtgatcttctttggtctgatccttccaatgaagcaacaggctgggccatcaatgatcgtggtgtttcattcacatttggtcctgataaagtttctgaatttcttgagaagcatgatttggaccttatctgccgagcacatcaggttgtcgaagatggatacgagtttttcgctagccgtcaactcgtaacaatattttcagcccctaactactgtggagaattcgacaacgctggtgccatgatgagtgtagatgatacattgatgtgctcgttccaaatattgaagcctgcaaggaagatgatgggtggttcaactaataacaaatctggcttcaagtcattcaggggatggtgacaacggcctgatggtgggcacgctgcgttcgacagggggtacatcttacagcggctgcaactaacaggcatatgcattttcgcggaaacctgcttgggccttggaagggcaaagcagatgtagaactgtgcatcttccatgttggattaacacttgatgtaatgtattgttatcggtttttactgtgcggatctccttatgatatgggaggatgtgaatgagtactgccctcccctttgcgtcctaagattcggaaagaatccattcgccaat

SEQ ID NO: 22976 - DNA, 605 bp, Zea mays
  Clone ID: LIB3592-093-G2_FLI
tggagctagctagctagtagaggtcaatcaccaaaatggcgaggcagctcgttgtgcttgctctgcttttcgtgatcgccggtgtggcgcatggcgcgggggagtgcgggagagcctccgccgacagggtggcgctaaggatggcgccatgcatctcggctgccgacgacccgcagtccacgccgaccagcagctgctgctccgctgtgcacaccatcgggcagagccccagctgcctgtgcgccgtcatgctgtccggcaccgccagggctgccgggatcaagccggaggtcgccattaccatccccaagcgctgcaacatggccgaccgccccgtcggctacaagtgcggagattacacgctgccctagctgatgaagacgtcattaacgagaccgtgcgagtgaacctgcatgaacgaatgccattatgccatgcaactatgttgtgttgcgttgttggaataataatcgaatccgctagaataaatatgtacgtgcacgacggcctcttgcttgtatcactggactttgcttgtgtgctgtacgtcaaatatgttccgtttctctcatataagaaaaatctgcaatgcttgttattaagct

SEQ ID NO: 22977 - DNA, 948 bp, Zea mays
  Clone ID: LIB3592-094-A9_FLI
gcacgctctttctgtccctcgtgccgacgaccgaccgaccgccgccgccgccgccgccgccaaggtcttcttcaggccactcgccggcaacgagcatccaccaggaaaatgttgtgaggactgatgcaataactaagcttgctggatggacggatgcgattgcatcgagccactatggcctaccgatgatcttctcgtcaagtatcagtacatctcagacttcttcatagcccttgcgtacttctcgattccattggagctcatatattttgtgaagaagtcgtccttcttcccatacagatgggtcctgatccagtttggtgcgtttatagttctttgtggggcaacccatctgataaacctgtggacgttcaccacacatacaaagaccgttgcgatggtcatgaccatagcgaagatttctacagcagtcgtgtcttgtgcaactgctttgatgctcgttcatatcattcccgacttgttgagcgtgaaaactagggagttgttcttgaagaataaagctgaggagcttgatagagagatgggacttataaggacgcaggaggagactggtagacatgttaggatgcttacacatgaaatcagaagtactcttgatagacatacaattttgaagactactctcgttgagctaggaaggaccttgggtctggaagaatgtgcattgtggatgccatctcgaagtggctcaagccttcagctttctcatactttgcgccaccagattactgttggatcatcggtgccaatgaatcttcctgtcgtcaatcaagtgttcagtagcaacactgacttgctgcattgagtagtatgtcctaccagcggattgaattgcttgttctggggtgtgcggcgcgcgccccgttgattgttctgttgtaacttgtaatcccatattaatcgtgtaatatgaaattcaatgcaaat

SEQ ID NO: 22978 - DNA, 866 bp, Zea mays
  Clone ID: LIB3592-094-C6_FLI
cttttgcagggtttgtgcatgtatgcagacgcagcacaaagtcgaaatggacaagagggatggaaagttcagcccacagcctatggcagtgcccccggtgcaacaaatgacacgcatcgatcagcctatgccgcctcctgctggatatgcaccgcaaccagcatatgggcagccttatggtggctatccatctcctcctggccaaggttatccacctcctcctggccaaggttatccgccagctggatactcccagggcggtgcataccctccacccgctcaaggttacccacagggtggtggatatcctccacctggtcaaggttacccccagggtcagggtggtgcatatcctccgcctggttcttaccctccacaaggttcctaccccccagcagagggctcctacccagcacaaggttcctaccacccagcacagggctcctacccagcacaaggttcctattccccagcacagggcccctacccagcacaaggttcatatcccccacccccagcacaaggttcatatcccccagcacagggctcgtacccagcacaaggttcctaccccccacaggcttaccctggcaagtaaagatcacacgacaggtgaaccaaatatcgtgaacatgtaaacagtaggaccgctttagcgctataggttattttgataaaattctttactgttcagggtggcattcggtgaacaatatttctattttatatggtcaacctgtcaacatcttgtgttgatcatgtcgtgttgagtctatcctcttttttttttttcctgaataaggaatgacattgaactggaatgtatttgaatttggtgacaactcacgtggatattgttttggttc

SEQ ID NO: 22979 - DNA, 646 bp, Zea mays
  Clone ID: LIB3592-094-E5_FLI
gcgccagggcccccggcggcagaggcggtgccggtggaggcgggagcagcgtgcggccgtggggatcgagtggtcgaccggcgggacgtcggtgtcttcatctgggaaacggatacagaaggagctgctggacctcaacgcctccgactgctccgcggggcccaagggcgacaacctgtaccgctggctaagagctccaaggatcgccatatgaacgagggatatttttccttgacatcgtgtttcctcctgattatcccttcaaacctcccatggtaactttcaaaacaaggattttaccattgcaatattgattccactggtaaagtgcatttggacattctgaaggatggttggagtccagctttcactatttcaaaggtgttattggccatcaaagacatcatcaacaatccagatccatacaccccgcttgtgatgagcatttcacgtcagtatgtgactgatagagctaaacatgatgaaacagcagctgagtggacaatgagatttgcaagatagaggattctgtttgtatctaagcacgattgaccttgtaaaaaaatcttaatgtggcctgacgcctgagatggtgaatgttggcaaaggagccatcagccatgtattatttgatgtgagttgtgac

SEQ ID NO: 22980 - DNA, 826 bp, Zea mays
  Clone ID: LIB3592-094-F1_FLI
atcaccatgcgccgcaccgtcaagagcgttccccagagcatatggtacggccctgatcgccccaagtatcttggcccgttctccgagcagacgccgtcgtacctgaccggcgagttccccggcgactacgggtgggacaccgcgggcctctcggccgacccgcagatcttctcggagggcgggctggactacctggggaaccccaacctggtgcacgcacagagcatcctggccatctgggcgtgccaggtggtgctcatgggcttcgtcgagggctaccgcgtcggcggcggcccgctcggggaagggctcgacaaggtgtaccccggcggcgccttcgacccgctgggcctcgccgacgacccggacaccgccgccgagctcaaggtgaaggagctcaagaacggccgccttgccatgttctccatgttcggcttcttcgtgcaggccatcgtcaccggcaagggccccatcgagaacctcttcgaccacgtcgccgaccccgtcgccaacaacgcctgggcatacgccacgaacttcgtccccggcaactaactgactgagcaacgccgtacatgtgtactaccatcagatccatccattcgttcgtccgtccgtcgagtgaacagtgtggtcttctctgtactctacttgttcagatcgtaggcgtgtagtagttgcaccagccggcgtatgctcatgatcgatgtgtgctcatcaatcaatgtcaatggctgcctgctgtaagcggtcgatgtaaactaagcacagacgcatgtatcgtcatcagtggatgaatcaatctatcgatggctgtgccattcat

SEQ ID NO: 22981 - DNA, 990 bp, Zea mays
  Clone ID: LIB3592-095-C5_FLI
cagaggtccgcgagcaaacgccttcaagcccatctcggtagccggagaacgagcagcagcggaggcgatggcgtccccggatcccggccacacgccggcgcaaggcgaggaatctgcctccccctcctcgtggcctccccgaaagctccagagtttcacaccagggctgtggtcacaatacaaagcttatgaggatgcagttgtggagaacattaaaggaactattgcggatgctctggttcttgtgagagagcatcaggcggaggcaattggatgtgccactgttgcaggattcattctgttcagaggccctcgaagatttttataccgcaatacctttggccgtttaaagactgagaaggatttactgaatgatgccgagcaaagtatgatggagtaccaaacatctattcagaacttgaagaaagaatcaaaatacactcttgacaaagtagctatcggtgaaagcgatgtgcagcgtgggcgaactgatctgagatctactgggaagcagatacaatctcttataggttccatttacaaagcagaatctacagctgcaggtctgatggatagactaagaaccattccaaccaggcaatctctcgagctgcgagcagaggtggcttccatggcctccgatttgaagaaccagaggtgtgccttgcaggaaaggatcaacaaaatatctgaatatggtgtccgtgtctgaactgctgcaccgtctgtacatttcccctcatagagcctcttttggtcctcccgtacaataaactgtgaatccaccgtgaggtgcgcgttttggttagacaggttccgattctaaccatattttctgtcagcattttgaatgctaggacagacatggtaactcatcacaaccataaattgttcctatcactttaacgttgagcattgctcgtttctgggaagcagatgggctgatggctactatcttatatatgcgattgcaaggaaaaactttgttcc

SEQ ID NO: 22982 - DNA, 561 bp, Zea mays
  Clone ID: LIB3592-096-A4_FLI
ccttcctgtttctggagataccaagcacgagtgcagcaatggcgcatcccatgcctcccctctcagcatcacagagcacaatcaccaccgttctgaagatccttccaaaacctcctgctgctccggagagcagaagcaataattgtgcttttggggccaaattcgacagtaggagggcacttctatgcggcttggtcgctgctgctgctgctgctggcaccatgctgggcgctgacatcgctggtgctgcttcgaagaggcggcctccaccgccagcgccggcagaggcgaagaaagacccgaacgtcagcggagtgcaggctaaagtgcttgctagcaggaagaggaaggaggccatgaaggaagctgtggccaagctgagggagaaaggtaagccggttgataagtgaaggccagaaccagtgacccttgatcaagaaatgtaacttattgttaaataatatactccctctattcttctaaagtaataagccattaatttgaatagtctactcactttatgtgtacagatgagaataaaaatacaactattttgcttgt

SEQ ID NO: 22983 - DNA, 1094 bp, Zea mays
  Clone ID: LIB3592-096-E12_FLI
atctttgccacgctgccactcgggcaagagactgctcgaccggaccgacgagcgacgaagcgcgcacaaagagaagaacctcggagctgagatggcacaagccatggcgtcgatgacaggcctctcgcagggcgtcctgcccagcaggcgcgccgacagcagaaccaggacggccgtcgtcgtcgtcagggcgtccgcggagggcgacgccgttgcgcaggcgggccgccgcgccgtgatcgggcttgtggccactggcatcgtcggcggcgccttgtcgcaggcggcgcgcgccgagaccgtcaagaccatcaagattggagccccgccgccgccctccggtggactccgtgagtgcctgcccgcccgcgcgcgcctcatatacagtagccctgtttcttgtatatatacgtctcttgaatcttgatcgcgagttcagaatcgtttggagctgatttgtaagggtttagtttagattaaaaacatcggcaaaggataggtacagatatacgagctcagatcgaaaaccccatatgtttgcagctttgcacacacacagaaaaaaacatctgacatttgctatggcacagccgggactctcaactctgaccaggcgagggacttcgacctccccttgaaggagcggttctacctgcagccgctgccgccggcggaggcggcggcgagggtaaagacgtcggcgcaggacatcatcaacctcaagccgctcatcgacaagaaggcgtggccgtacgtccagaacgacctccgcctccgggcctcctacctgcgctacgacctcaagaccgtcatcgcttccaagcccaaggaggagaagaagagcctcaaggagctcaccggcaagctcttcagcaccatcgacgatcttgaccatgccgcgaagatcaagagcacccctgaggccgagaaatacttcgcagcaaccaaagatgctcttggcgatgttctcgccaagctaggctagacgcaatggctaataatggccatgtaatttcggacttgtgtttgttcatatggacccggcaaggcaatgtaccattttctgttgatattgtatcaggaagcacttaact

SEQ ID NO: 22984 - DNA, 705 bp, Zea mays
  Clone ID: LIB3592-096-G9_FLI
gttccctctcgtcttccccagttcccctacgccggtaatcccacgtcctatcagccgccgatccagccttgcttccatccatccatccatccatccatccatctcgtcgcttctctctgttccgcgtgcgatcgagtagatcaaaaggaggaggaggatggcgaggagttcgttcaagttggagcaccccttcgaaaggaggcaagctgaggctaaccgcatcagggagaaataccctgacagaatccctgtcattgttgagaaggccgagaggagtgacatcccagacattgacaagaaaaagtaccttgttcctgccgacctcacagtcggacagtttgtgtatgtggtacggaagcggatcaagctaagcgctgagaaggcaatcttcatcttcgtaaagaacaccctcccaccaacagctgctctgatgtctgccatctacgaggagaacaaggacgaggacggcttcctctacatgacgtacagcggcgagaacaccttcgggctgttctgagtgggcgccgctatggatccacattgggcaatgcctcctgtaaatactaaacatgcatcacaagaatctgtgtccataacgtaatctggtctgtctgtctgtctgtctgtctgtcattacgcaacttgacgtgcaatgcgataacacatttaagtaataatatatactactctgctttgggatgcttc

SEQ ID NO: 22985 - DNA, 1508 bp, Zea mays
  Clone ID: LIB3592-097-B3_FLI
tcggatttccttccgccttccgacagcggctgtctcggcgacccaaccccagcctgaccccacctcccgccgccgccgccgccgccgccgcgccttcgtcgtcaggagaagggtcccggtggctgcgtctctctcccctgcccccctgctccacactcggttcacgcgtcggctcgctaccgcaggccctcgactcgtacgcccgtccccggcggcgatccggccggcaccgtaaccctaggactccgacggagcaggaatgatgagtcatgaacaacaaattgtccctcctagtaagggttctgtgaatgggttcccccatagaaaactggataaggagggcagtggaacgcaaagtagaataaatttggtgaggtcatcctctggtggttttactaattcagaaaatggcatcaaactagggcatggaagccattccagggaccggctaatctatgttctaacacaacttattgggcatcatgtggacgtgcatgtgaataacggctctataatctctggaattttccatgcaacaaaccctgacaaagactttggcgtcgtcttaaaaatggctcaggtcataaaggatggttctgccagaggacaaagatatcctgctgttcttgtaaagaaacctgagactatgataataccggcaagggagcttgtacaagtttttgccaaggacatagaacttggcggcgagctgccaaaagttcctggcaatgacaaaaggaaggacttgctgattgattctgctattacccgctatcattatctcgaagagagggaacttgagcgctgggcaccagatggaggagattcagagtgtattgaactggagaagtatgaccggaagggaaataggagctgggaccagtttgaaaccaatgcagcattatttggggtaaagactactttcaatgaagaaatttataccacaaagcttgagagaggtcctcacatgagagagcttgaaaagcatgcttcgagaatagctagagaaatagagggagaagataccagagatattcaccttgcagaggagagaggcttattcctgggtgatgacctggaccatgatgaagagataaaatattcagcagtgcgtagagacaccgataacagcaagtacaagccaccatttactaaggtcccaagcagtacatgccatgttgattcgtttaacaggacagtcaatattgatccgaatgattcactggcatgttcatcaacaatggacaaagaatcatcatcccacatatttgatgacactgatgcatctgccactatccatacaaatagcgttagccagccaacatctgattatctgtcagatagacccttgtccaatgatgaaaacaggttggacagaaagctgaacaaagagagtaatgaaaacatggataacagaaagttgcaacatgaggataatttacctgatggtgccagacctcttatttcggaagcgttggatgggcgatcctcaagttcacatgcatatg

SEQ ID NO: 22986 - DNA, 1450 bp, Zea mays
  Clone ID: LIB3592-097-D6_FLI
cacttcgcctccgtctccgtggcgcgcgcgctcgcacgaacacgagtcccatgtcgtccaccgcagcgcgcgtcgtccacccggctgccgcggcgccgccgcctccccgcccacgccgcctggcgcccgcgaggtgcgcggctggatccgcgacggacacggccaccgcgggtccgacaagggtgacgaccgtcagcaaccgcggggactccttggcgatatgccgggtgctcaacggcatgtggcagaccagcggagggtggggccgcatagaccgcgacgccgcggttgacgccatgctcgcgcacgccgacgccggactctccaccttcgatatggctgaccactatgggccagcagaggatttgtatggcatgttcatcaacagaattaggagggagcgcccacctgagtttcttgaagaagtcaaggggcttacaaagtgggtaccacccccggttaagatgacaagaagttatgttgaggataatatcaacagatccaggaagaggatggatgttactgcattggacatgttgcagttccactggtgggagtactcaaatccaggctacttggatgcgctaaagcacatcacagacctgaaggaggaaggcaagataaagactgtggccctaacaaacttcgatacagacagactgcaaataattctcgaaaatggaatcccagttgtgagcaaccaggttcaacattctatcgttgatatgcgccctcagcagagaatggcagagctttgccagctaactggagttagacttataacgtatggcacagtgatgggtggtcttttgtctgaaaagtttctcgacaccaatgtatcaataccttttgctggtcctcctctaaataccccatccttgcagaaatataagaggatggttgatgcttggggtggctggagcctgttccagactttgcttcaaaccttaaagaaggtgtcactgaaacacggtgttactatttcaacggttgctgtgaaatacatactgaaccagacgtctgttgcaggttccatggtcggtgtgagattgggactctctgaacacatcaaagacaccaacgccatattctcacttgaattggatgaagaggacatgaacatcatcactgaagtgtcgaagaggggcagaaatttgatcgatattattggggattgtggtgacgagtaccgagcttagttggccatgctgctgctgggctactacagacctatatactcgtgcccaattttgcacagctctaaatttttgcctatttgggtctagcggctcagcgcactgttgaggcaaccatatacctgaatgcctattattcaggcgctagcatgtaccctccagtcctcaacagccagttataaaactgtaaatacacagcgatgcagatcgctaatgtggtaacttgttcagtcctttttagcgattactgtccc

SEQ ID NO: 22987 - DNA, 1391 bp, Zea mays
  Clone ID: LIB3592-097-G11_FLI
cctcgccacccaaattcatcaagctcaacacgatctcaattcgattccagttcatccatccaacgcctcccgcctgtacgtatagaagaaagaaggaagaaccgtcaccgtacgtcctcgccagtacaaataatggccctgctcaaagccgcgcgcgtcgccgatgtgcccaccctggacgtggtggtggcccccggcctggtggcggttgccaaggcgaggagcgccgcggctgtgggcggccggttctcggtgatcgggcaccgcggcaaggggatgaacgcgctggcgtcggaggacccgcgtctgcgggatgtgcgcgagaacacggtccgctccttcaacgacgccgggcgcttccccgtcgactacgtcgagttcgacgtccaggtcaccaaggacgggtgcccaatcatcttccatgacaacttcatcttcacacaagacgatggtaagatttcacaaaagcgtgtggccgatattcagctggaagacttcctgcagtatgggctccagaatgagcaggggaaggttggcaagcccctgcttcgcagattgaaggatggcaggatggtgaactggaacgtgcaatcagaggacgctctttgcacactcgaagaagcgttcgagaaggtcaatccaaggttgggcttcaacgtcgagctgaaatttgacgacagtcttgaatacaccgaggaagagctcactcgcatcctccaggccatcctgaaggtggttttcgagtacgccaaggacaggcctatacttttctccagttttcagcccgacgctgcgcagctcatgcgcaaattgcaaggcacataccctgtctacttcttgacgaacggagggacggagctatacgccgacgtgaggaggaactcgctggaggaggccgtcaagctgtgccttgccggtggcctgcaaggaatagtttcagaagcccgcgggatcttcaggcaccctgccgccgtgccaaagatcaaggaggctaacctctccctgctaacctatggaacattgaacaacgtgccggaggcggtgtacatgcagcacctcatgggagtgaacggggtcatcgtcgacctggtgccggagatcaccgaggcagtctctgagctcatcgccctgcccgagcccgacctcgacctggaagtgggcagcttgagcaaccaggcggcagctagaggagccacaacaccgaatttctcgcagcgcgagatctcgttcctgctgaggcttattcctgagcttgtccaataatgcctagacttcctggtgtctgtctgtctgtctatcatggatgaattgactaatgtgttactgatgtactgatccgcatacaagaaaaaaaagcccttgtgcagggtattatttgttgtcgtgggttg

SEQ ID NO: 22988 - DNA, 1156 bp, Zea mays
  Clone ID: LIB3592-097-G8_FLI
gcaaacaagctcgctcgcaagcgcaacccacccacgtctacggtctaccacacgaagcatcgtagccagccagccagctaaacccacaccacacatggccgggatcgtggtggtgttcgacttcgacaagacgatcatcgacgtggacagcgacaactgggtggtggacagcctcggcctcaccgacctgttcgagcgcctcctccccaccacgccctggaacacgctcatggacacgatgatgggggagctgcacgcgcggggcaggacgctggccgaggtgaccgaggcgctcagggcggcgcccatcgacccgcgcgtgcccgccgccgtcagggccgcgcacgcgctcggctgcgacctgcgcgtgctcagcgacgccaacgccttcttcatccacaccgtcctggaccaccacggcctgctcgcctgcttctcccaggtcaacaccaaccccagccgcgtcgacgcccacggccgactccgcatcgggccctgccacgacccgcgcgcggcgccgcacggctgcggcgtcggcacctgcccgcccaacatgtgcaagggcctcgtgctggaccgcatcctccgcgaggccgaggccgaggccgagaccgcatcctccgcgaagccgcgcgtcatctacctgggcgacggccgcggcgactactgcccggcgctgcggctggcgcgcacagacttcgtgatgccccgcaggggttaccccgtctgggacctcatctgcgaggaccccgcgcgcctgcaggcggaggtgcacccctggaccgacggcgccgagctggaggagacgctgctgcgcctcgtgcggagggcggtcgtggaggacgccgcgctgccgccgccgccgccgccgccgctcgactgcaagctcgagtccatgcccgtcgccgcgcaggacggtatgcccatcgtgccgctgggcgtcaagaactgatactgtctctggttcagaattgaggtcgccggttagagctccaacaaattccgggcgaggcacggcgtaccgttagtagcgtttcactaattttgtgcgtctgtggtgtatccgtcctgatcgagtctgttgctgctgaattggttacgactcgttgtatcttactaaaaaaggtaaagttaataatggattagacatggtact

SEQ ID NO: 22989 - DNA, 991 bp, Zea mays
  Clone ID: LIB3592-097-H12_FLI
aagcgcggctacacataaatatattccggccttccctctcttgtgctcttggcatctcgttgctttcgtgcacaaggtcgtcagagaccaggtgtggcagcttgggcacgagaggtcgatcagcagcaggccggtgcagcaatggcggccattatgggcgtgaagaagggtctgctggtgctggctcttgggctcgccatggccgctacctcgtcggccgtcatctacaaggtcggcgacacctccgggtggaccatccttggcaacgtcaactacaccgactggacttccaagaagaacttccgtgtcggagacaccatagagttcacgtacccgccgggcatccacaacgtgctggaggtgaagaaggccgactacgacagctgcaccaactcgacgccgatcgccacgcacagctcgggcgacgacaagatcgtcatcaagagccccggccaccgcttcttcatctgcggcgtgcccggccactgcgccgcgggccagaagctcaacgtccgcgtcctcaagacgcgctcctctgacgccccttccccggcgccctccgcgcgctcagcagcaggctcggcggcggcgacccccagccccaccaccgagacgaccggcgcgtcgtcggcctcgggcggcagcagcacgcccgacgccacgaccgcgcctgcgcccaatgccaacggcgcgggggtcggtgcggcaggccaccagaacgtcgtcgtcgtcgtcgtcgctatggcggtggcggcgctcgcctccatgacgatgctacactagctcaccactccctatcctacatattatatatagtggtctcgtgtgcatttgtctatatgcgatttttttggccatgatgcctgtggaggttttcgtttcttgtctctgttgttagctgctgatgtggtgtggtcgtgtggattatacatattgttgagacgttgtgttttcctctgctttcttgtctccaacgttcttagtattttcc

SEQ ID NO: 22990 - DNA, 966 bp, Zea mays
  Clone ID: LIB3592-098-B2_FLI
ctaggttttttgattttagccgccgccgctgctcatctcacatccctcgagaagacgcctgctcctcgccgatcgatacgatggccgtcttctccgacctccacaccgccgacggcctcaagtccctcgaggctcacctcgccggcaaaacctatgtgtctggtgactccattactaaggatgacattaaggtcttcgccgcggtgccgtcgaagcctggcgctgagtttcctaatgccgcccgctggtacgagaccgtctctgcggctgtagcctcaagattccctggtaaggctgttggtgtaaatctgcctgcgggatcagctcctgcggcagctgctcctgcggatgaggctgaggatgatgatgaccttgatctttttggtgatgaaactgaggaggacaagaaggcagctgatgagcgtgccgccgctgccaaggcctcttctaaaaagaaagaaagtggtaaatcctccgtccttatggatgtcaaaccatgggacgatgagactgatatgaagaagctggaggaggctgtccgcagtgtccagatggagggtctgacttggggagcatcaaagcttgtgcctgttggatacggcatcaagaagatgactatcatgttgacaattgtcgacgatcttgtgtccatcgacactctaattgaggaccaccttacgcaagagcccatcaatgagtacgtccagagttgcgacattgtggctttcaacaagatctagagttcagtttctgagattgggcaacggcagcggctcagctcgtcaagtttgtgctgggatgccagtttatcccttctagtctattacagaaatgttgttcggagctgagtctattataaacatcttggtctgagtttattgttgagtggtgccagtttttttcaatatacatttatcttaaaaacagcggtactgatgtttttttgtctaaagttaatgagtttgc

SEQ ID NO: 22991 - DNA, 1016 bp, Zea mays; identical to SEQ ID NO: 84
  Clone ID: LIB3592-098-F12_FLI

SEQ ID NO: 22992 - DNA, 1951 bp, Zea mays
  Clone ID: LIB3592-098-F5_FLI
cctactctctcggaagcggcgccgctgccgccgcagcggcgaggagccagccatggcggcgcacgcgacgctccccttctcctgctcctccacgctgcagaccctgacccgcaccctctcctcgcgcggggcccaccagctccgcgggggcttcctccgcctcccctccctcgcggcgctcccgaggctggcccacccctaccgccgccacgtctcggcgtccgctgcggcggcgcccaatggcgcctccgttgagggggagtacgactacgacctcttcaccatcggcgccgggagcggcggcgtccgcgcgtcgcgcttcgcctccgcgctctacggctcgcgcgtcgccatctgcgagatgcccttcgccacgatcgcttcggacgagctcggtggcctcggcggcacatgcgtgcttcgtggatgtgttccaaagaaattgctagtgtacgcatccaagtactctcacgagtttgaagagtctcgtggatttggatggacatatgagactgatccgaagcatgactggagcactctcatagccaataaaaatacagagctgcagcgcctggttggcatttacaggaatattttaaacaatgcaggagtcactctgatcgaaggtcgtggaaagatagtcgatcctcatactgtcagtgtgaatggtaagctctacactgctaagcacatactagttagtgttggtggccgaccatcgatgccagatatccctggtatagagcatgttatagattcggatgctgcgctggatttgccttcaaaacctgagaaaattgcaatagtgggaggtgggtatattgctttggagtttgctggcattttcaatggcttaaagagtgaagtccatgtgtttattcgtcagaagaaagttttaagaggatttgatgaagaggttagagattttgtcgctgaacaaatgtctttaaggggcatcacgtttcatacagaacagagccctcaagctataactaaatcaaatgatggtctgttatctttgaagaccaataaagaaaattttggtgggttctcacatgtaatgtttgcaacaggtcgcagaccaaattcaaagaaccttggactggaagcggtgggggttgaaatggataagaacggtgcaatagtggttgatgagtattcacgtacctcagttgattccatttgggctgttggagatgttaccaatagggtcaacctgacaccagttgcactgatggagggtggggcatttgcgaaaactgtctttggcaatgaacctaccaaaccagattacagagctataccttctgctgtgttctcccaaccaccaataggacaagttggtcttactgaggagcaggcaattgaagagtatggagatgttgatgtcttcgttgccaacttcaggcccctcaaggccactctgtctggactacctgatcgtgtattgatgaagattcttgtgtgcgctacgtcaaacaaagttgtaggagtgcacatgtgtggtgatgatgcacctgagataattcagggaattgcaattgctgttaaagctggattgacgaagcaagattttgatgccaccattggcattcaccccacatccgctgaggaattcgtcacaatgaggagcccgactagaaaaattcgaaaaagttctacagatcaggtagaatctaaagatgaggttgtaagtaagcagtagataccattttttcctaggaggtgttctcgggggagggagtattcctgctgcaggacgacagctggacggaattttggaatacaccggcagagtagctgaaataactgctaggaatttctgagaaatttcatgttagggaaccaacgatgctgtttaatagaattggctgtacatacctgtccgccgagctattttcctgtgtcttgtacgttgaaataaaatactgcaaatgtttgccttacggtc

SEQ ID NO: 22993 - DNA, 1970 bp, Zea mays
  Clone ID: LIB3592-099-D2_FLI
ctctctttctctttctcccctgcttccccttccattcccgacggacgacgcaacaacccgcctgccctgccctgcctcacgctcgcacccgcggcggcgcggagggccggaacctaaaccctaaccctagcggcccgcccgcgatggggcagtgctacgggaaggcaggcggcgcgtcgtcgcggcgggcggaccacgacgaccacgcccacgcggtcgcgccgccgtccccgctgccggccaacggcgcgccgccgccgcagcccgccacgcccgggcgccgcatgtccggatcggccacgccggtgcaccaccaggcggcgacgaccgcctggcccagcccgtaccccgccggcggggccagcccgctccccgcgggcgtgtcgccgtcgcccgccaggtccacgccccgcaggttcttcaagcggcccttcccgccgccctcgcccgccaagcacatcaaggccactctcgccaagcgcctcggcgggggcaagcccaaggagggcaccataccggaggagggcggcgccggcgtcgccgccgactccgccgaggccgagcgcccgttggacaagacgttcggcttcgccaacaacttcggggccaagtacgacctcgggaaggaggtcgggaggggacactttggccacacctgctccgccctggtcaagaagggcgagtacaagggccatgccgtcgccgtcaagatcatctccaaagctaagatgacgacagccatttccattgaagatgttcgtagggaagtcaagattttgaaagctctatcagggcacaataatctcgtcaaattctatgatgcatgtgaggacgccctcaatgtctacattgtcatggaattatgtgaaggtggagagttgctagatagaattttggctagaggcgggagatatacagaagaagatgccaaagctatcgttgtacagattttgagtgtagtgtccttctgtcatcttcagggagtagttcatcgtgatttgaagccagagaattttcttttcgcaacaagagatgaaagtgctcctatgaagttaattgactttggtctgtctgattttattagaccagatgaaaggctcaatgatattgttggaagcgcatattatgtcgctccagaggttctacacagatcgtacagtatggaagcagacatttggagtataggtgtcataacatacattctgctctgtggcagtcggccattttgggcaaggacagaatctgggatctttcggtctgtattaagggctgatcccaactttgacgattcaccatggccttcagtatcggctgaagctaaggattttgtgaagagatttctgaacaaggattaccgtaaaagaatgactgctgtccaagcactgactcacccttggttacgagatgaacaaaggcaaattccattggacatactcgttttcagattagttaagcaatatcttcgtgctactcctcttaaacgtttggcattaaaggcactatctaaggctttaagggaggatgaactgttgtatcttagattgcagtttaagctgctcgagcccagagacgggctcgtatcgctcgacaactttcggacggctctgacgagatacgtaactgatgctatgagagaatcaagggttcttgagtttttgcacgcgttggacccgcttgcgtacagaaagatggacttggaagaattctgtgcggcagcaatcagcccgtaccagctggaggctttggacagctgggaagaaatcgctggaacggcttttcagcacttcgaacaggagggcaaccgagttatatctgtggaggagttggcgcaggaactaagcctcgccccgactcactacatcgtgcaagactggatcagaaagtccgacggcaagcttaactttcttgggttcaccaaatttttgcacggtgtcacgatacggggctcaaacacgagacgacactaaaat

SEQ ID NO: 22994 - DNA, 481 bp, Zea mays
  Clone ID: LIB3592-099-F9_FLI
ggaaacacaattcagcagcacacgcaccaccaaaaagagggagaagagtcttcgcctcgcggagagacgtgctgcctagcataatatatagccacgaaatagagtgctgggtctagctatagctaactagccagcagcagcagcagcgtgcgtgcgttcaaggcagcagaggtagagaggttttgagagagaatggcaagcaggcaaggtgtagccgcctccatgttcgccacggcattgctcctcggcgtctttgcatccatcccacaaagtgctgaggccatcggcgtatgctacggcatgagcgccaacaacctgccggcggcgagcacggtggtgagcatgtacaaggcgaacggcatctcggcgatgcggctgtacgcgccggaccagggcgcgctgcaggcggtgggcggcacgggcatcagcgtggccgtgggcgcccccaacgacgtgctgtcgaacatcgcggctagccccg

SEQ ID NO: 22995 - DNA, 548 bp, Zea mays
  Clone ID: LIB3592-100-F5_FLI
ctcctctttcccaataatcccaggcgccgcgatgcaaacaatctcctcttctctccccagattcactcaccgtccgtccgtccagggagccatggcagcagcctgcatctgtctgcagctctctctcccaagcaaccattcttcctctgcatgtcctccagcatacaggaagcgtgtcgcgctagccccagggagaggaaaccgtcttctctgcactgcatctggcgcctcttcttctgtggtggtgaccaaggagcaggaggaaggatctcctgagcccgaaatctttagctacaaagacgaccccaacttcaggtaaacctacttgttcgtcctcaaatctcctagatagcacttacgttttagcgaattgtgcgtcgatgcacacacactcacaccacacacaggggctgcaagggctgcggcagggacgagcttcagaggggctgcaatggacaaggccggatccagggcggcatagccgccgtcccgggcttcggctggtggcccatcaaggcgtaccggccgtgccccggcttcgtcgcgtc

SEQ ID NO: 22996 - DNA, 1155 bp, Zea mays
  Clone ID: LIB3592-101-C8_FLI
ccaattaactagcttcttctagctctagctaggctcgtctgctgcaagaaggtaacagcgcaggcatggaggggaaggaggaggacgtccgcctgggcgccaacaagttctcggagcgccagcccatcggcacggcggcgcagggcacggacgacaaggactacaaggagcccccgccggcgccgctcttcgagcccggggagctcaagtcctggtccttctaccgcgccggcatcgccgagttcgtcgccaccttcctcttcctctacatctccatcctcaccgtcatgggcgtctccaagtccacctccaagtgcgccaccgtcggcatccagggcatcgcctggtccttcggcggcatgatcttcgccctcgtctactgcaccgccggcatctccggcgggcacatcaacccggcggtgaccttcgggctgttcctggcgaggaagttgtccctcaccagggcggtgttttacatcatcatgcagtgcctgggcgccatctgcggcgcgggcgtcgtcaaggggttccagcaggggctgtacatgggcaacggcggcggcgccaacgtcgtcgcgcccggctacaccaagggcgacggcctcggcgccgagatcgtcggcaccttcatcctcgtctacaccgtcttctccgccaccgacgccaagaggaacgccagggactcccatgtgccgatcctcgcccctcttccaatcgggtttgccgtgttcctcgtccacctggccaccatccctatcaccggcaccggcatcaaccccgcgcggagccttggcgccgccgtaatttacaaccagcaccatgcgtgggctgaccactggatcttctgggtcggccccttcatcggcgctgcgctggctgccatctaccaccaggtgatcatcagggcgatcccgttcaagagtaggtcttaaaggagccgatgctgctgcttcgagatgctgccggtcttgaaaggatggattcgtggctgtttcaaatgatcccctactatgttacgtggagttccattcctctttcaaagttcggagctgcttttatccgaacccagacttgtaattcatctgtaccaattgtgtaatatgccgcgcctctgttatgtgcaattcaaaattatgagacagcgagtcaagcttt

SEQ ID NO: 22997 - DNA, 1313 bp, Zea mays
  Clone ID: LIB3593-006-G7_FLI
cgctactctctcccttctcactaccccgcccgtcaaagcgagagcgccgtatcaccggtctatccatcccttcaccgctgcctcgatccgcgccgaaagatacctttcccccccttcctctcgcgccgccgttttggtgcgaccatggcggcggagggggaggccaagaacccgtccggcggtggggaagggggtaacccccagcaccagcaggcagtgcaggctgcgccggcggagccgccaacggcacagggggaagcggtgcaggaggctggagcgcaggtgacggaacaagagccggagggggagaaggcgaatcgagatggggagggcggcgcgggggagaaggacgacggcgcgtgcagagatctggttctggttgaggatccggaggtgctcgccgtcgaggatccggaggaagctgcagcaaccgcggcactccatgaagaaatgaaagcgctcgtggcatccgtccctgacggtgctggggcagcattcacagccatgcagcttcaggagctagagcagcagtcccgggtttatcagtacatggctgcccgagtacctgtgcctactcacctcgtcttccccgtatggaagagtgtaaccggtgcatcctctgaaggcgcccagaagtaccctactttgttgggcttagcaacactctgcttggacttcgggaagaaccctgaaccagaaccagggaggtgccggcgaacggatggcaaaaaatggcgatgttggagaaacactattccaaacgagaagtactgcgaacgccacatgcatcgcggtcgcaagcgtcctgtacaggtcgtcgaggaagccgagcctgactctgcttcaggctcaaaatctgctcccagcaaggccaccgaaggcgccaagaaggttgacgacaagagcccaggtagcaagaagcttgccgtggcggcggcagctgcagctgctgtgcagtctacgtaattgatgcagcattttagtagtcgcaggaagagcatggcggcgctggcaactagcgccttcttttcattgcatgtgatctttagctataacctcatttagcacactcccagtggtgtccgtgggaggaggaagccgcaagcacttcccccgtagggtgtcgactgaaaaaattcacttgtagctgtatagtttgatctctcgctttgtcgtgcctccggccttcaggtaggcgatgcggcatgatgttataaatcctctcccagaactgacaatatcgcattgtaacccaagaagccggtgcaagaacctgtgaaactgcattgatgtgccttttgacgtccaccttt

SEQ ID NO: 22998 - DNA, 394 bp, Zea mays
  Clone ID: LIB3593-007-B11_FLI
gccgtccgtccgatgggaacgatctgccggcgccaggcggccgaggccgacgacggcgaacacgtctgggccgcccctccggtgccctagcccccacacgcccactataaaatcagctccatttctggacactctcatttcatttaccacaccctgctctcgctcttgttgtgacggtcgattcgcttgtacaagctagcaaccttgagatccagccaagatccagccatgagggagattctccacatccagggtggacagtgcggcaaccagatcggttccaagttctgggaggtcgtctgcgacgagcatggtatcgaccccaccggacgctatgtcggcacctccgacctccagctcgagcgcgtcaatgtctactacaacgaggcctcgt

SEQ ID NO: 22999 - DNA, 2068 bp, Zea mays
  Clone ID: LIB3593-007-D5_FLI
cttttttaaagactgctactattaaaacttaacgatgcctgcaacatccactaagcccgaatataacgttgatagcatagatgacgagttagctaatggcccattggccaagagaagctgcagagatcccctctgctgcttgctttttgtcctttttatgggaggtatggttggtatagccatatggggttatactcaaggaaatccaaaccttattggaagaggctatgatactgatgggagaatgtgcggtgtcgatgatgctgtcaaagactatccttatctttactttcccacaccagttagtggtcagttaaacaaggcactttgtcttagctcttgtccaacatccgactccttgccagccaccttaggttgtaaaacaactactgaataccctgattgtgtggctgatggcaataaccaaactttggtcgcagactatgcatctaatagttatgttggcaatatatatatttactcaacaaaagaatacgtctcaaggttttgtattccctctgaagccggagaacttctcaaaactgccacagctactatgatgaactcaagtggtgctgatattttggaacaatggattggcgatatcagagaaacatggcctgttattgctgtttctattgctgttgcctttgtcattggatttacctatatggtgctcctaagatattgctctggtgttttgacttggttcgcaatattagctttcatcgcaggtacagctatcctgggttggagattctatgagtctgctaaaaagctggaaacccaaaacacagaagctggaaataccgatgatgacagtacgacctctaagactgttttaatggaaaaggttattgcctatatctgttggggcgttgccggtttcacattcctggcagtactttgcttgtatagcagaatcaaattagctattgctattatgaaagctgctgctgactatgttaaggacacaccctcagtcttccttgtaccacccgttactgtcgttattcttcttatcttctatgctttctgggccggtgctgctgtgttcttggtcagttctggtgaggctacccacaccgcaggatctgtttttggatcattcaccttcgataagactcttaaaagattgttgatttatcacttgtttggcctattgtggttcaacgcttttgttattgctgccactcaattcgttttggctagttcaactgctctctggtatttctcacaaggtactggtcaagctgctccaaaaactatcagaacaagtgtcaagagattcttcagatatcattttggatcaatcgcctttggatccttgatccttgctcttatccaacttgttagaattattctagcttatatggaagctcaagctaacagaatgaaaggaaaagataacaagatcgtcaaatttactctgaaatgtctccagtgctatgttggttgctttgaaagattcatcaagttccttaataagaacgcttacatacagattgccttgtcaggaaagagcttttgtggtgctgccaaagacgcattcgtgcttattgcaagcaatcctttgagaatgggagttgtctctagtattggaagcatctttgtgttcttcggaaagattttcattgctgccattaccgccctcattgctttcatcgttttgactaactgggacagatacagtcaaaatatctattcccctttcatcccaactttggtcatcttcatctttgcttatgtcgttggagctatattcatgaccgtttatggacttgctgcagatgccattttggcttgcttcatccttgatgaacagattaacaagaagaagaatgctccccctcgtcattgcccaagctctttgagagatttcttggacaaccataaaagaaattaaatattaatggtgcagtgaaaagattaatgaataataataaattttttttaatatattagtaagcttttatcccatcaaccgaataaagaaacttatatattgcataagactatgaaatagttttttatatatctatttgcacagtttttcagaaatcacaat

SEQ ID NO: 23000 - DNA, 2209 bp, Zea mays
  Clone ID: LIB3593-007-E1_FLI
ccagagttcacaaaaaaatcacaagcaagcagttgcgggtgtagctcgcaacaatggcgacgaaccccggcctcttcaccgagtggccgtggaagaagctcggcaacttcaagtacctgctgctggcgccgtgggtggcgcacggcggctacctagcggcgaccaaggggtggagggcggccgacctggggtacgtggccatcctcccgtcgctgctcctccgggcgctgcacaaccaggcgtggatcacggcgtcccgcctgcagagcgcgcgcggccggcggcaggtcgtggaccgcggcatcgagttcgagcaggtggaccgcgagcgcaactgggacgaccagatcctgctcagcggcatcctcctgtacctgggctccacctacctgccggggggccagcacctgccgctgtggcgcgcggacggcgccgcgctcatcgcgctgctgcacgccggccccgtcgagctcgtctactactggctgcaccgcgcgctgcaccaccacttcctctactcccgctaccactcccaccaccacgcctccatcgtcaccgagccaatcacctccgtcatccatccatttgctgagctcgtggcgtatgaactattgttctcaatcccattgattgtgtgcaccttgaacggaactgcttcaattattgcatttgagatttacgtgatctacatcgacttcatgaacaacatgggccactgcaactttgaattggtgcccaattggctcttcaaatggttccctcctctcaagtatctcatgtacacaccctcgtttcattctcttcaccacactcagttcaggacaaactactccctgttcatgccattctatgactacatatataacaccatggacaagtcatcggacacgttgtatgagaagtcactcaagggaaaagaagaaacggcagatgtggttcaccttacccaccttaccagcctgcactccatctatcatatgaggcccgggtttgcagaatatgcttctagaccttacactgccaagtggtatgtgcggatgatgtggccgatgtcatggctctccatggttctgacatggtcatatggttcttcatttactgttgagaggaacgtcatgaagaaactcaaaatgcaatcatgggtcatcccaagatacagtttccattatggattgagttgggagaaggaagcaatcaatagcctcgttgagaaggcaatatgtgaagctgacaagaaaggagctaaagttgttaccctcggactccttaaccaggcacataacctcaacagaaatggagaactttatcttcagaagtgcccaaagttgggagtaagactcgtagatggcaccagcttagctgctgcagtagttgtgaatagtgttcctcaaggcacagatcaagttgttctcgcagggaatatttccaaagttgctcgtgctgttgccgcagcattgtgtaggaagaatatcaaggtagtaatgaccaacaagcaggattaccattttcttaagcctaacatggcagaagatgcagctgagaaccttttgttttcaaagacaactactgcaaaggtgtggttaattggggatggtctagatgcttctgagcagtttaaggcacagaaagggacccagtttatcccatattcacagtttccaccaagaatggcacgcaaggacacctgcacctactcgacaactcctgcaatggttgtacctaaaacactacagaatgtgcactcctgtgagaattggctgccaaggagggtcatgagtgcatggcgcattgctggaatggttcatgcattggagggatggaacgagcatgagtgtggggacatcgtgctagacatggagaaaatgtggtctggtgctcttctgcatggtttccgccctgtggctcaagtttgattctccagttgcaaatgcaaggcagcacaataagttattgaaagttataacataatgctcgcgagaactatgctacatacatatcagtatgttggtgttctgtacttctgtttgtccatgctctgcctcttatcacttaagacatctgctatctatgaagttaagatgaactcatgtagtgtaaaaaccattctgcagaagcagggtgaaaaatagcatctctacaatggtaagaggggatgggatgtagtatataagtgagtctgatctactgctagatgtttactactttattc

SEQ ID NO: 23001 - DNA, 502 bp, Zea mays
  Clone ID: LIB3594-008-A10_FLI
cccattgctcgttctgtcccttcgttcacaacctcctccacgaccaaacgatccgggttccagcggcggcggcggcggcgaagatgatcataccggtgcgctgcttcacctgcggcaaggtgattgggaacaagtgggacctctacctcgacctcctccaggccgactactcggaaggggatgctctggatgctttggaattgttccgctactgctgcaggcgaatgctcatgacccatgttgacctcattgagaagttgctcaactacaacacactggagaagaccgagacaagttaagtgagcaagcatatcatgctctgaaagcactactgtttcgcagtatcatatatattgtaggcggtatgttgtctcttctctatcaggagaggattgttgtcagtgtgaacttgcttttgctcacgagcattcaaggactgacagtgcatgttgcatctatgccacgatgttggagattttaatcgatataataactgctaact

SEQ ID NO: 23002 - DNA, 1397 bp, Zea mays
  Clone ID: LIB3594-008-A5_FLI
cgccgaagtagccaagacaacacgagcagcgaaacgccatctattcccgactctgctgcacctgcacctccgggccgccgccgagatgggcgcggatggcgggctgaaccgggcggcggagaagcccagggatggagagggcggggaggcgagggtgttccggtgcacggactactcgctgccgcggacgacgctggcgctggcgctctggctgggcggtatccacttcaacgtccttctcgtccttgcgtcgctcttcctcctctccggccgcgccgctgccatagtcgtggcgttccagctcttgttcatgttcgcgcccgtcaacgacagggacaaatggggccagagcgtcgccaggttcatatgcagacacgcaatgggctacttccctatcactctgcatgtggaggactacaagtccttggatcccagcagggcttacgtgttcggttatgagccgcactcagtgctgccgataggtctgtcggctcttgctgatcttgttggctttctgcctctcactaagatcaaggtccttgcgagcagtgcggtgttctacaccccgttcttgagacagatttggacatggcttggcttggtacctgcgacaaggaagaatttctactgctaccttggagctggttatagttgtatcgtagtccctggtggtgtacgggaaatgcttcatatgaacaatgattcagaggttgcttttcttaaatcaagaaaaggttttgtcaagatagctatacagtctggatgtcctttagtcccagttttctgctttgggcagagctatgcatacaagtggtggaggcctggtggtaaattgtttatcaagatcgctagagcagttaaatttactcctattatcttctggggtagatttggcacaccattccccttcccaaaacccatgcatgtggtcgtgggtaaacctattgaagtcaataagattccccatcctacaattgacgagattaatgaagtccatgaacagttcatcattgccatgcgggacctctttgagaagtacaaggcgaaagctggatatcctggccttcatctaagagtcctatgacattccacaaccagactcaaagttagaattcagcaataacatggctctattactcttccctcaactggggtgtcaaactgcacctcgcaggcactcgggcggtagttgttgcattatggtgatgataataaggctccagcaccgatgccaaaacatgcacgagttggtcacgagtcagagccttttgttgctggcttaacttttttctttaatgttgcaaagataagataatgtaattactggttatgtgatgttgcatatgatatgagaatatgaggattggtgatatataagctcctgtacatgcagctgt

SEQ ID NO: 23003 - DNA, 991 bp, Zea mays
  Clone ID: LIB3594-008-B1_FLI
ctcaaatactgatctcactgatccagtatggctatggcaaaggcaggcgcgccgagggtctcggcggcccagctggtgactctcgggctatcactcctctgcgctgtcgccggcccggccgccgcgcagaactgcggctgccagccaaacgtatgctgcagcaagtttggctactgcggcacgaccgacgagtactgcggcgacgggtgccagtcgggcccgtgccgctcgggcggcggcggcagcagtggcggcggtggtgcgaacgtggctagcgtcgtcaccggctccttcttcaacggcatcaagagccaggccgggagcgggtgcgagggcaagaacttctacacccggagcgcgttcctgagcgccgtcaaggcgtacccaggcttcgcccatggcgggtcgcagatttctgctacatcagcgagatcaacaagagcaacgcctactgcgacccgaccaagaggcagtggccgtgcgccgcggggcagaagtactacgggcgcggcccgctgcagatctcgtggaactacaactacgggcccgcggggagggccatcggcttcgacgggctcggggaccccggcagggtggcgcgggacgccgtggtggcgttcaaggcggcgctctggttctggatgaacagcgtgcacggggtggtgccgcaggggttcggcgccaccaccagggccatcaacggcgccctcgagtgcggcgggaacaaccccgcccagatgaacgcgcgcgtcggctactacaggcagtactgccgccagctcggcgtcgaccccgggcccaacctcacctgctaggctaggcggcatcggcggacggcgggggccttcaggccttgtgctcggcgtcgcatcgcaccctcgcgcgcgaaaccgagcaatagtgacaataaaacgccggggctagctgagcctgtttgttcgacttcgacctgaataatgaagcagctgtgatatgcatgttgtttcgacac

SEQ ID NO: 23004 - DNA, 1970 bp, Zea mays
  Clone ID: LIB3594-009-B9_FLI
ctctctctctctctatctctcatttcctcacgcacgtctcgcaactgccgcggcacaccgcgccgcttcttctcctcctcctcctcctcctccttccgagccgagagaaaggctgctgccagagggacgaggacgagcgaggatccttccgagcgatggagcagtacgaggtggtggagcagatcggccggggcgcctacggctccgcctacctcgtcctccacaaggccgagcgcaagaggtacgtcatgaagaagatccgcctctccaagcagaacgacaagttccagcggaccgcttaccaggagatgtccctgatggcaagcctcagcaacccgtacatcgtcgagtacaaggacggatgggtggacgaggggacctccgtctgcatcgtcacaagctactgcgaaggaggggacatggccgagaggatcaagaaggcaaggggcatcctattctcagaagagagggtgtgtcggtggttcacgcaattgctcctcgccctcgactacctgcactgcaaccgtgtgctccaccgtgatctcaagtgttccaacattttattgacaagggataacaatatcagactcgctgactttgggctggcaaaactgctcatggaggaccttgcctcatcggttgtaggaaccccaaactatatgtgcccagaaatactagcagacataccttatggatacaaatccgatatatggtcacttggttgctgtatgtttgagattttagcacaccgacctgcatttaaagctacagacatggcagcattagtcaacaaaataaacagatcttcaatatctccaatgcccccaatatactcatcagcactgaagcagatcgtgaagagcatgctaaggaaaaatccagaacataggcctactgctggggagctgctgaggcatccacatctgcaaccatatctttctgaatcgtccaactgttcaccgatctatcttccggtgaaacccaccaaaggtaacctggtagacaagcagtcaaagaagccaagcagtggcagaaagcgagctgtcaaagccaatggatccaatggaacattagaaactgcagcagagcacgctgtggaagcaagagacagctccacaaacttctcagatgtatcaactataggtacccaggaagccttgatattgcaaatgccggtggatcctgatgccggaagcaaagaagagcagaacgttgatgttgtaccgtttcagcatgcggcagagaatctgatggcgacaaccgatagacaggtcgatgcgaccatacgtcttaaagccataagaaccagtaacgcaaaagaggcggccccggtcacagttgcagaccaaaagttcaacgaggcgccaataccaaatgaggaactgacaatcggggtagtgcaggaacaaaggaaggacgtgaagccacgctcttaccaggcaggaaaaccagagatgtgtgacacaaccgtaacggaggaatcgtcgcccatcagcacgctaaagctggcgcacacggagagcgcgcccgcggagtgggaccacctgaacatagtccagcagagggccgacgcgctggagtcgctcctggagctctgcgcgaagctcctggagcaggagaggctcgacgagctcgcgggcgttctccggccgttcggcgagggcgccgtgtcgtctagggagacggcgatctggctgaccaagagcctgatgacccccccacccaagttcggagagtccccgacgaagcttttgtaaaacagtgattcgtttgagagtttttgtttttttttcgagtgccattttcgagagtgtacatagcatcaacagaatttgagttcaagattgctgtgcttacctaggcctgagctttatttatcttggatgtatatggtttgcatggcaccgactgttgtgagcgatgactggttatttaccagccgccttgttttatttattgtgctggaaatc

SEQ ID NO: 23005 - DNA, 1037 bp, Zea mays
  Clone ID: LIB3594-027-D6_FLI
gcacacacggcacaccacacggtttcgtcctcgtccaccatgctatcgtcctcgcacctcgttaagctgcccctcctgccgcgcggcctcctctcgtacctccccgcatccatcctcccgagcgggcgcgagagcaccgcggacgcagcaccctccacgccgccttcttccaagaagatgtcgtcgtccgcgcagcagcagcagcagcagcaagcgggcagcagcaaggcggagtcggcggagctggcgcgcgtgttcgagctgttcgacaaggacggcgacgggcgcatcacgcgggaggagctggcggagtcgctgcgcaagctgggcatgggcgtgccgggcgacgacgagctggcgtccatgatggcgcgcgtggacgccaacggcgacgggtgcgtggacgcggaggagttcggggagctctaccgcggcatcatggacggcgccgcggaggaggaggaggaggaggacgacgacgacgacgacatgcgggaggcgttccgcgtgttcgacgccaacggcgacgggtacatcaccgcggacgagctgggcgcggtgctggcgtcgctggggctgcggcagggccgcaccgcggaggagtgccggcgcatgatcggccgcgtggaccgcgacggcgacggcagggtcgacttccgcgagttccgacagatgatgcgcgccggcgggctcgccacgctcgggtgatgggtgaccgtcgccggccggtgctgcctcctgctcctgcacctgggcctggccatggagcgccgggcacctttttctgcatctgcgtgcttgatttcgtgtgctagaaagaacctgtagatagatattgcttgcttggagcgaggggggagctcacgtcacgtaaccgcgctgttccatcttcgttctgttgctttggtttcgttagaattgattgattgatgggcttgctaattaagtgttgtatgtactggttgttgccctgcccttaaggattgctcggggacaaggtttcccctgttttattcaggtcagggctttatttcttc

SEQ ID NO: 23006 - DNA, 958 bp, Zea mays
  Clone ID: LIB3594-054-B6_FLI
ccgaaatctcgagctttcgcgccggcgaccacagcaaagaggaggccacagcacgacagcgccccagggttcctactctcgtcgcagcggcagcagtgaggggaagatgtcgtcggtgttcagcggcgatgagaccgcccccttcttcggcttccttggcgccgccgccgctctcgttttctcatgcatgggggcggcgtacgggacggccaagagtggcgtcggcgtggcgtccatgggtgtcatgcgcccagagctcgtcatgaagtccatcgtgcccgtggtcatggctggtgtgctcggtatctacggcctcatcatcgccgtcatcatcagcactgggatcaaccccaaggccaagccatactacctctttgacggctatgcccacctgtcgtccggccttgcctgtggtcttgctgggcttgctgcaggcatggccattggcatcgttggtgatgctggtgtcagggcgaacgcccagcagccaaagctgtttgtgggcatgatcctcatcctgattttcgccgaagcgctcgccctatacggtctcatcgtcggcatcatcctttcatcccgcgccggccagtctcgtgcggactaggcacgttccacatgtctccgccacctggtcgtaaccggggtcgtgttttgtatccgtgatgagccgacaagctggagcacttaatttttttatgctgtctagttttttgaacttgcgttgagtcgagaaaacaaaatagaacttgtgtagccgaggggtgacctttttcccttgtgccattcttttccctgtcgtggtgggtggtgggctgtggctgatgcttctttctgcacactttttttttttgcttgggctgggggcgttggtgtaatctggtgaataagcgagtgcgtccagtgcaatgggagctcaggactcctttgttcaaaatccgccttgtttcgtcgttgtctt

SEQ ID NO: 23007 - DNA, 2061 bp, Zea mays
  Clone ID: LIB3594-054-C12_FLI
cactcttgggttcttgcatcccgcataccctcgaaagctcgaaagatcccgcggcgcagcagccacccttctctcctctccgctcccaatcttatcgtcgcctccctcgaagtcgccgctgccttcattccaccatggcgcttcacgccccggtccacgtgatgaaggactcgctgaagcgggagtctggcgcgaaggttcaccaagccaacatccaggcggccaaggctgttgctgacatcattcacacgacattgggtcccagatccatgctgaaaatgcttctggacgctggtggaggtattgtggttactaatgatggtaattctattttgagggaaatagacatcgcacaccctgctgccaagtctatgattgaactaagtcgtacacaagatgaagaagttggtgatggcactacatctgtcattgttctagctggagagatgctacacgttgcacaggcattcattgacaagaactaccatcctactgttatttgtcgagcatacaccaaagcgcttgatgatgctattgctgtacttgacaaaattgcaatgcctgttgatgtgaatgatcgcggggcaatgctaggcctcgtgaagagctccattggtacaaaattcactggccagtttggtgatcttattgctgaccttgctattgatgctacaacaacagcaggcgttgaccttggtcagggtatgcgtgaagttgatatcaagaaatacattaaagttgaaaaggttcctggtggtcagttagaggattctagagtccttaaaggagttatgatcaataaggatgttgtggctcctggaaaaatgaggagaaagatagttaacccccgtatcatcctgttggactgccctgttgagtataagaaaggagaaaatcagaccaacgctgaattgatgaaggaagaagattggcaggttctcctagagatggaggaagaatatataaagaacctttgcgctcaaattctaaaattcaagcctgatttagttatcacagagaaagggctcagtgatctcgctatccattatttgagcaaggctggtgttactgcaatccgtagacttaggaaaactgacaacaacaggattgctaaagcttgtggggcagttatagtgaacaggcctgaggagctccaagaatctgatgtgggaacaggagctggcctgtttgaggtcaagaagataggtgatgaattctttgcctttattgttgactgtaaagatcccaaggcatgtactgttctgttgaggggagcaagcaaggatgtattgaatgaagttgagagaaacctgcaggatgccatgtctgttgcaagaaacattttgaaaaatccgaaactccttcctggaggtggtgctacagagctgactgtatcagcaacactgaagcaaaagagttcttcagttgaaggcgtggaaaagtggccctatgaagctgctgctctagcatttgaggcaattccaaggactttggcccaaaattgtggtttgaatgttattaggataatgacacaacttcagggaaagcatgctaatggtgaaaatgcgtgggttggcattgatggaaggagtggcgatatcgttgatatgaaagagcgaaagatctgggattcctacagcgttaaagcgcagacgttcaagacagcgattgaggctgcttgcatgcttttgagaatagatgacattgtcagcggtatcaagaagaagcaggctcctggagcctcagctcccaagcaaccccaaattgaaactgagggtgatgccgacaatgagcagatgatcccagagtagaggctgtgaccaacctgcactgtcaaagttgtttactagtgccggaatagcactttgaatagagttcattttatttgagtgttggtggttagccttaggttttatatatagtttgatacactcgtccgagggttttttgtagtgtggttgctgcgcattttgctttggacagatggacgaacttcgcctgttgtatgccgtaaatctacctaatacatggtaatgctgttgtttcccatgatccgaactg

SEQ ID NO: 23008 - DNA, 1619 bp, Zea mays
  Clone ID: LIB3594-058-C9_FLI
cctttcccccttctcccaattccctccgtcggccgccgctccatcccgtacgacgacaccatgagggagtgcatttcgatccacatcggccaggccggtatccaggtcggaaacgcgtgctgggagctgtactgccttgagcatggcattcaggctgacggtcagatgcccggtgacaagaccattgggggaggtgatgatgctttcaacaccttcttcagtgagactggtgctgggaagcacgtgccccgtgctgtttttgttgaccttgaacccactgtcatcgatgaggtgaggactggcacctaccgccagctcttccaccctgagcagctcatcagtgggaaggaggatgcagccaacaactttgcccgtggtcactacaccattggcaaggagattgttgacctatgccttgatcgcatcaggaagcttgccgacaactgcactggtctccagggcttcctcgtcttcaacgctgttggtggaggaacgggctctggccttggttccctcctcctagagcgcctgtctgttgactacggcaagaagtccaagcttgggttcactgtgtacccttccccccaagtttctacttcggtagttgagccatacaacagtgtactgtccacccactccctcctcgagcacactgatgtggctatactgctggacaatgaggccatctacgacatttgccgccgatcccttgacattgagcgcccaacctacaccaacctcaacaggcttgtgtcccaggttatctcatcccttactgcctccctgaggttcgatggtgctctgaacgtggatgttaacgagttccagaccaacctggtaccctacccgaggatccacttcatgctttcttcgtacgctccagtcatctctgctgagaaggcctaccacgagcagctctctgtggctgagatcaccaacagcgccttcgagccatcttccatgatggccaagtgcgacccacgacatggcaagtacatggcctgctgcctcatgtaccgtggtgatgtggtccccaaggatgtgaatgctgctgtggccaccatcaagaccaaacgcaccatccagttcgtggattggtgcccgactggcttcaagtgcggcatcaactaccagcctcctagcgttgtgcctggtggcgacctggccaaggtgcagcgtgctgtgtgcatgatctccaactccaccagtgttgtggaggtgttctcccgcatcgaccacaagttcgacctcatgtacgccaagcgtgccttcgtgcactggtacgtcggtgagggtatggaggaaggtgagttctctgaggcccgtgaggacctggcggcgctcgagaaggactacgaggaggtcggcgctgagttcgatgagggcgaggatggcgacgagggtgacgagtactagagaagtttgctgatgacgcagcatcaggccagtgtgctgcccttatcccgtgatctgccgtgagttgctcctgctatcgtgttatgtgtgtctgttctgaagtattgtgtggtttacaacacctgatgttgtaagagttgttaattcccctgcattgctaccgggttattgagaataattatggctgtttacgttgttgcttc

SEQ ID NO: 23009 - DNA, 744 bp, Zea mays
  Clone ID: LIB3594-060-A6_FLI
ctctccgcttcccgctccgatcgacctgctccctccccaccaccgagcccatggcggaccagctcaccgacgaccagatcgccgagttcaaggaggccttcagcctcttcgacaaggacggggatggttgcatcacgaccaaggagctgggcactgtcatgcgctcgctggggcaaaatcctacagaggctgagctccaggacatgatcaacgaggtcgatgctgatggcaacggcaccatcgatttcccagagtttctcaaccttatggctcgcaagatgaaggacaccgactctgaggaagagctcaaggaggccttccgtgtgtttgacaaggaccagaacggcttcatctcggccgccgagctccgccatgtcatgacaaatcttggtgagaagctaactgatgaggaggtggacgagatgatccgtgaggctgatgtcgatggtgatggccagatcaactacgaggagtttgtcaaggtcatgatggccaagtgagccacagaaccataatctgaaggcagagaagattatgcattgcatattagtcaagatgcaactttttattccatcgacttctagtgaaacattctgctagttgtagttgctgaaaaaggcaatgtagttcctgctttgttcttccctccagtgtgttttcagaactgttgtttcatgtgaacttgtaatgattgccctctctgctgtgtcttgattgcagttaaaatcatatgtagtttcaccc

SEQ ID NO: 23010 - DNA, 1218 bp, Zea mays
  Clone ID: LIB3594-060-H3_FLI
tctaagccaaagcaagttgctaggtcctttgaaccagcaactgaagcttcctcgtctcatcatcgagaccagtaagcaacatggcggctaatctcaagtgggctcctgttctagccctcgtcgtcgtcgttgctgccatggttggcaccacgagcgccggcaacatcgcagtgtactggggccagaacggcaacgaaggcagcctggcggacgcctgcaactccgggctctacgcctacgtcaacatcgcgttcctcacaaccttcggcaacggacagaccccagtcctcaacctcgccggacactgcgaccccggctctggcagctgcaccggccagagcagcgacatccagacctgccagtcgctgggcatcaaggtgctcctctccatcggcggcgccagcggcagctacggcctctcctccaccgacgacgccaacagcgtggccgactacctgtgggacaacttcctgggcggcagcggctcgtcccgcccgctcggcgccgccgtgctcgacgacatcgacttcgacatcgagaacggccagtcggcgcactacgatgacctggcgaacgcgctcaagggcaaggggagcgtgctgctgacggcggcgccgcagtgcccctacccggacgcgtcgctggggccggcgctgcagacgggccagttcgacaacgtgtggatacagttctacaacaaccccgggtgcgcgtacgccaacggggacgacaccaacctggtgaacgcatggaacacgtggaccagcagcatcaccgcggggagcttctacctcggcgtcccagcgtctccccaggccgcgggcagcgggtacatcgaccccggcaccctgacgggcacggtgatccccgccatccgaggcattggcaactacggcggcatcatggtgtgggaccgctttaacgacgtgcagaacaactacagcagccaggtgaagggcagcgtctgatgggcataccgcatacgaagcttcaagctacagcacctagccatgcatatatatatagtggctattcgtcaagttatcggactgctagatacaaatataataagagcggatcatcgggagacaaagacgcatgtcagctattgtctcgttttctaagcaacgagcgagagctgcatgcgctggttagatttaatatggatattgcccatacgttatgtaattaaatcaaataaatgttaagttcatattg

SEQ ID NO: 23011 - DNA, 2010 bp, Zea mays
  Clone ID: LIB3595-006-G8_FLI
gcagttttgaatttagacaaactcataatcatagatggtttgacgctgttcaccatagcagccatcactttaccatcattaagctgccatgttttgatatcagcagcattgcgacgatcatcagcaagaacaggtgccgcatcggtcaaatggaagagtaatccatgtcctcggagtgcagtctcaacacagaaagcccactccggataattttgaccatcaagagtgatatttaccacaatagcatttgtcgccatattgaattgaatcaaaaatcagggagaacaggagacctgagaccaaacaaaccagagcaacccgacttggacgagttgacgggagtcctgggcgcggaagccgagttgaacagtggctggcgggagcagcaacgtcgcagatccgcagccctgtccgcaacggcgacggttggtgcagatttccggcgggagcagcggatccacggccctgcgcgcaacggcggctggcgggaatccgcagaacttgtcccagcggcggaacggcgcaggcagaaatagaaatccgcccttggcggcagatcgatgtagcgggcggcgctctgcccctggcagcaggaggcgcgctgcccctggggaggacggcgctctgcccctggcaaagaacccccggcagaaggcgcgctaccactggctgacggagggagggagatccgcccctggctgacggcggattgatgaagaaggcgggccaaggtccctggcggcggactgcgcggccgagatccttggcggcggacggtgaagtgagagaggaagatccgcccctggctgacgacggatcgatgaagaaggctgcgcggccgagctggcggctgcacggccgagatccctggcggcggacggcaggccgagatcgatctggtccctggcggcaggatgaaggaagggggtggccgcggcggcagagggaagggggtggccacgacggcaggccggagagctggtcgcgatggcagcacagcgacggcgcgatagcgccaaaaatttggatcagaatcgggtttagatgtaaaccctaaccctaacctgctctgttaccatgtgactaaccttgattaggcgagatgagagataagaacccccctcgggtactgtagcatatatataggcatatggaccttatgggccttaacagaagcttgttacagtcttttactcaagtaaatgcactcgaacgcttcaaagatgatgatgatatgctttggagatctcctggcactcctgttttcactgccccggagtgctgtcaaggttcagcctaccatggtagagcatctgatacatgggcagttggtgtaactttatattgtatggtctctgggcactatccatttctgggggatacattgcaggaaacttatgataagattgccaatgatcctgtggaaatacctggcgacgtgaatccccaacttgccgatttgctcctaaggcttctctgcaaagatccaggagatcgcatcacactgcgtgctgcggctgagcatccttgggtcgctggggatgaggggccagtccctgaattcatctgtagatgtgggtttggccgcaggaagaggaatgatgtccgggaagaagttcaataacaaagcatcctcggatggtctaataggtctagcgtagataattgatgatcggcaaagcgaagccctgacgatgagttcgttgttccgtgttccctgtttctaatacgcgctcgactgaacatatttctttttggtacagaatatatactgcgtaaccctatgccagtaaggcaacgtttgtcacagtttcacgttgtcaaacgcagcttaacgggtgatgttttttttatgatccgagaggaatggataagtgaatttttttttttttttttgaaaaaaggtgtatctttacggatggtctacgggtgaagcttccatttcatataaggagccattggtgaagctgttttactgaacggtttttataacagctcaaattctcgctt

SEQ ID NO: 23012 - DNA, 1629 bp, Zea mays
  Clone ID: LIB3592-102-B6_FLI
cgcacacaccgcccgtccccgatctccgatcccctcgtcgatccaaagatgcagatcttcgtcaagaccctcactggaaagactatcaccctcgaggtggagtcttctgacaccattgacaacgtcaaggccaagatccaggacaaggagggcatccccccggaccagcagcggctcatctttgctggcaagcagctcgaggacgggcgcacacttgccgactacaacatccagaaggagagcaccctccaccttgttctccgcctcaggggaggcatgcagatcttcgtcaagaccctcactggaaagactatcaccctcgaggtggagtcttctgacaccatcgacaacgtcaaggccaagatccaggacaaggagggcatccctccagaccagcagcggctcatttttgccggcaagcagctcgaggacgggcgcacgctggccgactacaacattcagaaggagagcaccctccacttggtgctgcgtctcaggggcggcatgcagatcttcgtgaagactctgaccggcaagactatcacccttgaggtcgagtcttctgataccattgataatgtcaaggccaagatccaggacaaggagggcatccctccggaccagcagcggctcatttttgccggcaagcagctcgaggacgggcgcacgctggccgactacaacattcagaaggagagcaccctccacttggtgctgcgtctcagaggtggcatgcagatcttcgtgaagacacttactggcaagacgatcacccttgaggtggagtcctcagacaccattgacaacgtcaaggccaagatccaggacaaggagggcattccaccggaccagcagcggctgatcttcgccggcaagcagctggaggatggtcgcaccttggctgactacaacatccagaaggagagcaccctccacctggtgctccgcctcaggggtggtatgcagatttttgtgaagacattgactggcaagaccatcaccttggaggtggagtcgtctgacacaatcgataatgtcaaagccaagatccaggacaaggagggcattccaccggaccagcagcgcctgatctttgctggcaagcagctggaggatggccgtaccctcgccgactacaacatccagaaggagagcaccctccacctggtgctccgcttgcgaggtggtatgcagatctttgtgaagaccttgactggcaagaccataaccctggaggttgagagctccgacaccatcgacaacgtgaaggcaaagatccaggacaaagagggcatccccccagaccagcagcgtctgatcttcgctggcaagcagctggaggatggccgcaccctagcagactacaacatccagaaggagagcactctccacctggtgctccgcctccgtggtggtcagtaagccatggttcatttaagctgctgctgtacctgggtatctgcgtcgtctggtgccctctggtgtacctctatatggatgtcgtcgtctaataaacatctgtggtttgtgtgtcatgaatcgtggttgtggcttcgttggtttaatggacctgttgtgtcctctgtgttgtacccaaaactcttctgcagcagtatggcttgaatcctt

SEQ ID NO: 23013 - DNA, 907 bp, Zea mays
  Clone ID: LIB3592-102-D10_FLI
gtcgcgtttgcagctaggcagatctgagttagccggcggatccgatccgtgcgcgtgcgcagtgtgtgtgtgtgtgtgtgtgtgtgtgtgtgtcggtggagagatggccacagcttacgctcccatggcgagccaggtgatgaagagcagcctcgtcgtgcactcgaggccgaggggcctgtcaggcgctgctgcgctcacgaggcggcccggccggttcaccgtcaaggccatccagcccgagaaggcaacgtaccaggtggtgcagcccatcaacggcgaccccttcatcggcagcctggagacgccggtcacctcgagcccgctcgtggcgtggtacctctccaaccttccggcctaccgcaccgccgtgagcccgctgctgcggggcgtcgaggtcggcctcgcgcacggctacctcctcgtggggcccttcgcgctcacgggcccgctccgcagcacgcccgtgcacggccaggccggcgcgctcggcgccgccggcctcgtcgccatcctcagcgtctgcctcaccatgtacggcgtcgcctccttcaacgagggggacccgtccacggcgccctcgctcacgctcaccggcaggaagaaggaggccgacaagctgcagacctccgacggctgggccaagttcaccgggggattcttcttcggcggcatctccggcgtgctctgggcctactttctcctctacgtgctcgacctcccctacttcttcaagtagaaatcatcaaagatgcgtatatatatagctccggccgatcctcctctctagctgcatggtatgtaggtggtgtggtccttgtttcatttcactccagcggtgatcagcgccgtgtataaatgtaattcctctgctttgcacatggatggattgggatgtaacctgttc

SEQ ID NO: 23014 - DNA, 675 bp, Zea mays
  Clone ID: LIB3592-103-A6_FLI
cagtcatccacactaacgaacgaactgaggtcgacgacgactgatcgagcagcgacgatggcggctgtgctgaacagcaggaagacgccgcaggtggttgccgtgctggtggcggcggcgctgctggcgtcgtccgcttcggcggcgatcacctgcgggcaggtggggtcgtcgctggctccgtgcatcccgtacgcgacggggagggccagcgcgctccccgcgtcgtgctgcagcggcgtcaagagcctcaacagcgcggcgcggaccagcgcggaccgccaggcggcgtgccgctgcctcaagagcctcgccaacagcgtcaagagcgtcaacatgggcaccgtcgccaccatccccggcaagtgcggcgtctccgtcggattccccatcagcatgtccaccgactgcaacaagatcagctaagttatacgacgaccaagctaataagcctaccgaacgtacacgtacgtcccgcgcgctgcacgagtgatgaagccagggaagaaataaaataaagctagctgtattgccaggagcagcatgcagtatcgatctatatatatactgtactgtagtactctattatatatgtatgtgtggcctgcagtgcgagttgcttcgatccacctacttgttcagacagtttaatggttttggtgcctgttatgaatc

SEQ ID NO: 23015 - DNA, 774 bp, Zea mays
  Clone ID: LIB3592-103-B6_FLI
gcgtcgacagcaacacctgctttcgctacgacgggagcaccagaggctaggatatattgcttcatcagtgacagggagccaagatgccggccggagggttctcggtctcggcgccgtccggcgtcgagttcgaggctaagatcacgccgatcgtcatcatctcctgcatcatggctgccacaggcggtttgatgttcggctacgacgtcggcatctcaggtggtgtgacgtcgatggacgacttcctgggcaagttcttcccggcggtgctgcggaagaaactggaggacaaggagagtaactactgcaagtacgataaccagccgctgcagctgttcacgtcgtcgctgtacctcgcggggctgacggccaccttcttcgcctcgtacacgacgcggcgcctcggccggcgcctcaccatgctggtcgccggcgtcttcttcatcgtgggggtgatcttcaacggcgccgcccagaacctcgccatgctcatcgtcggcaggatcttgctcggctgcggcgtcggcttcgccaaccaggccgttcccctgttcctgtctgagatcgcgccgacgaggatccgcggcgggctcaacatcctgttccagctcaacgtcaccatcggcatcctgttcgccaacctcgtcaactacggcacgtccaagatccacccgtgggggtggaggctgtcgctgtcgctggccggcatcccggcggcgctgctcaccctgggcgcgctcttcgtgacggacacgcccaacagcctcatcgagc

SEQ ID NO: 23016 - DNA, 1023 bp, Zea mays
  Clone ID: LIB3592-103-D3_FLI
tccacgcgcccgctcctcttcgccctcgtcgtcctccatcccacggtcccacctgtccctctcaccgcctcgttattttttcgcccccatctttgaacgccgggactccaactccaccgttcctccctcttcgttccctccgatcccgcccctataaatccagtcgcctcagccgccacagcgggccgcaagcacgtaaccacacagctcactgctgctcccgtcttcccgtgtcctgtcgtgctcccgtcgccgggggcggaagggttcgcgaggccggcgggcggttagggatttctccggagtcccgcgatggcgaagctgtatgtgcaggcgttcccgcccgcggatctgaacaagaacaccgagtggttcatgtatccgggcgtctggacgacctacatcctcattgtcttcttctcctggctcctcgtcctctccgtcttcggctgcacccctggcaccgcgtggaccgtcgtcaacctcttccacttcgcgatcacataccactttttccattggaagaaaggaacaccttttgctgatgaccagggaatgtacaacgcattgacttggtgggagcaaatggataatggcaaacagcttactcgtaataggaagttcctcattgttgttcctgttgtcctgtatctgatagctctgcacaccacagactaccaacaacctatgctcttcctcaatacccttgccgtcagtgtgcttgtggtcgcgaaactaccgaatatgcacaaggtccggattttcggaataaatgccgagaactgagcaacgtcatccttcgccagacatttaccctatatgcgcttttcagaacggttttgtgtgttcccccccccttctagtgcctttagttgggctcatcagagcaccagtgttcaaaaagttgttagcaggatgggccttggtcgctgtatagagagatgctcggaggcgtgctgtacatctgatgtgcacggattctgtacactcttaatgttgctatatatacggtttgttgcaagc

SEQ ID NO: 23017 - DNA, 1254 bp, Zea mays
  Clone ID: LIB3592-104-D3_FLI
aaaacgaaaaacctcaccggctccattccaatccatcttttccttatcccctctccctcccttcgttcgccatggcaaccgtgttcctccgttccctcgccatggccatggccgacaccgcgctcccgcccacccacaagctcctccctacggtttccctgccgctcctcccctcgtccacccgcgccgcgccgctcctcctctgcgccagccgccgcctgccgcccgcgcccctcgttgcctcctccgacgccgtcgagacgagcattgaatgggttgacgacgaggaggaggaggctggagaagccttcgacgaggagggtgaggatgttgaggaggaggtgctggcctcaggcgacgagggggaaggggagtacgccgcggtggagccgcccgaggaggcaaaggtctacgttgggaacctcccctacgacatcgaaagcgagggactcgcgcagctcttcgaccaggccggcgtcgtcgaggtcgccgaggttatttacaacaaagagactggccagagccgtgggtttggctttgttaccatgagcactattgaggaagctgataaagccattgagatgttcaaccgctatgacattagtgggaggcttctgaatgtaaacagggcatctcctaggggcactcgcatggaaaggcctccgagacaatttgcgcctgctttcagagcttatgttggcaacttgccatggcaagctgatgactctaggctggtgcaattgttcagcgagtacggagaagtcgttaatgctgcggttgtctatgatagagaaaccgggcgctcacgaggattcggttttgtaacgatggtgtcgaaggaggaactcgacgacgctatctctgccctggatggacaggaattggacggccgccctcttcgggtgaacgttgcagcagagcgaccacagaggggcttttgatgcggcggtacgagagagatggctgcttgtttgtgatgagagcacggagacacaacgcaggaggaacggtacaaattagcggaagctgatgctgtcacaagttgctagatccctcccttagcttcctgattttggttcttgtcgacatcatcatgagttaaattatccaagtaggcttctatgtttgatctatcccgattcccgatgccttatcaatttatcatcgtggcaaatgttttgttggtaaaaccataggagcaaacggagattatttatatctgacgtataaaaccgtacccagtgtgttgcattt

SEQ ID NO: 23018 - DNA, 1289 bp, Zea mays
  Clone ID: LIB3592-104-G1_FLI
cctgccccgtcgacccctcccacacggtgctcgaggagaacctggaggcgcacgtcggcaagtgccccctgaagaagcaggtcgccgcgctcaccgcgcagccgtactactccaagggcatcaactccggtacacctgaggcgggctgcggtgtgacgtcggcggagaagcgtgcggccgtgtacaggcttaccgaggaggagttccgccttctgctcgggaagatccggtcggtgcacgcggcggtcgcagcgccgatacgggagtccaacctgatcaccgctgcttgcgacaagtggatgagcggccaggttgataggaagatgccgtaccaagagaggcatgtcgcgcagcaggcgtccattgttggaaacatggaggcatttggcttgctgcagaaggctagccatgaggtggttgatggggagaatgcggcggtgagtgctcaggcagttgtggagtttggagctggaagagggtacttgactcaggtgctggtggactgttatgggattagaaatgtcttcttggttgagaggcggtcctacaaacttaaggctgatcgaagcttgcgtcaaaatgaagatgttaccttggagcgtttgagaattgatattgaggatttgaaactgcacggaattgaggcattgagggggctccaatatctagcaattggaaagcatttgtgtggacctgccacagatatgaccatgatgtgctgtcttcctgaacgatatgaccaaaccgaagaaaacggcaaacgtagtcttcaaggccttgctctagctacctgctgccaccatctttgccagtggaagcattacacgaataaatctttcctctcgggactaggtatcacagaagaagattttcatgccatgacatggtttagcagctgggctgtggatggtgatcatagctacccagatgctcctgtggaggttgaagacacgccctctgaagtcagaggacgagagaagcttgatcaggaggccgtcggaattgagagagtaatccgaagtataccagcaggggagagggccactctgggatccatgtgtaaagatatcattgatacggggaggctactatggcttgggcagaagggtctgattgctgatcttgtaagctatgttccatccagcatttcaccagaaaaccgtctgcttatcgcaaaatgcacatcttgattataggctgaaaagcaagtgcacgcatttcagccctgcaaatttgcaggaacttggattgtataagatactttcaactaataaaatcttgagtttttc

SEQ ID NO: 23019 - DNA, 1046 bp, Zea mays
  Clone ID: LIB3592-105-D2_FLI
cttgtctcgctctcgcacaaaaaagtctgcaagcagggttaaggcacgcaccaacctttcctcctacctctactcctgttcctcgggttcatcttcacctcgagcgctgctgcggccatggtgaccagaaggctggctctgagctccctcttccacggcaaggcaagggacacttcctccttaccaccgccgcctcctcctcctcccgcaccagcctggccatggccgtccagcaagaacccaagaacgacgcagccgcaggcagcagcagcagcagcagcagcaggcgccaggaccgtcgcctccatcgtcctcgactccgccgactcgtccttcacggcctcctccgcgctgcaggaggactgctgctgctccgacagcctctccacggcgtccgaggcgtcggcgtcggcgtcggcggcgtgcgacgacgcggcggcggacgacgccgtcgtcgtgcgcggggtccgctccgaccggctcctcttcgacccaggcgcgtcggccaccaactccatcctcgaggagaagtctgccaccaaacgggagcaggcgttcggcggcgccgtggccgtcgcgttcgagtccgccgacccgtacgtggacttccgggcgtccatggaggagatggtggccgcgcacgggatcggccgccactggggctggctggaggagatgctgggctggtacctgcgagccaacgacggcgacacgcactgcgccatcgtggcggccttcatcgacgtcgtcgtcgtcgccgccgtagccgccgacccggctcgctcttcgcagcaggcctcatctcgcacgtcgtttgcgacgggggagttggaggtggcagacaagggcaaaccagatggagccggagcgctcgccgtgtcatgtttggattaagctgagctaaatcttcacagtttatttgcattaccttattatatatgtagtactactacgtgttaatctcgtcgttctaaaatgtgtagagactagagaagagtactagtgtacggttctcttgacgatcaacctatgtcgttgacccacct

SEQ ID NO: 23020 - DNA, 2511 bp, Zea mays
  Clone ID: LIB3592-105-E4_FLI
tcctccctccttcctggtcgcccatggattattccatagatacgacctagctgcgctgctacagcccccgcatttcccttcccccaatcctctcctccacgaacacgccctcccttttgcccgttcccagcctcgaacggcaaatcaaaaggcagatatttgagcttttggtcatcgtctccacgccccattggtagccgcctctgaaattcctataaaaaaagatatatgggtggagacatcacccacgccgccaagatcctgtcttcttgcgcggccagctcgtagctccacgccggatagatagaagaggccaacctttcctccccgcttgctccccttttctttcggcaggatggcacatcttcccccacgtgacacctgagaaagtgagagcacagatttcttcttccccttgctgctgccgtttctcgtttccgttcctctctgctcgtgggtttctcatagataaacctcgcataaagcttcgttccctcggctcttggtcccaatcagcagggctcctccgcttacccgtccaatttctccccacccctgttcttctgcctccaacccgcgggaatccttgaggagttgcaggaatttgtagggagaggctcctttcctgctgcggaggccgtcgtacggttcttgatccggggagcacacctggggcgcgccaatgcagccggacccgagcgggaacaccaatgcgaaggcgaagctgccgttgatggctccggcgccgtcgtcggggcgcccggcgtccgtgctgccgtacaagacggcgaacgtgcgggaccactatcgcatcggcaagaagctggggcaggggcagttcggcaccacgtaccactgtgtgggcaaggccgacggcgccgagtacgcgtgcaagtccattcccaagcgcaagctgctgtgccgggaggactacgaggacgtgtaccgcgagatccagatcatgcaccacctctccgagcaccccaacgtcgtccgcatccgcggcgcctatgaggacgcgctcttcgtgcacattgtcatggagctatgcgccggcggcgagctcttcgaccgcatcgtcgccaaaggccactacagtgagcgcgcggcagcgaacctcatcaagaccattgtcggggtcgtggagggatgccactcgctcggggtcatgcaccgggacctcaagccggagaactttctctttgccagcaccgctgaggaagccccactcaaggccactgactttgggctgtccatgttctacaagcccggtgataaattctctgatgtcgttggaagcccttattatgttgcaccagaggtacttcagaaatgttatggtccagaagctgatgtgtggagcgcaggggtaattctgtacattttgctttgtggtgtccctccattttgggcagaaactgagtctggaatcttcaggcagattatgcgagccaaacttgattttgaatctgaaccctggcccagtatttctgatagcgctaaggatctggtccgcaatatgcttactcgggatcctaaaaagagatttagtgctcatgaggttctctgccacccatggattgttgatgatgccgtggcgcctgataagcctattgattctgctgttctctcaaggctgaagcatttttcggcaatgaacaagctcaagaagatggcattaagggttattgctgaaagcctgtctgaggaagagattggaggcctcaaggagttgttcaagatgattgatactgacaatagtgggactataacatttgatgagctgaaagatggcttaaaaagggtaggctccgaattaacagagaacgaaatccaggctctaatggaagcagctgatattgataacagcggaaccatcgactatggtgaattcatcgcagctactctgcacatgaataagctggagagggaggagaacttggtttcggcattctcattttttgacaaagacggaagtggctttataaccattgatgaactgtcacaagcatgtcgtgaattcggtcttgatgacgtccacctcgaggatatgattaaagatgttgaccagaacaatgatggccaaatcgactacagcgagttcacagcgatgatgaggaagggcaatgctggtgcaacaggaaggagaaccatgaggaacagcttgcacttgaatctcggcgaactcttgaatcccagcaaaacctagcgtgcattggaaggtcttgtcgggtacattcccatggcatatgaagattttggatgcgttgtcgatcggctggcctattctgagatgttgagcggttgtcctgtggtattactaagatgctgaagaattttcctagaagtacaactgccctgcggcatatatgtataactgtcgatgtaatgtagattgaacatggtctaaacattacttccctagaagtacaacttctctgctgtcaagtgtgtgtttagttgatattgaatagcaatttctttctctaatttcattgatgactctttttt

SEQ ID NO: 23021 - DNA, 2196 bp, Zea mays
  Clone ID: LIB3592-105-G12_FLI
ctcagccgcgcgccgcgaccttcgctcccgtctccggtctccgcctgccccccgtccccaacctatcgggagcgctcccgattcgcgggagcgagagaaatagagtgccccccgctctccgctctccgccgcggatcagcgccgtcgccgatcggaggccctcgcttccgccggcgggcggcgcgagccgggagatggacggcggcgcgggtgccggtcggaggagcgtcccctcctcctccggattcaggaggagggtcccgcccgccgagaacgggcacggccatgacgccccgccgccctccaggcggtcctccgcctccctctcccgcggccactccacgccgctgactggcgagaggaccgtgaaaaggctgaggttgtccaaggcactgacgataccggatcacacgaccgtgcacgaggcttgtcggaggatggcatcacgcagggtagatgccgtgttactgaccgactccaatgctttgctctgtgggatccttaccgacaaggacataaccacaagagtgattgctcgtgagttgaagatggaagagacactggtctccaaggtcatgactagaaaccctgtatttgttctcgcggacacgcttgccgttgaggcgttgcaaaagatggtgcaaggtaagttcagacatctgcctgttgttgagaatggtgaagtcattgcaattctggacatagccaagtgcctatatgatgctattgcacggatggaaagggcggcggagaaaggaaaagcgatcgccgctgctgttgagggcgttgaaaagcattggggaacagctgtatctggtcctaacaattttattgagactcttcgagaacggatgtttaggccatcactgtctaccattatctctgagaattcaaagtagggtggtcactgttgtaccatcagacacggtgttgacagcatcaaagaagatgctggaactaaaaatgagttcagcagttgtagcaatcgaaagcaaacctgggggaattctgacatctagagatatcctgatgcgtgttatcgcccaaaatcttcctcctgagtccactacagtcgagaaggtcatgactcagtgtcctgaatgtgcctcggtagacaccccaattcttgatgctcttcacacaatgcatgatggaaaatttttacatttgcctgttctggacagggatggaaatgttgtgactgttgttgatgttcttcacataacgcatgctgcaattgctacggttggaaacagcggggcagctggatctgagtcaacgtctgccatgatgcagaggttctgggattcagcaatgtccattggacctcttgatgatgatgatgactccaccagaagcgaaggatcgacaaaggtggcatctgaggcagcagatataggaagatcagccttgtttccagcttctgctttatcaaacacttttgggttcaagattcaggacaagcaagggagaatgcacagatttaactgtgaaacgagcagcttgacagacctgataactagcattcttcagagggtcggcgatgacattgacagaaaacacctgccacaaattttgtatgaagatgaggaccatgataaggtcatattgtcgtcggacagtgaccttatagctgccgtagaccacgcaagacaaatcggttggaagagcctaaggctgcacttggactacgcccgccggaagagaggggacggttcctcagacttcgagtacgctggcaaggatgcatgggcttctgcatacagtgctgtcgcggcaggggcggctctggttgctgggctcggcgtgatggcttacttgaaacggtcagggtaatagcttgaggcaagcacggcagggactagggagcacggttttgatcgtctttgtgatacaagtgccacttcatcggaattggcagaatggctgtgtaagtaattcttgtgagagaggaaaaaaatgaagattttaataatactactgtcaaggcagtgaatggtcccttcatacaagtacacggaactgatcgagttttttttggtgggttgagacttgagagtcaccatggctgtcagcttcgtcacgattgtatttattatcataaaaacacatgattcattgtacaagaagagtcttgatagaccttcttcatgcagcgtctggctgattagaatttatccaaggcgatttttgtcc

SEQ ID NO: 23022 - DNA, 1424 bp, Zea mays
  Clone ID: LIB3592-106-D8_FLI
tcacattcaccccgcggtccccgcggccagcagggtgctccgcgccaccccgcccttcttcctcatcctcctcgccgccgtctacctgctcgcctccgtcaccatcttctccgcccccacgccgctgctccgcctccgattggcctctcccaggccgctgatcctcccgaagcccgcgccaccgccgccgccgcctgcgccggagctctttgatctagacggcgggagtgtccgggtccgcctcaccaatgtcggcgccgccgtcacctcgttcctcgtcccggacaagaacggggttctcgctgatgtggtgctcggattcgactcgctggatccgtacctgaatggaacctcaccttactttggctgcattgttggtcgagttgcaaatagaatcaaggatggaaagttcactctaaatggggtgcagtacaatctgagtatcaacaacccacctaacactcttcatggtggatttaaagggtttgacaaaactatatgggaagtcgccgagtataacaaaggggacaagccctcaatcaccttcaagtattacagtaaagatggagaggaaggttacccaggtgatgtttctgtcactgcgagatactcgcttctcccaagcgcgacactgaagcttgagatggaagctataccactgaacaaggccacacccatcagcctagcacagcacacctactggaacctggcaggccacagctcaggagacgtgctctcgcactcggtccagatctggggctctcagataaccccggtagaccagacctcaatacctacaggcgagctcatgccagtgaccggcacccccttcgattttctgaccgggaccaggatcggaagcaggatcgaccaggtccccggcggttacgatcacaactacatggtcgactccggcgaagtgaggtcaggcctgcggcatgtggcgcacgtcgcggacccgtccagctcgagggccctggacatctgggccgacgcgcctggcgtgcagttctacaccggaaattctcttggtggcgtcgtgggcaaaggaggcgcggtctatgggaagcacgctggcctctgcctcgagacgcagggtttccccaacgctgttaaccagccgagttttccctcggtcgtgtttggccccggtgagaggtacagccatacgatgctgttcgagctctctaccgagtgagtcatgtagcccgtctgcctgcccgtgtagatagatagatatacaccgtttttattttccttgttgttttgtgcttgcgagtagttaagaaactgtggcgctggcgcgcgcggcggttgttcaattgattcttggtttagggcttaatgctgtagcaggaatgcagcaagactagtgggaaaggaacggatttgaggggaggtactaggttactaggtctgcatct

SEQ ID NO: 23023 - DNA, 1633 bp, Zea mays
  Clone ID: LIB3593-001-B3_FLI
aaaagagaaaaaaaaaactaagctcgcctgatcctttttaagagacgggagacgggacccctcaccactctgtaggtcccgaaggcccgaaccttaggatcgccggcgagccaccggagctgagccccacaaacatcactgtaccagacggtttggtggtgtggcgactggcgacgaagcgcacaagaacagaacaagagggcgagaaacatagggagaaaggaggagaggaacggagagctggaaaaggcaggaaagacccggcttttgaccccaagtaccctgttgagggcaatggcggccacctccgaggaggcaatcaagcagttctcggcgctcatggagcagctagaggagccgctaaagagcacattccagaatgtgcatcaaggaaatctgagagggactttgatgcgttttctgaaggctagagaatggagtgtgcctaaagcttataaaatgctaatggattgcttaaactggagagtacagaatgagattgacatcgtgttagctaaacccattctgccatctgatatatatagagttattcgggacacgttacttgttggattgacagggtactccaagcagggacaacctgtttatgcatttggtgtgggtcttagtacttttgacaaggcctcggtgaattactatgtgcaatcacacatacagatgaatgaatatcgagatcgtgttgtcctgccggctgcatcaaagaagtttgggagacagattaatacctgcttgaaggttatggatatgactggcctcaagctgtctgcactgagccaaataaagatgttgacgatgattactactgttgatgaccttaattatcctgagaaaacggaaacttattacattgtaaatgctccatatgttttttcagcgtgttggaaggttgtgaagccactcttacaagaaagaactaaaaagaagatccaagtcctgtatggctctgggagggatgagttactgaaggtcatggactacgagtcacttccgcacttctgcaagagagaagggtcaggttcatccagcgactcgctggatggagtagattgctactcctacgaccaccctttccaccagcagctgtacaactacatgaagcagcagcaatctctgaatcaggactccgttggtcccagaaaacaaggctcggtccacgtggatgtgccctcgcctggccttgaggaggccaagattgcggagacgatcaaagcagagctccagaatttgaggggaagcggcggtctcgcccattcattcagcagcatccagatcgaaggtccatgagggcgcgcgccagtgacccgaagagaagctcttggtaatggtgcctcctgcttgcagtcactggctgcaggcttgaccggggcgaatagagagcgggattctaataactgtatccgcgattgttgtgatttctaattaaccaagtgggcgtgtatcgccatgcttgtactatccctgtatgtatgtatatataacggccaactggacggagtttatgtaactccctgctaattacttagaatgctcatcttttattttactccaatatagtgaaaatttcgcttagggcccgtttggttccttgaaatggtgacctcgaatgatttct

SEQ ID NO: 23024 - DNA, 1464 bp, Zea mays
  Clone ID: LIB3593-001-D10_FLI
cttatcttggcggcggagaaaagtgcggcgcaggcgcaggcgagcggccgtccagtcgcgccggcagcagggcgcaggcgagcggccgtccgtccaggcgcaggcgagcggccgtccgtctaggcgtccgtccaagcgaactggtccaatcgtccaggcgagcgaccgtccgtccaggcgttggattccaagaactgatggacaaggcgaccaagcttttgatttatggtgcttcagcacacttgttgttgtccatgatggccatggttattgagtctagaaaaagaaaaagagatagtagaagagtcggtattacttatgggccaatggaggaaagggataggatgagacttgattatcttaacactaaaatatggatgagtgatacaacatgtgtgaacatgcttagacttagtaggtctagtttctttcgcttttgtaagggctttagagaccggggtttacttgaagatacaatacacatgtgtgttgaggaacaagtggccatgtttttgaacacagtgggacacaaccttaggaataggttgctgggaacaaattatggtagatctggtgagactgttagtcgctacttcaacaaagtgcttcgtgctattggagagctacgagctgaacttattaggccaccatcattagagactccatccaaaatagcaggaaatccaagatgggatccctactttaaggattgcattggagctattgatggcacacatataagagctttggtttccatagatatggaatcttcatttcgtggtagaaagtcttatgcctctcaaaatgtaatggcggctgttgattttgatcttcgattcacatatgtcttggctggttgggagggttcagcacatgatgctttagtactaagagatgctttagagcgagagaatggccttcgtgtaccacaaggaaaattctatctagtggacgcgggatatggagccaaacctggatttttgcccccttttcgtgctgtccggtgtcacttgaatgaatggggaaataatccggtacaaaatgagaaggagttgttcaaccttaggcactcgtctcttcgtgtcaccgtagagcgtgcatttggttcactgaagagaagatttaaaatacttgatgatgccacaccattctttccattttctactcaagtagatattgttgtagcctgctgcattattcacaattgggtcatacaagatggaggtgatgagctgatcattgaagaatctaattggccaattcataatcatgctacaacatcaagtggccaagctagtgaacatgcattcatggttaatttgaggcaggaaatagcaaatcagatgtgggaagatcgcaaaaccactatgcttcctaatttgttattgtttttcttgctgtaatttttatttatggacattaatatatggacttaattaatgtattcatatattgtgtgagatt

SEQ ID NO: 23025 - DNA, 1168 bp, Zea mays
  Clone ID: LIB3593-001-E12_FLI
ggtcctcggcggccggaccgccctgaggcttcggcctggcggcgcgcggagggccctggacgccgtcgtcgtcgcgcgggcgtcgtctgaggcggagaccgccgaggcgggcggcggcggcggcggagcggaggaggagcggccgtacgaggagtacgaggtgacgatcgagaagccgtacgggctcaagttcaccaagggccgcgacggcggcacgtacgtggaggccatccagcccggcgccgccgccgacctgaccggccagttcgaggtgggcgacaaggtgctggccaccagctccgtcttcggggaggagatctggccggcggcggggtacggccagaccatgtactgcatccgccagaggatcggccctctgtacatgaagatggagaggaggtttggtaagtgggacggcgccggcgacctcaccgagaaggagatcatcaggttcgagaggaactccggagtggtcagcggcagggtgcgggagatccagctgcaaaactaccagaggaagatggagcagaagatgcagagggaagaggacctccgcatggggctcaagctgtacaaggacgggaagtacgaggaggcgctggagaagttcgagtcggttctggggtcgaagccggagcccagcgaggccgccatcgccagctacaacgtcgcctgcagctactcgaagctgggccgggtagaggctgcgctttctgcgctggaggatgcgctcaagtcagggtatgaagacttcaaggcagttcgcaccgacccggatctcgcgaacctgaggaagtcggaggagttcgagcccttgctgaagaactacgacgagtcgttcatcaacgagaacgccatcaacgccatcaagtccttgttcggactcggaaacaagtgaggcgattgttagcttagcttgccctcgtacctgaccatttgccgtgcagatacattgtgtatgtctgtatgagtactgtccaaatgtaaaggaaatatgcaattgtgcttgtaagccacatgccaaatatgttaaggatcaagaaggtgaatatgttagcggacaaactcacgagacaagtattgagaactctggattggattcttttttcaggttcagacagtttaatgacttgtcaagaaaagaaaacgcatcaattcttcctggttc

SEQ ID NO: 23026 - DNA, 1496 bp, Zea mays
  Clone ID: LIB3593-001-F12_FLI
tcagtctcctctcatgtattaagctttgaaatgagtctccttaattgacgattctggaattcggaggcctggaattcggaggcccaggaatcatgatgcagcaggctcaggcgcacacctcggcacttgcgggagcgccgtcggcgtcggcggtggcaccgacggtggctcacccgcacgatccggtgggcggggatgcgccgccgaagcaggtggctcaggcgatggagcggctgggccgtgctggccggttcatcgcggacatccggctcggcgcggaccgcctcctcgaggctcttttcgtctccggcgacgcgcccccgtacagcgtgcgccagcacgtcgacaggatggagcgtattatcgtcaaggaggatgccgccatgcgcctccactttcaggacctacgcgccctcggcaggcaattagaggagtctggagttcttaacggggcccttaaagctcaaggcaattcatggggcttgcacatgccactcgtttgtccagatggtgctgttgtagcttatgcttggaagcgtcaactagcaggtcaggctggtgcatctgctgtggacaggactaggttagctctcaaggctttcactgaccagaaaagaagattctttcctcatctagaagatgaagttgttagccatctccatgatggtcaacctggtgacaccaaaaagtcaaagttgtttaccagcaatggatatctagaggaaaaatctttgtctgaaatactgaaaaatttagaacatgaagtacctaacataaaaatattcacatactggcatctggattggtcaaaaagagcttcatcattagcatctctgttggatgatgactttgtggatccatctaaagagctgaacctgcaaaatatggacaaatcgagatctgatgctctgacaactaccatagaccaagttgctgttattgaattgctggttccttcaatatttagagctgtagtgtcattgcatcctgctggatctactgatcctgatgcagtggcattcttctctcccactgagggaggaagctatcttcatgcaaggggcacatcggtacatcatgtgtttaagcatgtaaaagaacatgctgacaaggcattgcagtacttcatcaatgcggagccgagtaaagcactacctcttcttttgcgttggattgccagctatcagactctgtttacgaaggtttgcagcaaatgcagacggcttctgatgatggacaagtctttggctttgctgttgcctcctgtccaccgcccctatcaccagacttcaaatgttggaccagatcttcaagaggcctaccacattggatgttcctcctacgatggctagctgatgcttctaagatgttcctgacattgtcattgacatagtacgtgtacaacagtcctgtgtgaaacaatgttctttttttttttggaatgtatccaacccattaggtgacatatgtatagaaacgttactggttgcttaggt

SEQ ID NO: 23027 - DNA, 1875 bp, Zea mays
  Clone ID: LIB3593-002-A9_FLI
aagcggattcggatcgcgccgccatgccgctcgacgagctcgccgacaaagggccgtcgtcctccgaggaagttcagctcgcgccgtcggattccaagttccggagcctcagtcctgcgccgattccgctcccaactcttccgagcatcagatctatctctactgttagttcactagaatcagagagggcagcatatgaatttcttgctcaaactcctgtcaggtcaactgatgcacatcttgttgagttttcggaggctatgagaactgttgcaaaagccttacgacgagtggctgaagggaaggctgctgctcaagcagaggcagcggagtggaaacgtaagtatgaattagagacagcgcacaagcatcggagtaaaatcaaaggctacagcagttgtatcaataatgacttagacaaactggtcagccaactaaccctggagacacctacatctgatcaattaggatgttgcggaaagcatggtatatgtgcacatgagattctccaggacgaagttcctgggcctatcccaagatctaatcacaaggtggtggggagaaaggcatcatttaaactttcatggggatgtaatggggataaaaatggacaacataagcatgattttgtgtcctttgaaaaaggtgatataacaaccgcagaacgaagcaataagcagatcttactgaaatgggaatcgccaccacaaacagtgcttttcataaccaaaccgaattccaactctgttcgtgttctttgtgctgaaatgatcagatggctcagggagcataaaaatataaacatctttgttgagccacgtgttagcaaggaacttctaacagaggattcttactacaacttcatccaaacatgggataatgatgaggagataaagatgctgcgcacaaaggttgatttaattataactcttggtggtgatggaactgttctgtgggctgcatcattgttcaaaggacctgttcctccggttgttgcatttgccctgggatcactgggcttcatgacgcctttcccaagcgagcaataccgtgagttgttggacaatgtgctgaacgggccatttagcatcacgctgagaaaccgcatacagtgtcatgtaatacgtgacgaggcaaaggatgaaatcgtgtctgaggagccattcttagtgttgaacgaagttacaatcgaccgaggaatatcgtcctaccttaccaacctggaagtctactgtgacagctcttttgttacttgcgtacaaggggatggactaatcatatcaactacatctggaagtacagcatattcattagcagctggagggtccatggttcatcctcaggtcccagggatccttttcaccccaatctgcccgcactctctgtcattcagacctttgattctgcctgaatacgtgaccctccgcgttcaagtgccgttcaacagcaggggcaatgcctgggcatccttcgacggcaaagaccgacagcagctgtcgcccggtgacgccctgatctgcagcatttctccctggcccgtgcccacagcctgcctggtggactcgacgaccgatttcctccgcagcatccatgagggtctccactggaacttgaggaaatcccagtcatttgacggcccgcgtgattgatgcaacagctgttcagttatatttcagcccggtgccagaattcaagctgggaattctcaacaggaataactgtagctactccagggtgctctcacctttaccgttccatacttgcctatatacaaaggttgcgtgcgttagatgtgaggtatagatagatgtatagaatatggatggatgataacgactggacatgttgaataatacaacgccaacgtatgcacgt

SEQ ID NO: 23028 - DNA, 1440 bp, Zea mays
  Clone ID: LIB3593-002-B10_FLI
cagcagagaaaggccggcagcgctaatcgtaatagccatgggctccaccgccggcgacgtggccgcggtggtggacgaggaggcgtgcatgtacgcgatgcagctggcgtcgtcgtccatcctgcccatgacgctgaagaacgccatcgagctgggcctgctggaggtgctgcagaaggaggccggcggcggcaaggcggcgctggcgcccgaggaggtggtggcgcggatgcccgcggcgcccggcgaccccgccgccgcggcggccatggtggaccgcatgctccgcctgctcgcctcctacgacgtcgtccggtgccagatggaggaccgggacggccggtacgagcgccgctactccgccgcgcccgtctgcaagtggctcacccccaacgaggacggcgtgtccatggccgccctcgcgctcatgaaccaggacaaggtcctcatggagagctggtactacctcaaggacgcggtgctggacggcggcatcccgttcaacaaggcgtacgggatgacggcgttcgagtaccacggcacggacgcgcgcttcaaccgcgtgttcaacgagggcatgaagaaccactcggtgatcatcaccaagaagctgctggacttctacacgggcttcgagggcgtgtcgacgctggtggacgtgggcggcggcgtgggcgccacgctgcacgccatcacgtcccgccacccgcacatctccggggtcaacttcgacctgccgcacgtcatctccgaggcgccgccgttccccggcgtgcgccacgtgggcggggacatgttcgcgtccgtgcccgccggcgacgccatcctcatgaagtggatcctccacgactggagcgacgcgcactgcgccacgctgctcaagaactgctacgacgcgctgccggaaaatggcaaggtcatcgtcgtcgagtgcgtgctgccggtcaacacggaggccacccccaaggcgcagggcgtcttccacgtcgacatgatcatgctcgcgcacaaccccggcggcaaggagcggtacgagcgcgagttccgcgagctcgcaaagggcgccggcttctccgggttcaaggccacctacatctacgccaacgcctgggccatcgagttcatcaagtgaaccaccgtcgccgcgatgagatggcatggctgccacatgctttgcttgcttggtcctcgtatcgtacgtcgccgtcgtcgtcttcttctggttattgcgctgctacctcgctgctctcgcgtatgcatgtacttttgcttaattttctttcttcatatcatgcactctggctggcctagactgcccccgatccatggtggccggtacgtcttgtcgagctcttgcatgtcgtggattctaaattcttcttctgcgtcgaattgtctctgccatgtgcgagtaataacaatcaaggttatacttacgat

SEQ ID NO: 23029 - DNA, 1018 bp, Zea mays
  Clone ID: LIB3593-002-C11_FLI
gaaatccatcgacgaacaactaactgagaagagctgcgcctgcgcggctgcgcctgcgggaaagggagaacatggggaagaagaggggtattatctccccgctggaccatctcgctgggctgctggaggtgcgcgtggtgaggggagtggacctcgccatccgcgacctccgatccagcgacccctacgtcgtccttcgcatcggcaaggcgcagaaagtgaagacgcgagtggtcaagaagagcatcaatccggaatggaacgaaaaactcaccctctctattgaagaccctgcagttcctattagactggaagtatttgacaaggacactttcgttgatgatgcaatgggtaacgcggaggtggacatccgcccgttagtcgagattgtgaagatgaagctccagggtgtcgctgacaaaacggtggtaaagaagctggtgcccaacagacagaactgcctagccgaggagagctcgatatacatatcggaggggaaggtgaagcaagacctggtcgtacggctaaggaacgtagagtgcggcgaaatcgagctccaacttcagtgggtccacctccctggctctaagggtgtatgaggggagttatattgagcgctgcatagcttgcactgctcaggttcttcgcttcacattaaagtaatctattcaaactgtagttctaatctatagagataaaatagtgtaaaaatattagaaatcgatatggattaaagacattcgaacccagctcttgctagttgaattgagtcagtctaaatttaaccgacagaattagattagatgtacccagtgcatgaacgattggaaatcgtgactgtaaaatgtgtgcaatgcatttactaaggggatgtttggtttgagtaattactccatccaaaatgatgtgtgtattatgtgtatattttttaaatttagtgggatgacccatttttcatattagtaataactaactataatgaataaagtggtgatcatatcaactcattccattccac

SEQ ID NO: 23030 - DNA, 710 bp, Zea mays
  Clone ID: LIB3593-002-D12_FLI
cagctgctgggcagctatccagcgggccactgagtttaccttactgcttactcttacatactaagatcgctaccagagcatggcgggaacttcgtcgtggtcgtcgtcttcatcctgcgcgtcgtcgtccgggtcgcccgaccacgatgtcgtctgcgtcaccgagccggactctgtgggtgccgcaggcgccgtcgccgacgccgagggaagcgtcaagttcctgtgcagctacggcggcaggatcctgccccgccgcaccgacggcacgctgcgctacgtcggcggcgacaaccgggtcctctccgtcgaccgtcccatccggttttacgtgttgcagcggaagctgagggaattgtgcggcggctgggaagcgcacctgcggtgtcagctaccgacggaggacctggacgcgctcatctccgtcacctgcgacgacgacctcgccaagctgctcgaggagtacgacgaggctagcaaggaccgcctccagtcgctcaagatccgggcgttcctgttcccgactaggacgccggcgccgtccatactacagcgtaggagcccgccgtcgattgctcacctccactggcaaaacacttccccgccgccggccgcagccggcgtctcgctgacgtgcgcgccgcggtggtgggcagcgccccaggcctctcgccaggcgcagaactacgaccgacacagcctcggtgagg

SEQ ID NO: 23031 - DNA, 1622 bp, Zea mays
  Clone ID: LIB3593-002-D6_FLI
tccactttggcctcctcacttgcaagtttaatcttcgcctccagccatgggtaaggagaagtctcacatcaacattgtggttattggccacgtcgactctggcaagtcgacaaccaccggccacctgatctacaagcttggaggcattgacaagcgtgtgatcgagaggtttgagaaggaggccgctgaaatgaacaagcggtcctttaagtatgcttgggtgcttgacaagctcaaggctgagcgtgagaggggtatcaccattgatattgctctgtggaagtttgagaccaccaagtactattgcaccgttattgatgcccctggacaccgtgactttatcaagaacatgatcactggtacctcccaggctgactgtgctgtccttatcattgactccaccactggtggttttgaggctggtatctccaaggatggccagacacgtgagcatgctctccttgcgttcacacttggagtgaagcagatgatttgctgctgcaacaagatggatgcaaccactcccaaatactccaaggcacgttatgatgagattgtgaaggaagtctcatcttacctcaagaaagttgggtacaaccctgataagatagcatttgttcccatctctggttttgagggtgacaacatgattgagaggtccaccaaccttgactggtacaaaggcccaaccctgcttgaggctcttgaccagatcaccgagcccaagagaccctcggacaagcccctgcgtctccccctccaggatgtgtacaagattggtggtattggaactgtgccagttggtcgtgtggagactggtgtcatcaagcctggtatggttgtcacctttggtccaactggcctgactactgaggtgaagtctgttgagatgcaccatgaggctcttcaggaggcccttcctggtgacaatgttggcttcaacgtgaagaacgtcgctgtgaaggatatcaagcgtggttatgtggcctccaactccaaggatgaccctgccaaggaggctgccagcttcacctcccaggtcatcatcatgaaccaccctgggcagatcggtaacggttatgccccagtgctggactgccacacctcccatattgctgtcaagtttgctgagctcattaccaagatcgacaggcgttctggcaaggagcttgagaaagagcccaagttcttgaagaacggtgatgctggtatggtgaagatgattcccaccaagcccatggtggtggagacattctcgcagtatcctcccctgggtaggtttgctgtccgtgacatgagacagacggttgctgttggagtcatcaagagtgtggagaagaaggacccgaccggtgccaaggtgaccaaggctgctgccaagaagaaatgatgcgacctgtcgttgatgcagcgtctgcttttccaatacgtagctgagatgttccattttgacataagttttgtatgctgtggttgctgtttaccttgtgaactgttgagctctactattgggtgtccgtttatctgtttatgtagcatcttgttatttcacctattgcaatacaagaatgctatatgacatatatgttagacatttgggcaatgttaaatggatttttact

SEQ ID NO: 23032 - DNA, 1823 bp, Zea mays
  Clone ID: LIB3593-002-F8_FLI
catggaagagctgcacaaccagtcatgagtcaaccatgcacatttcatacgattccagttgcctattagtcacactgtcagtcttactttgcattgatagttgtactgtcaggaataatagattgaggctccccttatttattgataagtaatgcacatgccaaaacttgtgctgttgctatacttatatctgttaaagtgtgcacccaaacatataggtctgttgtagagcctgtgccaaatgatgttcatgattacaaaatttctgttatacatcactcttgaatgctataatatatcatggttattctggttctccaaataacttttatcttctacagaaatctgcttcggtgcttcattaattattccagcaagtcatcattgtgtgattatcctcattaattgatggagatcattataaatctttatgcttttccctgatgcagacctgattcatgtcctttcttctgtcccaagggatcttaacttcattgaccacaccggtgacgttggatcaaaagaacctgagaaagttcaacaaattatagtcgatgctggaatttacttgtcagggaggacaacttctttcgaggaacacagaaacgagcagctcctgaggcttttaagttctttacaggcatttcttgctctctgtgcttgctttgttttcattggtcttaataatttcctcaccaatttatctcctccgtaataggttctccatgggtcatattaaaccggcaatttatagagtactgcattcttgcttgggagaatctccctaggattcttctcatgtacttcaacaatgtaatacaacctcaggaagggtatttccagacagtcatctgcaactcactggacttccgtaatttcactgtgaacaatgacttgaggttcatggtgcaagatgattccgctcagaaaaagtcccttttcacgagcagggaacattatggtcacatggtggatagtggggcacccttcgcaaggccgtttcaggagaatgatcctctgctggaccagatcgacggcaatatactcaagcgttggagccatggaccagttcctggtgcttggtgcacaggaaggaagaggtggttcagtgatccatgttcccagtggggcgatgtgaatgttttgagaccaggtcctcaagcagtgatgttgcaccaatatgtaaatcggaccttagaagaagcaaagtctagcagcaattcatgcaggcggtagcagcattggcgtctagaacctcatgtcccatggttgaaagctttgagctttttccgcttatccactaagggttctccactctgctgaataaatagctgccacatgtctaagctgaaacaagcactcgtcgcacctggaacaaagccatggagggatgttcttttctgatattttcatgatgactatcatagtcacggatcaggagtttcactttggtctgtgattaatctgtgcaatccccatatttggctcatataacacttccaggcgctgataataggctgaagcttatataactactgttgtttatatgttgcggttatttgttggacagcttatattcatgctagtagatcaagttacgaatcccttatgctcccctgttgtgaggactgtagactgtagaacaagggattttgttacttgttagtcttactgaattcatgttgtgctttggacttacataatatgcctagtcctgtattgtacctaaaatgagactccagtcatctcagtttacctttgaggggtgtttggaagcatattattttttgcagtttcaaagcaatactatggtctttaagaat

SEQ ID NO: 23033 - DNA, 1867 bp, Zea mays
  Clone ID: LIB3593-002-H9_FLI
attgtcacgatgctgctggagaaaggcgctgacgttaacgcccgcaactactgcggccagactgcgctgatgcatgcttgtcggcatgggcactgggaggtggtgcagatgcttcttctatttagatgcaatgttactagggcagattacttgagtggtcgaacagcactgcattttgctgcacatgatgggtttgttcggtgtattaggcttttagttgcagactttgtcccgagtgtggccttggaggatattgcttcttctgtggtggatggtggtgattgccagacaaacaatgggagcagtcctaattcatcgtcggggcagaagtttaatgaatcggcccgtgtgaggtacatcaacaaacctgcagatggtggtgttacagcacttcacatggcagcattgaacggtcacttagattgcatgcagttgttgattgacttgggcgctaatgtctcagctgtctcattcccctatggcactactgcaaatttgataggagctggcagtacaccgttgcattatgcagcaggtggggggaaacaagaatgctgtgaggtaagtcaatgtcataaagaatcatcacctttttgacaagaatcctgcttcagttgtacctatcagagaaatttatttattttggtatgtgatgatgctgttcttgcagctactaatatcaaaaggctctagcaggttgacactcaattgcaatgggtggcttcccgttgatgttgctagaatatttggacggcgctctttggagccattactttctccaaattcacactcgaatgtccctgtatttcaaccatccagttatcttgccttgccactcatgagtatacttaatatagccagagaatttgggttgcagcataccacaccctcaattgatgataatgatctatgttcagtttgtctagaaaggtcttgttctgttgctgctgaaggttgcagtcatgaattctgcatcaaatgtgctctctacctctgctcaaccagcaacatccgtgtcgagttcacaggcccacctgggtccatcccgtgccctctttgtcggaacggcataatgtctttcaccaagttaccaagcacaccaacagaagggcttaaatcaggttcagcgctcacattctgcaacccatgcatactgaacacccggtccatggactcgccagccactttctccaaagccgaaatcagacggaaccgtgtggcagctgtctcttcggagctggtctgtccaatcacctgcagcccattcccgtcgtccgccctcccaacctgcaggtgcagcgacgacgatccatgcggcgatacagacgtgcaggatggtcccgagttccagtctccccggccctcgcacagcgcaagcatggagctggacaagaggggggagggggatctagaccgggccagctgctcaggcatgttctggagccgaagaagctgccacagggagcagcagtgtgatgcggagatcaacgcttgattctttatctgtggttctgaattacgtttggattcgtagcagctccaacgcgggagatgagcagcggttgttttttccgccccagctatgttccttcctcctatctacagccaatgttttcttgattggtgaaatgctgctgcgtcctttgcagccgtagagtgtgtgttgtaacagttttgttactatggttcatgtgtacctgtgaatctagatagccttcgaagttgctagccagttacggttctttgtagctctatgtaaattgcagaactggatggaattactttctgtccctgatgataaatatttatatacaacgagtgaagtaccctctaaggccatctccagcggagctggatgtgagcttgt

SEQ ID NO: 23034 - DNA, 1090 bp, Zea mays
  Clone ID: LIB3593-003-A1_FLI
taactagcttcttctagctctagctaggctcgtctgctgcaagaaggtaacagtaacagcaggcatggaggggaaggaggaggacgtccgcctgggcgccaacaagttctcggagcgccagcccatcggcacggcggcgcagggcacggacgacaaggactacaaggagcccccgccggcgccgctcttcgagcccggggagctcaagtcctggtccttctaccgcgccggcatcgccgagttcgtcgccaccttcctcttcctctacatctccatcctcaccgtcatgggcgtctccaagtccacctccaagtgcgccaccgtcggcatccagggcatcgcctggtccttcggcggcatgatcttcgccctcgtctactgcaccgccggcatctccggcgggcacatcaacccggcggtgaccttcgggctgttcctggcgaggaagttgtccctcaccagggcggtgttttacatcatcatgcagtgcctgggcgccatctgcggcgcgggcgtcgtcaaggggttccagcaggggctgtacatgggcaacggcggcggcgccaacgtcgtggcgcccggctacaccaagggcgacggcctaggcgccgagatcgtcggcaccttcatcctcgtctacaccgtcttctccgccaccgacgccaagaggaacgccagggactcccatgtgccgatcctcgcccctcttccaatcgggtttgccgtgttcctcgtccacctggccaccatccctatcaccggcaccggcatcaaccccgcgcggagccttggcgccgccgtaatttacaaccagcaccatgcgtgggctgaccacgtgatcatcagggcgatcccgttcaagagtaggtcttaaaggagccgatgctgctgcttcgagatgctgccggtcttgaaaggatggattcgtggctgtttcaaatgatcccctactatgttacgtggagttccattcctctttcaaagttcggagctgcttttatccgaacccagacttgtaattcatctgtaccaattgtgtaatatgccgcgcctctgttatgtgcaattcaaaattatgagacagcgagtc

SEQ ID NO: 23035 - DNA, 1696 bp, Zea mays
  Clone ID: LIB3593-003-A6_FLI
ctctcccactcgacacccacacaagtctaccaccccacccccaccccgcccttccctctacagtcttttatccgacttagtcttcttcgtcgaacaccttccaacttctttacctcagagtaatctacaacatggccggcggcgcagttgtttcaggcggttcgggtggaaaccccctccgacacggattcatcaagagggagtacctctgggctttcatcctcgttacttccctcttcttcctgtggggtttcgcctacggtctgctcgatgttctcaacgcccacttccgtgctgtcctcggtatcaccaagacccagtcgactggtctccaagcggcttacttcggtatcggttacttcgctttctcgcctgtcgccggagaggtcctgaagaggcgcggatacaagttcaccattatcatgggcctgtcgctgtactctttgggagccatcctcttctggccttgcgcaaagttctccggtaaaggcaacaacgccgccgtcttcggtggcttcgttatctgcaccgccgtcatcgcctgtggtctcgccaccctcgaggtctccgccaactcctacgtttccgtcatgcccccccacaacgtcgccaacttccgacttcagttctcgcagtcgttcaacggtgtcgcctcgttcaccggcccgctcattgcctccaagtacttcttctccggcgagcacaatgacaacctcgacacggtccagtgggtctacctcgctgtcgccctccttggtgtcgcggtcgccatcgccttcttcttcaccaagcttcccgaagtctcggaggaggctctccaggctgaggctgagctccttgccgacgccgccggtgccgacccgcagactctcaagcccttctacaagcagtaccgagccatctcgggagccgtcgcccagttcctctacgtcggtgcccaggtcaccatcggagccttcttccttttcctcgctgaggaggctggtatcaaccacgagaagggctcgcagctcctgtcttacggtctgatcaccttcaccgttgctcgattcatcggaaccgctctcttgtcgttcattgctgccccggtcctcctcggtgtctacgccgtcgcctgcaccatcattgccatcatgatcggagccgtccacggcccgaccggtgtctacctcgccatcgtcatcatgttcttcgagtcgatcatgtacccggtcatcttcgtgctgtccacccacaaccttggccgacacactcgacgagccgctgccatggtcgtcatgggtgtctccggtggtgccgtcttcccgcccatccagggagccatctccgacaagttcgacactcgagtctccttcttcatcgtcgtcccctgcttcgtctacattgcgctctgggccgtgtacatctggcacaaggacggtcgaaagtggggtgttgcttccaacgacgccgtcctcaacgctcagtccgcccagcttgaggctaccccggccgcgaacctcatgttcggcggtgcccagcgaaccgagaactacgagggaagcatcaaggaggacctccaccaggtcgagaaggtgtaagaaggcattgttttgggttgatccctttctctccctttatgggtttcgttgctatcatcatctaggtatagggtcttcattcgtttacgcgcatatgtatgcctttcgttgaagcc

SEQ ID NO: 23036 - DNA, 713 bp, Zea mays
  Clone ID: LIB3593-003-D12_FLI
tcgatgtggaggcagagtttgctggtggtgatagtggtggcacaaccacagagctggatggcctgccaccgccaccatccggattgacaatatcagctgccaaggccaaagggatggatagctacaagggagggcagtatgctgatgctatcaagtggttgtcatgggctgttgttctaattgagaaatcagggaaagatgctgacattgttgaggtgttgtcttcaagagcttcttcatataaggaggttggtgagtacaagaaggccatcactgactgctcgaaggtgctggatcaagataaggataatgtctcagtgctagtgcagcgtgctctcctttatgaaagcacagagaaatataggcttggtgccgaggacctgcgtttggttctgaagattgatcctacaaataggcttgccaggagtacaattcaccgcctgaacaagttggctgactagggatgtctttctagcgccctgatgtaatattgtactaccactgtactgcatccttctcacatgagatctgtgagttatttgaactctttagtctttattactatacttgtggctttgggggaatagtttgcaattgtgttgttataaagtatgaaatacgaatttacatacaatatattttttatttgtataatctacatcatgtatcaaattatcttgaaagctattactctgcggcatgtattctgtacc

SEQ ID NO: 23037 - DNA, 2774 bp, Zea mays
  Clone ID: LIB3593-003-F2_FLI
cctcctgtcttccttcaccttcgcgctccgccgccgccgtcgattcgtgctgctctcacccctaacctgtccaacatcgccggggagggaagcagcagaagaagctccccttacctccggctatcgcctgaggataaagtggggtctgtaggggagtcttaggggggagcaaaagggataggatagggagagatgaagcaatcaatttcttcgtccgccttcgcccctgcttacgtccccgctactaaccctaggatcattctgtcttttctcgtttcttatccgactcttcttcgttttatgcctatcagttatgaggttgaacgccttcagaagcttctctactagattagtgtaaatagtagacttgttcgagtttagcttggctggaagaattagtctctggtccgtgtttatatctgctagcaataatggctgcgatgaacggagaggtattgggtgaatgtggaaggaacataaatagtctcaagagaaagcgggagagccccgctgcatatgctgctggcgtattctgcacctctgaattgcatcagcatactgtcaatgattctgctgttaggtttcatcttgataaagaccgtaaggcaaagatcgtgtgccacttcaacaagcaggttttgcagagctataagaaattcatgagtagtgcaccacctaagcgtattttgcttcgccaaggtgctgtctggaaagactttccagaaaagattgtcaaattggcccaagctgacttcagggcaaaaaagatgatcacagaaacaggatatcagaaccagctatttttgctggattttgcccatatgacattcatagacacaaagacaggttttcagaggccaattgcttggatcgatgaaaatgaaaagtgctacttcccggaatcatttatacaagatcagaagttatttatgaagaaagattttggcaacggaaatcatgagtacattagtgaagagcgaaatgggacacgagaaacgaatcaccagtttggagcatcagaaagttctgctgaaagctcaaactttgagtcaagtattggagatgtttctagtcctaagagagctagggctgaaaagaatttcattgtaaaaaaatattgtgatatgggagaagctattggagaaaatgagccatgcactttgttgcctacagcctgtaacctactaccacaccaagctaatctgggtgaggtatcccgtgctcagcgcactattgaagccgtggagaagctgttgctgcaggggatgggttcagttattgaatccaaggacattattggaatctacaggactccattattggatgaccacggacaagtccgttaccatattcaccaaaagcaagtacaggttaccggatgtcatcgtggaaacgcaaatgtccgttatgcatggcttccttgctccaaaagcactgtgcatgtaatgatgctgaatggtgttttgcaagttgataagcctcccaataagtgtgcagcctatggagagggcactctccttacaccagcaaatcgttcggatgcctgtgtgaaatactctgatgttgatgaaaatggcattgtccgtatgatgttgtgccgtgtaataatggggaacgtagaaatagttcaccctggatctaagcagtgccaacctagtaataagtattttgatagtggagtagacgaccttaaaaatccacggcattacgttgtgtgggatatgaatctgaatagtcatatctattctgagtttgtagtcactgtcaaattgccttctaaaaccaaagattcctttgtatcgcaagaaaactgtcagaattcgtctgatctatcactggtgttgaactctagttcacctgattgtatttcacaggtaagatgctttacatggggtattaacaagatagtactgtaacactagagacaactgttgctaacttgatatacagaagagttccactgttggagcagcaagagtgcagtaattcagattctgtgatttgactcaataattgacatgattgcattattgagattataacttggagctgattatattcgttatctatgatagaaacctccaaatatgataagtttccctgtgaaaccatgctattttagccacgctggagttggttaaagcaccagttaacaacttccttttatgcataaaacaggagatgaacctggaggcacctccagcattgggaggtggatgtgcagcccccatgctaggagattcgatggaaaaggctccaagctcaccttggatgcctttctccatgctgtttgcagcgatctctaccaaagtgtctcctgagaatatggacgtgattattggttgctatgaagagtttaagagcaagaaaataagccgaggtgaactagtgaagaagctgaggcatgtagttggtgatagagtgctaatatcgacgataatgcgtctccaagataagttacctccagtggataagcgtgaggaaccagacacatcggcgtccaaggtggtggcggaaccatgagatgggtgtcaggaggtgggcgaggaatgcagaaagggaggaaccagccgacttgacatagaaaaccctgtgggaagcagcaactatgaagcctcttgcatcagtcttgtgcatggaggctgctgtttgttctctgtatcgtaggtgtctacgtttgcgaggaaattgtatccggtgtttctctttcttcaaattaaaccacgcacatgcagctgccgtactttttggaccattgaagtgtttcgtccgtg

SEQ ID NO: 23038 - DNA, 1627 bp, Zea mays
  Clone ID: LIB3593-003-H3_FLI
ctcatcctcttttcaccatggcttccgctgctgatatggagaagaagcatctgtccgtggccatcaccggccacgtcgactccggcaagtcgactgtgacgggtcgcctgctgacgctgctgggcggtgtgtcggagcgcgagctggagaagctcaaagtggaggctgctgcgctgggcaaggagtcgttcatctacgccttcgtgatggacaagcagaaggatgagcgcgcccgcggtatcaccatcgcgtgcacgtccaaggagttcttcactcccaacttccactacaccatcatcgatgcgcccggccaccgcgacttcgtcaagaacatgctcggaggcgcctcgcaggccgatgtggccgtgctcatggtgccggctgagggaggtttcaccaccgccatcgccgccggtgaccacgcgtcgaaggaggtgcagggacagacccgccagcatgcgcgcctgctcaacctgctgggcgtgaagcagctcattgtgggcgtcaacaagatggacgacggcactgtgaactggagcgaggctcgcttcaaggaggtgcgcgatgagatgcgcaacatgctgatcaaggtcggctggcagaaggagttcgtggagacgtgcgtgcccgtgatccccatgtccggctggaagggcgacaatctgctgtccaagtcggagaacatggcttggtggaagggagtggactgcaaggtcgacatcaagcagaaggacaccatccacgtcgacacgctgatggatgcgctcgacaagctggcgcaggcgcccaagcgcaaggaggacgccgctctgcgcatgccgctgtctggctgcttcaagatcaagggtgtgggtgatgtgatcaccggccgcctggagcagggcaaggtgaaggatggcgatgaggtgatgttcctgccccgccacaccgacgccaccccgtgcgtcggcaaggtgttctccgtggagatgcaccacaagaagatcccgcaggctgtggccggtgacaacgtcggcatcaacatcaagggtctgaccaaggagaacatgcccgagagcggcgacatcatggtcgtcaagtcggacaagtcgctcaaggccgccaagcagttcaccatgcaggcgcaggtgctcgactgccccaacccgctcaaggtcggctactgccccgtggcctgcgtgcgtaccgccaagtgcgccgtcaagctggtgaagatcaactgggtcatgcacaagtcgctcggcaaggagaaggtgactgacgccaccgagatcaaggccaactacgtggccgagctcgtcttcgagcccacccagcagctggtggtggagaagtacgctgactgcgagggtctgggccgcgtcggcctgctcgagggtaactcgctcgtcatgctcggaaaggtcaccaacgtcgtcttccgcgactaagcaggcggaaccacgttttcaccgaccaacactgacaacactcaactccagcgtgagagaggaaccaacacaaaaaaacactgcatcagatgactcgctcgcgcgcgcattgcacgcaacaagcggaaatgggcgtccaccttgcttcgtaacttgtcttgcacacacgaacgatgtcactcgttggcatattattc

SEQ ID NO: 23039 - DNA, 958 bp, Zea mays
  Clone ID: LIB3593-003-H4_FLI
ctgtgcgccgtcccgtgctccctccgctagttctcccaattccttccccacctcctcggtcgtcgcctcccccagagagcaggagccgcctcgtccctgccggtcccgaccccgacccccatcccgtccgcgtccaacgccatgaatcccgagtacgactacctcttcaagctgctcctcatcggggactccggtgttgggaagtcttgcctgctgctgaggtttgcggatgattcatatctggagagctatatcagtactattggagttgattttaaaatccgcaccgttgagcaagatgggaagacaataaagctacagatttgggatactgctggccaagaacgctttaggaccatcacaagcagctactaccgtggagctcatggcattattgttgtgtatgatgtaactgaccaggagagctttaacaatgtcaagcagtggctgaatgaaattgataggtatgccagtgaaaatgtgaacaagcttttggtggggaacaagtgtgacctggctgagaacagagtagtttcttacgaggctggcaaggcccttgctgatgacatcggaataccattccttgagactagtgccaaggatgcaacaaatgtggagaaggcattcatgaccatggcaggggagataaagaacaggatggcaagtcaaccagctgcaagtggtgctagtaggcctgcaactgtgcaaatgcggggtcagcctgtttctcagcaaagcagctgctgctcttgatcgtctgtctagatcacagtagtgtgattgtgcagcaagcgaaacttaaattggttgctccgtgtacattaagcctattactgtcccaaagaactcgatgttatctatcggatactggaagtctgtctatcgactgcaacgcttaagcagatatggcctgttttatctgcctgttcttattccagtgctaatgtgatgttggatc

SEQ ID NO: 23040 - DNA, 1502 bp, Zea mays
  Clone ID: LIB3593-003-H5_FLI
aaaaattgtcgtcccctgattcggatgtctatttaggcggtggtttacgttgagctgaggagtgaggaagatgtctggaaatgtgagtccctcctgcttcgacttggaccaagcggggaatctctcttgatgtgcggaggtccgtggtgcattccatctgatctcttgtattctgtgtgcagccagtcggcgtcgacaacacttctaggaggaaatttgacaaggaagagtacttggagagagctcgacagagggagcagagggagaaggatgaagctcggaaaggcaaggaaaggggtcctcctgtgcaaagacagcctttgaaacacagggactatgaagttgatcttgattctcgtcttggcaagactcaggtggtgaccccgattgcaccattgaatcagcaggtttgtgcataaattccatagggcatgttgtagcgtttaaattgatttagatttattttcatcatatcttaattcttgacaagaaattgctagagtgtagttgctttgctccgtccatattaaacacagatcttagtcgaagatgtttctgtgtattacctcttattcttttctcatgctgtaggcttaatttcatctttttgcagttcattattattaatttcagtctacttgttcctacatgcatttcataccagtgctatttacaacttaagtgtttctacaaaaatgaacctcttactttgatgatcaattcaacacaaaagtttcctcccaactttatgtactttctgacaggctggatactactgttctgtatgtgaatgtgttgtcaaagattcagccaactatttggatcatataaatggcaagaagcatcagagagcactgggcatgtctatgcgtgttgaaagggcatcacttgaacaggtccagaaaaggtttgaggcacttaagaaaaggaaggatccaagtgcctttactgaagaagatttggatgagagaataatgaaacaacagcaagaggaggaggaacggaagcgtcagcgcaaagaaaagaagaaagagaagaaaagagaacaggcaacccaacatgaacctgaggacgttgatcctgacatcgctgccatgatgggttttggtgggtttggttcctcgaagaagtgacagctctgtgttggccgcatccctttggtgaccttctgccctgaagatattgctcaaccccataaacacctgtgccatgaaaaatcgtttttgccagaatcctgataagatttgaacgaagtgcactggatgcaaggatactacgttttggcactgggatactgaactgcgtgtatgggagttgattatcaaaaggaatatctaagggtgttttggataaacctgtttatttgctacttcgggtgttcctgccatagaaacagctgatggtcgtgattatttgttgtggcaatgcagatgtgcgaagtggaacaaaccaaaagaattgccgtgtcattttctagaggaataaacttgtgtattgcagtt

SEQ ID NO: 23041 - DNA, 2016 bp, Zea mays
  Clone ID: LIB3593-003-H7_FLI
cccattcacttcacactctagactctagttcgccccatgagtctggcaggtcaaagaagggaagagacaaccgaaggatcaacggatcaagcgaggtagtcgactccgcgtctaattaaacctgtggtctgcggacgggcggtcgtcggttagagcattgcttccgtgtggtgcggttgatagctcggatcttctgctggccgagttcgtcttggaggagaagagagagagagagagagagagagagcgccgggatcggagccaggaagcatccagcagcgatggcgggcggaggggtggcggcgctgggcgtgaagacggagcgcgcggcgcagtacaaggggcgcatgacgctcgccgtcgccacgacctgcctcgtggccgccgtcgggggcgccatcttcggctacgacatcggcatctccggaggcgtgacatccatggacccattcctggagaaattcttcccggtagtgttccaccggaagaactccggcgggaagaacaactactgtaagtacgacaaccagggactagcggcattcacatcgtcactctacctcgccggcctcgttgcctccctcgtcgcgtcccccgtgacgaggaactacggccgcaaagctagcattgtctgcggcggcgtgagcttcctcatcggcgcggccctcaacgtggccgccgtgaatctggctatgctcatcctcgggcgcatcatgctcggcgtcggcatcggtttcggcaaccaggctgtgccgctgtacctgtcggagatggcgccggcgcacctccgcggcggcctgaacatgatgttccagctcgcgacgacgctgggaatcttcacggcgaacctgatcaactatggcacgcagaacatcaagccgtgggggtggcggctgtcgctgggcctcgcggcggtgccggcgctgctgatgacgttgggcgggctctttcttccggagactcccaacagcctcattgagcgcgggcgcgtggaggagggtcggcgcgtgctggagcgcatccggggcacggccgacgtggacgccgagttcacggacatggtggaggcgagcgagctggccaacaccgtcgagcacccgttccggaacatcctgcagccgcgcaaccggccgcagctggtgatggccgtgtgcatgccggcgttccagatcctgacgggcatcaactccatcctcttctacgcgccggtcctgttccagagcatgggtttcggcgggaacgcgtccctctactcctccgtgctcaccggcgccgtgctcttctcctcgacgctcatctccatcggcatcgtcgaccgcctcggccgccggaagctcctcatcagcggcgggatccagatgatcgtctgccaggtgatcgtggcggtgatcctgggcgtgaagttcggggcggagaagcaactggcgcggagctactcggtcgcggtggtggtggtgatctgcctgttcgttctggcgttcgggtggtcgtggggcccgctgggatggacggtgccgagcgagatcttcccgctggagacgcggtcggcggggcagagcatcacggtggccgtgaacctgctcttcaccttcgccatcgcgcaggcgttcctgtcgctgctgtgcgccttcaagttcggcatcttcctctttttcgcggggtggatcaccgtcatgaccgtcttcgtctacgtcttcctgccggagaccaagggcgtgcccatcgaagagatggtgctgctctggcggaagcactggttctggaagaaggtcatgccggacatgccgctcgaggatggctggggcgcggctgagggtcatgcggcacctgccaacaacaatcacaagggatgactggagtgaagcatgcatggttgcctggttggtttcgtggacactttatataactgaagaaaacaagacacacactaacatgtaggcggctgcttattcttattgtattttgtataaagcaggctgtgtgatatgcagggataaaaacgaacgagatcgttcc

SEQ ID NO: 23042 - DNA, 1836 bp, Zea mays
  Clone ID: LIB3593-004-A11_FLI
ttttaaataaaaataaagctcgacgtcgtcgtcacctctctcgccgtccacgagtcacggcgagcggcgtcgacggcgggcgggggtcctggccgttcaccaccatgcctgaccccaccaccaaacccccttcgccgcgcccccgccgtcgccgcaggctctgcggcctctgcctcggcaccgcgctcctcgcgctcctcgtcgccgcgctcgtccatgtcgtcgccccgcttccgcgcgccgcttccgcctccgcgcgcttctccgtcatcatagacggaggcagcacgggcacccgggcccacgtcttcgtcacggggcacgacggcagcccggatctggcgctctccaccgtgatgcgcgtctccccgggcctctcgtccttcgccgccgacccggcgcgggccggggagtctttgaagccgctgatagattttgcgagggataagattgacggcgcgggcagcgccgctggggaggcggaggtgcgactcatggccaccgcagggctgcgcctgctcgaggagcgcacccaggaggcaatcttagcgtcctgcagggacgttctacgagcctctgggttccggttcgaggacgcgtgggccaaggtgatcccaggctcggatgaaggtatctatgcttgggttgcagcaaattatgctcttggaagacttggaggggatcctaacagaaccgttggaataattgaacttgggggcgcttcagctcagcttgccttcgtttctgatgaagtacttccacccaaactgtcatataattatacttttattgaaacaacatacactctctataccaacagctttttaaactttggtcaaaatgcagctcaagactcgttccatgaaatgctgaggtcaagaggctcttctgaaaatgctacacttgctgatccttgtgctcccagaggatattcacgcaatgaagaaatgatgctgaggatgagtggtgcttcaaggtcaacattagagaaccagtatgttgataatgggactggaaactttacagaatgcatatcttcttcactgcttttactgcaaaaaggaaaggagaagtgccagtatcaacaatgtcacctgggatctactttcgtacctgagctgcgtggatacttcttggcaactgaaaatttctattttacatcaaagttctttggacttaagaagtcttcatcactctctgatttcatgttttctggagaacaattttgcaatcaggatttgtccacccttagaaaaaaacatcctaataggtcagatgaagatttttcacggtattgcttctcgatggcatatattgtggctctactgcatgacagtcttggtgtatcactggatgataagaggattgagtattcaaaccaggttggagacattcaggttgaatgggctctaggagctttcatcacactgattcaaaatgcaagtttaaagccattacacactgctgtggaatcaacccatagcaatagaccattgtttgctgtgctgggaatgtttcttttatgtggagtactttttgtatcaagatggaggaagcacaagacgaaagtcatatacgacttagagaaaggccggtacatcataacacacatcagctgatgctgaaccttgtgcagaagaactatatttatacgacaggaatagatgttgtgttgtacaacaatgtaccagttcaattatttgtgttttattttaggtagcagagctgggtgggtagagcatggaatatagcacaaatgcgtatagaagaatgtgtagaacaagttgccatgtgttaattgaattattttggtgaataattatacctgttttgttt

SEQ ID NO: 23043 - DNA, 724 bp, Zea mays
  Clone ID: LIB3593-004-A3_FLI
tgtacaggttcgttccgatccgtgtccgaccttgccactcgcccaccggccaccgccaccatcacaagcttctattttagctctagctcgctcgccatcccctgcccggctgctgcccccaacggaacgacggccagaggaagctaccagagtcgatcgatcgatcgagatcgagatcgagagagagagagcatggctggcaggagtttcctgattcggtcccccaaggaggaggagtccaacgccgccgtcagagaagctgtactgctgggagcaaagaacgccgcaatagctggtactgtggttgcagttcccacgttggttggctgccgtgtccttccttgggctaaggcgaatctcaactacactgcacaagcactcattatatctgcagcctgtattgctggcttcttcatcactgctgacaaaaccattctacggaacgcacgacaaaacaccatcgggaagcttgacaagtcaacttgatgcagagatgtagctgaagctgaaaaggttctctggttgccgcggcggttgatagggtgtctattgccccatatgcagtggcaccatttctcttcgtggacaagtaatttttgggtgtttggctattcaaaccagaggttgtgctgtaatgacttgtctaactgatggacccaactattgtatccagtttactccgaatttgaatcagaataaaaggtggttctatatgttcgtagac

SEQ ID NO: 23044 - DNA, 1565 bp, Zea mays
  Clone ID: LIB3593-004-C11_FLI
cccaacccgtcgagaccatccttcccttcttccctcctcgccagaggagagtctcgctagctagggtttccaccaatggcggcgcccaccacctcccgccgcggccccggcggcgcgcgcaacatggacgatgaaaacctcaccttcgagacctccccgggggtcgaggtcgtcagcagcttcgaccagatgggcatcaaggacgacctcctccgcggcatctacggctacggcttcgaaaagccctccgccatccagcagcgcgccgtcctccccatcatcaacggccgcgacgtcatcgcgcaggcccagtccggcaccggcaagacatccatgatctccctcaccgtatgccagatcgtcgacaccgccgtgcgcgaggtgcaggctttgattctctcgcctactagggagcttgcttcccaaacagagagagttatgctggctattggtgaccacctcaacgtccaagtacatgcttgcattggtggaaaaagtatcggtgaggatatcaggaggctcgagaatggggtgcatgttgtctcgggaactccaggcagagtctgtgatatgatcaagaggaggaccttgcgaacaagagccatcaagcttctagttctggatgaagctgatgagatgttgagtagaggttttaaggatcagatttatgatgtctacagatatctcccgccagaacttcaggtggttttgatctctgcaactcttcctcatgagatcttggagatgactagcaagttcatgacggaaccagttagaatccttgtaaagcgtgatgagctgaccctggagggcatcaaacaattttttgttgctgttgagaaagaggaatggaagtttgatactctttgtgatctttatgatacactcaccatcacacaagctgttattttctgcaatactaagagaaaggtggattggcttactgaaaaaatgcgcagcaataacttcacagtatcggctatgcacggtgacatgccccaacaagaaagggatgccattatgggcgagttcaggtccggcgcaactcgtgtgctaataactacggatgtttgggctcgaggactggacgtccagcaggtttcacttgtcataaattatgatctcccaaataatcgagagctttacatccatcgcattggtcgctctggtcgttttggacgcaagggtgtggcgatcaatttcgtgcgcaaggatgacatccgtatcctgagagatatagagcagtactacagcacgcaaattgatgagatgccaatgaatgttgctgatcttatttgagcaaccgctcctcgcaaggtttggcttggtgtggcggtgagaagtggacgagaggggctttgtaatctgagtggagcagagatttgtttgtttacttttttggtgacggcttgaactgtatgtatatatattttagcatgctccagctcatgtaacactttttgggagacctatgttggtggcttattgtgacaatgacacggagaactgtgctgctgtgaattgctgtttgattattattaattattatggttttggttggttgc

SEQ ID NO: 23045 - DNA, 755 bp, Zea mays
  Clone ID: LIB3593-004-F10_FLI
cttgtttcactgattcttgaagagatcgagcttcttttgcaccacaaggtcgaggatgtcttgcaactgcggatcaagctgcggctgcggctcaagctgcaagtgcgggtaatatatacataataatatataagtgcaccgtgcatgattaatttctccagccttcttcttgtcttgtctagttaatttcccttcttctttatttatttttttccattgcaaaacaaacaaacaaacaagaacaaagttaatttggatcgagtagttcaatccatttgcgcgctgtcctttttcagcaagaagtaccctgacctggaggagacgagcaccgccgcgcaggccaccgtcgtcctcggcgtggccccggagaagcaggccgcgcccgagttcgtcgaggccgcggcggagtccggcgaggccgcccacggctgcagctgcggtagcggctgcaagtgcgacccctgcaactgctgatcacatcgatcgacgaccatggatatgattattatctatctagcttgtggtggtggttgaacaattataataagcgaggccgagctggctgccatacataggtattgtgtggtgtgtgtgtgagagagagaaacagagttcttcagtttgctctctctctctctgcatgcttggcgtcagtctttgtgctcatgtacgtgtgtctggttgatccgattgcgtctgctgtaaccatatattaattggtccacgatgatatgatttgatactatatatatact

SEQ ID NO: 23046 - DNA, 756 bp, Zea mays
  Clone ID: LIB3593-004-H11_FLI
cagctaatctcggccccaagattcagaatcaccgaggcgcggcgaggcgacggcggttggcgacatgatggcctcggtgcccagccgtgttgcgctctccgcggcgagccgcctcccgaatctccacgccgtggcaggagatagatctttcatttacaagagaagatgtccaagtctttcaattcctatggctctgtcagcagctgcgccaggcaaaggtggcggtgtgcttgatcggccagtagagaaaattactcctggtcgtcagtccgaatttgatgtgaagaaatcccgcaaaatgacgcctccattccgcgtcatcctgcacaatgacaaccacaacaggcgtgagtatgttgtccaggtcctgatgaaagtgatccctgggatgaccgtcgacaacgcgttgaacatcatgcaggaggcgcatgtgaatgggttgtcagtggtgattgtctgttcccagtccgaggctgaggagcactgcacgtcactcaggggcaacggcctccgaagctcgatcgagcctgcgagtggtggctgctaaggttctagaaatgggtgtatcttgttttgccaagtatagtttgtaaatacccagcatatcaatctaagctgaaactgaaacgggttggttacatgcagttatcgatacaacgaagctaagtacctcttgggtaggtgtaaatcttgtaagggtaacctgtagaagaagaaacatagtatttttggttatgatttatgaaacatttagtt

SEQ ID NO: 23047 - DNA, 837 bp, Zea mays
  Clone ID: LIB3593-005-G12_FLI
gctgcgtcgtggcctgaccctgtccgtcctctccggtcggcgagagcaagaagagatcccgcgccgtcctcttctccacctccacctccacctccacccatggcggcctccaccttcagcggcgacgagacggcgcccttcttcggcttcctcggcgccgccgccgcgctcgtcttctcctgcatgggcgccgcctacgggacggccaagagcggcgtcggcgtcgcctccatgggcgtcatgcgccccgagctcgtcatgaagtccatcgtccccgtcgtcatggcgggagtactcggcatctacggcctcatcatcgccgtcatcatctccaccgggatcaaccccaaggccaagccctacttcctcttcgacggctacgcgcacctctcctccggactcgcctgcggcctcgctggcctcgctgccggcatggccatcggcatcgtcggagacgccggagttagggcgaatgcacagcagccaaagttgtttgtgggcatgattctgatccttatcttcgcagaagctcttgctctgtacggtctcatcgtcggtatcattctctcatcccgtgcaggccaatctcgcgccgattagaaggcttgatatacgccacactgagtcatctgccattgtattcaaagtgttcttttctcggtgaacaatgtgagggatcatgttgagcctgttccacctttgtaacattatattgctattatgtgaagacaaacctagctagctgttgcagttatgctgttgtacttgtatttgtttgaaaataataggcagcgagccccggatgtgatgaataataagcaagctggactagttgtt

SEQ ID NO: 23048 - DNA, 1558 bp, Zea mays
  Clone ID: LIB3593-005-H7_FLI
caccgctccaggctccacctctctcccatctcacgccaacgctcactggaccattcctccgtgcttgggagcggcggagagctatccacctcgtctcaggcaccctctggcgtccccctccccccgtcgcgtgccggcgagctgcggagatccgggattttgacctcgcctccttctgctgacaatatggattttgtaggaaagagcaaggtgatgttggagccttcggcactgggtctgccctcctgtgttgccctgcatattatttgctggttttcagagttgatgctaaacatgcttatttaactaaactagaaatttgttaccgagacttgtgaacgaggcagcatcatagttcagtttggaaacatgtcatcgaagaagatagagttggatcacaaggacatggtccatgattctgccatcgactactatggcaagcgccttgccactgcctcttcagacttcaccgtgaagatcgtcaacattggtgctgcaaatgccccatcccaggtccttgcaacgctaagtggccactatggtcctgtgtggcgtgttgcttgggcccatccaaagtatggtgcaatccttgcatcgtgcagttatgatggccgtgtcattatttggaaggaggatgcacgaggcaattggtctcaagtccacgtcttcagtgacaacaagtcatctgtcaactccattgcttgggctccgtatgaggttggcctctgccttgcctgtgcatcttctggtggaagaatatccatcttgacgatgcaagctgacgggggttgggatactgcaaccattgagcgagcacatcctgtcggtgcgactgccatatcctgggcccctgcaacagcgtcactagctggtgcaggggagcttgtttacaagcttgtctcaggagggtttgactctgttgttaaggtctggggattcaacaatggtagttggaagctggagagtgctcttatctctgacatgcacacagattgtgtgagggatgtcgcctgggcaccagttttgggattgtccaagtcgaccattgccagtggttcacaagacgggaaggttgtcatctggaccaagggaaaggatggagacaagtgggagggaaagctcatgcgtgacttcggttcccctgtctggagggtgtcgtggtccttgactggcaacatattatgcatagctgctggcgagaacaacataaccctctggaaggaagggtcagatgggcagtgggaggaggcgatgaaggttgaaccataggatgaccggcaaggtttctgaatttcttgtagatccatgtttcgacaaagacaaagcttgctactgttttactagtgtttcgacaaagtttaagtttgccattgtgttttactagtgtttcctgcggatccatgtttcgataaagacaaagcttgacattgtgtttccatagacactcaaattcacatattttagtaattcctgatgagcaattatgctcttggatggatctggtgcgctttagactgacaaattttttattcaggaaacactagtaatgttccctatt

SEQ ID NO: 23049 - DNA, 2027 bp, Zea mays
  Clone ID: LIB3593-005-H9_FLI
ctacgcctcagacctcggtgcaaacctgccgcgaaaatagcagccgcccgttcgctctcccactcctcccgcgatgagcgacccgcggggccacgccgccggtcccgaccgtgacggggacgacccgctcgccgaggacgccaacagcgaggaagcgtggcagacgcccgagaaagagccggttgctgtgtcgaaagaggcggctgcgcggggtggggacacgaccccggacgccgaaccggagagcgatgacggagagggaggagtgggctccccggatcagatggagcccaatgcggacggggagcgcgcaccgcccgtggccgcggctgaggacccggaggggattgttggcagcgcaaaggtggagacgaacggcgaggacgccatcagccttgacgccgacggggaggaggaggacgacgatgatgacggagacgaggaggaggaggaggaggacgacgacgacgacgactccacccctgatgcgtctccgagggccgaggtgaaggtggagggcgaaagctccacggggatgacccagagtggcgccggccaccgcgtggaggtggaaccggaccccttcctcgacggtgatgactctgggacggaggaggagcaaggtgcgttcatggcggagctggagcgcttccatagggagcacagtctcgagttcaagccgcccaagttctacggcaagggcctcaactgcctcaagttatggaggcaggtcgcccacctgggaggccacgagcaggtaacggtttgtaaactatggcgtcaagttggagagactttcaggccaccaaagacctgcacgactgtttcttggtcatttcgaattttctatgagaaggcacttcttgaatacgaaaaacacaaggtccggactggtcagcttcagataccaccgcctggtttaccacagcctagtggtgctgaccgtgaggtggttgtaaatcaatcatcttctgccagagttagaagggatgctgcagcgcgtgctatgcagggttggcatgctcaccgccttctcacaaatggcacttatggggataacattttgaaggacaaagatacaatgccacttccaaatcgtgataaaaacctaagctttggggtgctcaagagaaagaaagcatctagtccagagtatgctctcaagtcgtcccgctcaaaaacaaataagtcacaggaagattctatggtcgttgacgttggagaaccagccgactgggtgaagatcaatgtgcggcagactaaagattgctttgaagtttatgcactagttccgggacttctaagagaggaggtgcatgttcaatcagatcctgctggacgtctggttatcacaggggatccagagcagcctgataatccttgggggatcactccgttcaagaaggtggtcaacttgccatcaagaatcgatcctcaccaaacatccgctgttgtcacgcttcatggtcagctattcgtgcgtgcaccatttggtcatcctgatatgtagatatgaaatcctgtttacttcagttttgttgactggcgatgcctcgtcatcagtgatattccttgatattactagggtttatgtcaattctgttgaggaaataggattttgtttgagcagatacatgatgtcaagctgacttagctgaaccgttctgtggttggatgctgattgctgctgttgccatctgttatcaccttgtttattactccctccgttcttttttatttgttgtggtttagtttaaaaatgaactagaggacgataaatatttgagaacggaggtagtattatagtagtggccataaagttagctgattcatgcatgtattccagtttcatggtgagattttatagagaaaggagatgttgttcgtagtagggctaatttgacattatgattacttattgttctttattatttttcttctgtattataaatgcctctctgggtcactccaggcgccttaatgttgcatttttgtgcataacgccggttcctatggtttatgaagct

SEQ ID NO: 23050 - DNA, 567 bp, Zea mays
  Clone ID: LIB3593-006-A3_FLI
ctctgacgggttggtcatccacgatggcacatggacgtacaagatccccacggtcgacaccatcccaaagcagttcaacgttgagctgatcaacagcgcccgtgaccagaagcgcgtcctctcttccaaagcatcgggcgagcctccgcttctcctagcttcctctgtgcactgcgcaatgagggaggccatcagggccgccaggaaggaattctcggtctgcactggtccagcgaactccgccatcacgttccagatggacgtgccggcaacgatgcctgtcgtcaaggagctctgcggcctggatgtcgttgagaggtacctggagagcgtgtcggctgccagcccaacaaacaccgctaaagcatagatccagtaggcgctctatccatggtgtgatggcttaatcaatctgtaaaacactaatggtgtgtttggtttgtggagtcactctatgcttcatgaggtgatgcatcataagttcattccatcaattttggtggaatcaacccactcctcatgtatatactaattattagattatgaggaatgggatggtgatagatc

SEQ ID NO: 23051 - DNA, 1411 bp, Zea mays
  Clone ID: LIB3593-006-B9_FLI
ttctgggatcgcctgcagccgccctcgagactgaccagagacctgctatggggccttgtcctcggcgtgacggtgtcgatctcgtcgacaacgctcgcgctgctcacgcagagctggaggcggaaacagtctatcgcgaagatccctcctaggccgatcgaggtccggagtgaggaggtagtcgatggtgtcattggtctcatcggaaatacaccgctgatacggatcaactcgctgagcgacgcgctcggcgttgagattttgggcaaagccgagtttctgaacccgggtggctcggtaaaggacagagtagcgctcagaatcatcgaagatgccgaagagcagggcctgctgcacccaaacactggctcggtgctgttcgaaggaacggtgggcagtaccggcatttcactggcaacggtcgggcgtgcaaagggctatgactgctgtatcatcatgcccgacgacgtcgcagtggaaaaggtgcaggtgctggagaagctgggggcgaaagtcgagcgggtcagacctgctagcatcgtggacgagaagcagtttgttaacctagcacgggctcgagcgctcgcatttggcaaagtcgatatcacggattcgacccacggacaccctcacggggaggacctggttgtcaccgcgcagccggacgacatcggtacaggggaagacgatgacgtggtcgtgccgagctctccgactatgatcatccgcgacaaggtggctagcttgatcgatgccacagtcagccacaagccgcgaggcttctttgcggaccaatttgagaatcaaagcaactattgggcgcattacgatggaacgggcccggagattttgcggcagacgggcggtaacatcgatgcgttcgtcagcggggcgggcaccggcgggaccatcgcgggtacgggacagtatctcaagacgcatgtgccgggcatacaggttgtcttgtcggatccggagggctctgggctgttcaacaaagtcagatatggcgtcatgttcgattccaaggagagcgaggggaagaagagacggcatcaagtcgacacggtggtcgaggggatcggtatcaaccgaattacgcacaacttcgcattgggcttggacatgatcgacgacgcgtaccgagtctctgacgaggaagcggtggccatgtctagatggctggtcaagcacgacggcctatggcttgggtcctcgagcgcctgcaatctcgtcgcttcggtgcggcttgcgaagcgcctatccagcggtagccggatcgtcaccattctgtgtgatgctggatcccgccatcaaagcaagttctggtcggacgagtatttatcgcgcaacggcatcgcccatgactctgatctagtatcacgattactggatgcataaatcgtcaagt

SEQ ID NO: 23052 - DNA, 928 bp, Zea mays
  Clone ID: LIB3593-006-E4_FLI
ccgccgccgcctccaaggtgcgccaggcgtccagagtcgcggtgggcgggttccggcagcatccgcggagccgtggcggccccgtggccgtgcgggcgtcgctgttctcgcccaagcccgcggcggccaaggacgcgcggccgaccaaggtgcaggagctgtacgtgtacgagatgaacgagcgggaccgcgagagccccgcgtacctgcgcctcagcgccaagcagacggagaacgcgctgggcgacctggtccccttcacaaacaaggtttacaacggcagcctggacaagcggctgggcatcaccgccggcatctgcgtgctcatccagcacgtccccgaccgcaacggcgaccggtacgaggccatctacagcttctacttcggcgactacggccacatctcggtgcagggcgcgtacctgacctacgaggagtcgtacctggccgtcacgggcggctccggcgtcttcgagggcgcctacggccaggtcaagctccaccagatcgtattccccttcaagatcttctacaccttctacctccggggcatcccggacctgcccagggacctgctctgcacgcccgtcccgccctcccccaccgtcgagcccacgcccgccgccagggccgccgagccgcacgcctgcgtcaacaactacaccaactgactgatcaattccagcccaggaaccatctctgtctgccgtgcctgtcccccctgcccctcactcgatttgtatgtttgtatggcttattaggttcttcgatccgtacgtgcgtgcgtggtagcaccaataaagacgcgatcgatcgagttgtgtgtgcttctccattcacttgctctttcagcagctcgtgatcgagttgtgtgtgctccattcccaaattatatatgatcgattagtagcgttaggggttaaccagt

SEQ ID NO: 23053 - DNA, 1485 bp, Zea mays
  Clone ID: LIB3593-006-F4_FLI
ctacgtcaggatccaacaccaccatggttacgggaaagaagaggacattcgtgctctacccgtcgctgggcgtgggccacctgatcccgatggtggagctggccaagcacctcttgcgccacggccacggcgcgctcatcgccgtggtcaacccgcccgacaccgacgccgtgtcggccgccgcggtggagcgcctcgcggcggccaacccggccatcgcgttccgcctcctgccggtcccggcctacttcttcttcgcctccgcggcgggggacctcgccgtgttcctcaacctgccgtacctctaccccaccctgccgtcgttcagggacatgggcgaggcgccggtgcgctgccccggcatgccgccggtccgggcgatggacatgccgctgacggtgcaggacagggacagcgaccggaccaaggtccggatgtaccagttccgccgcatcccggaggggaagggcgtgctggtcaacagcttcgcctggctggagcccagggcactgagagcgctcggcgacggcgtctgcgtgcccggccgcccgacgccgagggtcttctgcgtcgggccactggtcaacgacggcagcagcacggcggggggcggggggaggcacgagtgcctggcgtggctggacgcgcagcctaagcggagcgtcgtgttcctctgcttcggcagcaagggcgccttccccgccgcgcagttacaggagatcgcccacgggctggagagctccggccaccggttcctgtgggccgtgaggagcccgccggaagaaccggacacggacctggggaagctgcttcccgaagggttcctggacaggaacagagacagaggcatggtggtgaaggactgggtgccacaggcagaggtggtgcggcacgaggcggtcggcgcgttcgtcacgcactgcggctggaactccacgctcgaggccatcatgtctggcctgcccatgatatgctggccgctgtacgcggagcaggggctcaacaaggtgttcatggtggaggagtggaggatcggggtggagctgcgcgggtacgaaaagttcgtcaaggcggaggagctggaagcgaaggtcagactggtgatggaggctgaggaagggaggatcctccgggagaggctcgcggtggcgagggagaaggcgttgggagctactaaggaaggcgggtcttctgaagtggcattcacggagttctttggagatttggacaagaccagatctccgtccgtaaacggagaatgcgattgaatttgatcagggtgtgctgctgtggcagatggactgcgaacgtatatatactttaggattcaatatcacttagtatttgacagtacgagactaaaatattgcatctgtggtatgggaataaaattggatccaagcagagagccacttgcgttgcgtgttacaatgtgattgacagttttaccttattttatgaatcaattcactgatgattgtaagt

SEQ ID NO: 23054 - DNA, 1073 bp, Zea mays
  Clone ID: LIB3593-006-F8_FLI
gctaatcggagatcaaagaagcacagccgttaacgatggcttccgacgagctggcaaagatcgtcgagccgaggaaaaagggcaacgtcaagtacgcctccatctgtgccatcctcgcctccatggcctccgtcatccttggctatgacatcggggtgatgagtggagcggcgatgtacatcaagaaggacctgaggatcacggacgtgcagctggagatcctgatagggatcctgagcctctactcgctcttcgggtccttcgccggcgcgcgcacgtccgacaggatcgggcgccgcctgaccgtggtcttcgccgccgtcatcttcttcgcggggtcgctgctcatgggcttcgccgtgaactacggcatgctcatggcgggccggttcgtggccggagtcggcgtgggctacgggggcatgatcgcgcccgtgtacacggccgagatctcgccggcggcgtcccggggcttcctgacgaccttcccggaggtgttcatcaacatcggcatcctgctcggctacgtgtccaacttcgcgttcgcgcgcctcccgctccacctcggctggcgcgtcatgctcgccatcggcgcggtcccgtccgcgctgctggcgctgctggtgttctgcatgcccgagtcgcctcggtggctggtcctgaagggccgcctcgcggacgccagggtcgtgctggagaggacctcggccacgccagaggaggccgcggcgcggctggtcgacatcaaggccgcggcggggattcccagggacctggacggggacgtggtcgccgtacccagcaaggggcgagacggcagtagtgagacgcaggtgtggaagcagctcatcctgtccccgaccccggcggtccggcgcatactgctgtcggccgtcgggctccacttcttccagcaggcctccggcagcgactccgtggtccagtacagcgcccgcctgttcaagagcgcggggatcaccgacgacaacaagctgctgggcgtgacctgcgcggtgggcgtgaccaagacgttcttcatcctggtggccacgttcctgctggaccgcgcgggg

SEQ ID NO: 23055 - DNA, 1534 bp, Zea mays
  Clone ID: LIB3593-007-E9_FLI
ctagccctcaatcacgccgagctcgacggaatcagcccaacccgagccaatttctgctcgggtcccggccgatccggcggctcctcatcagcacaacccggggcaacgtcccccagtggatgctagcctgatcgggtccccacggtcgatgggttcgcctgggtccgccaatggcagacgcggcgagtacgtgaggatccctgaggaggtggaggtggcgtccaagggggagggagatgccgcggcggccatcaaggcggccgtggcagcggagtgcccgagggtgctgcggtgccgcgcgatccggtggtgggccaaggtcgccgtgcttgggatcttccttgcaggggccggagctgctgccgtggtcttcctcggcccgctcgttattaagaaggttgtcgcacctatcctttactgggaatcaataactttcagcagaccagctattgctctaatatgtttcggcacaatcgccttattcccaagtgttttgttaccttcttcgcccttcatgtggcttgctgggatgacttttggatatctttatggctttttgataatcacagtggggatgagcataggcatgtcgttgccgtattttataggctctgcattccactgcaggatacatagatggctggagaagtggccaaagaaagcagcttttgtaaggcttgctggcgagggagattggcatcatcaatttaaggctgttgctttactcaggatttctccatttccatatttagtttttaactacgcttctgtggctacgaacgtcaaatattacccatacatagctggttccatggctggaaccatacatgaaactttccttgcaatatacagtgggaaacttctacagagcttggctgtagcaactagccaagggtcattcttgtcggtggatcagattatctacaatggaatcggctttacaattgctgcaacttccactgctgctatcactatttatgcaaagaaagcgcttcaaaagctccaagcggaggacgagatattttgagaggtccaaggccaggatcaaacccgtaacgctagttttcttacaggtgtactatatatgaacagctgctactaatcttgtttcctgtgtcgactaccggactgctactaccatccatctggaggaagaggaggggggaggtgcttcagcaattgtaaagaaaatagaggcccagaaaaacttaagtttttcgttcttgttttgttttctgtagagagaattaccaacctcatctgtgtattgcatttgcgctatgtaaatccccaagttgaaagttgtttccttatcttgagaagtataacaaggtatgctggctgcgtcgatatatattacatacactgcagccatggtttgcgtgttgtatagtaatgcatcttaagctaatatatatacgacgaaatcctatggggctattaggaaacatcatcgttgatgctgatatatggacattctgaaatgccagaagtgttggttgcgtttggatggttaaggaagctatattttagc

SEQ ID NO: 23056 - DNA, 2267 bp, Zea mays
  Clone ID: LIB3593-008-C2_FLI
ctgcatttcaaaataatatctccctgcgcttttcctagccctttgtcatccaaggatacaataaacaaccggcgcttttacacccccgccaagaacaggagcaacaacaataaggctcctcgcaacaatccattctcatccatggcgaagctcatgaacaagctggtcgattcgttcgagcacgacgagatactggacgtcggctgcgtgcgcgccgtgctggccgagctcgtcctcaccttcctcttcgtcttcaccggcgtctccgccgccatggccgccggtacgtcatacgaccatgcgcccaccgcgcctctatcagaccgtctcctctccactcgatcgccctcctatttgttatttatatccctctgggctctggccaggaaaagacaggtccttttccccctttatgaaacgtacgtggctctgcacgcgcgcaggatccgacgggaagcccggcgacgctatgccgatggcgacgctggcggcggtggcaatcgcgcacgcgctggccgctggcgtcctggtgacggccgggttccacgtctccggcggccacctgaaccccgcggtgacggtggggctcatggtgcgcggccacatcaccaagctccgggcggtgctgtacgtcgccgcccagctgctggcctcctccgccgcctgcgtcctcctccgcttcctcagcggcggcatggtacgctccacttccaccgtacccgcgcagattcatggatctaggagtaccgcatgattttactccaagtaattactgtccttggtaaattccgcgcggtccaaaggatgtgggggaggagagagagctcagaaaggggaccaaaaatcgtgggtttccttcgttgaatgaatctatatatgcttgtttttgtggatcctatttatgttatgtttggtgtgcgctgtcggatgccgattgtttcggtagtagaggcgggccaggcttgtctgcctcaaatcaacttgggccgggctcgaatgggtgagagcctctatggtggatctggaccttttagggtcttgaatgggcttatggataattagttcactctttcttgtttagttttagtttgacctttaataaaaaagagttaaaggaaacatatttactacataacaatcaactgattgtttttttttggcagtgttgtctgctgttttgtaaaaagtagtaaaaatgaactaaattttttttgccaaggttgtgtctacttggtatatatgacagtgaattttatctgctcgtggcttctaagtccatgccattctatttgacctgcctatctagtccatgagcttctgcctaccaatcaaatgtggcctttcagatttagaagagttattagtacacagcatggtcgagtaaagccaaagccaagaattggactgaatcatacttattatctcctatgacaaaaacgactgaatccaccgatatttgtttaacgtcgcccttttgatcacgaaaattaacaacggaacggaagctggtgaaaacgactagcagtgctgaccaagatgtgcgatgcaggtgaccccggtgcacgccctgggcaggggcatcagcccgatgcagggcctggtgatggaggtcatcctcaccttctccctgctcttcgtcacctacgccatgatcctggacccgcggagccaggtccgcgccatcggcccgctgctgacgggcctcatcgtcggcgccaacagcctcgccggcggcaacttcaccggcgcgtccatgaacccggcacgctccttcggcccggccctggccaccggggactggacaaaccactgggtctactggatcggcccgctgctcggtgggcccctggcaggcttcgtgtacgagtcgctgttcctggtgcagaagatgcacgagccgctgctcaatggggaagtctgacgaccatcagcaccttcatgcttgtttctgtaaaacaggtcattatctgcaagcatggtacatatattggccacggtaattagagaggcttgctgtaaagcagtaggattgctggctgtagaaattgttgatgggctttttttgggggtttcctgccaaggaattctttcttttatataatctcaaaaaagtttttttttttggtatgggctgggttctatcaagggtttgttaagtctattagtttaccatgtagcagaaaaactagtgggacgtgaaagttttttcacgtacattgtaatactttggtatttttgtctaccagatgaaactggaagtacagagc

SEQ ID NO: 23057 - DNA, 804 bp, Zea mays
  Clone ID: LIB3593-008-D11_FLI
ccgttccccaccccgaccgactgctccccctcccccgcaccagcctcaaggcatcgccggcgccgcaacatcgctgaggaagcccgcacccctgcccggatccgatggccaacagcaacctcccgcggcggatcatcaaggagactcagcggctgctcagcgagccagcaccggggatcagcgcgtcgccctcggaggagaacatgcgctacttcaacgttatgatccttgggccggcgcagtcgccctatgaaggtggagtttttaagcttgaactctttttacctgaggaatatccaatggctgccccaaaggttaggtttctgacaaagatctatcatcccaacatcgacaagcttggtaggatatgcctcgacattctcaaggacaaatggagcccagcacttcagattcgaacagttcttttgagtatacaggctctactgagtgcgccaaatccagacgaccctctttcggataacattgcaaagcactggaaagccaatgaggtagaagctgttgaaacagctaaggagtggactcgcctgtatgcgagcggtgcatgagaacgcagtgatgttcttgatgtaataacccatcatacttcagtcctcatctattgccatttgcttgataaaaaataggctggagatatttgccatggaatgaagtctctacatgactatcactctgaattgtttggttgtacacctgtggtcggttccctttaccttggggcacctttgacaaatcagtatctgtggtagaacttgctgatactgtaatatatttgttacttcatgt

SEQ ID NO: 23058 - DNA, 629 bp, Zea mays
  Clone ID: LIB3593-008-E7_FLI
cgaaagtgtgagtttgaggtgaaagatgacggcgacgatagatcggaggttatcaacgctgaatccaaacgcgccggtgtttgatccggtggattttcgtgaggtggaggatttttcaccgaaatggtgggatctagtaacgacttcgaaatggttccgtgacttttggctcagtgctaactctgagaatgagttcctcggcggcgacgatttctcagttatggaagaagagttcgaggagatgatcgcatcgtctgatggtggatccatggctgatacagttacagaagcagatgtggctagttatttgaagatgcttttgaacatagcggagtctacgaaagagaagatttatagatcgaaggtttcgtcttgttcaccaaagtataatcagaagaagtacatgaatccgaactttaattgtcgccggaatcatcatatctatcagccacggtgaagcttctagaaggaacaaagctcttcttcttcttctttcgagatgataatcagagtcgtgtctgtgtttatggctgaatctgatcttttctgctttcttgttttttgtaattctgtgaatattcctactttctataataacatcactttatgttatgagcataaccaaattg

SEQ ID NO: 23059 - DNA, 1303 bp, Zea mays
  Clone ID: LIB3593-009-E11_FLI
gtcactccgccgggcgctggccgatcagggtcaccttctccaaagaatacatggaacaatgatcgatttaaccgccgctgttactgatccgtccaggagcgatataagtcagaagatgattatccctatccgcctccgcttaccttagatgtctccgagatccaaaaacaagaacaagagcgagcagagcgtggcgacaaatcacccgcggccttttatcccgcaaccagcagcagcgaggccgcgagaggcaggtagtagccgcacgccacatcaacacaccacggatggccggcggcggcgaccttgacgcatccgacgcggagctccgcgcggggttcgagaccctggccgtgacgcggccggacccttccgctggggtctacgaggtccgcctcaaccgcccggcgcagcgcaacgcgctgagcccggccgcgttcgcggagatcccgcgcgccatgtctctgctggaccgcgccccctcggcgcgcgccgtggtgctgtccgccgcgggcccgcacttctgcgcgggcatcgagctcgggggccccggggacccgctgtccgccgcctccgcctccgccgaccccgtggccgccgcggaggggctccgccgcgcggtcctcgacatgcaggcggcgctcacggccatcgagcggtgccggaagcccgtcgtcgcggcggtgcacggcgcctgcgtcggcggcggcgtcgacctcgtggccgcctgcgacatcaggtgctgctccagggacgcctccttcgtgctcaaggaggtggacatggccatcgtcgccgacctcggcgcgctgcagcgcctcccgcggatcgtcggctacggcaacgctgctgacctcgcgctcaccggacgcaagatcaccgccatggaggccaaggagatggggttggttaccagggtattcgattccaagcaagacttggatgcgggcgtcgcaaagatcgccaaagagatagctgacaagtcggcatgggcggtgatgggaaccaaggctgttctgctgagaagcagggatgcgaccatagaacaaggcctggagcatgtagccacatggaacgcgggtatgatgaggtcgaacgatctgaaggaggccatcagagccttcctggagaagcggaagcctgtgttctccaagctgtaatgatcagataccatcataccatacctctgtgttacttcacaagtggtgctacgtatctggaaatgcaaaggaataaagtgtgctaagagtagacaagaatgccgtctgcggtatcatttggcgaaacatccattcttgtaagg

SEQ ID NO: 23060 - DNA, 995 bp, Zea mays
  Clone ID: LIB3593-009-E12_FLI
ctcacagacagtcacagacacatccaacgagcccgaccgccagagctcgccgccgtcctccgcagacaatccaccatggcgatggtgctggggatggtgctggggaagatcccggtggagacgcccaagcacgaggtcctccacaccggcgccggctatgagatccgcaagtacccgcccagcatcgccgcggagttgacctacgatcccaaggagatgaaaggagaccctgatggcgggttcaccgtcctcgccaactacatcggggtcctcggaaagccgcagaacaccaagcccgagaagatcgccatgacggctcccgtcatcaccaccggcagcggcagcggcggcgacggcgagaagatcgccatgacggcccccgtcatcaccaccggcagcggcagcggcggcgacggcgagaagatcgccatgacggcccccgtcatcaccaccggcggcggcgagcccgagcccgtcgcgatgaccgcgccggtgatcacggacgaccagcaggcgccgggcaaggtgacaatgcagttcctgctgccgtccaagtacaccagggtggaggaggcgccgcggccgacggacgagcgggtggtgatccgcgaggtgccggagaggaagttcggcgtggcgaggttcagcggggtggccacggacaggacggtgagggagaaggcgaagggacttaaggccgccctggagaaggacgggtacaccatcaagggcccgttcgtgctggcgcggtacaacccgccgttcacgctcccgccgctgcgcaccaacgaggtcatgttccccgtcgagtgatccggcaaggcgccggccaccgcccagctaccggccgcggttcttctgtgaagtgacggcttgaggttcagcaggaactgtgtttgtattttgtatatgtatttctcttgaagttgttgtaaaatatgctttatgcaacgagttatggataaattttactactcttcgatcaatgaagaact

SEQ ID NO: 23061 - DNA, 823 bp, Zea mays
  Clone ID: LIB3593-009-H10_FLI
ccggaagttctgtgggtagaggactagagactgcagatcgagggtctggcagcgggccgtggcagttgggtgattacgacgaagagagatgggcctcctcgacaagctgtgggacgacaccgtcgcaggcccgcgcccggacaccgggctcggccgcctccgcaagcagcctgtgcgtcccgccgccgtcaagatcagtgatccggccggggacgctgcggcgttcgtgccgccctcgccggcttcgggtagcgaggagacgccggtgaaggtgacgcgcagcatcatgatcaagcaccctcgcacttgtttttgctccttcacaagcatcatctacggtagacagggaggaccggagaagaaagacatcaagaggggaacggggatgatctagtcgcgggttgtcttacctctactgtgatatattatattgtagatatatctgtatggtttccttcctagtatgtggcatatgatgtataataataatacgtcgaacgctcatggtactgtgctgtgtgtgccatgtgcataggggtgggtgcctcagggtcagggattcgtgtgcgctatgccgcagcttggatctcgccgtgggccgtgtcgtgtgtttcctcctgctctgctatgtatgtcatcactgacggtgtgtggaggttgggttcatatatatgcttgtaatgttagctggtttgaggtgtggactacgagagtagttttgttcagtgtctggtatctagtagctgaaggtgtttgcttgaactctgtgaactgtgatgtgggataatgctaagaagatgaatagatgatcgttgggttgtct

SEQ ID NO: 23062 - DNA, 856 bp, Zea mays
  Clone ID: LIB3593-010-B8_FLI
agcagggggctgggccgggccctggcgctcgagctggcgcgtcgcgggcacgcggtggtcggttgtggccgttccgccgagcagctccgctccctcgaggcagagatcacgtcaccgtcgcgccacttccttaccgttgccgatgtcagatctgacagcagtatgtccgagctggcaaaggctgttttggaaaagaagcaagttccagatattatagtaaacaatgctggtacaataaacaagaataacaagacatggaatcttccagtggaagattttgatatggtggttgatacaaatatcaaggggacagcaaatgtgcttcgtcattttgtaccacttatgatagcgaggagacatgggattataattaatttaacctctggttggggaagatccgctgctgcagaagtcataccgaaagccaccaaatgcattatagttgatcctttctgttgaatcaaaatccttagtgcatactaaattgcacgttgccatttcaggttgctccatattgtgcttcaaagtgggcgattgagggcttgacacgctcgttggctaaagagctgcctcctggaattgcagccattgctcttagccctggtgtcgtgaatactgacatgcttacttcatgctttggaagttcagcagcgttatatcaaacaactgaaacatgggcacccaaggcagctacaatgatactaagcctttcactggacgataacggtgcctccttgactgtatgaagtggtgaaattttgtgctcaactgattactgatggggggtctgtatatttttgcgagattatggtgatgtaaaatagtagttataatgtgtgtgcactctgatgtccct

SEQ ID NO: 23063 - DNA, 898 bp, Zea mays
  Clone ID: LIB3593-011-E11_FLI
ccgcaacacagcgcagacggcggcggctgctagcctgcaacgaacaaaccagcgagcgagcgggcggaggaggagatgccgggaaaggggcagcggcggagggagaagaacttccgggcggcgcacggcggggtaccgtgcctgcccccgccgccaaagcagagggagctcgaggccatcccgactaaactccgccgcctcatcgccttccagaacaagcacaacgccaatgctgacgcgtcctcaggaggtgctcccaagaagcaagacgatgggttaaggaagaacaagctagcaacagacaaggcaaaggacaagaaaaccaagaagcaggcattggtggttcctgctgatagcaaagcatcagatattaaaggtaatgataaacgttcagctgccaatgaggatgtgaatgcagagggaagtaaggggaagagaaagaggggaaatgttaaggaccttcgtttcgaggaactggacaagaacatctcagcctcgaagaagcagaggaggaagcagcacctggatgagaagaaaaagaagcgcaaggacaataagacagaaactctaccagactttcctgggcgcgagaaagtcaaatttggtgaagttgttgtggctccaccaaaattgtcattcccgaaggtgaagagtgcttcagatgcttctcgcgagatgctgaggaaagaggcaattgagaattacagatatatcaaaggctggacatcgaggcctggactgcagcttccaacgctagcagaatcacaatagatattttctctgtttatcgttgtcaaacttactctgtttatatcagagaagtttagagtatcaattgtgtaatttgtactctcatgtaggcaattccgaacaaatattcctgtctggatttcctctc

SEQ ID NO: 23064 - DNA, 762 bp, Zea mays
  Clone ID: LIB3593-012-B3_FLI
gcatttgaaccgaaggtcaccgctgcgccccgagggcctcctcgctctccaccagctcacgaacacagagagagaggccgatggcgagctcgctggcccgcctgggagcggcgctgccacgcgctcgcccacgctccgcggcgctcggcatcggcgcctcccgccgcgccgcgccgaacgctttcaggtgccaagttcattccgacattaaagtagcccctacatcggacttgaaggacgatagcaaatctgaaacttggaggatcaagatgctctatgacggtgattgccctctctgtatgcgtgaggtaaacatgctgagggaaagaaacaaatcctatggggcaataaagtttgttgacataagctctaaagattactctccagatgacaatgaaggccttgattatgaaactgtcatggggaagatacatgtcattctttcagatggaactgttgtcacagatgttgaggcatttagaaaattgtacgaggaagtaggactcggctgggtttatgctgttactaagtatgaacctgtagctacgatggcaaatgcaatatatggcgtgtgggcgaaataccgaatgcaaattacaggtcgacctccgctagaagagattatagcatccagaaaagctgcaggcgaatgtaaagatgacaaagtatgcaagatgtgagcataaaaaatgttctactgtgctacatacctcactcacctatgttcatgcttagataggctcatatacatagttttaacac

SEQ ID NO: 23065 - DNA, 919 bp, Zea mays
  Clone ID: LIB3593-012-G11_FLI
gctatgtatatatataccaataagtgccaccaataagaagaattaaggtagaaaatgtcattaatgagaatggagagaggagacgaggagctgaagctgctgggcatgtgggcgagcccgttcgtgctacgggtgcaactcgcgcttagcctcaagggcctgagctacgagtacgtggaggtggacatcagcaacaagagcgagctcctcctccactccaaccccgtccacaacaaggtccccgtgctcatccacaacgggaaccccgtctgtgagtcgcagctcatcctgcagtacatcgacgaggccttcgccggcaccggcccgtgcctcctcccggccgacccctacgaacgcgccgtcgctcgcttctgggccgcctacatcgacgacaaggtgctggcgtcttggatgcaggcctccaggggcaagacagaggaggacagagccgagggaaggaaacagtggctcgtcgtgcttgagacgctggagggagcgctgagggactgcgccgccggcaaggggatgatgatgcccttcttcggcggcgacagcgtcggctatgtggacgtggtgctcggcagcctgcttgggtgggtcagcgcaaaccaggaggtttggggcatagagtgcttccatccccgacgggctccgctgctggcagcgtgggcggaccgcttcgccgcactgcaaaccgtccagacggtggtgccccaagtcagcaggctggttgagctcggcaagatgttgagggcccgtcaatcggacggggccgctgccgaaagttaatctattaacaaaggcaatagatatgaaggtgactgtatatatagctagctatcaacgtaacgaaggtgccatcttattgtactcgcctctgtatggcagtgtttgctagaaatttactttgttttcgagg

SEQ ID NO: 23066 - DNA, 1311 bp, Zea mays
  Clone ID: LIB3594-001-B5_FLI
ctcatcataccgataccggcctcaacgccctctctttcccagcctcacaaccaattcctgtttcagtcgatcgcagttagcatggccacgacacagagctgtcagagcaggagcagcgcctgcagcaaggctgctgcttgcttcccggccgccgtagcggtcgacgaggagcacggccaccacagccaccagctgaagggaggagcgcaggaggaggctgagaacgacaataataagccggagctccggcgtggcccctggacggtagacgaggacctcaccctcgtcaactacatcgccgacaacggcgagggtcgctggaacaacctcgcccgcgccgccgggctgaagcggacgggcaagagctgccggctgcggtggctcaactacctccggcccgacgtgaagcgtggcaacttcagcgccgacgagcagctgctcatcctcgacctccacacccgctggggcaaccgatggtcgaagatagcgcagcacctgcctggaaggacggacaacgagatcaagaactactggaggacccgggtgcagaagcacgccaagcagctcaactgcgacgccaacagcaagcgcttcaaggacgccatgcgctacctctggatgccgcacctcgccgacgacgtcgataccatcgctgcggccaacgacgacgacgaagaccaccaccaccacctacgcctcctcgtcctgcaccaccaccaggcccagcacctgcagcaagctgctgccgcggccggcggcgctgccaacgaccttgctgcgggcgcctacgacgtccgccagctgcacgcgctgccctcgtcaggcatggcggcggtgccgacgacggcgacgacgtcgtcgtccgactcgctcgcgtcggagtcgtacgatgacgggggcctgcttttcgcgaacttgcgcgccggcgagatgctgatggacggcggagattgggcggcgcagcaggaggccgaccaagggctgtggccgccgccgccgccgacgtctgatcttgatcagtcggtggtgcaggctgctggtgccggcgctggccagtttcaggacatggagctcagtggttgggtgcaaggcttctccgagagcattacagataacttttgggccttggaggaaatttggaagatgcaatgagcgagcaattttacatcttacacatccatccaaattaaagacaacatagatacacatatacataccatatattctaacaacaggtgccatatacgatatacatacacaagttgttgtatagttgtattccgcttatatatatatatatttttgcctctc

SEQ ID NO: 23067 - DNA, 442 bp, Zea mays
  Clone ID: LIB3594-001-D11_FLI
caccttctcttctaaccagccaaggcgcatctagcgagctgagcagcaatggcggctgctacttcttctaggcgccctgcagctgctctgcttgtcctggcactggcactggcagcagccgtcgtggccctggcggccgagggggccaggtacccgccgctggctccgggcctgtcgttcgacttctacaagaagagctgccccaaggcggagtccatcgtgcgggagttcctggcgtcggcggtccggcagaacgtggggctcgccgcggcgctgatccggctccacttccacgactgcttcgtgcagggctgcgacgcctccatcctgctggacgccacgcccacccagcccagcgagcagcagtcgccgcccaacctcacgctccgccccgccgcgttcaaggccgtcaacgacatccgcgcccgcctcgaccaggcct

SEQ ID NO: 23068 - DNA, 1113 bp, Zea mays
  Clone ID: LIB3594-001-D3_FLI
cctagtaaaagacgcccactctttggctcctcgcctccctcctcccctccgtctcatctcctccctgtaggctgtaggagcattcgtgtgttcaccttttgctcccccacgttgatccttgaccctcgtactcctttcttgattccttctccgtgggatctcttgccaggagtaacctgccccgtgtccgcgctcgcactcgcacagacatgcttcttgccgcgtcttgaaaggggagaaagtgaagatgggtgcttgcgcttcagttcacaaggacccggggtaccccaaggagcagtttcttgactcgcccaccaaggcggaagctgcaaacgagaagggcggctgcggcggcggtgacgatgactttgctgatttcaagtccaaggtcgacgctgagcagcagcgggcagagttgaaccccaagagcccggattctggtagcaaggatgaagtgttcttcgaatctcgagcttggttagattccgactgcgaggatgacttctacagcgtgaatggagatttcactccatctcgtggcagcacacccatccatcagcccagagcgcagacggtgatgagcaacatctttcaaccagacacgcacggttccaaatcaccggagccttctccaactggacggaggaagctagctgagctcctgcaggaggcaatgcaaaacggccccgaagaaagcaccgaccaggagctgcagttgcggtctgttgccgcagatgggaagccggtgtctgaatccacatccagctccgcttgcagcactgtgacgactccgatcgcagtcgctaacgccaagagccggaaggagaaggcgtggtacaccggacgctgttgcctgccgagctttgttcatagcctgaccttagatgagagtgagagggcgcagaagatgagctctaggccatgtgctgtttgacagtggggctccagtgccctcacggctcatgccctgagctatactgtaaaggagaagtattaagagtactgtatgtatagagagagggtaatcaagtggataatagctactagttaaatgctctgcacaccatgtttatcaattgcccttacctgtgtatatatatctaatcgaatctc

SEQ ID NO: 23069 - DNA, 2016 bp, Zea mays
  Clone ID: LIB3594-001-E10_FLI
ttcgacatcctaaacattaaatggtcagcgattaaacttattagacaagactctaatccaataagacttgctagctagttcatcaagcgatggccggagattaaggatcaacagccagcaacacatggagtaaaaaaataaggagcaaacttgccttgtggaaatcccaataagtccttgtggaaatcttcagtccagacccagaaatcccaatcatggacaacagtgcgtactactgctactgctgccttctagctcttcttccacctctatactttctcgtcaagttctggtggagaacttcctgtgcacgtcgtagccatggactccggctccctccaggcccatggcagctccccatcatcggcagcatccaccacctccgcggctccctcgtccaccgggccctgcgagacctgtcgctccgccacggcccactcatgttcctcaggctcggcgaggtgccggtggtcgtcgcgtccacgccggacgccgcgaaggagttcatgaagacccacgacgccaccttcgcgacgaggccaatgaccctgagcgccaaggtcttcgcgaaggacgggccggggatcgtggtggccccgtacggcggcgaccactggcggcagctccgcaagatctgcatcgtggagctcctcagcacccgccgcgtccggtcgttcgggcccgtgcgcgaggaggaggcggcgcggctggtccaggccgttgccggcgcctcgacgcggcgcgcgccggcaccggcgccgctcgtcgacctcggcaggctcgccgccgtgtacgtcgccgacgcgtcggtgcgcgccatcgtgggcaggcggttcggggagacggacgctctgctgcgcttcgtggacgagagcgtccgcctggccggcgggttcacgcccgtcgacctgttcccgtcgtcgctgctcgttcgcgtgctcaccttgcgccgggccgtgcgcaggctggagcacttccgcgagtccttgttcggcttcatggatggagtggtgcgtgagcacctggagaggaagcagtcatcacgtggtggaggaggagaagaagaagaagctgacatggtcgacgttctcctccggatccaacaggagggaaacctaaagttccctctcaccatgcgcataatcgaagcagtgatatttgatctcatcgcagggggtatcgagacagcgtcatcgacgctgcagtgggcgatggcggagctgatgcggaaccctgccgccatgtccaaggcgcaagccgaggtcaggggagtctacgcggggcagacgaaggtaaccgaggaccgactaggcgagctaccctacctgcagctggtgatcaaggagaccttgcggctgcacgtcccggggccgctgctgatcccgcgggaatgccaggagcactgccgcgtgctcggctacgacgtgcccaagggcgccatggtgctcgtgaacgcgtgggcgatcgcccggagcccggagtactgggaggagccggacgcgttcgatcccgacaggttttccggtgacgcggcgagggatttcaggggcaacgacttcgagttcataccgttcggcgctgggcgacggatctgccctgggatggcgtttgggctcgccaatatcgagctcgggctggccagcttgctgttccatttcgactggagcctgccggagggcatcgttccaagtgagggcttgttcggttattttcaatccatatggattgaaggggattgatacggattgtgagggattttgacttgctagggattgaaaccccctcaatccccctcaatccatatggattggggtagaatcgaacaagccctgagatggacatggctgagaccatgggaatcactgctaggagaaaggcagacctcctgctgtccgctacaccgcgtgtcgtcccacgccggagttaaattcatggttcccgtacaatttagaaccaatgaacttctcttgcttgcttctgaaaaaaactaataataattgtgttgactgtttggtt

SEQ ID NO: 23070 - DNA, 1156 bp, Zea mays
  Clone ID: LIB3594-001-H5_FLI
cttcataattccctgccgcactcacctcccgttgcgcgtgcatgcggtcgacggccgggcaggatcgccgtggtgaccggcgggaataaagggatcgggctggaggtctgccggcagctagccgcctcctccaccagcggcgtcgccgtcgtcgtcgtcttgactgccagggacgaggcgaggggagcagctgccgtcgggaagctcagaggcctggggctctccaacgtcttcttccaccagctggacatcacggacgccccgagcatcgctcggctggccgatttcttgaagtcccggtttgggaagctggatatcctggtgaataacgccgggtttgttggccttgagtacatccaagatcgtatagatggcacttcaacgacgagcgaggagttttgtggcatggacatggacaagaggctggagctgctgctgaaatggtgcctccgggagacttgcgatgctgggaaggaatgcatgaggataaactaccacggcacgaagcaagtcacccgagcactcctgcctctgctgctggcctccgacagcggaaggatcgtcaatgtctcctcggtgcttgggcagctcaggtttttcggcagcgaggcgctgaagcgggagctggacgacgtggcgagcctgaccgaggagaggctggacgaggtggcgggcgcgttcgtggcggacctggaggccggcgccgtggaggcgcgggggtggtggcccgccgggttctcggcggcgtacatggtgtccaaggcggcgctgaacgcctactcgcgcgtcctggcgcggaggcaccccgcgctgcgcgtcaactgcgtgcacccgggcttcgtcaggaccgacatgaccgtcaacttcggcatgctcacgcccgaggaaggcggcagcagggtggtggccgtcgctctgctccccgacggcgggcccaccggcgcctacttccaggagcgccagcaggcgccgttcgtgtgacgcgctctgcctctgctctgcttccttcaccacccgatgcttgatagctatgtatctcttgaagttttcgcttgataatagttgatacacattcaatccccgcgcgtaatctctccgttgcaaaaataatggaatcctaagttttggacaagtaaaaatttctcaacttttgatc

SEQ ID NO: 23071 - DNA, 538 bp, Zea mays
  Clone ID: LIB3594-002-B10_FLI
ctactagtagtgacgagtagtggtagcagcaattaaccaacgagacaccaatggcggtcgcaagtaatagaccagcaaccactctactgcccctggcggcccttgtggccgtcgctggctccctcttcctcgccggcccggccgcggccacggggaagaccgggcaggtgactgtcttctggggccggaacaaggccgagggcacgctccgagaggcctgcgacacgggcacgtacaccatcgtcgtcatctccttcctcaacgtctcggccggccccggcaacagcccgccgagcctggacctctcgggccaccccgtcgccggcatcggcgccgacatcaagcactgccagtcgaagagcatcatggtgttcctctccctcggcggcggccagcactccctgccgagcgccgaggccgccgcggacctcgccgactacctctggtacgcctacttcccggcgccggccccgcgcgccggcgtgcgccgcccgttcggcgacgcgtacgtcgacggcctcgacttcttcctcgaccg

SEQ ID NO: 23072 - DNA, 962 bp, Zea mays
  Clone ID: LIB3594-002-B5_FLI
cgggaaccacgcccaaacgaagagaaaagagaagaacctcaatccggaagcgaaaaggaccagaagaaaccagaggcgactccaggttcgtgggcgatgctgcgcgcgggagctaggcagctccttgccccggggctccggcggctcggtctgggcaccggcgccgccggtcaggtgggcccggccgccgcggcggcggggatgagggcgtaccacgagcgggtggtggaccactacaacaacccgcggaacgtcggttccttcgacaaggaggaccccaacgtcggtactgggctggtcggcgcgccggcctgcggcgacgtcatgaagttgcagatccgcgtcgacgaggactccggtaaaatcgtcgacgcctgcttcaagacctttggctgcggctccgccatagcgtcctcgtccgtcgctactgaatgggtgaagggaaaaccaatggatgaagtcttgacaatcaagaatactgagattgcaaagcacttgtcccttccaccagtaaagctccattgcagcatgcttgcggaggatgccattaaagctgctgtgaaagactacgaagccaagaaggcgaagatggggcaaaagagtgaagacagtccatcagagaaagctgctgaagcatgaaagtttctgccttttttaagtgtaattgagctgatatgtttctcagtccatgactccccgctgcttcagataaatgcttctgattgcgaggcgaggcgagggaccgcgtgtaatgttcacaaattctggtagtgcggcatgtgccttaactcttttgaggatggtgacaaccaatttcaaataaatttggtgccatcttagaattagaagtactatgtggatatcacatagtggaagtgttttctgtcaactacataattgaattacggccgtcgttgcacggaggctattttaaaatgttgtattgtatgtggtatggattc

SEQ ID NO: 23073 - DNA, 610 bp, Zea mays
  Clone ID: LIB3594-002-C5_FLI
cagaacatactcccgctgaagcgctgagaagtagataagaataatatggggttcagtgaggcacaggaagagctcgtcctccgttcatggaaagccatgaagagcgactccgagtcgactgctcttaagttcttcctcaggatctttgagatcgcgccgggtgccaagcagatgttctccttcctgcgcgacgccggcgacgcgccgctggagaaacaccccaagctcaaggcccacgcggtcccggacatgtggacgccggagatgaaggcggcgtgggaagaggcctacgaccagctggccgccgtcatcaaggaggagatgaagaacgccgccgccgccgaggagcagacgaagaacgccgccaccgccgaggaggagattaagaacgccgccgccgccgaggaggagacgacgaacgccgccgcggctgttgatggttcctagctcccactacgctcctctgctagcgaccgtggcacgcgcaccgctgcgttgatgggtgcttttggactgctgctggcctgatacctacctacgaagctgttgctaatgctgctgcatttttgtttgtcgaccgcatcattgtgatgataaataaaatgttcag

SEQ ID NO: 23074 - DNA, 804 bp, Zea mays
  Clone ID: LIB3594-002-E7_FLI
gctctttccgccttataaaccagcggacctttttcttttcttccaaaacactcgtctgagccaccaaacacttgctatgcccgctcctccccgcgcactgctcagcacgccgtgcccgtgagaccatggacgcgagcgcggccaccgccaggcgcaagcgcaagcgccccgacgccgacatcaccgccgccgccgccgccgccgccccggtcgccgtcgacgaggcctcggacgccgaggtcgaggagttctacgccatcctgcggcgcatccgcgacgcctcccgccggctgtgcggcgccggcgcccggcccgccccgcgcgcgccggcgtggcggcccagcttctcctgggaggacttcgcgacgccggcccctggcgcgccggcgcctgagaccccgacccccgcgcagcaggagccagcgcagccgcggcccgacgagcctgtagccgtcgtccgcgctaccgccccgtcgccgcgtgccgggctggacctgaacgcggagccggagccggaggcgccggccacccctcgctcggcgcgcgtccaggcgtagcgtagcgcgcggcgcatcgtcgcctgcctcctgcaccgcgccaagttgggcccgcgcgtcagctcggctgctgggaggcgggcggcacagcacacacagtgcgtaccttcccctcggtgaattactgatacgaatccccatcatgtaatcgtatttttttagtggctctctttggtgcgctgctccgtgtggacaggtgagactggttcgttgctttggttgcaggaaaataccttttaatcggatc

SEQ ID NO: 23075 - DNA, 499 bp, Zea mays
  Clone ID: LIB3594-002-F8_FLI
tctcaggcaccccgctcgatctcatcctaatcggtgtgattttcgtcttcaccgtcaacccacccctccacttactctgattcgcactttgttggcaggcatccggaagaaatggccaagtcgaagaaccacacggcgcacaaccagtcgttcaaggcgcacaagaacggcattaagaaacccaagcgccaccgccagacctccaccaaggggatggaccccaagttcctgaggaacctgaggtattctaggaagggcaacaaaaagagtggtgaggctgaagctgaggagtaggaaggaaagcatggctttgtttcctctgtttttagctcagttccacctttaggacctggggttttgctaaagatggaacttaagtggtgttactgtatgatggcaaggaccttttgctgccgaaggttatgttttgaagttcatgctaccttttaaagtacggattaccttgtgcctatgttcattatttttgcctttggcagct

SEQ ID NO: 23076 - DNA, 826 bp, Zea mays
  Clone ID: LIB3594-003-B3_FLI
gctcttagctagccctagccacgtccccacacatcgtagacaacgcaattagctaggaatagcatccatggcgtccggggctgctgcttcctcggccctcttgctcctcgtcgcggccttggtggccaccagtgcgagggcggccacattcaccatcaccaacaactgcggctcgacggtgtggccggcggccaccccggtgggcggcggcacgcagcttgaccccgggcagacgtggaccgtggacgtgccggcggggacccagtccggcagggtgtgggggcgcacggggtgctccttcaacggcggcagcgggagctgccagacgggcgactgcggcggcgcactctcctgcacgctctcggggcagcctcccatgacgctggccgagttcaccatcggcggcggcggcagccaggacttctacgacatctcggtgatcgacggctacaacctggccatgctcttctcgtgcagcaccggcgtgaccctcaactgcggcgggcccagctgcccagacgcctacctgtttcccagcgacaacaccaagacccatgcctgcagcggcaacagcaactaccaggtcaccttctgcccgtgagatcgcgcgtgcgaggcaggcggcagtgtggccggacgacgatgcaatatgcaatgcatgctccagccaacttctttttttgcgaataataagtatgttgtttgtcctagtttgttattagtggagaaattaaaaaagtagacaatcgaataagacgatgatgttcaccccatagattatgtaacttcgatgagtttgatctatatatatgtgcttgcaaaacat

SEQ ID NO: 23077 - DNA, 1360 bp, Zea mays
  Clone ID: LIB3594-003-D5_FLI
caaaacccacgtctaaaacaggtggcccaccaacgattcacttccccgatcccagggggcggcgatcggaattcgcaacttctcccacgcggcgaacacggcagagatgatgagctcccgggccggatccatcctcctccgccacgccggctcccgtctcttcaccgcagcggcgatctctccggcggcggcctcgaggccattgctcgccggcggcaatggtgttccggcagtcatgctacggctgatgtccacctcctcccccgccgctcccacggaggcgaaggacgaggcagccaaggcctccaaggtgggaggggacaagaaggcggtggtgatcaacagctactgggggatcgagcaaaacaacaagctagcgcgggacgacggcaccgagtggaagtggacttgctttaggccatgggagacgtacacggcggacacgtccattgacctcaccagacaccatgagcccaagacgctgatggataaggtcgcatactggaccgtcaagtcgctgcgcttccccacggacatcttcttccagaggcggtatggctgccgggcgatgatgctggaaaccgtggctgcggtgcctgggatggtgggcggcatgctgctccacctgcgctcactccgccgcttcgagcagagcggcggctggatccgcgctttgctggaggaggccgagaacgagcgcatgcacctcatgaccttcatggaggtggcgaagccgaggtggtacgagcgcgcgctcgttatcaccgtccagggcgtcttcttcaacgcatacttcctcggctacctcttgtccccgaagttcgcgcaccgcgtcgtcggctacctggaggaggaggccatccactcgtacaccgagtacctcaaggatctggaggccggcaagatcgagaacgtccccgccccggccatcgccatcgactactggcgcctccccgctaacgccacgctcaaggacgtagtcaccgtcgtccgcgccgacgaggctcaccaccgcgacgtcaaccactttgcatcggacatccattgccagggaatgcagctgaagcagtcccctgcgccgatcggataccactgaggatgtttgtgctcttcttaattttgcatcgctaataagcaattgtctttaagggaaggaaaggatgcttattgagttacgagtactgctacggcgattaggatattttccaaccagttgtttgagagtgaaacctattatatgtacgcatgttacatgtacatatctctaagtgcgagaggtgcttttctggcgtttatcacttcttcctggagttcctttgttcttcatgtcagctgaattgggctcgctaatatcgaatgt

SEQ ID NO: 23078 - DNA, 753 bp, Zea mays
  Clone ID: LIB3594-003-E4_FLI
gtcctacgagcagtcgcacgcaagtgtcaagagacaaaacggtcgacatggctcgcacgcaatctgccgtagcggtcgccgtggtggccgcggtgctgctgctggcagcggcggcgacgacctcggaggccgccatcacctgcgggcaggtgagctccgccatcgcgccctgcctctcctacgcccgcggcacggggtccggcccctccgcgtcctgctgtagcggcgtcaggaacctcaagagcgccgccagcaccgccgccgacaggcgcgccgcctgcaactgcctcaagaacgccgccaggggcgtcagcggcctcaacgccggcaacgccgccagcatcccctccaagtgcggcgtcagcatcccctacaccatcagcacctccaccgactgctccagggtgaactaaaacctagaccacgcgcgacgacggccgcctgatcgatcgaccaaccattccgccgtcgccgccggccggatcatcgatcgtcgtcatgatgatatctatcaatctacgcgtgatgatcgatggctacttgtctactgctatgtactactaaataaaatctctccgtgtgtgcacgtacgcttgcatgtgcatggtagcatgtatgtacgacgtcgtccatgtatgtgtgtgtgacgtgtgagacagagagagagagagagagagagagagacaggatcgatcgagagacggtcatgtccttttggctgtttggtttattcatatcacaacttttgagtgt

SEQ ID NO: 23079 - DNA, 1284 bp, Zea mays
  Clone ID: LIB3594-004-C3_FLI
tcctctcccgcctctctctctctctctctctcacacacacacacacacgcgcacacacacaaacacacacacacacacacacacacgacgtcgtacgcggcagctagcagagcacgcacgatcgccgcagcgtacgtactagcacagaggacgacgaccgacgccatggcggccttcttcgcgcgcggcggcgcggcggcggcggcggcgctggtgatggtggcggccgtgctggcggcgtcgtgggccggcgtggcccgcgcggacttcgcccaggaccgcgccatgtgcgcggaccggctgatggggctggcgacgtgcctgacgttcgtgcaggacaaggcgacggcgcgcgcgccgacgcccgactgctgcgcggggctcaagcaggtggtggcagccagcaagctgtgcatgtgcgtgctggtcaaggaccgcgacgagccggcgctggggttcaagatcaacgtcacccgcgccatggacctgccctcgctctgcagcaaccccgccaccttctccgactgccccaagatcctgggcatgtcgcccgacgcccccgaggcggagatcttcaaggagtacgcgaagaagcacgagagcaacaacggcaccaccattcctgccgctgcaaccggcgccgccgcggcgaccgggaagagcacgagcgcggcgccgacggcggacggcgccgggaggcagcccggcacggtcttcttctacgtcgtgtcggcgctgctcgtctccgtcgcggtcctgctgtgctgatggcttaacggccggccgcggcagcgcatgcattcatggccggccggccggcagggagatggaggtgctactgcacgctgcacgactggaaggaagcccggagacacaattcaagtctttgagatgagcaaactaaaggacacgagtactctttttttttctctttcctgtagcctttttgtgtgtgtgtggcgtgttgtggggagtttgtgagacgtcggcttgtgctagtgctgacggtgcaccagcgacgcagctctgtacttcccagctgttgggctgtggccttccagcctggggattttaatgtggtggcccgggactgccgacctgtctgtctgaatctgatgattctgacccattatgttggcacttggcacattgtatgtttggtttctttggttttagttctcgtcttcttgcttttttttatttaaagtaatttctgtaagcaacatgatgcatgtaactagaaggacctttgtttgtatacgcttaagaaacagttttcccgtc

SEQ ID NO: 23080 - DNA, 601 bp, Zea mays
  Clone ID: LIB3594-004-G1_FLI
tgtttcattgattcttgaagagatcgagcttcttttgcaccacaaggtcgaggatgtcttgcaactgcggatcaagctgcggctgcggctcaagctgcaagtgcggcaagaagtaccctgacctggaggagacgagcaccgccgcgcaggccaccgtcgtcctcggcgtggccccggagaagaaggccgcgcccgagttcgtcgaggccgcggcggagtccggcgaggccgcccacgcctgcggctgcggtagcagctgcaagtgcgacccctgcaactgctgatcacatcgatcgacgaccatggatatgattattatctatctagcttgtggtggtggttgaacaataataagcgaggccgagctggctgccatacataggtattgtgtggtgtgtgagagagagagagaaacagagttcttcagtttgctatctctctctctgcatgtttggcgtcagtctttgtgctcatgtacgtgtgtctacatgcatgttggttgatccgattgcgtctgctgtaaccatatattaattggtccacgatgatatgatttgatactatatatatatatatatactaaaaccggacttcttattat

SEQ ID NO: 23081 - DNA, 215 bp, Zea mays
  Clone ID: LIB3594-004-G2_FLI
agataacagagtctgttagagggagaatcacggcgagagcgtgctcgtgggcacccctctccgtcaactggggtgcgcgatcgatcgatcgaaatatcgaattgccgttgccaaaaccccagtccggtcttctatttccgatcgagccgcaaacgaggcaggaagaaggccggcgcaggcgcaggcgcggatggcgatgggagcgacggttcgcg

SEQ ID NO: 23082 - DNA, 1093 bp, Zea mays
  Clone ID: LIB3594-005-F3_FLI
cttccctccctccctctccccgcgggccgccagaggcaatttcgccctcgattcgaccccgattcgtccgcccgcgaccgggattccctccgccaagcgcggatctgaacgctgcgctccgtgtcgccgctcgaatccgccatgaagggggccaaatccaagggcgccgccaaggccgatgccaagctggcggtgaagagcaagggggcggagaagcccgccaagggcaggaaagggaaggccggcaaggaccccaacaagcctaagagggctcccagcgctttcttcgtgttcatggaggaatttcgcaaggagttcaaggagaagaaccctaagaacaagtctgtcgctgcggtggggaaagctgctggcgacaggtggaaatccctgagcgagtcggacaaggctccctatgtagccaaggctaacaagctcaagctcgagtacaacaaggccatcgctgcctacaacaagggcgagagcactgcagctaagaaggctcctgccaaggaggaagaggaggaagatgaagaggagtctgacaagtccaagtcggaggtcaatgacgaggatgatgaagagggtagtgaggaggatgaagatgatgacgagtgatggagctcctcgagacaatggaccgtgcttcatccaacaatggagcggctacacaaggccccgtggcgatcacaaaaaaggagcctatatccatgtactagaattattcagtttcactccacatcgtgatgttttatttttacttttgtcgtgctataacggatagcgctcctcgttggcgccactggcgggtggttctgcctctggtctggtgtgtttgtgtgtggtcacacttgccagccagcagaggcgcctgcttgtacctagattactgtttccattgtcgtcatcatcggctaacattgtcataatgtcagtttgggtaatgttagattaagtaattattgtgttctgtattcttgtttgttgcccttcttttgtgtgtttttgttattgttggtctgtttccattgttgttgctttggcattgtcagtgcccgccagccctgaaaattgccgtttgggtgggtttgcgtgt

SEQ ID NO: 23083 - DNA, 723 bp, Zea mays
  Clone ID: LIB3594-005-G7_FLI
gttgctctagatccgttcatcctggtggttttgtgaggtcgaaagcggcgagcgaattagaagatgctggacaagctgtgggacgacgtggtggccgggcctcgcccggagacgggcctcgagaagctccgcaaggccaccaccgcccgtccgctcgtcatcaacaaagacgcggacggcggcagctacaagcgggcgcagtcgatgccgtcgaccccgacgacgccggtgacgccgtcgtcgtcgtcgtcgtcgacgacgccgcgcggcgccggcaacgtgtggcgcagcgtcttccacccggggagcaacctggccaccaagggcatgggcgccaacctcttcgaccggccgcagcccaactcccccaccgtctacgactggctctacagcgacgagaccaggagcaaccaccgctagatcgggcgagatggatggacagtgaagaggccatgtttgctggtccttgtggttatctaaaacgcacgcatgctctattatagctagtcatcactatatatatacttgtgtttgtgtattgttgttcttgttctgctggtgtctccgccgtttaatttgacctatgttatggagtgagtgatatatgtgccgtcactcctagtatatagtagtgagtgactagttggtatgtgtagtactgtactatcttttctccatatgcatgttttgccagcgcgtaatgaatgtaatgtcagtactgct

SEQ ID NO: 23084 - DNA, 752 bp, Zea mays
  Clone ID: LIB3594-005-G8_FLI
ccagctaccagggatgtctggcgaggaggaggagaacgccgcggagctcaagatcggcgaaggtccatgctcttccgcgccgccctcctctcctcccctcctctcccttctcaaccaccgtccagtccttgggcgcgcgggcggctagggttttcgtcctccctctcgagctcacccgtaagcctgtgggcgcagagttcctcaaggccaagtgcctgatgaactgcgaggtggcgatcatcctggagcacaagtacgagcagatccagcagcacgcgtcgtcggagtcggacccgtcgtcgcaggtgtcgcaggtgttcgagaagtcgctgcagtacgtgaagcgcttcagccgctacaagaaccccgacgccgtgcgccaggtccgcgagacgctgagccgctacggcctcgccgagttcgagctctgcacgctcggcaacctctgccccgacaccagcggcgaggccaccgcgctcgtcccctccctcaagtccggcggcaggttcgtcggcgaccccggggacgagaagatcgagaagatgctcaacgacctctccctcatcaagaagttcgagtagagcgggagccctctcttctcttatcttctcttctcttggagtagcgagcatccagagaggaggggaattcaacatcaagacgatgtactgctaaaattttacttgtcttacactactatcgttgaggttcacgtctgcgtattgattagaaccttgtttgatcgacaatcc

SEQ ID NO: 23085 - DNA, 778 bp, Zea mays
  Clone ID: LIB3594-006-A1_FLI
gccccaactacccccagtctcggaagagaactatccagaagcgcaagactccaaagccgtcgccttcctatccatcccttcctcgccgcgggggtcgcctgagatcacataaacaatggtgaaggctgttgctgtgcttggtagcagcgatggtgtcaagggcaccatcttcttcacccaagagggagatggccctaccactgtcaccggaagtgtctctggcctcaagcctggcctccatgggttccatgtgcatgcacttggtgacaccaccaatggctgcatgtcaactggaccacactacaatcctgcgagcaaggaacatggagcaccagaagatgagaaccgccatgccggtgatcttggaaatgtgacagctggagcagatggtgttgcaaacattaatgttaccgacagccagatcccactgactgggccaaactcaatcattggcagagctgttgttgttcacgctgaccccgatgatcttggaaagggtggacacgagctcagcaagagcaccggaaacgctggcggccgtgttgcttgtgggatcatcggactccagggctgaactgaaacaaatggtcgctggacttcgggggcgcctgagagtgccgtcaccagcaggctagaataacatcccgaagacatcgtgaaataataataagagcgcctgatatgtgatcagtggtgtacttgccattaagcacctgtggcaaccgatgagctgaactgtgttggactgttggctaaaatgctggttcgcctgagcatc

SEQ ID NO: 23086 - DNA, 485 bp, Zea mays
  Clone ID: LIB3594-006-D5_FLI
ctttactacagaaggaaggagatatcacgggagctttatgagttctgcctggaccagagctatgcagatcgtaacctgatcgcaaagtggaaaaagccaggttacgagcgcctttgctgccttcggtgcatacagacacgtgaccacaactttgcaacgacttgtgtctgccgggtccccaagcatctgagggaggagcaagtgatagaatgtgtccattgcggctgcaggggttgtgccagcggtgactaatcttgtcatcatgttgttgggctcacgactcatcatcaccatcctgaccacattggatgtctcgtgagcatggatcggctacggtgattagcatgaatgtgttgtggtaactagtgggaagactaaatttcctgacgtttggatgtttccaactgctatgtactataaagattcctcgtgccacaaatgtttacgttaaattagtagcgcttttgcatcttgtatgattctgt

SEQ ID NO: 23087 - DNA, 1462 bp, Zea mays
  Clone ID: LIB3594-007-C1_FLI
ctgcactctcgcgggatggagcttggcctagcgctccggctcgtcgcgccgccaccgctgctgccgtgtctctcccgtagagctctttccctaccaccggattttgtttcctcgcgtgtgcttcgaggaagacgcatccatgcctcgagactgaagcatggagctggggttgtgtgcaatgcgattatgacctattcaggagtggaagaggaggagatggtggaagaagaaatggaagaggaggctgaaccggcggtgagcacaaggccgcgtctggagctcatcgagaagccggaccggagcctagcgctgctggatgagtacgagtcggaggaactgggcacctctctttgcgccaatcatcgcagcggttatgttgctgtattggggaagccaaatgttggcaagagcacacttattaaccaaatggttggtcagaaactttcaattgtaacagataaaccgcaaacgacaagacatcgcattcttggtatatgttctgaaccagagtaccagtttgcagattatactttatgacactcctggtgttattagaaaggagatgcataagctggacagtatgatgatgaagaatgttaggagcgctatcggcagtgcggactgtgtgcttgttgttgccgatgcttgcaaagctcctgaaaagattgatgaaatgcttgaagaaggtgttggaaacaaagatattggacttcctgtactgctggtattgaacaagaaagatctcataaaacccggagaaatcgcaaagaaacttgagtggtaccaaaaatttactaatgttgatgatgttataccaataagtgctaaatttggtcatggagtggatgatatcaaggagtggatattgtcaaagctccctctgggtcctgcttactaccccaaggatatagctagcgaacaccctgagagattttttgttggtgaaatagtgagggaaaagatttttgttcagtacagacaggaaattccttattcatgccaggttaatgttgtcagttacaaaagtcggcctactgccaaggacttcattcaagttgagatacttgtggagaaagaatcacaaagaggcattatactagggaaggatggcaaaagcataaagatgctggcaaccgcatcgaggcttgacatcgaggactttctacagaagaaagtctaccttgaggtggaggtcaaagtgaaggaaaactggcggcaggacgagcgactcctgaagcggtatggctacggcggcgagatccaagcgctgtgactgtgactgtgactatgaccggtgcgctctagctcactgtcagctgccgcgagcgtggaatgacctggttttttttcaattcctctcgtgtgttgttgttgtcgatgcgaatgagtagcagttatttaacctggtgtcgaactcaactagcagctcagttgtgttaattagtcagcaagttatgtgctc

SEQ ID NO: 23088 - DNA, 736 bp, Zea mays
  Clone ID: LIB3594-007-D11_FLI
tttgttggaggtaaagtagccagaccgaccgggggaaaaaagaccgtgtcttgatgtcgtcgtcgtcgctgtcgccggcggggaggacgtccgggtcggacggcgactcggcggcggacacgcgccggcgcgagaagcggcggctgtcgaaccgcgagtcggcgcggcggtcgcggctgcggaagcagcagcacctggacgagctggcccaggaggcggcgctcctgcaggccgagaacgcgcgcgtggcggcccgcgccgccgacgtcgcgtcgcagaacgcgcgcgtcgagcaggagaacgccgtgctccgcgctcgcgccgccgaactcggcgcccgcctccgctccgtcaacgaggtgctccgcgtcgtcgaggagttcagcggcgtcgccatggacatccaggaggaggtgccgccggcggacgacccgctgctccgcccctggcagttgccctgctacccggccgccgccatgcccatcggcgccccgcatatgctccgctactgatgagtgatgaatgattgcccccgccaaccatacgaggcagacagagccggggctggtcggcaaacgagacaagaagaattggctgcgtctcaacaacacatgattattgctgctgatctgttctctctgtgtgtatgagatgatgctcgtttacatatgtatctggttggttgtactttcggtattgtaatgttattatatcaataagtgttatgtaatctcct

SEQ ID NO: 23089 - DNA, 792 bp, Zea mays
  Clone ID: LIB3594-007-H10_FLI
cgcaacaccagacgctccagcagtccagcactcggagctcgcgcgcccgacggcccaccatgatcatccccaagaagaaccgcaatgagatctgcaagtacctcttcaaggagggcgtgctgtatgccaagaaggactacaacctggcgaagcacccacagattgatgtgcccaacctccaggtgatcaagctcatgcagagcttcaagtccaaggagtatgtcagagagaccttctcctggcagtactactactggtacctcaccaacgatggcattgagcacctacgcaactacctgaacctcccgtctgagatcgtgcctgccacgctcaagaagtctgccaggccactgggccgtccatttggctctggccctcctggtgaccgcccaaggggccctggtcgttttgaagacagaccaaggtttggagacagggatgagtaccgtggtggccctcgtggtgctcccggtgactttggtggcgataagagtggagctcctgctgagttccagccatctttcaggagttctggcgcaaggcctggctttggccgtggtggtggcagcggctttggcgctggcccgacctcttccatggagtgaacagtgaagctgcccttagtttggacatgatgtttcccctcccgtgaggcgtttaattttgaaggacggttattatgtactagtaatgttttccggatcggctagtgctgacatgcaaaaaaaatgttccatatttatacattggttccagtatagtagtctttgcaaaacgtttggattttcaagt

SEQ ID NO: 23090 - DNA, 1688 bp, Zea mays
  Clone ID: LIB3594-007-H7_FLI
tgcgctaaaataacgcaggagaattctaacttgttctctcttccccacaacggcgagtttgagctgagctcacgctcgtcatctaactctccccccattcgcaatccaaaaagcttgcgcgctactccactggtccattacttacgcagtcagttcagcgagtgagcactgagcagccatgtagcaatttcaattgcaagttgcaacgcgacgaatacggagccatggacgacggcgccgcaaccacaatcgtccaaggcggcgacgcgcacgtcctgctcctgccgttccctgggatgcagggccacgcgaacccgatgctccagcttggccggcggctggccttccacggcctgcgccccaccttggtggtctcccgccacgtcctctccaccacctccacctccaggtcgtgccccatccccgtggccgccatctcggacggcttcgacgacggcgggatctcctcatgcccggacaccgcggagtacgtgcgccggatggaggccgcggggtcggagacgctggcggggctcctggacgccgaggcccgcgcggggcggcccgtccgcgtgctggtgtacgactcgcacctgccatgggcgcgccgcgtggcgcgggccgccggcgtggccgccgccgcgttcatgacgcagatgtgcgcggtgggcctcgtctacggcgaggcgtgggccgggcgggtggccctgccactggcggacggggccgcgctgcgcgggaggctcgccgtggagctgggccccgacgacgtgccgccgttcgtggcggcgcccgagtggtacccggcgttcaccgagtccgcgctgagccagttcgacgggctggagcacgccgacgacgtgctcgtcaactcgttccgtgacctggagccaatggaagcggattacctggagtcgacgtggcgcgcgaagaccgtcggcccgacactgccgtcgttctacctcgacgacggccgcttgccatgcgacaagacatacggcgtggacctcttctcgagcaccgactccgaggcggcgccgtgcatgacgtggcttgacaagcaggagccctgctccgtcgtcctcgcgtcgtacgggaccgtcgccaacctcaacaaggagcagctggacgagctcggcaacggactgtgcgattccggcaagcctttcgtttgggtgctgaggtccaacgaggcagagaagctgtctcgacagctcggtggcaggtgcaaggagaggggcctcattgtccccttctgtcctcagctcgaggtgctggcacacaaggccacaggttgcttcctgacgcactgcgggtggaactcgacgattgaatccatcgctagtggtgttccaatggtggcgatgccgcagtgggcggaccagccgacgacggccaagtatgtggagagcgcgtgggggattggggtgcgcatgcggaagggttccttggtgaggaaggaggtggagaggtgcataagggaggtgatgggcggggagaggaagcatgtgtacgggaggaatgccgctcgttggatgcacaaggccaaggaggccatgcaggaaggaggaagctctgacaagaacattgcagaattcgcagccaagtatttaccaaagtagatttccgattatgttctcctcggataatgagttttttgggcaataaagtttcttgtctttagggct

SEQ ID NO: 23091 - DNA, 1170 bp, Zea mays
  Clone ID: LIB3594-009-H6_FLI
cgatcgagcaagaagcaagcagcagtaacaagaaaccatcatcgatccatgtatccaccaatggcggcgctcggaggacggcggaggagggcgtcgtcagcggccctcctgctagccttgttggcggtggccctggtctccctggccggcccagccacggccgcggggaacaagaccgggcaggtgaccgtgttctggggccggaacaaggccgagggcacgctgcgcgaggcctgcgactcgggcctctacaccatggtgatcatgtccttcctcgacgtctacggcccgcagcgcggcggctaccaccagtaccacctggacctgtcggggcacccgacggccggcatcggggacgacatcaagcactgccagttcgtgggcgtgccggtgacgctctccgtcggcggcttcggctccggctactcgctcccgtccacgcaggcggcgctggacctgttcgactacctctggaacgccttcctcggcgggtcgaagccaggcgtgcgccgccccttcggcgacgcgtggctcgacggcgtcgacctgttcctggagcgcggctcgcccgccgaccgctacgacgtgctggcgctcgagctcgccaagcacaacatccgcggcgggcccggcaagccgctgcacctgacggccacgccgcgctgcggcttcccgcccgccggctacctgcgccgcgcgctcgacacgggcatcttcgagcgcgtccacgtccggatccacgacgacgccgactgcgaggccaggtggcacctcgcgtgggacgagtggacggcggcgtacccggccaccaggttctacgtcggcctcacggcgtcggagatgacgcacggctgggtgcaccccaagaacgtctactacgacgtcgcgccgtccgcgcagaaggcggacaactacggcggcttcatgatctgggaccgctactacgacaaactctccaactacaccagcatggtcaaggactacgcttgattggatttctcgactcagttcagagcagacatgcatgctagctgcgtcagccgcttcgatctagctcaccgacctatataagccgaagtactgtgtagtgtgtttgcattttattgtaagaaactaagaaggaataaattggcgaataaacaagagtaaaatacaccgggttgttgagtg

SEQ ID NO: 23092 - DNA, 365 bp, Zea mays
  Clone ID: LIB3594-010-E1_FLI
ctttgcatgggtgtcgccgtcggcaacttggcgatggaggagaagcagatccagcagaacatccagatgagcgtcaacttccttgtttcccttctgaagaagaactggcagaatgtgagatgcctgtacgtcaagagcaccatggggaagccatacagggtgttctaagtatgctcttttgtgaagtctgctaggttctggcagcgaggttttattgaattaaactcttgttaaggatatgtttttggacgatcctatatttcgtcctggcgctactatgtttcagaatggtggtactactataagtatcctagcgctataagtattgcttgaaaggatcaatataatttgcgtgtcatacccgc

SEQ ID NO: 23093 - DNA, 1441 bp, Zea mays
  Clone ID: LIB3594-010-H12_FLI
tttgcctctctcctccactccacctctcctctcctgcgctacagcgagggggaaggggagcgtcgaccgattcgtcccggcctccgtcccgccgctggcctcgcctgccccgatggcggcggtggcgatccaccagttcgccgagtgcatcacctgccacgcctggagcccggaccagtcgatgattgccttttgtccaaacaaccatgaagtacatatctataaattcttcacagacaagtgggagaaacttcatgttctgtcaaagcatgatcagatggtttcggggatagactggagtaaatcatccaacaaaatcgtaacagtttcacatgatagaaattcatatgtttggacacaagaaggatctgattgggtacctaccctggttattctaaagttaaatcgtgcagctttatgtgttcagtggagcccaaaagaaaacaagtttgccgtgggaagcggtgccaaatctgtgtgtatttgttactatgaacaagaaaataactggtggattagcaaggtcatcaggaaaaagcatgaatcttctgtcactagtcttgcatggcatccaaacaatatatatcttgcaacatcgtctacggatggtaaatgcagagtgttctctacttttatcaagggtgtagacacaagaggatcaaaatcgagcacttcaaccgattcaaaattcggagagcaaatcgctcagcttgatctatcatctacctgggtatttggtgtaaggtggtcaccaagtgggaagacattggcctatgcagggcacaactccatgatttatttcatcgatgaagtcgaatcatctcctgtggcacaaaatttggcactgcgtgatctgcctctccgtgatgtgggttctttttgtctctgagcgcacattgattggtgtcggatttgactgcaatcctatgatctttgctgctgatgatactgggctttggactttcataagattcttggacgagaggaaagctgccccatcagcttcaaaagcctcgcagctctctgaagcccttggaaagctatacggccaatcaaagcaagggactagtagtgataccgttgaaccatcaaaacctcgtggtggggcccatgagaattgcataacgtgtattgtacccttgagaaaaggaagcgacggtagtatcaaacgattcagcacatcaggattggatggtaagatcgtggtatgggatttggagaatcacgtcagcattgcaaaatagctcgagggagactttattaccaatcaaatcgagggaactcctgtcattaccagccgtcctgcaggttttcaagatccagggccagccagatagattgtttttttttaatttttaaattttgttgtacctgtacacagaaacattgccttagcgtagggacagcttgcatctatcaagtagcttcatttttggcgagt

SEQ ID NO: 23094 - DNA, 1516 bp, Zea mays
  Clone ID: LIB3594-011-B4_FLI
ctgcgctgccctagaaccttcgccgccgcccctctttaggattaccgtgtccccgatcgccccctggcacgcccgccccgatcgccccctggcacgcccgcccggatcctgcaccggaattccgtgtggaattccggacccgatcgaaatcgaaccgcctccctgcgtgctcccctgatcaagaaattctcacgccgcgcgaacgcacgcctgaggcggttggatcctctggtggggttccttggtctcgatttgctgtgtgtggatgggggcgccgaagcagcgctggacgccggaggaagaggccgctctcaaggccggcgtcgccaagcacgggcccggcaagtggcgcaccatcctccgagactcggacttcagcgcgctcctgcgcctccgctccaatgttgacctcaaggacaagtggcgcaacttgagcgtcactgcaggaggttatgggtctagagagaaggcaaggatggcgttgaagaaaggtagacgcgtggtgcctaagcttactgctgagccaatggatgtagatgtgaagaatatggatgacgctcatgacacagccattgatgtggaacctttagcaatggctttcgagtccttgccaactgaggaaagtccagataagtcagttgctaggctcgatgatctcatattagaagctataaggaagcttaaggagccttctgggtccagtaaggcagccattgctgcatacattgaggaccaatactggccacctgctgattttcagcgcctgctatctacaaaactgaaggcattggttaattccggaaaattaatcaaggtaaaccaaaagtacagaattgcaccaagtccacccccctcgggcagaataggcactaaggtatcctctgctgaaggcatgaaggcagaaaataataatgctaaacggctaactaagcatcaagtgattgctgagctggagaagatgaaaggcatgaccaaggaagaggcagctgcctttgctgccaaggcagttgctgaggcagaagtagcaatagcggaagctgaggaagcagcaagagttgcagaggctgcagaaaatgatgctgaagctgcaaaggcttttcttgatgctgtcactttatcaatgagaaacaggaatgctgcttccatgatgcttcgagcttgctgatcctttacccatgcggtcatatggttttggccagcagcacaccggtgtttctgctgcaaagattttctggatatatgagtttcttgtatagccttatttatagatcacgacgcatcaactggaggggtttttaacatcttgctgttggtcctttgtcgttgcagcctttagacaatcgacaatatgataacaagagttatcttgaaagtagtcttcatttacttttgttttctccccattgtgttgctttgtaattaaactctagccttttcgtttagttatttgaaattgtgtcgtctagtagaacaactgtagtgaaaagaaaatgtcagatagccaccttagttattc

SEQ ID NO: 23095 - DNA, 525 bp, Zea mays
  Clone ID: LIB3594-011-C8_FLI
ggttgctctagatccgttcatcctggtggttttgtgaggtcgaaagcggcgagcgaattagaagatgctggacaagctgtgggacgacgtggtggccgggcctcgcccggagacgggcctcgagaagctccgcaaggccaccaccgccccaccgtctacgactggctctacagcgacgagaccaggagcaaccaccgctagatcgggcgagatggatggacagtgaagaggccatgtttgctggtccttgtggttatctaaaacgcacgcatgctctattatagctagtcatcactatatatatacttgtgtttgtgtattgttgttcttgttctgctggtgtctccgccgtttaatttgacctatgttatggagtgagtgatatatgtgccgtcactcctagtatatagtagtgagtgactagttggtatgtgtagtactgtactatcttttctccatatgcatgttttgccagcgcgtaatgaatgtaatgtcagtactgctactacgtgctctgctacttcc

SEQ ID NO: 23096 - DNA, 783 bp, Zea mays
  Clone ID: LIB3594-011-E2_FLI
gagcgggcctctgggagaggtagggagccatggggaggtcgccgtgctgcgagaaggggcacaccaacaagggcgcgtggaccaaggaggaggacgagcggctggtggcgtacatccggtcgcacggggaagggtgctggcggtcgctgcccagcgcggcgggtctgctgcgctgcggcaagagctgcaggctgcggtggatgaactacctccggccggacctcaagcgcgggaacttcaccgacgacgaggacgagctcatcatccgcctgcacgccctcctcggcaacaagtggtctctgatcgccgggcagctgccgggccggacggacaacgagatcaagaactactggaacacgcacatcaaacgcaagctcctggcccgcggcatcgacccgcacgcgcaccaccgcccgcaggcgctgcaccacgtggcagcagcagccctcgtcccggcccccgccgcgaagccgaagccgaagccggcggagtcgtccgacgacggcgggcgcagcagctgcagctgcagcggcagcggcagcagcgcgggggagccgcggtgccccgacctcaacctcgacctgtccgttggtccgccggacgcgcccacctcgccgccgccgccgtgcctgtgccaccgcgcctgggaagcgtgcggctgccaggcaggctgacggctgaggcagcaagagttcagattttttttttgttaggcagttgaaacaaggctagtgtgaaccgagaggagatcagtagctaggacactgtctcagagaaagaaag

SEQ ID NO: 23097 - DNA, 2186 bp, Zea mays
  Clone ID: LIB3594-011-F10_FLI
taatttaacaaaattagcagaggagggaaaattagatcctgttgttggaaggcagccacaaattgagcgtgtggtacaaattttaggcagacgaaccaagaacaatccctgcttgattggagagcctggtgttggaaaaactgcaattgctgaaggacttgctcagcgcatttctacaggcgatgtacctgaaacaatagaagggaaaaaggtcataacccttgacatgggacttcttgttgctggcacaaagtaccgtggagaattcgaagaaagattaaagaagctgatggaggaaataaagcaaagtgatgagataatactctttattgatgaagttcacactctgataggagcaggagcagcggaaggtgctatagatgctgctaatatcttgaagcctgcgttggccagaggtgaattacagtgcattggagccactacactagatgaatataggaagcacattgagaaagacccagcacttgaacggaggtttcaacctgtgaaagtgccagaaccaacagtagatgaaaccattgaaatcctcagaggactgagggaacgatatgagatccaccataaacttcgttacactgatgaagctctgattgcagctgcaaagctgtcatatcaatatatcagtgatcggtttctcccagataaggcaattgacttgattgatgaagcaggttcccgtgttaggctacagcatgcacaggtccccgaggaagcaagagagcttgacaaggagctcaaacaagtcacgaaacagaagaatgaagctgttcgaagccaggattttgagaaggctggggaattgagagaccgtgaaatggaattgaaggcccagataacagccctcattgacaagagcaaggaattgagcaaagcagaggaagagtctggagagacaggacctatggtcaatgaagaagatatccagcacatagtatcttcatggactggcatccctgtggagaaggtttccagcgatgaatctgataagcttcttaagatggaagagactttgcacaagcgtgtcattggccaagatgaggctgtggtagcaattagtcgctccatccgccgtgctcgtgtgggtctcaagaaccccaacaggccaattgcaagctttatttttgctggtcccaccggcgttgggaagtctgagcttgcaaaggctcttgcagcctattactttggctctgaggaggctatgatccggcttgatatgagtgaattcatggagagacacacggtatccaagctgattggttcacctccaggatatgtaggatacactgagggtggccagctgacagaggcagttcgacggcggccatacacagttgtgctctttgatgagattgagaaggcacaccctgatgtcttcaacatgatgcttcagattttggaagatgggagattgactgacagcaagggaaggacggtggacttcaagaacacactcctgatcatgacctcaaatgtagggagcagtgtcatcgagaagggtggaaggaagatcggatttgaccttgactctgatgagaaggacagtagctacagcaggatcaagagcctggtcatcgaggagatgaagcagtatttccgacctgagttcctcaaccgtctcgatgagatgatcgtgttcaggcagcttaccaagctcgaggtcaaggagatagcggacatcatgctccaggaggtctttgacaggctgaaggccaaggacatcaatcttcaagtgaccgagaagttcaaggagcgggtggtggacgaaggctacaaccctagctatggtgcacgcccgctgaggcgagccatcatgaggctgctggaggacagccttgctgagaagatgctcgcaggggaggtaaaggagggcgactctgccatagtagatgtggactcggaggggaaggttgttgtgctcaatggtcagggcggcataccggagctctcaactccggcgatcaccgtttagctcgtacataacaaatgacaaaattaatagcatagtttttgttcaaacacattatcatttatggttagaatatctgtgtatatgtagtggtatagtcaatggggaaatcgttcctgcctctaaattcctttttttcaagttaaggtgtttcttttgtcgcaagttaatctgcctggttattaagatattattgttt

SEQ ID NO: 23098 - DNA, 580 bp, Zea mays
  Clone ID: LIB3594-012-A3_FLI
caatagcctccaccgtccaccctcacgcaactgcctcttcgcggcggcgcaaaacaccaacacgtcttctctccggttgcgaggagggtataggatttcgccgcggcgagatgtcggcgtacgacgaggtggagatcgaggacatggagtggaacgcggagctgaaggcgtacacgtacccgtgcccctgcggcgacctcttccagatcacgctcgacgacctccgcatcggggaggagattgcgcgctgcccgtcgtgttctctcttcctcaccgtcgtttacaacgccgaggactttgctgacgccaaggagccgacccacaagccgtccccgagcccagtcgccgtcgcctgatgtggcccgtgcccggcgagatggacgcatggaaatggatctcagagcaggataacgaatgagtttttgtttggcacacaccactacgggagcatttgtactactcttagatgagtcaacccactgcatattttcagagctcaggttgttgaactatcttttttttgtgcttgacattgtaaggtgacatggacagaacatgctatgaaaaaaattgtttagtc

SEQ ID NO: 23099 - DNA, 163 bp, Zea mays
  Clone ID: LIB3594-012-B5_FLI
gcagatgctgagaaggcaattgagaccgcacccaagaagcagaagaaagcatcttcaaagaaatcttcagggtccaagtcataaggcgctcacagaactcagtgtgtcttctcctttatgttgtttaccgccagactaattagagtgtcgtgaagttttactt

SEQ ID NO: 23100 - DNA, 753 bp, Zea mays
  Clone ID: LIB3594-012-D12_FLI
attgcttgctctccacaagaaacaaagcagagcaccaacaatggccgccgcctcctcgtcctcggtcctcctgctgctcctggccgccgccttggctggcatgagcgccaacgccgccaccttcaccatcaccaacaactgcgggttcaccgtgtggcccgcggccaccccggtgggcgggggcacgcagctgaacccgggcgggacgtggaccgtcaacgtgccggccggcaccagctccggccgcgtgtggggccgcaccggctgctccttcaacggcaacagcgggagctgccagacgggcgactgcggcggcgcgctggcctgcacgctgtctgggcagccgccgctgacgctggccgagttcaccatcggcggcagccaggacttctacgacatctcggtcatcgatggctacaacctcgccatggccttctcctgcagcaccggcgtgcggctggtgtgcacggactctggatgccccgacgcgtaccaccaccccaacgacgtgaagacccatgcctgtggcggcaacagcaactaccaagtcaccttctgcccgtgatcggaataggctctgcatgcatgggcgagtgatttggatttgcacaataatatttagggagcgcgtgcatgacacgtgcacgcatttgtatgtacgcgcgtatacgtacctacgtagctggatttgtgtgcgtgcttcgtaccaaatattaataagaataaacaaatatgactcgtgtcatatacacg

SEQ ID NO: 23101 - DNA, 478 bp, Zea mays
  Clone ID: LIB3594-012-E6_FLI
ctgcacaagtactggggcgtggggggccggcggtgcggcagctgcgagggggccccggcggcggtgcactgccgcacgtgcgttggtggatccttcctctgcacgacgtgcgacgcccggcccgcgcacgcgcgcctgggccacgagcgcgtgtggatgtgcgaggtctgcgagctggcccccgccgccgtcacgtgcaaggccgacgccgccgtggtgccagaggccttcggcggcagcggcagcggcggcgggagctttgagctcgacttcacaaggcccaagcctcaggcctacatgccatacaccgggactccccagagccacagcgtgccatccgcggacgtggaggtggtgccggagcggggagacttggctgcggtgaggccggtgccgctgatgggggagagcagggaggcgcgcctgatgcggtaccgtgagaaaaggaagaacaggcgcttcgagaagaccatccggt

SEQ ID NO: 23102 - DNA, 929 bp, Zea mays
  Clone ID: LIB3594-012-F9_FLI
ctcaaatactgatctcactgatccagtatggctatggcaaaggcaggcgcgccgagggtctcggcggcccagctggtgactctcgggctatcactcctctgcgctgtcgccggcccggccgccgcgcagaactgcggctgccagccaaacgtatgctgcagcaagtttggctactgcggcacgaccgacgagtactgcggcgacgggtgccagtcgggcccgtgccgctcgggcggcggcggcagcagtggcggcggtggtgcgaacgtggctagcgtcgtcaccggctccttcttcaacggcatcaagagccaggccgggagcgggtgcgagggcaagaacttctacacccgctgcagatctcgtggaactacaactacgggcccgcggggagggccatcggcttcgacgggctcggggaccccggcagggtggcgcgggacgccgtggtggcgttcaaggcggcgctctggttctggatgaacagcgtgcacggggtggtgccgcaggggttcggcgccaccaccagggccatcaacggcgccctcgagtgcggcgggaacaaccccgcccagatgaacgcgcgcgtcggctactacaggcagtactgccgccagctcggcgtcgaccccgggcccaacctcacctgctaggctaggcggcatcggcggacggcgggggccttcaggccttgtgctcggcgtcgcatcgcaccctcgcgcgcgaaaccgagcaatagtgacaataaaacgccggggctagctgagcctgtttgttcgacttcgacctgaataatgaagcagctgtgatatgcatgttgtttcgacacaacgtgtacgcttgcagagcgcttgtactttacgattgcattgtatgcagcaagggtttaaaggctgaatcaataaacggtgtgtaggcgatcactgttt

SEQ ID NO: 23103 - DNA, 1386 bp, Zea mays
  Clone ID: LIB3594-012-H3_FLI
gggaaacgtaccaggctggcaactctgggaggccgaggcgaggcgaggctcatcagacctcggatgggacgtgcgtgtatgcgtcttgtgtgtatataaaggggagggggtgttcgttgtatccaagagagcaaactagtgagtgagagagagacagagagatcatcgatcgatcgacgaccatggcgaggcaacgacaagttgcttccatgcttgcagctgctctgctcgttgcaacgacgtttgcgtccattcctacaaccgtgcactccatcggcgtctgctacggcacgctgggcaacaacctgccgtccagcagcgacgtggtgcagctctacaggtccaagggcatcaaaggcatgcgcatctaccccccgacgccaaagccctcgccgccctgcgcaactccggcatcgcgctcatcctcgacaccggcaacggcggcggcgtcctgggccagctcgccaggagcgcctcgttcgcggactcgtgggtgcagagcaacgtgcggccctactaccccgccgtcggcatcaagtacgtcgcggtgggcaacgaggtgcagggcgacgacacgcgcagcctcctcccggcgatgcgcaacctggacgccgccctggcgcgcgccggcttcccgggcatcaagtgctccacgtcggtgcgcttcgacgtggtcgccaactcgttcccgccctccagcggctccttcgcgcagggctacatggcggacgtcgcgcgctacctggccggcaccggcgcgccgctgctcgccaacgtgtacccttacttcgcgtaccgggacaacccgcgcgacatcagcctgggctacgccacgttccagccgggcaccaccgtcagggacaacggcaacggcctcaactacaacaacctgttcgacgccatggtggacgccgtcgtcgccgcgctcgagaaggccggcgcgcccaacgtcagggtcgtcgtttccgagagcggctggccctcggccggcggcttcggggccagcgtcgacaacgcgcggaaatacaaccagggactcatcgaccacgtcggccgcggcacgcccaagaggaccggcccgctggagaccttcgtcttcgccatgttcaacgagaaccagaagggcggcgatcccacggagaagaacttcggcctcttctacggcaacaagcagcccgtgtacccgatccggttcaactaattaagagtggcggatcggaggaataatacatcttcatcaatcaattaacctaataatatgctacatgaataagctgctgcgtgcatgtggccggccggacttgtggaggagcggtgcaattaacttgtatgcacgtactctatctatatatgatgaataaaaagagatagaattctgatgcattc

SEQ ID NO: 23104 - DNA, 1033 bp, Zea mays
  Clone ID: LIB3594-013-A4_FLI
ctctctctctctctctctctctctctctctatatctctcttctctcccagaccttccctccggccagcctcaatctcccgcgtgagctcctcgaacgcacacctctctcgatccgactgacatggccggcgcccagtcctggaggacctacctgtgctgcgtgggcggcagcgcggcggtcgaggacgacggctcgacgctgcggcggcggcggaggcgcggcggcagcggcagcagcagcagcaaggacagcccgaggtcgtcgtcgtcgcggatgtcgctcacgagcctcggctcgtcgtcggagacgctctcccccgaggacctgtcgctcacgctgtccgggtccaacctgcacgccttcacgtacgccgagctgcgctccgccacggccagcttctcccgcgccaacttcctcggctgcggcgggttcggccccgtgtacaggggcgccgtcggcgaggccctccgcccgggcctgcgcgcgcaggacgtcgccgtcaagtacctcgacctggagggcggcgcgcaggggcacaaggagtggctggctgaggtgttcttcctcgggcaactgaggcacaagaacctggtgaagctcatcggctactgctacgaggccgagcaccggatgctggtgtacgagttcatgagcttcgggagcctggagaaccacctgttcaaaagtaccaacggcgccctcccatggatgacgaggatgaagatcgccgtcggcgcggccaagggcctcgccttcctccacgacgccgacccgccggtgatctaccgcgacttcaaggcttccaacatcctgctcgactcggactacaacaccaagctgtccgacttcggtctggccaaggacgggccatagggcgacgagacgcacgtgacgacacgtgtcatggggacgcacgggtacgcggcgcccgagtacatcctgacgggccacctaaccgccaagagcgacgtgtacagcttcggcgtggtgcttctagagctgctctcgggccggcagtcggtggaccggtcg

SEQ ID NO: 23105 - DNA, 927 bp, Zea mays
  Clone ID: LIB3594-013-B12_FLI
ctactcacagacagtcacatacacatccaacgagcccgaccgccagagctcgccgccgtcctccgcagacaatccaccatggcgatggtgctgaggatggtgctggggaagatcccggtggagacgcccaagcacgaggtcctccacaccggcgccggctacgagatccgcaagtacccgcccagcatcgccgcggagttgacctacgatcccaaggagatgagaggagaccctgatggcgggttcaccgtcctcgccaactacatcggggtcctcggaaagccgcagaacaccaagcccgagaagatcgccatgacggctcccgtcatcaccaccggcagcggcagcggcggcgacggcgagaagatcgccatgacggcccccgtcatcaccaccggcggcggcgagcccgagcccatcgcgatgaccgcgccggtgattacggacgaccagcaggcgccgggcaaggtgacaatgcagttcctgctgccgtccaagtacaccagggtggaggaggcgccgcggccgacggacgagcgggtggtgatccgcgaggtgccagagaggaagttcggcgtggcgaggttcagcggggtggccacggacaggacggtgagggagaaggcgaagggacttaaggccgccctggagaaggacgggtacaccatcaagggcccgttcgtgctggcgcggtacaacccgtcgttcacgctcccgccgctgcgcaccaacgaggtcatgttccccgtcgagtgatccggcaaggcgccggccaccgcccagctaccagccgcggttcttctgtgaaatgacggcttgaggttcaggaggaactgtgtttgtattttgtatctgtatttctcttgaagttgttgtaaaatatgctttatgcaaggagttatggataaattttactactcttcgatc

SEQ ID NO: 23106 - DNA, 716 bp, Zea mays
  Clone ID: LIB3594-014-B3_FLI
gctggaagtggaaagaagtgggttcttgcttgagctgagctcttgctgcccttggatctgtttgggagtggagaacgcagtatggggcgcgggaagatcaagatcaagaggatcgagaactctaccaaccggcaggtgaccttctccaagcgccgggccggactggtcaagaaggcacgggagatcggcgtgctctgcgacgccgaggtcggcgtcgtcatcttctccagcggcggcaagctctacgactactgctcgcccaggacctcgctgtccaggatcttggagaagtaccagaccaactccgggaagatactgtggggtgagaaacacaagaacctgagtgcagagatcgacagagtcaagaaggagaacgacaacatgcagattcagctcaggccagtgtttctgattcagatctgctcccgatctctagctgcgcgcgcacttcactagctcgctgttcgtgtgtgttcttgttgtgattgtgctagcgtgtccgtcacttgtgatggtgcaggcatctgaaaggcgaggacctgaactccctacagcacagggagctgatcgctattgaagagggcctccagaatgggcagaccaacatgcgcgagaagcagatggactactggaggatgcacaagacgaatggaaagatgctggaggacgaacacaagatactgacttttaggatgcaccaacaggctgttgatctg

SEQ ID NO: 23107 - DNA, 917 bp, Zea mays
  Clone ID: LIB3594-014-C11_FLI
cagaagaaaatgcaacgggcagtgcaggccgtcaggtcacacggcaatgttcttaaatatgctgttctacaacacatcagcgctcccaagccagcaatgcttcctgctgccttttctcgtttcatgtcagtttcatctgctcgcctagaggatcgtggatttgaaactgccactgtagcagatgtcttgaagtctaaagggaagagtgctgatggatcttggctctggtgcaccacagaggatagcgtctatgacgctgtcaaatctatgactcagcacaacgtgggagctttggtggttgtcaaacctggacagaataaatcaatcgctggcattgtcactgagagagattatctccggaaaatcatagtgcagggaaggtcttccaagtcaactaaggttggcgacatcatgactgaagagaacaaactgatcacagtgaatcccgacaccaaggtcctgcaggcaatgcagctcatgacagaaaaccgcgtcagacacatcccggtgatcgacggcacggggatgctggggatggtctccatcggcgacgtcgtgcgcgcggtggtggccgagcacagggaggagctgaaccggctcaatgactacatccagggaggctactaggacggcgtgtgcagcgacgaccccctccgatcccgccagtcagtgaagtccgcctttgaaatccaataactcggaacaatgatgatgacgaaataggccgtgttttcttggacaatgatgttaagttcggcaaggttttcctttctctttttttattctactgcgtggtctatgtgtatattgccaaaggcatgcgtgagccatgcgcccggtgctggggcgcagagaccatctgatggtggaaacaccggaaataagagcgtgccgctgtgtgtttcctttgaaggaat

SEQ ID NO: 23108 - DNA, 824 bp, Zea mays
  Clone ID: LIB3594-014-D12_FLI
cgcatctcctccccggcccgtcgccatgatatatactcgcctcgcatgatgcccagcgccgcccggcgcccgcccgtgcatgattaattaggtcgcgcgctagctgtgcggactgctaggagctagctccatcgtcgtccggttgttattcctccttctcaacacacattgcccgttgccaacatcatccttccagcttcctggccgacgagcagtgccttcatatatacaaacgtacaccagctacactacacatctctctagctagctctctctctctctgctccggcagggcttcacctcacctgtgctgttgtgtgcgtgcgtgcttatatgggttcttgggtgcgcaccatcacaacgcccttcaggaaagcatgcaccatcttcggcccgcagaaggacggcggcggcggcggcaagaggtcgcagcaaccaaacccagcgacgatggtacggcacgtcgacgacgccgccgagagggccaagctgcacggggaggtgatggcgtgcgcctacgaagacgtgcaggtcatgtggtccatgctcgaccagacaacaaggattggggatctcagtggcagctcgtgaccgccggcaattgtccgttcatgcattttcctagagccacaaaggtggagatgcagacatggtgtacatagcaaaatatcttctcaccaaacatcccccccccccacccacccacttgctttcttgggccttgaattggaagagctatttgcgccgatcaattgagcccagaaccaagtgcccgttttgtacgtagcaagatttattagcttttcttttggagtttccagctc

SEQ ID NO: 23109 - DNA, 1132 bp, Zea mays
  Clone ID: LIB3594-014-D7_FLI
ctaaggaagaagacgcggatccaagggttgactgctgaggaagaagacgctactcctcgtcttcgatctgttgagcggttcaagcagagctgatggctacatcagagccagtacaagagagtttggtggtgcactactcacaacctagtaggccccgggtcctccttgctgcttcaggaagtgtagccgctataaaatttgagagcctttgccgtagcttctctgagtgggcggatgtccgagctgtggccaccacgtcatccttgcacttcgttgatagatcatctctaccaagtggcatcgttctttacactgatgacgatgaatggtctacctggaagaagataggagatgaagtcttacacatcgagctgcggaaatgggcagacgttatggtgattgctccattgtcagcaaataccctggctaagatcgccggtgggttatgcgacaacctcttgacctgcatcgtgagagcgtgggactacagcaaaccgctctttgttgccccagccatgaacacgttaatgtggaacaacccattcacggagcggcatcttcacacaatcaaccaactgggcatagccttgatccccccagttaccaaaaggctggcctgtggcgattacgggaatggcgcaatggccgaaacctcacagatccatacttccgtgaggctcgcatgcaagacgcaaccgcacgatgcgagcagttcactcgcaggtcctgtcagtaataaccggccatctagctgatgcagcggttggccacttgattgtcaagcttaggaatttgttttatctggagtgttgtaccagatttttttcaactagagtttgtgtgtattgaattagggggaaaggttgttgtcacatgataacaataacttccaatgatgactctattcagtttgtaattgtctgtgggagtacaattatgcagctgtattgtctgctacaatattgtttgtttgtgtgtgtgggagtggggggtgctgttgccacagagatagattcctccctgcccagtaatggtagtgattattcagtttgtagttgttagtggaagtgtccagcaaacttttctacccttcgatattcctggtacaaatgttgaaacgactgtcccgacc

SEQ ID NO: 23110 - DNA, 1747 bp, Zea mays
  Clone ID: LIB3594-014-F8_FLI
ctcctgcatcaggatcatcatcaggttctccgttccactccatggccttccctgctgtgcccctcctcctcgccgctctgctcctggtcgccgccacgcggctgtgggactacgtcttcgtgcgcctcgtatggcggccgtacgccatcaccaaggggttcagagagcaaggtatccatggaccctcctacaggttcttcaagggctgcaacgaggagatcaggagcatgaaggagaagaccgacggtctcgtgctggacgtcggcgaccacaagtacctcccgcggatcgcgccgcactacctcgaatggagggctcagtacggagaaccatttctatattggtacggggcacaagcccgaatttgcatatttgactacgaactagcaaggcaaatcctttcgagcaagtctgggcatttcgtgaagaacgatgcgcaccctactttgttggctctggtcggcaagggactcgggttcatggaaggctctgactgggtgcgccatcgcagggtgatcaaccctgctttcaccattgacaagcttaagattgtgaccgagacgatgctggacttcgccgatagcatggcaggtgagttggaagctgaagcatcccagaacgagaacggagaaacacaagtggatatatacaaacatttcagcgatctgacagttgacaatatagcctacgccatctttggaagcagctacaagttaggcaaacaagtgttcgaggcacaaactgagctgctggggatcaccatggctactttccttgacgtgcccataccaggatccaaataccttccaacccaagcgaatcggcgaaaatggatgctggagacgaagctcaagagcttactcacgcggatcatacagccacggttagcaagcggtgagcacggaaacgatctgctgggcgtgatgctggactcctgcactgagaccaagcaaggagggaagcagcagcaagtggatcgtctgcgtctcagcttgagcatggaggagatcatacatgagtgcaagctgttcttcttcgctggccacgagaacacagcccttctcctcacgtggtcggtgtatttgctcagcatataccccgagtggcaagaaaggctccggaaggaggtcttgagggagttcgggagggaagctcctaaccccaacgcgctcaacagattgaaagagatgacaatggtgttgttcgagaccttgaggctctactcgcctgctctcttcatgcaaaggaagaccctggccgacatgaccgtggggccaataaaactgcccaaaggcactgcaattgtgatacccattccgatcatgcatcgagacaagcaggcctggggcgacgacgcagacgagttcagtccgatgagatttgcgaatgggatcacgggagcagcgaaagttcctcacggcctgctggcgttctcgatggggccaaggtcttgcatcggccagaacttgtcgatgctggaagccaagtcgacgctggccctgatgctccgcaagttctccttcgctctctcccctgactacgtgcacgcgcccgtggatctcttcactctcaaacctaagtttggccttcccgtcattctgaggccactggataatgttttgatttgagttgggcatatagtacaacaggaagtaacttaggtacatatcaaatttgctagctggtcaaaacgttatatgatgttctcaaccctccgttgttctatatcgttgaaaacaagtatttt

SEQ ID NO: 23111 - DNA, 1209 bp, Zea mays
  Clone ID: LIB3594-014-H1_FLI
cccgtcctctccgctggcctcgtgccccctcgtcccaactcccaactgccgatggggaaggagcaatccggtgtgcgcgcgcgggcgcggaagtgaaccccggttgagtagtaggtgggagatcgaggtcgcgcccttgccccacacgccactaaaggccgcgccgacgggctcatcagacgctttggagtttggacgggctcgcctcggccgctctggcgcttgtgcggtgggtgaagcgcgggtgctggtgcgggaagcctcgccagacctagcgctgccgactgccgagctgggtgcgggcgcgaggagtcgacgggaagacaagggtgaggaattatgagtgaaacagggcacactgtacaagtcactaacctctcgagcagagtatctgaaagtgatcttcatgagttcttttcgttctctggtcctattgagcatatagaacttatcagatcagaaggatacggtgccactgcttatgtgacattcaaggaacgctttgccttggaaactgcagtattgctcagtggggctactattgtggatcagccagtatgcataacctattggggacaacctgagggaacttttaatttctgggacaggccaacttgggaggttgaagaggaaatcgaatacaggaactaccaaacatgccagtacaacactactccgcaggaagcttttacagtggctcaagatatcatgaagacgatgctagaaaaggggtacgtgctcagcaaggatgctttggctaaggctagagcctttgatgagtcctatggattaacagctgcagcagcagccagggctgcagagctgagcaagagaattggtttaactgatagggtcaatgctggtgttggtgcaatgcgatcagtcgatgagacatatcgcgtaagagagacaaccaagacggttgctactgccactggaagaacggcagcaaaggtggtaaatggcatcgtcaccagcagctacttctctgcaggagccatgatcttgtctgatgctcttactagggctgccaaggccgcggcagatctggccgctcatggtaggcagaattaagtgaaaaatagacataaagttcatccttgcagttactaaacatgaggacgaacaccttcaagtgatgttgcttgatgtatatttatgacacaacagtgtcgtaaattaaaaggagacgatcactgcgtttggaac

SEQ ID NO: 23112 - DNA, 1553 bp, Zea mays
  Clone ID: LIB3594-015-B6_FLI
cccgtcgcatcccatcccactaccacccatctcgtcgtccgccgattcgatccggttcttccaacccaggggcagtgatggcgacgaagaggagcgtgggcaccctcggcgaggcggatctgaaggggaagaaggtgttcgtgcgcgccgacctcaacgtcccgctcgacgatgcccagaagatcaccgacgacacccgcatccgcgcctccgtccccaccatcaagttcctcctcgagaagggcgccaaggtcatcctcgccagccacctgggtcgtccaaaaggtgtcaccccaaagtacagcttgaagcctcttgttccacgcttgtctgagctccttggagttgaagtcgtgatggccaatgattgcattggtgaagaagttgagaagttggctgccgctttgccagaaggtggagttctgctcctagagaatgttagattctacaaggaggaagagaagaacgaacctgagtttgctaagaagctagcatctgttgctgacctttatgtcaatgatgcttttggcacggcacacagagctcatgcttcaaccgaaggagttaccaagtatttgaagcctgctgttgccggcttcctcatgcagaaggaacttgactaccttgttggagctgttgccaacccaaagaagccatttgccgctattgttggtggatccaaggtctcaagtaagattggtgtcattgagtccttgctggcgaaggtcgatatcctcatccttggtggtggtatgatctacacattttacaaggcacaaggatattctgttggaaaatctctcgtggaagaggataaacttgagctcgcaacttctcttattgagaaggcgaaggcaaagggggtttctcttttgcttcccactgatattgtagtagcggacaagtttgcagctgatgctgagagcaagattgtccctgccactgctatccctgatgactggatgggtcttgatgttggccctgatgccaccaaaacattcaacgaagcattggacaccaccaagactgttatttggaacggccccatgggagtgtttgagttcgagaagtttgcagctggcactgaggcgattgccaagaagctagctgagcttacaaccacgaagggtgtcactaccatcatcggcggcggcgactctgttgctgctgtcgagaaggctgggctggccgacaagatgagccacatttcgaccggcggcggtgcgagcttggaactcttggaaggcaagactctacctggtgtccttgccctcgatgacgcctagatccgctgctgctgctgctactcaggttctgccagctttgcgtgtcatcttgtttcggaccttggtgtagcactgcaaggctaaggtttactcctccgcacatggacttttggggataggcttgccaccgtgttttgctagatgagtcgtggaataagcttttacttcctcgctgctgtgggtgaagtgactggaattcggaaatttggaactaacaaaaccccccgtggatttgtatgatatgttttgttcgacagtttgcgtccc

SEQ ID NO: 23113 - DNA, 1667 bp, Zea mays
  Clone ID: LIB3594-015-D1_FLI
cacctttgccggagcatgtgaaccgtacggaatcgccggcctgagatggcggccacctccgcgttcgggttggcccccggagatggagcggttcctctgcgagaggctgcttgatgcggagcaccccatcgcggagcgcatccgggcgttcttctccctcggtccctccgcaacctccacggggatgcgccgcgccctcatctaagctgcaaaggatccttccaacttgcttgctcatggggctgcatttgcacttggacaaatgcaggatgctgaggctattcctgatctggtggcagttctcaaagatttttctctacatccaattgtcttccatgaggttgcttatgtgctaggtcagctgcaaaataaaaccgcttcagatgcacattctacggtcgtgaagaatgtctgtgagcatccaatggccaggcatgaagccgctgaagcccttggctcaatgcggaccaagagagcattgtgcttttggaggagtttgcaaaggatcctgagcccatagtacgagagatcggggaagtcatttgagtttctcttccttgagactcctcgtgtgcagccctatgatcacccaaatgcgaagtggctgaaggctccttggttaatgtgactgcaccaaccatgtatccactggtggcttgcctggtaggaaagattttgcttaccatctcagtggcaacagcggatgatgaaaaatggtgaagctgcagctcttgctgctgcaagcaaaaactgacacagtgaccgacagcaaaacagatcgtagctgcctcggagctaggagaagaatcctctgatcctttcggtttggatggttttgttgagcacaagcccaagaagcctgagagagcccgagaaagggccgatggcagctctgaacataggaagctgacagggagcaaagatatttctcaagtcgcagcgggaggccccttgtgaaacgcctggatatagctgctcggcgctacagagttccatgggcgcagactgccattgacatccttgcgaagcgcgcatactcccacgagacgaagatcagcagtggttgctcggctaaggtggtcagtcggcagatccgttggtgtctgtctgatccccgcttctcccccttggcaggcgggcgtagcatgatgatctggttgggttcaacaaggacggcgctcgcctgatccatccattgcctatgcctggcctgggactcccatggtccatggatttcggtgcttgtgatgaatgcggacgacgccagggtttcttctttgggcttcggcgagcgacacgggcgtgggagctgctgtttttgtgcttggatttccgtagaggagggttgacatgacatggccatcaccatccccatgcatgacctcatacatcagctgactgactggatgtgttggatgcatctgcatcccttacagttgcgttgcgatgccaagctaagcttgcaggtaccgtgcgcggtgtgcctgtacactgtgtggtgggtgggtgggtggtgcctgtactgtacaccgtatggtgtgatacagagaagggggttgacttgaagaaagtacagtagagaaagagagcaaatgttttttggttttgatgatgttttcttttccctcctcttctataagagcaactccattagttttctaaaaaac

SEQ ID NO: 23114 - DNA, 1262 bp, Zea mays
  Clone ID: LIB3594-016-B6_FLI
tcctggcgtacaggaggacgacccaacccaagcggcacacaagatccaagaggatgccgccgccgccgccgctcgtgctgctggcgaagccgctgttcccgaacttcgcggcggcgctggagggccggtaccgcctcgtcctggccggggacgccgacgcggccacggcggcggaggcccgggtcctgctcgtgccggggctcgtggccgtgacagccgagctcgtcgaccggctcccggcgctggagctcgtggccgcgacctccgtcgggctggaccacgtggacctccgtgcctgccgccgccgcgggctcgccgtcaccaacgccggcgcggccttctccgtcgactccgccgactacgccgtcggcctcgtcgtcgccgtgctgcgcagggtcgccgccgccgaggcgcatctccggcgcggcgggtgggctaccgatggcgagtacccgctcaccaccaaggtgagcggcaagcgggtggggatcgtggggctcggcagcatcggctcgctggtggcgcggcgcctggccgccatggggtgccgcgtcgcctaccactcccgcgcgccgaagccgtcgtgctcgtgcccctacgccttcttccccacggcgcgcgccctggccttggccagcgacgtgctggtgctgtcgtgcgcgctcacggaggagacgcggcgcgtggtgggccgcgaggtgctggaggcgctgggacagggcggcgtgctggtcaacgtcggccgcggcggcctggtcgacgagccggagctggtgcggtgcctgcgggagggcgtcatcggcggcgcggggctggacgtgttcgaggacgagcccgacgtgcccgcggagctcctcgccatggacaacgtcgtgctgtcgccccacagggccgtgctcacgccggagtccatgcgcgggttgctggatgtcgtcgcgggaaacctcgacgccttcttcgccggcaggccgctgctcagccccgtgtcgctgtgaattctgaaccacatgtaggatagatacgtcaagtcgtcaagttccattccatccaagaagcatcaaccagacaaccagtgtgtgagactcaccacgaacaatacggaagaacactcagaattggtagggtggttcgggtttcttactttctgttccaagttcatcatccaaaagccaaatttcaaaatgacaacagttcgtcttttatacttgctactggaaaaccaaaacgaattggaatatattacagccagttggctccaccat

SEQ ID NO: 23115 - DNA, 685 bp, Zea mays
  Clone ID: LIB3594-016-D11_FLI
ctaccgtccgagaccccaagcaccagcgcggcggcgggggcggcggcgaccatggctgtcggaaagaacaagaggatctccaagggaaagaagggtggcaagaaaaagaccgtcgaccctttctctaagaaggattggtatgacatcaaggcaccgtcggtgttcagtgtgcgcaacatcgggaagactctcgtatccaggacacagggtaccaggacagattgcatagctagagtgtcccctgaagatggcctagtggtgggttggatctttcttcatgagctgaggcggcagttgtggaactcaggcaacacgaatattgacgtcttaaacgggatagcttgggatgaaagaaggcacagattatttgtgacagggaaactgtggccaaagctatatgagatcaagctacgggcagtagatggtccagcagatggatctgtagaaaagctttgtccaaaagccagcttctatcgctgaagagtgtagaaccgcatatacactgggtgtgctaacatgggccttcatttgtttaaacgcacgatgcgaaggatgtggagatgtgagtacgtacatgtttgatctggtaccactgtcatatatatatacacccatgagttagtagatgtagctgtacattgttgtgacctgtatgaattttgatgatggctgtgttgtttgtgtt

SEQ ID NO: 23116 - DNA, 761 bp, Zea mays
  Clone ID: LIB3594-016-D9_FLI
ctcttatcttgatgaattacctagaacacatggcgagaataaccaatttgctgcatcacgagtgcccaatgactggggaattgagaggcatggagcagatgccagttcaagtcttaggtttgacatgccatcccaccaacagaccttggaagaacttgagatggagtttaaaaaagaagctacacaattagctagagctcgtgaccaagaggaggatgaagagaactataggcatcgagagtcgctgagagtgattagagaaaattacatggagagagtgattaccatgaggactgtgcatgcaaggaagtgggaagaatttcttgacacctttaaaagtcaacaacaagcacagccttcatacatacaaaccggatatctaggttttgagcagagaacggcacatatttcagctacacatcaaccaatggattcgaagagcacatatccgtatgcttctgatagctattcagccccaaaggctcatgcagcatatggtgagtttcaacatgagaggcatgatgatcttgggagggcctataggcgatattagctgtgaatagtggtgagttatttagttaattacccatttcagatttttgatgttaagccctgcagttctaatgtagctagagataatcatttcgttgtttgagcaattggtgtcctgctaggtaagctaattaaagagctgtgactgtcaatagctacaggcttgggaagcctccgtcttattagaaaatgttgaccaaatgttccct

SEQ ID NO: 23117 - DNA, 1344 bp, Zea mays
  Clone ID: LIB3594-016-E7_FLI
tcgctgatacgcccttgggccacgccttccttcgtatcccgtgcgcctgccctgccctcctgcagcgcccgtcgcctccctttccccttccctccctctccccgcgagccgccagaggcaatttctccctcgattcgaccccgattcgtccgcccgcgaccgggattccctccgccaagcgcggatctgaacgctgcgctccgtgtcgccgctcgaatccgccatgaaggggggcaaatccaatgcagcaggcaggagcttaggagaggagacgccgacggaagattgcggggcggacaccatgcagcggaagcttatggatttgccaggtcccagatggaagaagggcaaggactgcaagggctttgcagcactggcagcagccaatcccatgtccagcatagttgcggagctccaggcttcactgcgggactcggaagccgtggcgattctagccgcgcacgccagggacgcgatcctcgaggtcggcccacgccaagccgcgcttctgaacggcgctgccttcggcagggccgtggagggtgcaggtgcagagagccagtggttccagctgggccccgaggaagtgttcttcctttgccatgccctgaagtgcctcagggttgagtcgaataacaagacgcggattggtgcgcccgagctgtggggtctcttggcctccggctcagagcaattcccggagatgtacagggcgtatcaatacctcaggctgaagaactgggttgtaaggtcgggactgcagtacggggcagactttgttgcttaccgtcatcatccggcacttgtgcactcggagttcacggtggttgtggctccagaagggaaagcattcggcaccaggtgtgcccgcatggaggtctggtctgaagtactctgtgcgcttcgggcctctggaagtgtggccaagacgttacttgttcttaccatcagcaccaagagctgcgagctgggatccttggattgtttggagcagatgattgttcatgagaggacgatcacgagatggataccacagcagtgcagtgagcaacaagacaaaccatgtagagaagaaaccaacagggatggacaaagacaaaaatcttgcatagaagtatcaagcaacgaagaacaagagcatacaagtgggggtgtagtgtttagctattggcccgtagtgctaagctatacaattcttttcagtgtacttgtctacaagctgaaatcttaactgaagagcttcctatttctgtatgctcatgttgattagcgtgaataatgcaattctatggtacgaatttgttgtgattctcattgaagtttctacatatctttgataacatc

SEQ ID NO: 23118 - DNA, 1664 bp, Zea mays
  Clone ID: LIB3594-018-E7_FLI
tttgctcggaacgcacacacagcccggtccccgatctccgatcccctcgtcgatccaagatgcagatcttcgtcaagaccctcactggaaagactatcaccctcgaggtggagtcttctgacaccattgacaacgtcaaggccaagatccaggacaaggagggcattcccccggaccagcagcggctcatcttcgctggcaagcagctcgaggacgggcgcacacttgccgactacaacatccagaaggagagcaccctccaccttgttctccgcctcaggggaggcatgcagatcttcgtcaagaccctcactggaaagactatcaccctcgaggtggagtcttctgacaccatcgacaacgtcaaggccaagatccaggacaaggagggcatccctccggaccagcagcggctcatttttgctggcaagcagctcgaggacgggcgcacgctggccgactacaacattcagaaggagagcaccctccacttggtgctgcgtctcaggggtggcatgcagatcttcgtgaagacacttactggcaagacgatcacccttgaggtggagtcctcggacaccatcgacaatgtcaaggctaagatccaggacaaggaaggcattccaccagaccagcagcggctcatctttgctggcaagcagctggaggatggccgtacccttgcggattacaacatccagaaggagagcaccctccacttggtgctgcgtctcaggggcggcatgcagatcttcgtgaagacacttactggcaagacaatcacccttgaggtggagtcctcggacaccattgacaacgtcaaggccaagatccaggacaaggagggcatcccaccggaccaacagcgcctgatcttcgccggcaagcagctggaggatggtcgcactcttgcggattacaacatccagaaggagagcaccctccacctggtgctccgcctcaggggtggcatgcagatctttgtgaagacattgactggcaagaccatcaccttggaggtggagtcgtctgacacaatcgataatgtcaaagccaagatccaggacaaggagggcattccaccggaccagcagcgcctgatctttgctggcaagcagctggaggatggccgtaccctcgccgactacaacatccagaaggagagcaccctccacctggtgctccgcttgcgaggtggtatgcagatctttgtgaagaccttgactggcaagaccataaccctggaggttgagagctccgacaccatcgacaacgtgaaggcgaagatccaggacaaagagggcatccccccagaccagcagcgtctgatcttcgctggcaagcagctggaggatggccgcaccctagcagactacaacatccagaaggagagcactctccacctggtgctccgcctccgcggtggtcagtaagccatgggtcatttaagctgctgctgtacctgggtatctgcgtcgtctggtgccctctggtgtacctctatatggatgtcgtcgtctaataaacatctgtggtttgtgtgtcatgaatcgtggttgtggcttcgttggtttaatggacctgttgtgtcctctgtgtgttgtacccaaaactcttctgcagcagtatggctcgaatccttatgaagtttgatgtttgaactt

SEQ ID NO: 23119 - DNA, 934 bp, Zea mays
  Clone ID: LIB3594-019-A7_FLI
catttcgccccgcctcccgccccgcctccctacaccttcaccgctgtcgggggaggcggctcgccgtgacatcgaccccaccccacccccagcgtagcatcccgccactccatcgcactgtccatggaggatgacgagtacgaggaggggatggagatgggctacggcgggcatcaccagcacggcggcggccacgcggggtacggcgcggaggaggacgacgaggtggggtacggcggcgggggcggggaagagatggatgaggatgcggacggggacgctgagcagcaggaggatatcactcaggacgacgcctgggccgtcatatccgcctacttcgaggagaagggcctcgtgcgccagcagctcgattccttcgacgagttcatccagaacaccatgcaggagattgttgatgagtccgccgacatcgagatccgccccgagtcgcagcacaaccctggccgccaggccgaatttgccgaggttgttgccccactctgatcgactgttgcaagtgatgcctgaatggttcactatttgctgctgctagactgggcgattagcctggggtgctgggggagcttggtatgacatggtgtctcggtagcatttgccggctcatcactttgccatctgtgcacctgcttgattagatgtccacctacggttttggatctagtgcggaaacaggtgcccaattttatggctgaggatgaattttgcaccgacttaggtggacaggggattgtggaattgttcagttctactagtgtctagaatagcttctgctgaagttccctctgtgcgatatatggtagggaattcttgagtttgacaaggatagcataaaagattccagagtgagttttgtattgatcaggacatttgtagtgatcttcagttggtactagtaatatatggagttgatctt

SEQ ID NO: 23120 - DNA, 165 bp, Zea mays
  Clone ID: LIB3594-019-B2_FLI
aagcacgggaaagcagaggaagcggagcagagctttgtgggagcgtcaatggcaggaacttgggtgaagatggagcagaagggcgccggtccgggagcacggagctcccacgccatcacgctgctcgggggcacggcctactcgttcggcggcgagctcaccccg

SEQ ID NO: 23121 - DNA, 2650 bp, Zea mays
  Clone ID: LIB3594-019-D10_FLI
cgcttgtctctactctcggggaagcctgagctgattcctcctcgtgctctctcgtgggaagcatggcggatgggggtattgtggtagccatttgccaatatggtggagaattcacttctggccccaatggtaatttgacatacaaaggaggcgaggcgcatgctgttgatgttactcgtgacatgccacttgagaacttcaaggatgaggtgtccaaggtgttccatgttgatgtcactgacatgtcattgaagtacttccttccgaataattacagaacgctaatcacgatatcatgtgatcgagatttacaaaggatggttgattttactaccagtgccacacaagtggaagttttcttgattagtagagtagaaaacaggagtattgttacttactctggagcttctgcaagtaagcctggatctaatgctcctggtgataaaaggaaaaggccaccttccaaaaacaaggtatccaaaagtaacaagaagactccaactcccagtgctcctggcacttcagtccaacctagtgctaataatgtgaaacagccaagaccaatagctatcgaaaccaacgacaacagggtattccaactggaatttggaagtgatgttgcctttgccaccccagctggaggtgcttctactgcgccagacattctggatcagcaaaaccttgctcttgttgacactgcacatcgggaaccaattggccatttcaatgattcaggtgactcatatgttggttctgagatcactgtagatcctcagcatggactcgacaaccctgttatgttttgggatgacattattaaaggtgttggtcaagaatttgataatgtgaaggatttccgtgctcaattgtgcaaatatgccattgggaaaggatttgcgtaccggttcattaaaaatgaaactactcgtgtcacggtaaaatgtgttgcagagggctgcacgtggcgaatgcatgcatccgagtcatctcgtaacaagaaatttgtgatcaagaaaatgacagatgagcatacatgtggaggaggaaatggagaaggtcagcgtcgagcgacaagacaatggctgaccactgttattaaggagaagctgcatgataatccgatgttgaaaccaaaggaccttgtcaaggaaatatatgaacaatatggagttacactgacctattcacaggtctggcgaggtaaagaagtagcacagaaggaactgtatcatgctatcagggagacttacagccatttgccttggtattgtgagaggcttacagagtccaacccagggagtattgctttgttatctccaatggtggatacaaaattccgtcgcttttttgttgcatttcatgcttctttgcatggttttgcaaatgggtgcaggcccctattgtttcttgacaaggttccactgaaagcaacaaatgagtacaagttgctggtggccgctgcagtcgatgctgacgatgctgtctttccagtggcatttagcgtggtcgaggatgaaaactatgaaagttgggtttggttcttaatgcagctgaaattccctgtccaaaatcacagctacgcttacaatgccatgacattcttgtccagtggacagaagggtctggatgctgccgtttctcaagtttttgaagatagccatcatgccttctgtttgcatcatatcatggaggaattcaaaggagagctgagaaagggaccatggtcacaacaaataagagaggggatgattgaggattttactcgcgccgctcaagcatgtagtattgaggattttaacgcgtcaatcgagagcattaggaacatatccactgaagctgctgagtggatcatagcaagcaagcctgagcattggtccgacgccattttcagaggctgtcgatacgaccatttctcctcaaacattgttgatgccttcaataactggataccaaccaagaaggagggttcaattgtgctgatggttgactcactgagaacaaaaataatggagataatagaaacaaggcgtgaggcttgcaaggcgtggtcaggacctttgacgccttccatggaattcaaagcacaggaggaggtgacgaaggctggtaaaatgaccgttctgtgctcttccgaaaccgtgtttgaagtgcgaggcaatgcgatctttgtcgttaatctcgcaaattgggaatgcacctgccggaggtggcagctttctggcctcccgtgcctgcatgctgtcgctgtgttcaaccggatcgggcgatctttctacgactactgctccaagtttttcagaatagagagctaccatatgacttactcaggaacgatcttcccaatacctgatatggacactgttgattttagtgccggtgcaaatctaatcccgcctcccaagccacggacgtcggataaaccaagaaggaagcggtttaaccccaacaagatccccacggtaatacggctctgcagcaggtgcaagcaagcaggccacaacaaggcaacctgtgaagctattttgtagacaaaaaagtagctgctgcatctggggtttgtattttatagcaggtaccctttttacgttttaactttgacttctcgtgctatatatatatatttttctgaagtaaggtaatattttgaatc

SEQ ID NO: 23122 - DNA, 2523 bp, Zea mays
  Clone ID: LIB3594-019-E1_FLI
ggagaaaaaaaaaaacaaaagagataacgcacggccgcccgcagtgcttgaaaccagcccgctcctccattccaacgtctccacccactgctcccaatggcgacgccgttcccgccggaggccgacgagggggaggcgcgggagctcctctacgaggcgtacaacgagctgcacgcgctggcgtccgagctgggcggcgcagcggcggcgccggcggtcgtggtcgtcggccaccagacggacggcaagagcgcgctggtcgaggcgctcatggggttccagttcaaccacgtcggcggtggcaccaagacgcggcgccccgtcgcgctccacctccgcttcaacccgcgctgcgacgagccccagtgccgcctcctctctgcaaccggcgatgccgacgaacatgacgaagccggggttgccgcccgccccatgccgctcgccgacatccaggcatatattgaagctgaaaacttgaggttggagaatgacccatgccagttttcagagaaggaaatcataattaaggtagaatacaagcattcccccaatctcaccattattgacactccaggcctcatccttccagctcctggccgtaaaaacagagttttgcagagccaggcttctgctgttgagagccttgttcgtgctaaaatccagcataaagagaccattatactgtgccttgaagattgtagtgattggagtaatgcaactacacggagagtagtgatgcaggtcgatcctgatcttgcaaggactgttctagtctccacaaaactggacactaaaataccacaatttgcccgtccctctgatgtggaagtgtttcttcacccaccaaattgtgtgctagatgtttccttattgggagattctccctttttcacatcagtaccttctggtagagttggctcttgccatgaagctgtgttcaggtcaaatggagagtttaagaaggccatcttatcaagagagttggaagatattgcatctattgaagacaagttaggaaggtcacttacaaccatggagaaagatagaattggagtgggtaacttaagattatatttggaagagttgctgcagaagaggtacgttaagagtgttccattaatcattccacttcttgagaagcaacatcgaaatacaacaagtaaattgcgtgaaatcagtcatgaactcagtgatctggacgaagccaaactgaaggagaaagctcagctattccatgacacatttttgaccaagttatctttgctattgaaaggcatggtggtggcacctcctgataaatttggagaaactttagtcaacgagaggattaatggaggaacatttactggaagtgagaatttccagctcccgaacaagatgatgccaaatggtggcatgcgtctttatggtggtgcacaataccatcgggcaatggctgaatttcgtctggtagttggtagtaccaggtgccctccaataactagggatgaaattgttaatgcttgtggtgttgaggatattcatgatggtacaaactactccaggactgcttgtgtaattgccgtggcaaaagcacgtgacacgtttgagccattccttgatcagttgggttttaggcttttgtacatactgaagaggctgatcccaatctctgtttatctgttggagaaagacggtgagcactttaatagccatgaagtgcttataaggcgtgtccaggaagcattcaagaggtttgttgaatccactgagcaatcatgtcgtcaaaggtgtatggaagatttggagagtaccactcgttatgtcacttggtcccttcacaacaagaaccgtgctggattgagacacttcctcgattcatttgttgcaccggagcaactatcagtaaatacactgaacgtgcagttttctgggttgaatgataacaaacaggataaggcaaagggtgactcgaagtcaaaccattctccagacacaaattcgtccactgctatgccagagacaaggctggttgacctattggatagcacactctggaacagacgcctggttccctcatctgaaaggcttgtttatgctctggttcaccagatttttcatggaatcaaagagcattttcttgtcaccactgaactgaagttcaattgctttctcctcatgccgattgttgacaaactaccagcacttctaagacaagaccttgagtcagcttttgaagaggaacttgatagcatccttgatgtcactcaactgcgccagtcacttgggcagaagaagcgcgagctggagatcgaactgaagcggatcaagcgcttaaaggaaaagtttggggagataaataagaagctcaattctcttcaggttaggcagtaggccaggctcaaaaacacttagcagtagcttggtaggctaggaactccaggtagagtgtttctatgctgtaataaaatcattggtcacctagagtgacttcttgttgtatcctttcagttgtaaatatcagtgtcataaacgttaaacggt

SEQ ID NO: 23123 - DNA, 1884 bp, Zea mays
  Clone ID: LIB3594-021-F11_FLI
agaaagcagcagcaaaggtctagccggctgcgtggcctaggcgcctaactatatagttaaggtctatctttgagcagttaacgtgcaggaggaataacacgatagccatggacgtgtacatctaccaggcgctcctcctctcggtccttgctgtggcactgctgcagctggtgaagatggccctcaagccgaggccacggctgccgccagggccttggaagctgcccgtcatcggcagcatgcaccacctcgtgaacgtgcttccacaccgggcgctgcgggatctggcggacgtccacggcccgctcatgatgctgcagctcggccagacgccgctcgtcgtcgcctcttccaaggagacggcgcgcgccgtgctcaagacgcacgacaccaacttcgccacacgccccaagctcctcgccggcgagatcgtcggctatgagtgggtcgacatcctctttgccccctccggcgactactggcgcaagctccgccagctctgcgccgccgagatcctgagccccaagcgcgtgctctcgtttcgtcacatccgggaggaggaggtgatgctgcgggtggaggagatccgcgcggcgggcccgtcgacgccggtgaacctgagcgtgatgttccacagcatcacaaacagcgtcgtgtcgcgggccgcattcgggaagaagcggaagaacgcggcggagttcctggcggctaccaaggccgtcgtcggcctgtcgagcggcttcaacatcccggacttgttcccggcgtggaccacagtcctggccaagctcaccggcatgacgcgcagcctcaaggagatccacaagacggtggacaccatcctcgaggaaattatcgaggagcgcaagcgcatccgcgacgaaaagatcatgggcggcgccgccgccgaggacgtcgacgagaacctcgtcgacgtactcatcggcctgcaggagaaaggcggcttcggcttccaacttaccaacagcatcatcaaggccatcatactggacatgttcgcgggcgggacggggacgtcggggtcggccatggagtgggggatgtcggagctgatgcggaacccaccagtgatgaagaagatgcaggcgctgatcagggaggcgttccgtgggaagacggtggtgacagagggcgacctacaggcgagcaacctccagtacatgaagctggtgatcaaagaggccctgcggctgcatccgccggcaccgctgctggtgccccgggagagcatcgaggagtgcgagctggacgggtacacgattccagccaagtcacgggtcatcatcaacgcgtgggccatcggccgtgaccccaagtactggaatgacgccgacgagttcaagccggagcggttcgaggacggctcccgagacttcacgggcagcagctacgagttcttgcccttcggctccggccgaaggatgtgccccgacttcaactacggcctcgccagcatggagctcgcctttgtcggcctgctctaccacttcgactcgtcgctgcccgatggcgtcaaggaggtcaacatgggggaggtgcctggactcggcgtctgccgccgcacgccactaatgctttgcgcaaccccgttcgtcccggtccccgcctagctagccaacgtacatcgtcatgccagccgcgagctgagggacctattgtatctctgtctcagtatctctatgtgcttgctggctaaataaacacgtcatctgtacgtctcgttatgggtgctgcccattgtagtgtgctgtgcgtacgtgtagtagtacagtgaagagtgtactataatcatgtacctaaagtttcaacttccaaagtaaagtgcgtcccaagggtaataaatctatacttacactctggacc

SEQ ID NO: 23124 - DNA, 879 bp, Zea mays
  Clone ID: LIB3594-021-F6_FLI
gctagcgccggcgcctccatttcgttttcctcactctctcctccagctcagggtccggcggcgaagggaaggcaagatgtacaccgcgaggaagaagatccagaaggagaagggtcttgagccctccgagttcgaggactccgttgcccaggctttctttgatctggagaacgggaaccaggagctcaagagcgacctcaaggacctgtacatcaacaatgctatccagatggatgttaccgggagtaggaaggctgttgtcattcacgtcccataccgcctgcgcaaggccttcaggaagatccatgtcagactcgtcagggagctggagaagaaattcagcggcaaggatgtggtaattgttgctacacggaggattgtgaggccacccaagaagggttcagctgttctgcgccctcgcaccaggactctgactgctgttcacgatggcatcttggaggatgttgtctacccagctgagattgtggggaagcgtgtcagataccgtctggatggttccaagattatcaagattttcttggacccaaaggagaggaacaacactgaatacaagctggagacctgcactgcggtctaccgcaggctgtgtgggaaagatgtggtctttgagtaccctatgaccgaaaatgcataaatatgatgccctctggatatctccactctatttcgttgattctgaatgttatgttgggtctccctatgtacttcaaaaaacatagttttgatgctaaagttgcctaggaatttggtacggtgaagtggcagtggacgtgaacaatgttaagttttgagcatttaaattaaacctttgccctgataacgttgcgagttatttaatttcttgctttgttcgcggct

SEQ ID NO: 23125 - DNA, 520 bp, Zea mays
  Clone ID: LIB3594-021-G5_FLI
gccgtctcccttttgcgtgagcaaagaaagagagcgagaagcagtcgccatgtctggcatcatccacaagatcgaggagaagctccacatggggggcgaccacaagaataaggaggaggagcaccacaagaaggccgaggagcaccacaagaaggaggagggggagcaccacaagaaggacggcggggagcacaaggaaggcatcgtggagaagatcaaggacaagatcaccggcgagcacggcgacaagtccggcgaccacaaggagaagaaggacaagaagaagaaggataagaagaagcacggcgagggccacgaccacgacggcggccacagtagcagcagcagcgacagcgactgagatctggtgtcgcagcacaggtgcaacacatgtatgcttgctggatggaggattcataccagctgatgctgatgtagtgtttcactggtgtcatgcatgtatcgtgctattataatcaaaaagaaaaaagaaataacagtcagggatggtttgtttgcc

SEQ ID NO: 23126 - DNA, 1364 bp, Zea mays
  Clone ID: LIB3594-021-H7_FLI
ctacctctccaccccctcctcgtgccgtccacgcaccaccggcgcgccgcgctgccatggccatgaggccacgcgccgcgctcgccctctccctggcagccggcgtcccgctggtcctcctcctcctcctcctcgcgcccggcgcgcgcgccgacgacggcagcggcgggtgcggggcggcgggcggcggcgaggcggcgccgggcgaccgcgcgcgggccagggcgctgaagatcgcggccttcttctccatcctcgtgtgcggggcgctgggctgctgcctgcccgtgctggggcggcgcgtgccggcgctgcgccccgacagggacgtgttcttcctcatcaaggcgttcgcggcgggggtcatcctggccacggggttcatccacatcctccccgacgcgttcgagaagctcacgtccgattgcctctccggcgggccgtggcaggacttccccttcgcggggctcggcgccatggtcggcgccatcggcacgctcgtcgtcgacaccgtcgccacgggctacttcacgcgcgtccacttcaaggacagcgccgccgccgccgtgggcgccgccgccgtcggcgacgaggagaagcagcagcagcaggcggcgtcggcgccgcacgtcgacgacggagcagacggcgacggccacggccacggcgggcacgtgcacatgcacacgcacgcgacgcacgggcactcgcacggcgcctcggcgctcgtggccgccgtcggcggcgccgagggcgacaaggagcacgcgctgcgccaccgtgtcatcgctcaggttcttgagcttgggattgtggtgcactcggtgatcatcggcatctccctcggcgcgtctcaagaccccagcaccatcaagcctcttgtggtcgccctcagcttccaccaaatgttcgagggcatgggtctaggcggctgcatcgttcaggccaagttcaagctgcggtcgatcgtgacgatggtgctcttcttctgcctgactacgccggtgggcatcgtggtgggcgtcgggatctcgtcggtgtacgacgaggacagccccacggcgctggtcgtggagggcgtgctcaactcggtggcggcggggatcctggtgtacatggcgctggtggacctgctcgccgaggacttcatgaaccccagggtacagagccggggcaagctgcagctcggcatcaacgcctccatgctcgtcggcgccggcctcatgtccatgctggccaagtgggcctagtttactagccacttttttgctctgtgccctctcgattccagtttttttagttgagttgctgtaaaaatactactgttatggagaaacgaacgaatacaacaactcttttttctg

SEQ ID NO: 23127 - DNA, 1680 bp, Zea mays
  Clone ID: LIB3594-022-A10_FLI
ctcttgtctgcggccaacatacagctaactggcgagccgtggacgctcggccagctctgctggccgactaaggagggcgtcgtgggcctcaccgccggcgagtgcgtccctgcgggtgggcacactgccgtcggttgtccagcacagctacaagttgaggagctctgcagtaaaggaagtgtgtagtcaccatggtccatttcaagaataggtatatggtggtggagatctttatagatgcaggtagaggtgaacaggaccctataatcctcacccaatttaatataacaaaagttataaaagacagcattcagctcaactttggtgagtgtggcctagctggatctcttggatcattgcaagttaagtatgtcaatcctgtaacgaagctctgcattgtccgcgtgtctcgcgaagaccaccagaaagtttgggctgctatgacgatggtgcggtgcattgggaagatccccgtttcgttcaacttgctcgacatgagtggtaagtggctcagactctggatgatggtacagaacaatgatattgcattgcctttttacgtggttgttttcaatcaaactggcgcttgctttggtgcacggcgaacattccaaaaacaacatatttctgtagttaattctgtcttcttgctgaagttgtagtattttgatagatgagactttgatttagaaaggattcatatatgcccatctctcataacggtcaaagttaacgagtgcgaataatcttcgtgtggggcgttttgctgtttagagtaatttactgaacttccggtgcaacatttctgccatctatgatggaggtgcgtaggagctactgctatagtagaaagctatagatttgtcactcggattcattttgattccctaatattttttagctttctggaattagatttctccttagaacacaaaacatagttgtgccagttattttcctgcttaaagtattgctgcctacatgtcaatttggacggtcagcttcatattctaaacacatgtcaatttggacggtcagcttcatattctatacaatgtagcgcttttgacatgttggatgttgcaataataatatgtagtccttgaccttacgacatgtgctgctcttttttctttatgtctgaactggctacgactccacttttttttctatctctttaggaagcatcagggcttgcaagaaagctgcattggagtgcgatgaagcgaaatttgagcaatacaagctggttgcaggtgattgtatcacggcagagatcacccagtctgtagagaagtgctttgagaagatcagaggactagagagctaagcagaagaattgacatcatgtccacccacactcggatcctaaaacctgctgaccctgcaccacatccgtgatcacgtcacaccacaagttgtgtgtccagcgcccaccacagcaacggcctcttgctgccagcagcctccgtgcctccagcagctctcctctccaaggaaaagtctgaagtccgcaaccaaacaagtgttctgcagctgctctttgccgttggttgaagtctgcaaccaaacaagtgttatgcagctgctctttgccgttggttggagttcttggctccacactttcagaaagaattcatgtatacataaaatttattatatagagagtttgcttcgtat

SEQ ID NO: 23128 - DNA, 947 bp, Zea mays
  Clone ID: LIB3594-022-D4_FLI
cagaaggagagcaccctccacttggtgctgcgtctcaggggcggcatgcagatcttcgtgaagacacttactggcaagacaatcacccttgaggtggagtcctcggacaccattgacaacgtcaaggccaagatccaggacaaggagggcatcccaccggaccaacagcgcctgatcttcgccggcaagcagctggaggatggtcgcactcttgcggattacaacatccagaaggagagcaccctccacctggtgctccgcctcaggggtggcatgcagatctttgtgaagacattgactggcaagaccatcaccttggaggtggagtcgtctgacacaatcgataatgtcaaagccaagatccaggacaaggagggcattccaccggaccagcagcgcctgatctttgctggcaagcagctggaggatggccgtaccctcgccgactacaacatccagaaggagagcaccctccacctggtgctccgcttgcgaggtggtatgcagatctttgtgaagaccttgactggcaagaccataaccctggaggttgagagctccgacaccatcgacaacgtgaaggcgaagatccaggacaaagagggcatccccccagaccagcagcgtctgatcttcgctggcaagcagctggaggatggccgcaccctagcagactacaacatccagaaggagagcactctccacctggtgctccgcctccgcggtggtcagtaagccatgggtcatttaagctgctgctgtacctgggtatctgcgtcgtctggtgccctctggtgtacctctatatggatgtcgtcgtctaataaacatctgtggtttgtgtgtcatgaatcgtggttgtggcttcgttggtttaatggacctgttgtgtcctctgtgtgttgtacccaaaactcttctgcagcagtatggctcgaatccttatg

SEQ ID NO: 23129 - DNA, 597 bp, Zea mays
  Clone ID: LIB3594-022-E8_FLI
cttgtttcattgattcttgaagagatcgagcttcttttgcaccacaaggtcgaggatgtcttgcaactgcggatcaagctgcggctgcggctcaagctgcaagtgcggcaagaagtaccctgacctggaggagacgagcaccgccgcgcaggccaccgtcgtcctcggcgtggccccggagaagaaggccgcgcccgagttcgtcgaggccgcggcggagtccggcgaggccgcccacggctgcagctgcggtggcaactgcaagtgcgacccctgcaactgctgatcacatcgatcgacgaccatggatatgattattatctatctagcttgtggtggtggttgaacaataataagcgaggccgagctggctgccatacataggtattgtgtggtgtgtgtgagagagagagaaacagagttcttcagtttgctatctctctctgcatgtttggcgtcagtctttgtgctcatgtacgtacgtgtgtctacctgcatgttggttgatccgattgcatctgctgtaaccatatattaattggtccacgatgatatgatttgatactatatatatactaaaaccggacttcttattat

SEQ ID NO: 23130 - DNA, 343 bp, Zea mays
  Clone ID: LIB3594-022-G4_FLI
tctccaccaaaccaaccaaccatgcgtccgtcgtcgcgttacccgccgcaacccgcgctactcgctctcgctctcgccctcgccctcgcggcggcggccccggagctgagacccctcgccgccgccgtcgccgtcaccgtcacgccgccgtcggagcggacggacgaggaggtgcggcggctgtacgaggagtggagatcggagaacgacgcggggccgaggcgtggcgccaccggcggcagcctcggcctgggcgacgccgacgccggcgaggacgacgacgcgcggcggctggaggtgttccgcgacaacctccgctacatcgacgcgcacaacgcggagg

SEQ ID NO: 23131 - DNA, 792 bp, Zea mays
  Clone ID: LIB3594-023-A2_FLI
gcaaggcgaacgcgagagccgaccgtctcagtgtgcgcgcgagaaagaggaggaggaagaagaagaatgtatccggccaagcccaccgtcgccaccgccagcgagccggtaaccgggatggcggcgccgccggtgaccggcatccccatcagcagccccggccccgccgtcgcggccagccagtggtcctcgggcctctgcgcctgcttcgacgactgcggcctctgctgcatgacgtgctggtgcccgtgcgtgacgttcgggcggatcgcggaggtcgtggaccgcggcgcgacgtcgtgcgcggctgcgggggccatctacacgctgctggcctgcttcacggggttccagtgccactggatctactcctgcacgtaccgctccaagatgcgcgcgcagctggggctccccgacgtcggctgctgcgactgctgcgtccacttctgctgcgagccgtgcgcgctctgccagcagtacagggagctcagggcccgcggcttggaccccgcgctcggctgggacgtcaacgcccagaaggcggccaataataacgccggcgccggcatgacgatgtacccgccgacggcgcaggggatgggccgctagttacgctaccagctccatctgtaaactcatatgttgttgtgttgtgtcagccagatcatcgcgtacgtacgggtatacttgtgatatgtaatgtcagggaccggtatgcccatgtgtttcaagatatttcatgttcaagtcctttctgtccgctcactatccgaatgaaaaccattttccttg

SEQ ID NO: 23132 - DNA, 1639 bp, Zea mays
  Clone ID: LIB3594-023-C6_FLI
cgcctctagtcggcggggccaagaggtggaaaagggcaggatgaagtccggcggaggtgacggcgaggggaaaagtaaggaggaccgcggccacgggccggagaagcataaagtgacgctcccaaccgtttccaactacactattcatgacaccgaggacacccaaaatgccaagcaagacgatacaagtaatgaccagcaggggagcaagcccctgtgcgacttctcaaatttcagagcaaacgtgtgcgagatgcgtggtgacgttagagttcacccaaatgctgcatcaatcatgttcatggagcctgggcattcgcagagagatgagctgtggaaaatcaagccgtaccctcggaaaggggacgagttctgccttagccatatcacggagctgacggtgaaatcaagcaaagtggcccccgagtgcagcaagtaccatgacgtgcctgctgtgatcttttccctgacaggctacactggaaatctgttccacgacttcactgacgtgatggtccctcttttcacgacagcaagcgagttcaacggagaagtccagttccttataacggacatggcgctctggtggacaatcaagtaccataccgttcttgagaaactgtccaagtaccctgtgatcgatttcagcaaggacggcgaggtgcactgcttcaagcatgtcatcgtcggcctgcatgcctacatggagttcacgatagactcgtccaaggctccgcacaactactcgatggttgactttaacagattcatgcgcggcgcttactcgctgggcagggacagtgtcaccgtgctgggagagtaccctaaggtgaagcctaggctgctcatcatcaagaggcaccgcacaaggatgttcctcaacctggacgagatcattgcaatggctgaggagctcggctttgaggtggtcatcgacgaggccaacgtgagctctgatatctccaagttcgcggcgctggtgaacacggtggacgttatgatgggcgtccatggagctgggctcacaaactgcgtgttcttgccgcagaacgccacgctgatccagattgtgccgtggggagggttggaatgggtgtcccgcaccgacttcggcaaccccgcggagctgatggggctgcactacaagcagtacagcatcggcgtgcacgagagcagcctcacggagcagtacccgagcgaccatgagatcttcaagaaccccatttctttccacaagaaagggtttgacttcatcaggcagaccttcatggacaagcagaacgtgaagctggactgcaagaggttcaggcctattctgttggaggcactggacaacctcaacgcgtaagaccgtaaaagcttgtgcttgtgctcaattggtactgggcatggcaatagagattccttcctgtatacaattccttctttttttttttttacaattcgttccttttagtaaaatctattgttcgttctgtccctccctgagaaggttcgcattgtggaaaatttaggagaaattggcttataaaagttgttgtatacacactgtataaattgctgccactgcatagctttcgttctaatcaatcatacatagctcccgttccaggaaaaaaaatagtataaattcttccgg

SEQ ID NO: 23133 - DNA, 2231 bp, Zea mays
  Clone ID: LIB3594-024-A4_FLI
ctcaactggtacaccagtcccgaggaggcggacgacagcgccgctaccttcgcctctgacgtctatagactgggtgtgctcttgttcgagctgttctgcacattcgaaacgatggaggacaagatgcgggcaatggcgaatctgaggcaccgggtgttgccgccacagttgctgctcaaatggcccaaggaagcatctttctgccagttgctaatgcaccctgtgccagaaaccagaccgaagatgagtgaggtgctgcagagtgaattccttaatcagtcaaggaatagcctggaagaacgtgaagcggcacttaggttacgcgaagagatagaagaacaagaattattgctggattttcttcagcagttgcagaaaagaaagcaagatatggcagacagtttgcaggacactgttgcttttctctcttctgacatcaatgaggtactccaccagcagtctgcacttggccactgtgtgaacttttcaccagatttggataaagaggtgtgctctggaactgttgaagatcagagtgattgtggatccaggaagcgttttagacctgagctgcaaggcgttgatatggaggaaaataatcgtagtgtggaagaatgttcaagaacagtgccgtcctctgagttaatccaggaaaatgttctgtcaaaaagctccaggttgatgaagaacttaaaaaaacttgaaacagcttattttctaacaaggtccaagttggcgaagcaagttggcaaccagataaatagttgtaatcgagttgttaagaggactactggttcagctgttgggacagaagcaagttcaatagatgatttttctttggaaaggcaatatggtagaaggcaaagaggttgggtgaactcttttcttgagggattgtgcaagtacttgtcattcagtaagttgaaagttcgggcagaattgaagcattgtgattcactgaactcatcaaacttagtatgctccgtagggtttgaccgagatagagagttttttgcaactgctggtgtaaataagaagataaaagtgtttgagtataatatgattgtaaatgaacaccgtgatattcactatcctgtggtagagatgtctaatagatcaaaactgagttgtatttcctggaacagttatatgaagagccatatagcatctagtgattttgagggtatagtgcaggtttgggatgttactaggagtcaagtttttgttgagatgagggagcatgagcgacgtgtgtggtcggtggacttctcaattgtggacccaacaaaattggtcagtgggagtgatgatggatctgtgaagctgtgggatatgaatcaggcaattttattcttgcacctactgctgggagtattggcactattaaaacaagggcaaatgtgtgttctgtgcaatttcaacctgatactgctcgctccattgccatcggctctgcagaccacaaaatttactgctatgatctacgtcacatacgagctccttattgtacactagttgggcacacaaagactgtaagctatgttaagtatctggatgcatcgacaatagtatctgcatctactgacaactcattgaagctttgggacttatcgatgagtccaggaaggataattgacagtccagttcaaacatttaaggggcatacaaatacaaagaacttcgttggcctttccatatctgatggttacattgctactggctctgaaacaaatgaggtttttgtgtaccacaaagaatttcccatgccagtgttggcctataaattcagcgtgacggaccctatatcagggcaggagattgatgaccagtcacagttcatttcatgcgtctgttggagagggcagtcttcaaccctactttctgcaaactccagcggcaacattaagatcttagaaatggactgaggattggagttaggcatctgctgagtctcagctataaatggactgacttcttaccaagttttgtgcgtgtgtggcttcaaaatttgtggcgacggagttgccaacggtgcgtggtgcagagttgggagaggtaggagtagctgtaacaggtttagcatggtttgatatgattaaattagcgtggtagcaaaagtagcataaataggaaacaaaattgaggtgtggggtagtactgcaaggaaaggttttgtacatcattggttcgaggtatacttgtacagccaatcaatccagtttttacttagc

SEQ ID NO: 23134 - DNA, 406 bp, Zea mays
  Clone ID: LIB3594-024-B10_FLI
catttccgttgcccgcgcgcgcacacactgcaggcctcacttcttggtggcactggcagtggcactggcggcaatgccggactcggatgtccccagcccagcatcgtcgccgcttggcagcgtgcagaagattgccaggggtcggaaaagcaggcgcggcggcgggcggagcccggcgtaccgcggcgtgcggatgcgggcgtgggggaagtgggtgtccgagatccgcgagccgcgcaagaagtcccgcatctggctcggcaccttcccgacggccgagatggcggcgcgcgcccacgacgccgccgcgctagtggtcaagggccgcggcgcggtgctcaacttccctgagatggcggcgtccctgccgcgcccggcttccgccgcgccgcgcgacgtgcaggcc

SEQ ID NO: 23135 - DNA, 502 bp, Zea mays
  Clone ID: LIB3594-024-E11_FLI
acaactagaagcatagaagcacgaagcaagcagacaactagaagcactaagcattaagcaatcagccaagcagacaactagacaagcagacgtgcggccaagcaggaagcagcggcaggcggcagccgtgcggccatgcgggtcggcgcctcggcgggaccaagcggcaagcagcccgcagccggccgccggcgggacaagacaaccggtcaaccggacaagcagatcagcggagcaccggagctggcggctggagcgtgacgagtccgaggctccgagcggctggaggcctggaggctggagcaccggcaggagcggcctgcggccgagcaggcagctgtgcgggacgctggcagtgcggctgtgcggaacgccgtgacgaaccctaatctctattctattagtgggccggcccaaggtattgcccaggcaatactgggccatactgggccctccgcccctgctctgctccaaattatgaaattattatagatcatttttt

SEQ ID NO: 23136 - DNA, 1015 bp, Zea mays
  Clone ID: LIB3594-024-F8_FLI
atatctgcaacgtcaaatcaacacaggctgttgtttgcttcttttggtaaaggctttagctgcggcagatccaccggcggcgccccgagaatcgaagatgccggtgaaggtgttcggatcgccgacgtcggcggaggtcgcccgcgtcctggcctgcctgttcgagaaggacgtcgagttccagctcatccgcgtcgactccttccgcggcaccaagcgcctgccccagtacctcaagctccagccgcacggcgaggcgctcaccttcgaggacggcaacgtcaccctcgtcgagtcgaggaagatcctgcgccacatcgccgacaagtacaagaaccaggggtacagggacctgttcggcccgggcgcgctggagcgggcctccatcgagcagtggctgcagacggaggcgcagagcttcgacgtccccagcgccgacatggtctacagcctcgcctacctgccgcccgacatgcagctcgacggcaggggcgtcggcggcctcccggcggcgacggggacgatgaacccggcgcaccggcagaaggtggaggagatgctgcagctgttcgagaagagccgcaggcagctgggcaagctgctggacatctacgagcagcgccttggcgaggaggccttcctggccggcggcaagttcacgctcgccgacctgtcccacctgcccaacgccgaccgcctcgccgccgacccgcggtccgcgcgcctcatcgagtcgcgcaggaacgtcagcaagtggtgggacaccgtctcccgccgcgactcctgggtcagggtcaaggagttgcagcgcccgccgtccgcggaggcgcccttctgatctcgatcgatcgcaaattaaggcggtggcccttgctcaagcctacgtgttcggtttctgcataatttttaataaacgccactggccccctacgtcattggccattgttcattgtgtaataaatcgttcaagagcatatgatgcttcttgccgtgagattaaactcgtcgttgcctc

SEQ ID NO: 23137 - DNA, 948 bp, Zea mays
  Clone ID: LIB3594-025-B9_FLI
cgcgctccagctcaccatttctcctctcccttcccttccctaagcatctcagcgaatccaatcgatccgaaggcgatggaccagcagggtgcgggcggggacgtggaggtgccggcggggctggggctgacggcggcggagtacgagcagctgcgtccgacggtggacgcgcaccaccgctacgccgtgggggagggccaatgctcctcgctgctggcgcagcgcatccacgcgccgccggccgccgtctgggccatcgtccgccgcttcgactgcccgcaggtgtacaagcacttcatccgcagctgcgcggtccggccggacccggacgccggcgacgccctccgccccggccgcctccgcgaggtgtgcgtcatctcgggcctccccgccagcaccagcaccgagcgcctggaccacctcgacgacgccgccagggtgttcggcttctccatcaccgggggcgagcaccgcctccggaactaccgctccgtcaccaccgtctccgagctcgcgggccccgggatctgcaccgtcgtgctcgagtcctacgccgtcgacgtccccgacggcaacaccgaggacgacacccgcctcttcgccgacaccgtcatcaggctcaacctccagaagctcaagtccgtcgccgaggccagcacctccagttccgcacccccgccgccgtcggagtagcgggcggccggaatcggcaaggggagaaacgcagcagcaagttttgggcgtttttctgttatttcacttctctgggaaatggtctctctgaattaaatctgatcgtggatggatttggactggacgagaggaggagaggaggggtcgggtcagcttgaatcaggtgtcgcgttgccagggtggcgacctgtaataacctctccttcatctcctagattcattcctttcatctcctagattcattcctttcatctt

SEQ ID NO: 23138 - DNA, 1679 bp, Zea mays
  Clone ID: LIB3594-025-F10_FLI
cttgctttttgaaacagttttgtcgtgatagtttttttaaaaaaactaatacttcttatcaaccatttaattattggagacactttgtttctaatatagtaacaaaacatagattctaccacagcactactaagaaaggtgccacctagatctaccacttaatccttgttggctatagtggtggggacttgctagaattccggtgcctggattttaggttcctttcaggcaacagttattccacagattttatagtaaaattgcaacattagttcattgcaatttatgcagtcataatctgtgattttcggttccgagaattaaaagaactgttagacaaaaccacaaccctgacaaattctgacttgtgttggcacaaagacaattaacaattgttcctagtcagacaaggacaaaattgatatattgcgagacaaatacaaatagtaaatcacaaaagtaacaatttgcttgtactagttagttgtacaagaatattgcctaaaattatcttaaaattcaggcatcggcaatataaaaaaaaactcggccggtaggagaaagaccgcccccacaatattatatattaagaagaagctcaatcggagccgcgaccgagaaaggtcacgaaagtttaatctcagcctgaaattcgctcccactggtattcgaaatcaggacctaatgagtgttactcagaccacctaaccaactcagttagagaccctttcgcgacatctgcaatatagaagtggaaaaataaaaattagctaatcttaatggtgcacacagtattaggcctcagaaacatatatacagatattcagttaaggtaatagaaactatgccagctttctggtataaagagctacacatatcaataatcctttagcaaattgattatgaactacatgtgtagatagagtgctgacaatgggtgaccatgtggatttcgctggcatataagtctagaaaccccctacctgcttttgtgcttattatggcattgtttgtttatgagaggaaaccttgttcaacaattaggttaatgctgctcttgtaccaatattcatgcatacatttagcatgcaatcaacattttctgtggtcctgtccaggtaaggctgcattgatcactgtcgggggacttgcagctggtgcaactgtcggatctgcagtggaaaatttcctgcaggttgatatcgtgccctttctaggcatccactcccccgccgtcgttgtcagtgaatttattctgttctcccagttgttggtatcactgtttgttaggtaggatctgaaatcaagctgtcatcctgatcatggcatgtaagtaactgaaatggttcgtgttcaaacttcaaagggtcagggaaatgcttattttccgctcaaggtgcaagcagctgtgtatagcaaacaatacatggacatctctgtcccttataaagatcacttgtatctagttctctcaaccccaatcccaatctttcagaagaaagtttgtatcgattgcagaatgtggaatgagaattcttggattaatactctggagtctggaatatcgtagcctcctgttttttttttcaaaatacacatagcgtatgggaacacctctacctctactttttgtataaggaacatatattgactttggattgagctgatccttactcttt

SEQ ID NO: 23139 - DNA, 945 bp, Zea mays
  Clone ID: LIB3594-025-G9_FLI
cagtattagaccttgacctcgatctcctttccgatgagcaagcaaagatggcgccggtgagggtgttcgggacggcggacttcgtgaacgctgcgagggttatggcttgcctggaggaagttggcgtggagtacgaggtcgtcgaggtcgactacgcggccatggagcacaagggcgcccagcacctcgcaagaaacccgttcggccaaatcccagcgtttcaggacggggacacgatgctctttggtacgccatatacgcttataatccgatcgattcgatcgacacatctcactaccacagaaacgctagctagctagaggttgctttgtttttttttctattgcttgtatctctttgaacaatttctccagaatcccgagcaatcgccaagtacgtgctccgcaaatactccaagtcagctcaagtcgacctgctccgtgagggcaacccggaggaagccgccatggtagacgtgtggacggaggtcgaggcgcacacctacctacccgccatcgcgcccatcttctacgagtacgtggtgtaccccgccgagcatggcaccacgcccaaccaggaggtggtggacgagagtgtggagaggctcaggaaggtcctcgacgtctacgaggcgcacctgtacaagaccaagcagctctatctcgccggggactacttcagcctcgccgatctcaaccacgtcccgtacaccttccacctcatgaggacaccgcacgcgtcgctcttcgaggcgtatcctcacgttaaggcctggtgggagagagttatagcacgcccgtcgctgcagaagctcgccccggatatggtgatcaaagcctgattgcacgtacctttgtatcatcagattcttccttggggtgtatatatgcaaggggtacctttcttgcaaaataaataaagaaataaataaatccgatcacaatt

SEQ ID NO: 23140 - DNA, 1245 bp, Zea mays
  Clone ID: LIB3594-027-A1_FLI
tgagagagagagacagagagatcatcgatcgatcgatcgacgaccatggcgaggcaacgacaagttgcttccatgcttgcagctgctctgctcgttgcgacgttcgcgtccattcctacaaccgtgcactccatcggcgtctgctacggcacgctgggcaacaacctgccgtccagcagcgacgtggtgcagctctacaggtccaagggcatcaaaggcatgcgcatctactcccccgacgccaaagccctcgccgccctgcgcaactccggcatcgcgctcatcctcgacaccggcaacggcggcggcgtcctgggccagctcgccaggagcgcctcgttcgcggactcgtgggtgcagagcaacgtgcgcccctactaccccgccgtcggcatcaagtacgtcgcggtgggcaacgaggtgcagggcgacgacacgcgcagcctcctcccggcgatgcgcaacctggacgccgccctggcgcgcgccggcttcccgggcatcaagtgctccacgtcggtgcgcttcgacgtggtcgccaactcgttcccgccctccagcggctccttcgcgcagggctacatggcggacgtcgcgcgctacctggccggcaccggcgcgccgctgctcgccaacgtgtacccttacttcgcgtaccgggacaacccgcgcgacatcagcctgggctacgccacgttccagccgggcaccaccgtcagggacaacggcaacggcctcaactacaacaacctgttcgacgccatggtggacgccgtcgtcgccgcgctcgagaaggccggcgcgcccaacgtcagggtcgtcgtgtccgagagcggctggccctcggccggcggcttcggggccagcgtcgacaacgcgcggaaatacaaccagggactcatcgaccacgtcggccgcggcacgcccaagaggaccggcccgctggagaccttcgtcttcgccatgttcaacgagaaccagaagggcggcgatcccacggagaagaacttcggcctcttctacggcaacaagcagcccgtgtacccgatccggttcaactaattaagagtggcggatcggaggaataatacatcttcatcaatcaattaacctaataatatgctacatgaataagctgctgcgtgcatgtatgtggccgccggacttgtggaagagcggtgcaattaactgtatgcacgtactctatctatatatgatgaataaaaagagatagaattctgatgc

SEQ ID NO: 23141 - DNA, 1589 bp, Zea mays
  Clone ID: LIB3594-027-G11_FLI
caccggacagaaaagcgccactaaaaccctagccatccgccatgtccacctccccagccgcctcatcctccgctccgaccgccttcgccgcctctgcggttacgatggctgccgaggccgccgacgggccggtactcagcgtagtatcgaagcgtctccgcgcgctgcggaagaagtacaatcgtatcacgcagatggaggagtcgctcgccgccggcaagtcgctcaaccgagagcaggaggaggttctccgctccaagcccgtcgtcgctgctctgatcgacgagctcgaacgcctccgccccccgctcgcatcagctctcgcggaggagctctcctcccgctctgcccccgcccctgctcccgcccccgccgccaccgcttcctcctccgacccagattcgtcagtccaggacctcctcgcgctcgtctactttggctccctcttcgatgtcaagcaacaaagcgacttcgtctctttggtatacacgcgcgagctcgagcggagcagctgcctcacttatgactacgtcggggatgatccggaagacagtctcgtggagaccgatctgaacgccgtttctgcccttgccaccctcgcggcgtcgcgccctcctgctgcagctggagtctctcaccgtgatgccctccaggcttgtgcccatcacgcccgcctctggctcaaccgtgcggatgaacccatccaccctgactccaccatcacatatgctggggtgagggcaaagctggatagaatcatggcatcgggctactacacagctcagctagaaatgaggacaccaatggatctggctgctgcagtggcaaactttggagccggaggtgtgcaggtgcaagagagcatggttgtgtcgcctcaggcactggaagcagtcgaggggagccaggatgttgaagaacacaaggacgagaaggaagattctcaggctacagaaatctacagtgaccatcaggctcctgttgttgacgctgaacatgtggatgatgaaggcctggtgaacccagctcatgaagttccttcagctgaggcagagcaggagacatttgacgattatgtggacgatcaggaacaaaaagaccaacaattcacccagcggcgctcttaccagaaccagcgtagtggcggcggtcgtggtggcggcaggaggggctatcctaatggtcgtggagtgcgtgggtaccagaatggccgaggtggcggtggataccagaatggccgtggcggaggcggtgggtactacgaatctggatactaccagccgaggaactacaacaacagaggccggggtggtcgcaactcttattacaacaaccatggtggaggtgcacaggcaggcggccatggccatcctgggagggttgagctgggtgcaaacgcctagctcgagctgactgttttgtttgaggagcagaggtcggggggagccattttgttattatagaactaactgagcctgttatttcttttttgctactcgcatatggaaatgctttggggaagtagtttcaggtcgactttgttcttctaagttacgtctattaatcgtgttaatatgcccttatttctt

SEQ ID NO: 23142 - DNA, 1318 bp, Zea mays
  Clone ID: LIB3594-028-E4_FLI
ctttgaatcagttccacggttcctcctcctccctctatttccctgtccagactggtggccacagcagggcacgccggcgacgcgcacccgccggcgaccagacggtggcgcgtcaagactccccacccggctgtccggcgaggacctcggctcctcgcccctccgccgctaaagagccgccatccagccgcccagccccaggccccaccgccccagctccacctcggtcccctctcctcacctcgacccggattccgcccctcgcctcacctcgacctacatctgcctcgtccccatggaggcggcggcgagccgcaagcgcgcgtacagcatcatcgtgcctacctacaacgaacgcctcaacgtcgccctcatcgtctacctcatcttcaagcacctcccggatgtgaactttgagatcattattgtggatgatggtagtccagatggaactcaggacattgtaaaacagctgcagcaagtatatggtgaagattttgttgtaagtagcttaaaaaaatatgttcctggtccacttgaagtttttgtacatatgatgtcagtctgtttattcagtaccatggcttaatgcattgtctttaacctgatatgatgctagttactgcgagctaggccaaggaagctagggcttggtaccgcatatttacatggactaaagcatgcctcaggggaatttgtcattatcatggacgcggacctatctcaccatccaaaatacttgccaagctttattaggaagcaaaaggaaactggagctgacattgtaactggcacacgttatgttaagaatggtggtgtccatggttggaatctcatgcgcaagctgactagcagaggtgcaaatgttcttgcacaaacgttactgcagcctggagcttcagatttaaccggatcatttaggctatataagcgagatgtcctggaagacttaatctcctcatgtgtcagcaagggctacgtgttccagatggagatgattgttagggctacaaggaaaggttatcacattgaagaggttccaataacgtttgtggacagagtatttggaatttcaaaacttggcgggtccgagatagttgaatatttgaaaggccttgtttatcttctgctcacaacatgattgaagatatatagtaggcttctggtttgtgggtacaaccgtgttacattacagagaattttactgatgtgttattaatgcagcttgaattgtaacagtaccaccattacgcatgtttccagtggatggattattgtactcaattcttggttttctctgtacactttatcagtctct

SEQ ID NO: 23143 - DNA, 804 bp, Zea mays
  Clone ID: LIB3594-028-E9_FLI
gcagtcaccactcccaagccagtacccacagtcctacgagcagtcgcacgcaagtgtcaagagacaaaacggtcgacatggctcgcacgcaatctgccgtagcggtcgccgtggtggccgcggtgctgctgctggcagcggcggcgacgacctcggaggccgccatcacctgcgggcaggtgagctccgccatcgcgccctgcctctcctacgcccgcggcacggggtccggcccctccgcgtcctgctgtagcggcgtcaggaacctcaagagcgccgccagcaccgccgccgacaggcgcgccgcctgcaactgcctcaagaacgccgccaggggcgtcagcggcctcaacgccggcaacgccgccagcatcccctccaagtgcggcgtcagcatcccctacaccatcagcacctccaccgactgctccagggtgaactaaaacctagaccacgcgcgacgacggccgcctgatcgatcgaccaaccattccgccgtcgccgccggccggatcatcgatcgtcgtcatgatgatatctatcaatctacgcgtgatgatcgatggctacttgtctactgctatgtactactaaataaaatctctccgtgtgtgcacgtacgcttgcatgtgcatggtagcatgtatgtacgacgtcgtccatgtatgtgtgtgtgacgtgtgagacagagagagagagagagagagagagagacaggatcgatcgagagacggtcatgtccttttggctgtttggtttattcatatcacaacttttgagtgtatacaagattatttatgtggc

SEQ ID NO: 23144 - DNA, 1870 bp, Zea mays
  Clone ID: LIB3594-028-G11_FLI
ctctcgcgtacataaacgacggagaaaaggacacaacccagcccgccctaaaaccctcgcaccatcatgtcgctctccacacacagccacccggccgccgccgccgccgggagcggaaaatccctttttccggctggcccagcggcgcagtccgtacatttccccaaggcacggccccctgtccccgccgccgtctccgccgcgactgcggctgttcacgcggaggatagggtttcgtcgctgactcaagtctccggcgtgctggggtcgcagtggggcgacgagggaaagggcaagctcgtcgacgtgctcgccccccgcttcgacatagtcgcgcgttgccaggggggagcgaacgctggacatactatctacaactcagaaggcaagaaatttgctctgcatcttgttccatctggtattctccatgaagggacactgtgtgttgttggcaatggagcagtgatccatgttccagggttctttggagaaattgatggtcttgagtccaatggagtccgctgcgatggaaggatactggtatccgaccgggcacatctgctgtttgatctgcaccaggctgtggatggacttagggaagcagagcttgaaaattcatttatagggacaactaagagaggcattggtccttgttactccagcaaggtaactcgaaatggactgcgggtttgtgatttacgacacatggacacttttggggataagcttgacatcttattcaaagacgctgcttcgagatttcaaggctttcagtacagcaaaagcttgctcaaggaagaggttgagagatacaagaagtttgctgatcgcttggagcccttcattgctgataccgtgcatgtgctaaatgaatctatcaagcagaagaagaaaatcctggtcgaaggcggccaagcaactatgctggatattgattttggcacttatccatttgtgacttcttctagcccttcagctggcgggatatgcacaggcctagggattgctccaagggcaattggcgacctgattggagtggtcaaagcttacacatctagagttggctctggccctttcccaactgaactatttggagaggaaggtgatcgccttaggaaagctggaatggaatttggcacaacaacaggtcgcccaaggcgttgcggctggcttgacattgttgcgcttaagcacagctgccaaatcaatgggttctcatcacttaatctgaccaaactggatgttctgtccgggttgtcagaaattaaggtgggtgtttcttatacccagactgatggacagaagctgcaatccttccctggggatcttgatacccttgagcaagtacaggtcaactatgaggttctgcctgggtggcaaagtgacatttcttctgttcgaagatacgatgaacttccccaagctgcccgcctctatgtggagaggatagaagaacttgttggtgttcccgtgcactacattggtgttggacctggcagagatgctctcatatacaagtaaaagcaactttatttggtccttggttgggtggaaaccaggccgggactcgggagcatttgctttttcttggcgtggtagcttttgatacggtgaagtcactgactcgtggagtgatgttgctcaataatcattaatcagaaccttgtcctaatacagccgctgagacatcagctaaggcgaataagggaaggatgagtcatttgcaccatgtttgaccaccaattgttaggtggtccatatattttgtactaattgcgagactttgtgctatggatctcaactgtataccttgctggtgcatggctttgggtttacatggttgaaaatgagattggtgtactaattgtct

SEQ ID NO: 23145 - DNA, 1762 bp, Zea mays
  Clone ID: LIB3594-029-A10_FLI
cgaacaaacccccttattccatagcgagcgcgagcagcggcgccgggaggactgctgcgatggggggagacgccagcaccatcgaggggggcccgctcccgcatctcggcggccggccggcctcccgcgtgcccgacaccccgctggtgcgcacggcgggggacgccgcgcgcatggtctgggacgagtccaagcgcctctggggcatcgggctgcccatcggcgtgggcatgctgagcatgtacgccatcagctccatcacccagatattcatcggccacctcggcaacctcccgctggccgccgcctccatcggcctctccgtgttcgccaccttcgcgctcggcttcctcctcggcatgggcagcgcgctcgagacgctctgcggccaggccttcggcgccggcgaggtcgccatgctcggcgtctacctgcagcggtcttggatcatcctcgtcgccgcctgcgtcgtcatgacgcccgtcttcgtcttcgccgagtcgctgctcctgctcatcggccaggacgccgacgtcgcgcgggagtccgccaggttcgccacctacatcgtcccctccatctacgccatgggcatcaacttcgccgccagcaagttcctccaggcgcagagcaaggtcaccgtacccgcctggatcggcttcggggcgctcctcgcctgtgccctcctcaactacctgttcgtcagcgtgctcggctggggcctccccggcgccgccgccgcctacgacatcgcgcactggatcatcgcgctcggccaggtcgtctacatcatcggatggtgcaaggacggatggaaaggatggtccgtagccgccttccacgaaatctggccattcgtcaggctctccctcgagtccgccgtcatgctctgcctcgaggtatggtacatgagcctgatcaccgtgctcaccggcgacctggaggacgcccagattgccgtggactcactaggcatatgcatgaacataaacggatgggaggccatgatcttcatcggcctcaatgccgctatcagtgtccgagtctccaacgagcttggctccggccgtccgagggccgcgtggaacgccgtcatggtcgtcgtcggcgaggcgctggtgatcgggattctgtgcatggcactcatcctcatcttcagagacagcttctccatcattttcaccagcgacaccaccctgcagcgagccgtcgccaggatcgccggcctgctcggcctcaccatggtgctcaacagcgtgcagcccgtggtttcaggggtcgcggttgggggcggatggcagggcctcgtcgcctacatcaacctcggctgctactatatcttcggcctgcccctgggctacttgctcggatacaagttcagctttggagttggggggatttggtccggcatgctttgtggtatcacccttcagacgctcatcttgctaggtgtggtttggaggacagattggaaagcagaggccgcacaagcttcaggccgtgtgcaaaagtggggcggcaaaggcaccgatgaagtcaagcctctcctggaatagaattagtgtagtactatcacgcacgaagctcgtttcatttgaataaacaactgggcaatacgccttatccctttcagaagcacagctcatttgctttcccatcgaatctgatagcttccctttcccctcctccgtgtagttaaattgatgtctctgtatgaacactgtttgaggcgactagtatgaaccctgtttgcggcgactag

SEQ ID NO: 23146 - DNA, 2612 bp, Zea mays
  Clone ID: LIB3594-029-C12_FLI
actgaagactgttgcagccgcgactcctgaatcccgacagctccagcgcctccgctggtccccactgcttcggccatggcggtgcgagccacggtctcccgcttcccggccacgccggaggcgctggagtcgtgcgccgtccagtggggcgtcgccgtgacgcccttcgccgccgcggacgagcacggccaacccccgaccaccggcgccggcggggaccgcgtcccacgctgcgagcactgctgggcgtacttgagcagccactgcgatctggagcgctggggctggacctgcgcgctctgtggcacgctcaacggattcgacgacgaggccgagcgacggttccagcgtcccgacgtgtgccccgagctcaagtcctctttcgtagacctcgaaatcctagtggatgaggcagagggcggaggagacggtgtgcaggcgctgcctgtctatgtggccgcagtggatctcgcatgttctgaagagttcctggaactcgtcaagagtgcgcttcttgcggccctagaagctcttgttccgggctccctatttgggcttatgacattcagccacaagattgggttgtatgatgtccaaggcccgattccactcgtgaagaatgtttttattcctccggacttagaagaagatggtctgcctgttgcccttgaagatgccatgcccctactttgttttttggctccagttgacacatgcaaggatcaaattgctgctgtcctggagacactgcgacctacatcttcatgggagagaggggttgcttctgggcaggaagaggatactgttttgcttggcagacgtggttttgggacagccatgtctgctttaattgagtacctaagttcagaatatggttctacttttgctttagctcgggtatttgcttttctgtctggtgctcctgattatggagctggtgtgctagataccaggagatatggggagcaatatgctagtaaaggggtagacgctgatcttgcgttgctccctgaacagatacctttctacagagacctagcagctgttgctgttcagtcaggagtatgcatagacatatttgctgtaactgatgaatacactgatttggcttcactgaagtttttaagtatcgaaagtggtggatctttatttctttatgcaagtacagatgattcaacagttccccaagacatataccgattgctaagtcgaccctatgcatttggttgtgttctaaggctgagaacatcttcagattttgagccgggcaattcttatgggcatttcttccctgaccctcaatatgaaaatgtgcaacacatcatctgctgtgattcatttgccacttatgcatatgactttgagtttgcccataacgacggtttctccaggcacacagatcctgctgttgtacagattgcttttcagtacagcgtgattgaacctgtcaaggaaacatcaggcaatggatcacaaccatctgcaagttacaagttctgtctgaagagacggttgagaataagaacattgcagtaccgtccaactaataatatcagcgaaatttatgacagtgtagatccagaggttgtcctgcatatccttgttcataaggttattttagaatccttggataaaggggttagagaaggcaggcatcaagtgcatgcttggctatccctccttgcagcccggtataatcaggccctgagttctgatgtgcgaccgctgtcaagcatagacattgacttctcacagtgcccacagcttcaaacgatacctcagcttgtttttgcattgttgagaagtcctcttcttcgcttgcatgaggaaggcgtgcacccagattacaggatatatctacaatgccttttcagtgcactggagccatcatctgtagctaaagccatatatccggttttaatctcgtattcctcgcctgacaagcaagcattcccacggcacactctgagccatgctgctctaatcatgagcgagagcccaatatttcttctcgacacatttaccaaccttattgtttactattcctcaactgctgatccttcagttccttttcctccaccccatgactgccttttgagaaaaacaataaatggactgaagcaggacagatgtataacccccaagcttacattcatccatggagggaaagatgattcaacattgtttgagagctatctcattgaagagcaagatgttgatggatcgggcttaacaactggttcaggttttgtagccttccgtgagagcgtgaggaacgttgcaggagagatcatacaggaagaaattggaagttagttccagctcgattacctttttggttctgctgcagagggtatcgactaggatgttttagccttaattaatgccgtagcagttaactgaaacgtagatagccaaaatggagagacaattcaatgaataataaaaggaggccacttgatgtatagttgcttctgtcaacaactgctttaggcttgactaggcagagcagcctttctggtacagcggcactgtctgtctctatgctaaaacagacgagttttactacacaataatacaccgtcggaacctggcagactgaaatttgagag

SEQ ID NO: 23147 - DNA, 2023 bp, Zea mays
  Clone ID: LIB3594-029-C6_FLI
ctttttctcgcctctcctcgctcctcgccatttctctctcttcccctccgcttcgcccaccgcccgctccgaaatctgcgcgccgacgccgccggctgcccgtggagagcctcgaattagagcgcgttccgtcgagaggttttcaagcaactatgtttgagtttggttgatatgatactcattcacgttggggatgcagaccccccctctgtgggggttgattgaagaagttaactgtacacttaggagaacttgtgtcctactgaaagtttcttggtttcgaggtgctcttattggttattggatcgctgtgtgtaatttgtttctttccctttgagagcctttctagtttcttgggcaggctcttgagctaccaagcatgccagattcaaatgtgaagtggattgatgggctccagttcacatcattgtactggcctccacccctcgatgcggagcagaagcaggcacaaattttggcatatgtcgagtactttggccagtttacagctgacaccgatcaattccctgaagacatagctcagctcattcaaagttcctatccatcaaaagaaaatcgcttggtagatgaagtattggcaacttttgttcttcatcatccggagcatggtcatgcagttgcacatccaattctttcacgcatcatagatgggacgctgtgctatgatagacatggtcccccattcagttccttcatctctttattcagccataattctgagcaagagtactcagagcagtgggccttggcctgtggagaaattcttagggtcttaactcactacaataggccaatattcaaagttgagcgccaacatactgaagctgaatgtagcagcacatctgatcaggcaacatctagtgattccacagataagagatctaataattctccaggaaatgaatctgactggaagccattgaggccactaaccccgtggatcactgacatattgctagccgcacctttgggcattcgaagtgactattttcgatggtgtggcggtgtaatgggaaaatatgctgctggtggagagttgaagcctccaactactgcttgcagccgaggatctgggaagcacccacagcttatgccttccacccccagatgggctgttgccaatggagctggagttatattaagtgtctgtgatgaggaggtagctcgttatgagacagcaaatttaacagcagcagctgttcctgcgcttctgctacctccaccaacaacacccttggacgagcatttggtggctggcctgccccctcttgaaccatatgctcggttgttccatagatactatgcaattgctacaccaagtgctacacagaggttgctttttggtcttctggaagcaccaccatcatgggctccagatgcacttgatgcagcagtacaactagttgagctacttagagcagccgaagattatgcttctggcatgcggcttccaaaaaattggatgcatctgcatttcttgcgtgcgattggaactgcaatgtcaatgagagctggcattgctgctgatacagctgctgctttgcttttccgaatactttcccaaccaacgctgctttttccaccactgagacatgccgaaggagttgaagtacatcatgaaccactaggtggctatgtatcatcaactggcaagcggacgtcgagaggtgcatagagtgggaagcccacagccgccgcgccactgggctgacgctcgccttcctcagtgccgcagcgaaggagctcggctgccctctcccgtcatgacaaggccattcctggatctgacatcggcttccaattgacggtcagtgctggcacagctgctgcagggtccgcgagtaggacggctctaatctctccatcacgtgttattatctggtgtttccataatgcgatttgatttcaatttggcgttagatgttgtacacgtgtatttaactgcttgagttgtacgtaatttgtatacttgtaactttgtttaataatatggctattactc

SEQ ID NO: 23148 - DNA, 1093 bp, Zea mays
  Clone ID: LIB3594-029-E11_FLI
tcccacaccccccgagctcagcttagctccactccagctccaatcacagtcgtgaccagagcgcgagagctagctagagggccgtgaaaatgccgatcaataggatcgccctggggagccaccaggaggtgtaccacccgggcgccctcaaggcggcgttcgctgagttcatctccaccctcatcttcgtcttcgccggccagggctccggcatggccttcagcaagctgaccggcggcggcccgacgaccccggcgggcctgatcgcggcggcggtggcgcacgcgttcgcgctgttcgtggcggtgtctgtgggcgcgaacatctccggcgggcacgtgaaccctgccgtgaccttcggcgccttcgtgggcggcaacatcaccctgttccgggggctcctgtactgggtggcgcagctgctggggtccaccgtggcgtgcttcctgctccgcttctcgacgggcgggcaggccacgggcaccttcgggctgacgggcgtgtcggtgtgggaggcgctggtgctggagatcgtgatgaccttcgggctggtgtacacggtgtacgccacggcggtggacccgaagaagggcagcctgggcaccatcgcccccattgccatcggcttcatcgtgggggccaacatcctggtgggcggcgccttcgacggcgcgtccatgaaccccgccgtgtccttcggccccgccctcgtcagctgggagtggggctaccagtgggtgtactgggtcgggcccctcatcggcggcggcctcgccggcgtcatctacgagctgctcttcatctcccacacccacgagcagctcccctccaccgactactaaaagccgaagccgaccgacctaggggtgcgcagcgcagctagcgcatccagctctctctccccgctcgccgccgtttagtttctctcgtgcacgtgcatgcatcgtcgactgtctcaggccgccgctgcgccggcgccgctcgcatcgtttgcttccttggaccagcagtcgtcgccgtcaggctgaactgcttgtaaccgtgaattccggacccgtttgcttctgtaagatttgtgcatttgcctgagtac

SEQ ID NO: 23149 - DNA, 700 bp, Zea mays
  Clone ID: LIB3594-029-H3_FLI
caggatgatgccccaggccagcgctagcctcgacctcggcctcagcctgggcctcaccctcacctcccagggcagcctctcctcctccaccaccaccgccggctcctcctccccctgggcagccgcgctcagctccgtcgtggccgacgtcgccagggcgcggggtgacgcgtacgcgcagcaccacgctggcgccgcgatgacgatgcgcgcgtccacgtcgcccgacagcggcgacaccaccaccgccaagagggagagggagggggagctcgagcgcaccggctccggaggcgtccgcagcgacgaggaggacggcgcggacggcggcgccggcgggcgcaagaagctcaggctctccaaggaccaggccgccgtcctcgaggagtgcttcaagacgcacagcacgctcaaccccaagcagaaggtgcagctggccaaccgcctgggcctccggccgcggcaggtggaggtgtggttccagaaccgccgcgcgcggaccaagctgaagcagacggaggtggactgcgagtacctcaagcgctggtgcgaccgcctcgccgacgagaacaagcgcctcgagaaggagctcgccgacctcagggcgctcaaggccgcgccgccgtcgtcggccgccgcgcagcccgcctcggccgccgccaccctcacaatgtgcccgtcctgccgccgcgtcgcggcc

SEQ ID NO: 23150 - DNA, 604 bp, Zea mays
  Clone ID: LIB3594-029-H4_FLI
cagtactcctatactagccgacgactatcgacagggccatatagatctgctcaatccagtacagtgatcatatgaacaagaaacaaccacgtcatccatgaatgcattatattgcatcgcattgttagctcaaaacatagatgcatgcatgtaatcgatctgtcgatccatgcatcgatcgagatgtatatatatcctggttctagatcccatagagatcatagaactagagccagctccttgttgcccatggccatgacgagagcactggccatggtggccatgttggccactgctgccttgttcttcatgtccgctcgcgcacagcagtgcggtatgcaggccggcggcgcgctctgccccgactgcctctgctgcagccagtggggctattgcggctccactcccgactactgtaccggcggctgccagagccagtgcatcggcagcggctgcggcggcggcggcggtggtacccctgctactcccccgagcggcccggtgtctgaaatcatctccgagtccctgttcaacgagatgctgctgcaccgcaacgacgtggcgtgcccggccaccggcttctacacctacgacgcgttcatcg

SEQ ID NO: 23151 - DNA, 655 bp, Zea mays
  Clone ID: LIB3594-030-D2_FLI
tttgagaaatcggagcagagatacacaataatggaggcggcaggtggagggcagcacgaaacacgacgacgtgcaggcctcgccctcctgggcgtcgtctactcatcgctgctcctgaacgccatcttcgtcgcgcaccacttcctttcgccgtcccggctgctgctccgtgacgacgggcgcgggtgcgggctcacctggtctctgcaggcggccagggaggccgaggcggtggccgccgtggagtgctcgggccacgggcaggtgttcgtcgatggcgtcgccggcgaggacgggcggcccgggtgcgagtgcaacagctgcttcggcgggccggactgctcccttcgcacgcccaactgcaccgccgacgccgacagcgggaacccgttgttcctggagccgtactggcggcgtcacgcggcggccagcgccgtggtgttctccgggtggcaccgcatgagctacaccaccacgggcgggttccagtcggtggagctggagcgccagatccggcgcctgcacggggccgtcggcaacgccgtcgcggacgacaagcacctggtcttcgccagcggctccctgcagctcatcaacgcgctggtgcacgcgctgtcgccggacgccacggccgcctcgccaccgtccagagtgg

SEQ ID NO: 23152 - DNA, 976 bp, Zea mays
  Clone ID: LIB3594-030-G8_FLI
ctcaatcaaagaaagtccccacgcagagcaagccaagatctgcgccgcggcgaagcaaatcaaagcaaagcaaagcaaagcaccggctggctcccatggccgtggacctgatggggtgctacgccccgcgccgcgccaacgaccagctcgccatccaggaggcggcggcggcggggctccgcagcctggagctcctcgtgtcgtcgctgtccacgcaggccgccgcgccgcacagggccgcggctcaccagctgcagaagccgccttcgcagccgccgatcggcgagatcgccgaccaggccgtctccaggttccgcaaggtcatctccatcctggaccgcaccggccacgcccgcttccgccgcgggcccgtcgtcgagccgccaccggtgcctgctccggccgtcgccgctcccgctccggcccccgctctccacgtggtggctcccgtcgccgtggcgcagccccagagcctgaccctggacttcaccaagccgaacctggccgtgtcgggcggcgccacgtccgtcacctccacgtccttcttctcctcggtcacggccggcgagggcagcgtgtccaagggccgcagcctggtgtcctccggcaagccgccgctgtccgggcacaagcggaagccctgcgccggcgcgcactccgaggccaccaccaacggcagccgctgccactgctccaagagaaggaaaaaccgcgtgaagaggaccatcagagtgccggcgatcagcgccaagatcgcggacatcccgccggacgagtactcgtggaggaagtacggccagaagcccatcaagggatccccctacccacggggctactacaagtgcagcaccgtgcgggggtgcccggcgaggaagcacgtggagcgcgccaccgacgacccggccatgctggtggtgacgtacgagggcgagcaccgccacacgccgggcgcgcccgcgcccgcgcccagccccct

SEQ ID NO: 23153 - DNA, 741 bp, Zea mays
  Clone ID: LIB3594-031-B9_FLI
acaaaacggtcgacatggctcgcacgcaatctgccgtagcggtcgccgtggtggccgcggtgctgctgctggcagcggcggcgacgacctcggaggccgccatcacctgcgggcaggtgagctccgccatcgcgccctgcctctcctacgcccgcggcacggggtccggcccctccgcgtcctgctgtagcggcgtcaggaacctcaagagcgccgccagcaccgccgccgacaggcgcgccgcctgcaactgcctcaagaacgccgccaggggcgtcagcggcctcaacgccggcaacgccgccagcatcccctccaagtgcggcgtcagcatcccctacaccatcagcacctccaccgactgctccagggtgaactaaaacctagaccacgcgcgacgacggccgcctgatcgatcgaccaaccattccgccgtcgccgccggccggatcatcgatcgtcgtcatgatgatatctatcaatctacgcgtgatgatcgatggctacttgtctactgctatgtactactaaataaaatctctccgtgtgtgcacgtacgcttgcatgtgcatggtagcatgtatgtacgacgtcgtccatgtatgtgtgtgtgacgtgtgagacagagagagagagagagagagagagagacaggatcgatcgagagacggtcatgtccttttggctgtttggtttattcatatcacaacttttgagtgtatacaagattatttatgtggc

SEQ ID NO: 23154 - DNA, 1086 bp, Zea mays; identical to SEQ ID NO: 1705
  Clone ID: LIB3594-031-D4_FLI

SEQ ID NO: 23155 - DNA, 1104 bp, Zea mays
  Clone ID: LIB3594-031-E8_FLI
ccatcactcgcgccgtacatcctgctcctcccgcgcgcgcgcgcgcgtgcgtgcacgctagctagctgccggtcgcctcgccaccatggtgttcgacgcgagcggcagcaggtcggcggcggcgtcggggaaccctctccgcgtgatcctgacgcgcgggttcgcgcggcaggtgctcgtggggcggtggttgacggtgttcgcgagcctgctcatcatggcgtcgtccggcgcgacgtacatcttcgggagctactccggcacgctcaagtcgtcgctcgggtacgaccagcgcacgctcaacaccgtgtccttcttcaaggacctcggcgccaacctgggcgtcttctcggggctcatcaacgaggtgaccccgccgtgggtggtgctggccatgggcgccgccatgaacctgtccgggtacctcatggtgtacctggccgtgtccgtcgtgttcgtccacaccatccggtacatgccgtacccgcgccgccgtgggcaggagacgagctccgaccccttcttctgcttcctctacctctccatcgcgctggcgtgcttcctcctcgtcatgatcgtggtgcagaagcaggtgcctttctcccgcgccgcgtacggcgtggccgccacgccgctgctcatcctcctcctcatgcccctcggcgtcgtcgtcaagcaggagtacaagatctaccgggagcgccagctcgacgccgccgacccgccgccgccgaccatcatctccgcgtcggcaacggacgccatcaagaaaacagagcagcagccggcgccgacgccgacgacgtcgacttcgtcgttctgtgggtgcgtgaggaccatgttccgtccgccggctcgtggggaggactacacgatcctgcaggcgctggtgagcgtggacatgctggtgctgttcgtggcgacaatctgcggcgtgggcgggacgctgacggcgatcgacaacatggggcagatcggcgagtcgctgggctacccagccaggagcgtgaacacgttcgtgtccctgatcagcatctggaactacgcggggcgcgtgacggcgggctacgcctcggaggcggcgctggcccggtaccgcgtgcc

SEQ ID NO: 23156 - DNA, 895 bp, Zea mays
  Clone ID: LIB3594-031-H9_FLI
ctagatccgacactggctgtgcgggattagtcggcgtgcgtgcttagcagcgtctgccgatggatggagaatggtggaatcgagaaggccggtgtcacccacaagatcgacatcagcgatggccccgtgctcccagtcccgtccgcctcgaatccattcgtttgcctgcacaggagaagaaccacgcgtcgttcgacttcatcttcatggacgccgacaaggacaactaccccgagcgactgctcaagctggtgaggccgggtggcctcatcggctacgacaacatgctgtggaacggctccatcgtgctcctggacgacgcgcccatgcgcaagtacatccgcttctaccgcgacttcgtgctcgccctcaacatggcgctcgccgccgacgagcgcgccgagatctgccagctccctcgttcatgtggtgctgtgtatcggaagaaaatgcgacatcaaacttcgccgccatcgacgcaagcttgggagatgcgacgggggaaggtgtggcggcgcgggggcttgcgacgagaggcgcgcgcgcggcgagctcggccgtggcactgggcttcagcggggaggcggagaagccccgcgaggagggcaagctgatgttgagttcggcggacgaggggcccggcgacgacgacgcagttgaagagccgactccacggacggtgcaattgcgggtacgtggtgcagcccctgtcaccgtccctattcttggaagtggaacggctagcagcccctatcgccgcctttgcctagctccacggctccgcccctgttcttcccatcctttcgaatgctagctgaaggtctattgaatctgggcatggttgattatcttattagtgctattgaactaattatagaaaaggccaaattcagag

SEQ ID NO: 23157 - DNA, 1349 bp, Zea mays
  Clone ID: LIB3594-032-A8_FLI
tcaatcgcggacgcccgcttggccgcttccatgggttccatgaggcggagttccgtgcggcttctcatagggttcctgctaattcggctcaattggtgctcggcggtgggcgacaagggcgcggagaaagtaggcgtggctttcccggtggtggtgagcacctggccgttccgtgaggcggtcagagcggcgtggaaggtggtttcgaccggtgaaggatggggttcggccgtcgatgctgtcgtcgctggctgctccgcctgcgaggacctccgctgcgatggtacagttggtccaggtggaagtccagatgagaatggggaaaccactttagatgctcttgtcatgaatggggcaacaatggaaattggagctgtggcggccatgagatatgtgaaggatggaatcaaggcagcaaagttagtcatggagcacagcgagcatactctgctcgttggagagaaagcaacagcatttgcaatttcaatgggtcttccaggaccaactaacctcagttcaccagagtcaattgagaaatgggaaaagtggaaacagaaccactgccaaccaaacttctggaaaaatgttgatcctgtcggtaagtgtggtccataccatcctatcaatttagcctcagttgaagttgagggttctgtaaagaatgaggtagtggggagtcaaggtggtctctgccaggggtattttgaaagtgataatttactggagccaataaagtccaatttgaaggttgttaatcgccacaaccatgacacaatttctatggctgtgattgacaagatgggccacatagcagttgggacatcaaccaatggtgctacatttaaaattccaggaagggtgggcgatggaccaataccaggatcttcttcatatggtgatgatgaagttggggcttgtggagcaactggtgatggtgatattatgatgcgcttccttccatgctaccaagtggtagagagcatgcgacaagggatggatcctcgagatgctgccacagatgctatatcgagaattgcccgcaaatacccagatttcatcggtgccgtatttgcagtcaacaaggaaggggtgcatgccggggcatgccacggatggacattccaatactccgtacggaattccagcatgcaagatgtggaggtcattacagtatatccttagcaatcgcaattcaacgaaaacaaaagtttgctttatcagcatgtttaaaaatgtcacggctgcccccctgttgatgttttaaaaatgttctgtgcggattatttcaatgttttcttaaagtcgattgttttgaaactagtagtactgtatgtaccaatctgaccttg

SEQ ID NO: 23158 - DNA, 2350 bp, Zea mays
  Clone ID: LIB3594-032-E4_FLI
ctcttgtcttccacacatcgccacgccactgattggctcgcgattatgtgattcgtgaaccttcttgccatggggatgtctgcagcgtctcatctctgtgcttcttcgtccctgcgagctttaaccgtgttgtttgtgttggcagctcttgtttcagatgtagaggggcgacatcatcgtcatgtctgtcctccttatttctcctgcggtggtttaagcaatatatcgtatccatttcgtcggcaaggtgatccatctgggtgcggtgtccaatcgtatgagctggtttgcacggatacagatgctacaattcgcatcggcagtggaacatacaaggtgcttagcatcaactccacatattcttacttctgggttgttgatgccgacctggacatccagagcagttgcccccttccccggtgggattaccatgctaggaggaccagtcgtaatcgtaacttacattggaggattgagttcagccatgatttttccaattctaatccgacgatgtgggtttacgcttacgcttaccctgattggaccagtagaaactcatatcgtcagagggttgagttcagccatgatacccctttttcttcttcttatatggattattcggggtgggctatctttgtgaattgttctcagccaatagagaacggtgtgtatagaccggtgtcttgcttgagcaattcttctttcatctacttggtaactggttactggtatgagtatgatggctatgtttttgctttgggtctggagccttcatgcggttacctagccatgactcctttgggtggtccaggcatgccggtgcccatgaatacaagctatccagatgttgttaagttcatgaggagtggatttgcccttcggtttcctctttcgtatggtgacaacatcagagaatgtctcgcagagaatacgcgtgctttccatgaagaaccaagaaatagtacaggcatcagggaacagatcttggacattcttacgttcgagacattatggttttgtgttcttgatcaacttggatcaactaataatgatgtcaaatctgttctcatcgacatcatcgtcgaaataataccatttgttctgtggggtctaaaatctgcacatgttatttgcaggttcgtattgatgccgttagcagtatttgtcttcctagcctataaatactggaaaacacggataacaatagatgcagtcgagaagttcctgcgaatgcagcatatgctcgttccgatgagatatgcatacacaaacgtcattgcaatcaccggccatttcagagacaagctcggacaaggaggctacggtactgtatacaagggggtgctacagccaggtgaagttcatgttgctgtcaagatgctaggcaactccaactgtaacggagaagagttcatcagtgaggtcgccaccattggaaagatccaccatgtcaatgttgtgcgcctcattgggttttgctccgaggaaaatatcagggcacttatctatgagttcatgccccgtggatctctcgataagtacatcttctcgtcggagaagacattctcatgggacaaactcaacgagatcgctctgggcattgctagaggtcttaactacctgcatcacgggtgtgatatgcagatagtacactttgacatcaagccacacaacatccttcttgatagcaactttgttccaaaagttgctgattttgggctagccaaactgttcccaaaagatgacaatttcgtgccactgagcgctatgcggggaacgattggctatatagctccagagatggtatctcgaagctttggtgtcatctctagcaaatccgatgtgtacagctttgggatgctactattggagatgacgggcgggcgaagaaacgcagatcctcatgcaggaagctccagtcaagcatactacccatccttggtgtacaagtagctgagccagggtgatgcaaacatgatcaatgaaggtgttgatatgcacgagttagagaagaagttatgtatcattgggctttgctgcatccagatgaagccgcaagatcgaccgacgatgagcgaggtcatagagatgcttgaagctggtgtcgatggcatccaaatgcctccaaggccatacttttgtgatgaagagggtgacagttcttactctataatctctgaactggatacaatagaagagtagtagtagtaaaatgcacttgtgtctatgtgctcttaatgtatcagactattaagattgcaaggttgccataagctaaggtactggttgtatacttttattgagagtgtgataatgtgatatcatataaaatacctccatgaagtttttt

SEQ ID NO: 23159 - DNA, 1339 bp, Zea mays
  Clone ID: LIB3594-032-H3_FLI
agagcggtgccaaaccaccatggcgatcctgctcctcttgctcttcgttttgtcctcagcttcagctgatgagtacggggaagagctgctgcagcgcgcgtggggggagcgggagtggatggtgagcgtgcggcggcgcatccacgcgcatccggagctcgcgttccgggagcaccgcaccgcagccctcgtccgcgaggagctcgagcacctcggccttcccgcccgcgccgtcgccggaacgggcgtcgtcgctgatgtaggttccggggcgccccccttcgtggcgctccgcgccgacatggacgcgctcccgctccaggaattagtggagtgggagcataagagcaaggtggacggagtgatgcacgcctgcgggcacgatgtccacacagcgatgcttctgggagcagcaaagttactcagccagcgtaaggatcagctcaagggaacagtgagactcctttttcaacctgccgaggaaagtggtgcaggtgcatctcatatgataagagaaggggttctggacggtgttgaagccatatttgcaatgcatgttgactatcgtataccaactggtgtaatagcagctcacccaggacctacacaagcggctgtatgtttcttcgaagcaaaaattgaaggtaaaactgggatggctgaaaccccacacttaaatgtggaccctgttgtcgtcacatcattggccatcctgtccctgcagcagcttatttccagagaagatgatcctcttcacagccaagtggtctcggttacctatgtgaaagctggaaaagcccttgatgctacccctaaccttgttgaatttggaggtactttgaggagcctcaccactgaaggcctttactgtctgcaaagaagggttaaagaggtggtagaagggcaggcggctgtgcataggtgcaagggagctgtcgaaataaaggttgaggactacccggtgtaccctgccgttgtgaacgacgagaagctgcatcgacatgtagaggatgtcggcagaggcttgcttggcccgggcaaggtgagaccaggggaaaagatcatggccggcgaagacttcgctttctaccagcagcttgttcccggcgttatgtttggcatcggcattagaaacgaggaagctggttctgttcactcggctcacaacccctatttcttcgtcgatgaggacgtcattcctgttggggctgctttgcatgctgccattgcagaactgtacttcactgacggccccctctttcgacaaagaagactagtggtttctcgttcgtgcggttggtctcgggttcagtaaatataaatatagtttgacatgtac

SEQ ID NO: 23160 - DNA, 1097 bp, Zea mays
  Clone ID: LIB3594-033-E10_FLI
cgtttcttcctgtgagcgacagctggtggagctgcgccgctctcaccttcaccggcgacgggcattcacaagcataggcacaggttatgatctgtctgtcaccaccttctctcctgatggccgcgtctttcaggtcgagtatgccacaaaagctgtcgacaacagcgggactgttgttgggatcaagtgcaaagatggcattgttctgggtgtcgagaagctggtaacctcaaagatgatgctggaggggtcaaatcggaggatccattcagtgcaccggcattcgggcttggttgttgctggtttggcagcagatggcagacaaattgtttcaagggccaaatcagaagctgccagttatgaaaaggtctatggagaacccattcctgtgaaggatttggcagatcgtgtagcaagttatgttcatctttgcacgctgtactggtggctcagaccttttggttgcggtgttattcttggaggttatgatagggatggaccacagctttacatgatagagccctcaggagtttcctataaatactttggtgctgcattggggaagggaaggcaggccgcaaagactgagatagaaaagttgaaactttcggagcttacctgccgagaaggcattgttgaagttgcaaagataatttatggagtgcatgacgaatccaaggacaaagcttttgagttggagttgagctggatctgtgatgaatcgaaccgccagcatcagaaggttccgaatgaattgttggagcaggccaaagctgctgctcaggcagctcttgaggagatggatgctgactaagaaacatgacaaatatgcccatgcttcatgtttttgtgctgttgatatctttgatccctttggggtgacaccgtgacagactggacattgccaatttgttggattttatttggatgtcatgtaaaactccattcatggaagtttgaatctggattgactgatataagagctgtggtgttttttacattctggtttagtcacgggctcacggcgctcgcgttctttaggaacttgcccttagacgatgcctgttttcatccatcaacaagtctcttccacatgc

SEQ ID NO: 23161 - DNA, 1230 bp, Zea mays
  Clone ID: LIB3594-033-F6_FLI
tcaactcccactcccactctccctttccactctcaggctcccactccccccctaccggctaccctacccatcacacacaaacagccactcctcacctcccccgtcctccggttcatgtcctgctgctccccatgtcgcccccactcgacctcgactacataggcctctcgccggcggcggctgccgccgctgcccacgacgacctgaagggtaccgagctccgccttggtctgccggggtccggttcgccggaccgccgtgttgtggctgccaccgcaaccaccctggacctgctcccggctaagggcgccaagcgcgggttttctgacgaggcgccgacgccatcgcccggtgcagcttccgggaagggaaagaaggtagcggaagaggaggacgacaagaaggttgcagcgacgccgcagccggtcgcaaaagctcaggtggtgggatggccaccaatccgaagctaccgcaagaacacgatgtctaccacccagctgaagggcagcaaggaggatgctgaggccaagcaggaccaggggttcctgtacgtcaaggtcagcatggatggcgcgccgtacctcaggaagattgacctcaagacttacaagaactacaaggacctgtcgactgcgcttgagaagatgttcagtggcttcagtactggcaaggatggcttatctgagtaccgcaaggatggtgaatatgttctgacttacgaggacaaggatggagattggatgcttgttggcgatgtaccatgggagatgttcgctgactcttgccgcaggctcaggatcatgaaaggatcagatgcaattggacttgctccaagggcagctgataagtccaagaatcgcaactagaatggttgcttcttacagtccagagcaagagggagatatccagtgactgtagggatctttgtggaagccggaaaacgtctaacagtttcaagaagaattctgccttatggtctgtaccacatgtttttgctgctacgcaagtaaagaactccacgtctgtcaatgttagttttacaacatcgtctacggacaaaaaaaaaacccccgctatttgattgttgctaagccttcgtacgacgtgtaaatggtttggtacaatgagtgctgcgactacgattgagcacccctctacctagtttgcaaaaaaacagtgtcccatggactgtctgttgtccctctatataaatgtccaatgaagcttgct

SEQ ID NO: 23162 - DNA, 953 bp, Zea mays
  Clone ID: LIB3594-034-G4_FLI
ctcccggctcccgccacagaaaaagacacgaggagcgcgcgtgctcgcctcggcaggcacgcatttcaatgggcaactgccaggcggcggaggcggaggcggcgacggtgctgatccagcaccccggcggcggcggcacggagcgcgcttactgggcgctctctgcagagaccgtcatggcggccaatccgggccactacgtcgcggccgtcatcaccaccgcgcagccggacgcgggagacggagcagcctcttctgctgccgcgcccgtgaagcacctcaagctgctccgccccgacgacacgctcctgctcggccgcgtctaccgcctcgtcagcttcgaagaggtgctgagggagttcgcgtcgaacaagcggcaggtgaagctgagccgcgtgacggtaagggccaaggacgaagacgaggacgtgaagccggcgtcgaagcatcgccgcgccagtggcgacgtcggagagcgcaaggaatccgagaggtcactcgccaaggtcctgcgccagacggaggagctggagccggaggcagacccgtcgtcgggccccagcgccaagcacaggcaagccgacaccgacacgccagccgacctggaggccctcctgccgcacagggcgctgctcggccaccgagccgcccggcaatggaggcccgcgctgcagagcatcgcagaaggcggagggtgagtggccgggatagctccgtgcaaagtcagtcgctatttgcgaggtagacagcgtattgtaaaaataagtttacactggcaacattgtgtatgtcgacgtgtataacattgttttgtaatgtgtctacgtagaagagtttgaaaaatagagtgatataaggcgtatgatatggattcgatggtgtgtttgtaaggtggcaggcgagtagtggcatacgccatcgcataaaatctctagtctatttcttgcgagctc

SEQ ID NO: 23163 - DNA, 491 bp, Zea mays
  Clone ID: LIB3594-034-G8_FLI
ctgtcgtgggatcccagccaccgccgctagaagaagagctcggcgattcccaggtcccgcgagaatatgccgaagcagatccatgagattaaggacttcctcctcaccgcgaggaggaaggatgcccgctcagtgaagatcaagaggagtaaggatgttgtcaagttcaaggtgcgctgctccaagtacttgtacacgctctgcgtcttcgatgctgagaaggcaaacaagttgaagcaatctcttcccccaggtttgaccgtcgaggaggtctgattggatacatggcaacgccgagttgaactacccaagcttctttatcagtagcagagcatgctactctatgtacttttggaacctaagctattagacctgtcagtgttggatgtctggatcttgcatttttggagaaataccaatttacctcgttcaaggatgcaagtatatttcttgtttaactgcacattactttatatttatgcctgtttcat

SEQ ID NO: 23164 - DNA, 786 bp, Zea mays
  Clone ID: LIB3594-035-C10_FLI
gctgctcttgttgcgccggcagcgggcaggcggcagcgcaaaacattaaaaccatcatttgcagcggcggctgctgccggcgacgcgatgtccaagcaaaagtccgtgatcaggctgggcgtaccgaacgacaagaaccggtctaaggccatgcagatggcatccaagtttgtgggagtgaactcggtggggatcgccggcgacgccaaggaccggctggaggtggtgggggagagcgtcgacatcacctgcatgatcaacctgctgcgcaagaaggtctgccgcgccgacatcgtcgtggtggaggaggtcaaggacaagaagaaggaggaggaggagaagaagaagaaggaggaggaagagaaaaagaagaaggcggaggaggaagccaagaagaagaaggaggaggaagagctcaagaagaagctctgcccgtacccgtacccgccgccgccgtgctccggtgcctgttgccgcgggccgtcgccgccgatgtttctgtgcgagccggaacagccagcgggctgccacatcatgtgacgatgaagtgaagctccttagtgctcaagatggatcctgcctgcctgggctcaacaatatgcatgcttgtgattttggtttgccacacatcatcgaccggtcagtttcactccgtgaataatcgtcccgtccgaacttgtgcacatgcgtggttgtggttttgctttggcatctgaattacaatcctaagtgatcatggaatttagatcactactatatatatatatatataagtatttttttgtg

SEQ ID NO: 23165 - DNA, 423 bp, Zea mays
  Clone ID: LIB3594-035-F1_FLI
ccaattgtcacttgctctccctccaacaagctaattaaggccggtcgtcatccctcttctagctcgttttattatccatggcggaggagaagcaccaccaccaccacctgttccaccataagaaggacgaggagcaggaggagcagctcgccggcggcgggtacggcgagtccgccgagtacacggaggccacggtgacggaggtggtgtccacgggcgagaacgagtacgacgagtacaaggaggagaagcagcataagcacaagcagcacctcggcgaggccggcgccatcgccgccggcgccttcgcactctacgagaagcacgaggcaaagaaggacccggagcacgcgcaccgccacaagatcgaggaggaccgaaaaaatgtatgcaactctgatttacttacatgtttagttgttt

SEQ ID NO: 23166 - DNA, 609 bp, Zea mays
  Clone ID: LIB3594-036-A1_FLI
aacgaactgaggtcgacgacgactgatcgagcagcgacgatggcggctgtgctgaacagcaggaagacgccgcaggtggttgccgtgctggtggcggcggcgctgctggcgtcgtccgcttcggcggcgatcacctgcgggcaggtggggtcgtcgctggctccgtgcatcccgtacgcgacggggagggccagcgcgctccccgcgtcgtgctgcagcggcgtcaagagcctcaacagcgcggcgcggaccagcgcggaccgccaggcggcgtgccgctgcctcaagagcctcgccaacagcgtcaagagcgtcaacatgggcaccgtcgccaccatccccggcaagtgcggcgtctccgtcggattccccatcagcatgtccaccgactgcaacaagatcagctaagttatacgacgaccaagctaataagcctaccgaacgtacacgtacgtcccgcgcgctgcacgagtgatgaagccagggaagaaataaaataaagctagctgtattgccaggagcagcatgcagtatcgatctatatatatactgtactgtagtactctattatatatgtatgtgtggcctgcagtgcgagttgcttcgatc

SEQ ID NO: 23167 - DNA, 2354 bp, Zea mays
  Clone ID: LIB3594-036-B6_FLI
caaaaaactcacacaagccatgcccatgtccacgatgccaccaccaccgccgccccatcacagcccagccatccaacggccgagcacgaccggatcggacgtgcccctgaatttccaccgctgccactaccaaatcccgttttttaaaatcaaaatacaaggctcccttcttccagtcccccgtgctccggctccccttcctccgcatgttcccacctcctgcgcggccccgggtcactgccaggtaggccacaccatgcagccgccgcagtcgctggtgtcccgcgcgcgcaccgcgatccactccgccgccgcccgcgtgctcaccgacatcaaggccgacctccgagatgccgaaggatccggcgggcgtagccgggcgccgtcgccgaggacgtctctggatcgggaggccgccgaagcgagcgccacggggcgggagccggacgtgaagccgccgtcgccgcgtgatgaggtcctagaaataagccccccagagaacgaggattcctcaagcataccaactgaatcaacctgttcaacaaaactgacctttcctccagcttcaatagttaaacaactggtgtctgccattgaaaatgggaaaagtttcaagtcaatgagtgatatgaggtatactggagaacaattgctgaaagataagggaggtttgagcttgtctgttgttaaatcacttgttcgacgtgacaaggaagaaagatcgagctccgatttttttggtgatgaagaaactcaatctttgatgtactccttgttcaaattagaggaacagttttccttcgaagcaagtcaatgtttccctgaattggttcattcaagatctgtgtccaaggatctacatggtgcaccacctggaagttttattcaccatttagcagtggttattggcagcattagttctgtgcacaagatggcatttttttggcagtcagttgttcttgagttgaggaaactatggtctgattggcaacctgtgcctcgtatgccactggaggttgctccagatttgaattcttgtttactacatcaggaaatccaagttgtaaattgctgcattgccaggaaaaaaaagaagaaaagcagctaaggagtcactggattccttgctaaatcaggcaagtattggtaaatcagaacccaggttgtcagaagcgaagtttcctgacagcgagatgtatgcaagagataatactggtgattatgtccttcgacttggtgctgaccagtcatctgagaacttaacattgctggaaactggtgagcctatctattccccgacactgcaggaaggccccatcatgacagcagagcttataaaagaaacagaggagctagtcttacggacaggaagtcttggtgctggatgctctcaacttctatcagatatgcaggctttcaaggcagcaaatcctggttgtgtcctggaagactttgttagatggcactctccacccgattggtctgaggattgtgctgcaaacagtaccacagttggggaaggctcatctagacgtgggcggttaagtgataggatgcaaacaaaagaaggtaacttgtggaaggaactgtgggaggctgcaaaacctatacctgctgttgaacaaactcctatatatgatgaagatttagctgtggagagcatctttgatgctttggaggttattgagccatcaaaactgtttgagcagctacttggcgtcattctttctgtatgctttgtggcagcagaatcagttttagcagcagatagcaatctgtcaaaattattctacgattgcaaggactacataattggcgtttaccacaatgacatgtcaaaagatgagctagatgagatgtacaaggtgtacgagacgatggaagccatagtaacccaccctgaagaagctctccagatcatggagcaacctgatgagaagtctgttgacaataaaaaccgcttcacgctgaagctcaactttatggccaaagatcgcccgccgctctggaagcgcacgacaaaggacgacaagatttctcaaaaggtcgagaagaatacgtcagaggaaaagaacacgaagatattctccaacctttttgacaagaaggtcagcatattttcaaagaagaatgtgagatcgtcggaggtgccaccggcatccacttcatcttcttcgccagggccatttgacgagagtgagtggacgattttgtagttggaactcctgtattgtttcttttgtacaacatgtagaggggggggtgccccggagatgtcgggaataatcttaagctgtacatattcagtctaattcattgaacattttgaaataaattgaaaatataaaaattcc

SEQ ID NO: 23168 - DNA, 1002 bp, Zea mays
  Clone ID: LIB3594-036-D6_FLI
cgattttttccaccccacacccccaacccaacccagagcccgaactcttcacgtcgcgtcggccggcaattggcattcccactgcgccgccgtcggatcgactgggtcctcgccgccgatgggcttcttccgccggatcgccggcttcctaggcatctcgcgggacgacgccgaccacccggactccccgacctccgtcggcggcgccgcggcggcggcggaactccctcatgacagggcggcggcgcacggggtgaggcaggggttcagcgtcaaggttcctgtccatgtcgagcggcaggtgcccgtgcccgtgctggttccctgcccgcagggggacggcggcgtgcagggttttaggtggtacacaaggaggcttaggatcgatgaagacggcgacgtggctgacgagttcttggatgaaattatcccggaaggctcaatcagcaacgacaaaagcgcaaggttccaagtgaaatataacaataaacctgctgctgtagcgctgaggaagcaggtcatcgctgtcgacggtgacatccgccatagcttggaacaccaggggcaactgcggtgggtgtgactgagtcggagcagataagtgaatcctgagctctgctccatcagtgtgcgttgagcagagggcgggcgcacacaggagcggagcgaatgacccaggttcttcatctctgaagtggatctagaggtagttcgttgctgatgtatccattgttcttcgttcagtgtgttggtatgcttgatctcatggcgattgagacgccttgtaccactagcagttgtacattattgaaacagctcccgctgtacatgttgaatgtgcttgcttggcaatggatctgccagactggtgaaaaattggaatgtgacacttcagccttcagcctttaagcatggctacaaatttagagctagaatttgtcatgctaaggaatagtttttttttactctgtaatatataaaggccatatctggtagtgctct

SEQ ID NO: 23169 - DNA, 771 bp, Zea mays
  Clone ID: LIB3594-036-G12_FLI
tcatatttgttcatttgtctccagcaatacaatggagtactcgtctactagggtcgtgtgtttagctctggcgttggccatggtcgccgtgacgccgtgcgcggcccagaactcgccgcaggacttcgtgaacccgcacaacgcggcgcgcgcggccgtgggcgtcggcccggtgtcgtgggatgagaacgtggccgccttcgcgcggagctacgccgcgcagcgccagggcgactgcaagctggtgcactccggcggcgggcccaaccactacggggagaacatcttctggggcggcggcagcgcctggaaggcgtcggacgccgtcggcttgtgggtgggggagaagcagaactacgactacaacagcaacagctgcgcggcggggaaggtgtgcggccactacacgcaagtcgtctggcgcaaatccaccgccatcggctgcgcccgcgtcgtctgcaacaacggcggtggcgtcttcatcacctgcaactacaacccgccgggcaacttccgcggacagagaccctactagctacctagctagctagttccaatatcgattatacgcgtacatatactctacatgcatgtccagatgcatgctaccgattgaataagccacaaactaagcttaggccaccagttgattaggtttcttgtgaacctactcacccaggtttaagtgaagggtgcatacatgtatgtgtatgttctgtgtggggtgtgacagtttgtttggtgtttcataaaataaataaattaatgaat

SEQ ID NO: 23170 - DNA, 1352 bp, Zea mays
  Clone ID: LIB3594-037-A7_FLI
aggtcaatcgcggacgcccgcttggccgcttccatgggttccatgaggcggagttccgtgcggcttctcatagggttcctgctaattcggctcaattggtgctcggcggtgggcgacaagggcgcggagaaagtaggcgtggctttcccggtggtggtgagcacctggccgttccgtgaggcggtcagagcggcgtggaaggtggtttcgaccggtgaaggatggggttcggccgtcgatgctgtcgtcgctggctgctccgcctgcgaggacctccgctgcgatggtacagttggtccaggtggaagtccagatgagaatggggaaaccactttagatgctcttgtcatgaatggggcaacaatggaaattggagctgtggcggccatgagatatgtgaaggatggaatcaaggcagcaaagttagtcatggagcacagcgagcatactctgctcgttggagagaaagcaacagcatttgcaatttcaatgggtcttccaggaccaactaacctcagttcaccagagtcaattgagaaatgggaaaagtggaaacagaaccactgccaaccaaacttctggaaaaatgttgatcctgtcggtaagtgtggtccataccatcctatcaatttagcctcagttgaagttgagggttctgtaaagaatgaggtagtggggagtcaaggtggtctctgccaggggtattttgaaagtgataatttactggagccaataaagtccaatttgaaggttgttaatcgccacaaccatgacacaatttctatggctgtgattgacaagatgggccacatagcagttgggacatcaaccaatggtgctacatttaaaattccaggaagggtgggcgatggaccaataccaggatcttcttcatatggtgatgatgaagttggggcttgtggagcaactggtgatggtgatattatgatgcgcttccttccatgctaccaagtggtagagagcatgcgacaagggatggatcctcgagatgctgccacagatgctatatcgagaattgcccgcaaatacccagatttcatcggtgccgtatttgcagtcaacaaggaaggggtgcatgccggggcatgccacggatggacattccaatactccgtacggaattccagcatgcaagatgtggaggtcattacagtatatccttagcaatcgcaattcaacgaaaacaaaagtttgctttatcagcatgtttaaaaatgtcacggctgcccccctgttgatgttttaaaaatgttctgtgcggattatttcaatgttttcttaaagtcgattgttttgaaactagtagtactgtatgtaccaatctgaccttg

SEQ ID NO: 23171 - DNA, 390 bp, Zea mays
  Clone ID: LIB3594-037-B3_FLI
cactgacgccttgcccggaaccaaattattgaccgacaacgcgatgctccaaggggtgctgtcccgcgcgcccgccaccgacgctgcggcagcaatgaaggccaagcgggcgggcgcgtcccccggtgaagaggaggaaggggacggccgttctgcgcgggggaagcggcagcagctgctcgggcttggccccgccaccgctttggcgtcggcggcggcggcggaggaagggccggagacgcgaggcctgcggctgctcagcctgctgctgcggtgcgcggaggcggtggccatggaccagctgacggaggcgcgggagctgctccccgagatcgcggagctggcgtcgccgttcgggtcgtccccggagcgcgtggcggcctacttcgg

SEQ ID NO: 23172 - DNA, 1972 bp, Zea mays
  Clone ID: LIB3594-037-D3_FLI
tcttccccgcaaagaaagaaggcaagagttctcggcttctcgcaagtcgcgacagagaaagaggcggagttgcggagaagatgcagagcagcagcatgaagagggagatcagcgaggcccacaacaccattcgcttcggcatcaacgccggcgtcaaagcggacctcgccccgccgcacccgctccagtctaccatccaatcggtaaggattcgtcgctctccttcgtttcgtggttcacgcgtggtgtcgcatcgggcggctcgacgaggcggacaaagccggtggccagtgcgtccaccacctaggggcgcgaccgactcgtcttccccaccggtctggtgctccatggaggtggctgtctccattggtaccacgcagggccaggcttgttccactggctgcagcgtggacaatgacgtgaagccgaagctctagacggcgatcaaagcagaggaggaacaccagctgagactactctacacccgagtgtcacagtggtggcccatgaatacgcaggctggagctgcgatctcgtcgcagaccatgggtgcaatgggtgcagagacttaggtggatggttctaaatgttcacggcaaaaaaatgtgtggcgcatgggtttctatcctgagggtgcgcagatcggtcgccattagaaagatgcagcttcaactactttggaccaggtgcaaactcatggcagttctgatagggcaccctacacaaatctggagtttgaacacacgacaggtgatatgcttatcttttgtggatggactgttcgcttggcttttgctgattgaattggagctgcacttgtagtttggtaacgtttatatacataactatgcggattgcgttagctagaatatgtcttccagtaccagggtgagtgggtgacaatgggctctaaattttacactaaaatttaagaatccgatcgggttatgatcaggttatatttatatttattattgaactaaaattaatttagggctctaacaaattgtggagaaacattttgaatcgtgatccattatcacccctaccagcaccacatacatacctcccgttgtggtgtttaaccctacgtgcagaccttgtcaccttattttggatcgattccctgttgtatgtggcttgtgctaaaacaagaaacacttgcaactttactagaaattatggtcagactctctttctctgtgttcgtttgattgttgctctggctgtctcctgctaaccaattttgtgggaaattcaacctttgaagcatcaatgtggtgaataatttctcaaaccctcagtatgttttccctaatgctggataaggcgctctcaaaaaggtcagttcctatttgatggtgcattcattatttggttgtgcatggttaatggtgccatctttcttgtatgaatgcctgggactcggccacgacctctgggtgcacctcttcaccaccagcgaggctgtggtcagcgccttcgcctccatgacgccgatgctcatcggctccgtcgtgctggactccacgcagggggtactctgcggcgtcgccaggggctgcaggtggcagcacctggcggcgtggaccaacctggtggccttctatgtcatcggcttgccgctcgccatccttttcggattcacgctcgccttccaaaccaaggggctgtggatggggcagatatgcagcctcctctgccagaactacgtcctcttttttatcaccctgtgaaccaactggcaggagttagacctgaccatgttcaacaaggacaacgattttgtgtgctaggaatctagaaagagtttttattttcttttttgccatgtgctgttgctgaaacattgaaccatcagcatcaggcttcgacagagctgtctggtgtttgctcatcaattcatcatcagtgtaatactacagattataacatttggaatctcgaagataggaattaaaaatgttctgat

SEQ ID NO: 23173 - DNA, 881 bp, Zea mays
  Clone ID: LIB3594-037-F3_FLI
cgcacccaaagcaagcccaacgaaacccagacggcaacgagacagttgtcatctcactccaccgcaccgtccgcgcacggctcgccggccgtcagtcacacaaccagcacgacaccatccgttcctggccttcctcccttgcaactaccactcgcgtcaccgcggaaattaaccccgaaatccagcgccttcggcacgagcacgaccaggcctgcgcaggagatggggcggagaggggagccctactacgtcgaggcggtgccgccggtggacgtgaacaagaacacagagtggttcatgtacccgggcgtctggaccacctacatcctcatgctcttcttcgcctgtcttctcgtcctctccgtctctggttgctccccgggggcagcctggaccgtcgtcaacctcgcgcacttcgccatcacttaccacttcttccattggaagaaaggaaccccttttgctgctgatgaccaaggcatctacagcagattgacatggtgggagcaaattgacaatggtcagcagcttactcggaacaggaagtttttaactgtggtacctgtggtgctgtatctgattgcgtcgcacttgaccgactacaagcagccgatgttttttctcaacacgattgcagttttcgtgctggtcgtggcaaaattgccgaacatgcacaaggtccgcatatttggaatcaatgcagacatctgaggacggctgcaagaagtacatggatgcgatgccatgatgttatgaacaagcagtgtgtttctcaaactcgacacaactgcctgtaatatatgtacaggtttagaaagaactgtaaatgaatgatactctaggatacaaggtttgcctgcagactgctctgtgttgccgtt

SEQ ID NO: 23174 - DNA, 915 bp, Zea mays
  Clone ID: LIB3594-037-G2_FLI
ggtatatgtatgttatgtaatatagtatgaagtccgacccataccaccacgcctagactgtgcctgcatccctcatcgctcggctcaatcgctgatcagttctgcggccggcgacgtgtgctagctcacgacgacgacatgggctcggcggtgaagatcgggacgtggggcggcgacggcgggagcccctgcgacatcacggtggcgccgcggcggctggagagcatcaccatccgctggggcaaggtcctcgactggatcgccttctcctaccgggaccagagcgggaagctgcacaccgccggcccctggggcggcaacggcaaaggagagggcacggagacgatcacactggaggcctcggagtatgtaacgggagttgcctggtccgtgggcccgttcaagttcaagaacgtggagcgctgcatcacctccatcaaggtcgtgaccaacctccgcagctacggccctttcggccacggggtggacagcacgcaccacagcttgcccgtgatcgacggcagcgtcgtcggcatgttcgcccgcgcaggggattttctcgacgccatcggcttctacgttctcccagatgccctccctgctctaaaaccgacgacggaccctgctgaacaagaagaaaaagaaaaggactctggccatgaacagaatgggaaggcaaaatctaaccaagaagaaaacgaggactccaaaaacgagaaggataaaccctgcttgtcgtagttcgttttctactacaaaaaatgaatcctaatctttgtcggatatctgtttgtgctcttgttgtgagtctcttcagctattgttccaactattaatatatatgtacatgcgtgggagctatgcattgtaataatgaattttcagaaaaataaagagtattttccctattttttt

SEQ ID NO: 23175 - DNA, 467 bp, Zea mays
  Clone ID: LIB3594-039-G10_FLI
tccgcttcgcttcgacttggacttcgtcgcgccttccccgccatctccggcgaccggcgccacagccaatggagcccatggacagccagctcacggctctcgcgctctccgactccgacagcgcctccgtcgagggcgccgcagctgacgcggcggacgccgacctgcaggcgctccgccgcctctccgacaacctcgcggcggcgttccgctccccagacgacttcgccttcctcgccgacgcgcgcatcgtggttcccggcgcgcccgacctccgcgtgcaccgctgcgtgctctgcgcgcgcagccccttcctgcgcgacgcctttgcgcgccgcgccgccagcgccggcgaggaggagaaggacaaggacagttacatgtgcaaggtggagctccgggatctcctcggagacgaggtcgaggtcgggtacgacgcgctgcggctggtgctcgactacctctac

SEQ ID NO: 23176 - DNA, 1848 bp, Zea mays
  Clone ID: LIB3594-040-D2_FLI
ggaagctcaaaaacctctccgctgaaaccgccacacgtcgcacgccccgtcccgctcctcttgaccgcctcgctcccacggtcccaccccgacgcgcggcttcctcaggcacccacctcgccgaccgacacatggaccccaccgccgcccccggctccggcggcacccccgccgactccgacgccacctccccgaccaacaccaccgtgacgctcccgccgctcaccctccgcgacgtgccgcgcctcgcctcctcgtccccggcggcggcggcggcggcggcggtcccgaaccccatctcgcgccacccctacttccacccccccgccaacttctacatctctccgggggacgtctccctccgccacgccttcttcgacctcgtctccgccgcgcccaccccgctcgtcgcctaccgccgcggggggccccggcgggacctcgccgtcgacccggccgcggcgcgcgccgcgctcgtcacctgcgggggcctctgcccggggctcaacaccgtgctgagggagctcgtcgtcgggctccaggagctatacggcgtccgccacgtcttcggcgtcgccgccggctaccgagggttctacggcgccgacgaggatcacgtcaggctgcaccccgccgccgtcgacgactggcacaagaagggtggcaccgtgctcaagaccacgcggggtggcttcgatctcggcaagatcgtcgacggcatcgtcgcgcgcgggtacacgcagatatatgcgataggcggggatggaaccatgagaggggctctggcgatctttgaagaatttaaacgccgtggtttgaacatatctatcactgggatcccgaaaaccgtggacaacgacatcggcatcatagacaggtcgtttggtttccagactgcggtggaggtcgctcagcaggcaattgacgccgctcatgtggaggctgttagcgccgtcaacggcgcaggcattgtcaaactgatgggaaggagtacaggccatatcgcccttcacgccaccctcagcagccgggacgtcgactgctgcttgatcccagaggtggatttctacctggaaggcaagggtggcctgttcgagttcctgtacgaacggatcaagaagaaggggcatgctgtcgtcgtggtcgccgaaggagctggccaggaactgattccccggactgacgatcagaagcgggagcaggacgagtccggcaacaccgtcttcctcgacgtaggaccctggctgaagtccgagctgggcagatggtggaagagggaacatcccgacgagctgttcactgtgaagtacattgaccctacgtacatgatccgagcggtccctgcgaacgccagcgacaacttgtactgcactttgctggcgcattccgccatccacggggtcatggctgggtttactggcttcgtgcctggtccgataaacgggacgtacagttacataccgctggaagatgtcgctgtggcgaagaaccctgtcgatgtgaacgatcacaaatgggcatgggttcggtcggttacgaatcagcctgatttcctgaaatcccaagcatagtacctcaagtccaatggctgctcctcccttaattagactttcttactgatccagttgcctgcatccctggttattttctgttcaataagggttgtagcttttatgctctccagtttgtgcgcatgtggaacacttttgagaaactgttgtgcttgtacatatgctgatactatcgttctcatgaataaacgatgctttttactttgagtgaaacaccgtttgcttaaactgtattggattgctatagatgtcagccgacatcgattgataatgatcc

SEQ ID NO: 23177 - DNA, 931 bp, Zea mays
  Clone ID: LIB3594-040-D7_FLI
ccctagccgcctgtcttgctgaagctgaactgctgatccgtcttccaagctgtgagggcttgtgaggtgggattctattggggagtgttgtgccgttgtttggtcttggctggcctcttgccggcgttgcacggccgtctgcagctggcctctgggcagatctggcgttcgcaaccggctctgcttatatcaaaagcaagtgtcatcccctgagttctgatccaagatgtatctccagtattacatcaatgagaagggggacaaggtctacaccaccaagaaggagtcacctcttggggtgccgacgcagtctgctcacccagctcgcttctcaccagatgacaagtactctcgccagcggtacctgttgaagaagagatttggacttctgccaacgcagaagccagcactgaagtactgaagcttcaactttccaaccatggatgtgcagtttgtgtcactgcttgatgcttgttggttggaatgtagaataggtatctgaggaaacatatcaaacactgctaggcactactatgacatctcagcgcattcaggcactatatgtaatgctatgtgtttgacaggtcttgttcttattatgtacttggtgtgtgggccaaagcatcgtttttggcgttctcttttcgtcttgattgatgacgtcccctttgctaaatcaatttgaagtcaggtctcaagtgctaatcaaggagggtaacagctttggacagctcgaatctccagaggagacttgggaagaggttgctgaaaaagttcacaaagaccaatggcttaaattcaatggcacaatgatttatattatatggaacatttgaaggatcaattactaaattcaacggcacagtgatttatattatatggaacatttgaagtatcaattactaaattcaatggcacaatgatttttatt

SEQ ID NO: 23178 - DNA, 1258 bp, Zea mays
  Clone ID: LIB3594-040-G11_FLI
gcagtttcagattgcttgctccagggcgcaaatggtcatcatcagcggcagcaacttcccagcggattcgtgatccttccgcgatgggtcccgtcgccaacgatgcgcgctgagccagcagcagaggaacccgacatctgtgagaataaatgtaggcctgcaggcagcgaggcgttgccgaggggcatcgtgcaggacaagtccaacttcgagatggagtcgctgggtggcaaccctgaacggaaggagaagaagggcaacggcaggcactcgaaaagcctcctcgccatccccgtcggcatcaagcagaaggcgatcgtcgacaagctcgtatccaagttcccggacaccaatttcatcgtgatgctgttccactacgacggcgaggtggacgggtggcgagacctggagtggtcgggccgcgcgatccacgtcggcgtgcgcgaccagaccaagtggtggttcgccaagaggttcctgcacccggacctggtggcggagtacgactacgtcttcctctgggacgaggacatcgaggtggacagcttcgacccgctccggtacctgcgggtcgtgagggaggagcggctggagatctcgcagccggcgctcgaccggcggtcgcagatccaccaccggctcacggcgcgcgccgcgcggagcgggggcgtccaccggcggtactacaagacgagcgggcacggccggtgctacggcaacagcacgggaccgccgtgcgcggggtgggtggagatgatggtgcccgtgttctcgcgcgcggcgtggcggtgcgcgtggcacatgatccagaacgacctcatctacgcctggggcatggactacaagctcggctactgcgcgcagggcgaccggagccgcaacgtcggggtcgtcgacagccagtacgtgctccaccggggcatccctacgctcggcgacggcggcaaggcgacggcgacggctgccgcgtcggcagaccggttagcggtcaggcagcggtcctacaccgagctgcagctgttcaacaggaggtggaagaaggccgtggcggaggacggatgctggaccgacccttacccgaacccggcgacgaccaccggctgaccgttggacggagcgaggcagcgcagggaagtacagtagttggtagctgtcagattgaccttgcctagaagatggtagtagatcatacactcgcattaatttacaggttcacagagagctatacatataatgtacagaactacagattgttttt

SEQ ID NO: 23179 - DNA, 632 bp, Zea mays
  Clone ID: LIB3594-041-B4_FLI
cgtgtgcgagtcgctcgtcatcctgcagtacgtcgacgagacctgggcaggcaccgggacccctctcctccccgccgacgcctacgaccgcgccatggctcgcttctgggcagcctacgtcgacgacaagttctacaaggagtggaaccggctgttctggtcgacgacagcggagaaggcggcggaggcgctcggcgtcgtcgtccccgtggtggagacgctggagcaggcattcagggagtgctccaaagggaaacccttctttggcggcgacgccgtcgggctcgtggacatcgcgctcgggagcttcgtggtgtggatcagggtggtggacgaggcggccggcgtaaagcttctggacgaggccaggttcccggccttgacggcgtgggcggagcgcttcttggcggtggacgccgtgaaggaggtgatgccggacgccggaaggctgttggagcactacagggggtttctggctaaacgggctccacctgcgggttactgatcgctgtaactgtaagcttgtaacagcaagctcagtgttcgtgtacttttccgtgcgttaacaggtgtgtactggagttcaagaaaggctttgattctgtccagacgaataaacgatactttatttg

SEQ ID NO: 23180 - DNA, 704 bp, Zea mays
  Clone ID: LIB3594-041-F3_FLI
cctgcaggccagtccgttcacgttcctgcttttcccctgtcctgcggttttggcctttttgcccccggcttcctggcggcaacgaaacaaccagtcggttcggtcgatgcttcgcgagttggaattggacgccggccgacccgctgctcaatccgtcgagttcgacatggagtctgacactgcatgcctttgttaatcgacaggctactcccttggttgctgggttgtcagtggctgccgctgcattaagcggaagatacatgattagagcatggcaagccttccggacccaggcggcaatgccgcgggtgcgccgcttctaccctggtggattccagggggaaatgaatcgaagggaagctgcattgatcctcggcgtcagagaacgtgctacagtggacaagatcaaggaggctcacaggagggtcatggtagctaaccaccctgatgctggtggcagccattacgtcgcttccaagatcaacgaggcaaaggacatgctgatgggaaaagggaagtccgggtcttcgatcttttagctgacacaaagctcattctgctgtggcgtgatcaggctgtagctttttcaagggactgacagttgcacgtttcaaatttcttaacaatgctctgctgcttgtaccatatatcataaaggatacagatacagatacagaattgaatcaacttattatctgggtctt

SEQ ID NO: 23181 - DNA, 1518 bp, Zea mays
  Clone ID: LIB3594-042-A10_FLI
gcatatgccactgctaaagtcaattcctcctgtaactcgcatggctatgggacgtggaacctgggtgaccgtcctatgcagaaagctgaaggattggtggcattgggttgcagaaggtgatctgccaattgttgcatctcatggaactgaaattgagacatacaaaacactagaaccagctattcgtttattaattttgaaagcgatatgtgatatccgtgttgagcaagaggatattcggaacttcattgacagttcccttaagcatggtcatgacctttctacttttcgtaaagaacggattggaggggattcccttggaatctcatactggtactactttatttatcttgaatgtaaagaatttccattatttcattttcatgcaaggccatgcaaaacaggtatgaagatgatgagattctcgggcatagattgtatcgtgaaattagacgagtagaacaggttaagaaggagcctggaaagaggtccaggggaaaaggaggatcttcagctatttcagttgtgtcctaccaatgggaaactgttgcgtccacctttgatgagtttgatgatgtggcagtaagttttgccatttgagttcctcatatctgctcccgtagagtgctatttgtttttctgcttaatacagtattactactactgtggaaatcttggaggtgaccaatatagaggaacaatagtggaggtagaccttgctgtgttagccaaaattcacattttagagttagtctgcatgaacactaataaagcaattcagagggcagactcaatgtgggaggctcccacatgaggatctggggaagggataaactgaggcaagccttcccctgcaaatgttgagaggctgcttcaaagacagctctcaccactgcactagggctgccttctaataaaacaattcataggaaatacaataattgactaaaatatgcgagtatttatcttgctggagtgttcatttgttctatttctttcttgtattgaactagagcagttcttttctattgtgcttagatcttatcaatgcccacttgaccacttcagctggttgacatctctgtattattcacatgcagcattttttagcacaaatggattacatatgctccaaccattatttatatgcaagtaaaaatgggaatttttttggttgtgactgatttataacacattttagtagcgcatggaaatggtacatgcatgactattttgtgaaactgctaccttaatagttgaccttattggaaccatttctcatggtgccatcaagtgtttcactgtctacacaacacttatttttaagacttcatgccagctacattataaccatgtcctgcagcccatccatccacatatatgatgtgtcaataactcggtcggggagggtaagaccaccctcgcggtattttttttttcgaacacgcaggagagctgtgtatcattggattaagaaaagaagggtctaaaaatagaccaaatacaaacacaacaaag

SEQ ID NO: 23182 - DNA, 936 bp, Zea mays
  Clone ID: LIB3594-042-F1_FLI
cgccgcgccgcgtcatcgtctcccaccgcctgccgctccgcgcgtcgccggacccggcggcgcccttcggcttcgccttctccgtcgacgccggcaccgtcgcgtaccagctccgctcggggctgcccgccaacgcgcccgtcctccacatcggcaccctcccagccgtcgcggccgaagccgcctcagatgagctgtccgactacctgctagccaatttctcgtgcctgcccgtgtacctccccaccgacctccaccaccgcttctaccacggattctgcaagcactacctctggccgctcctccattacctcctcccgctgacgccgtcgtcgctcggcggcctgccgttccagcggactctctaccactccttcctctcggcgaacagggccttcgccgaccgcctcaccgaggtgctgtgccccgacgaggacctcgtctggatccacgactaccacctcctcgcgctcccgaccttcctccgcaagcgcttcccgcgagccaaggtcggattcttcctccactcacctttcccctcgtcggagatcttccgcaccatccccgtgcgggatgacctcgtccgcgccctactcaacgccgacctcgtcggcttccacaccttcgactacgcgcggcacttcctgaccgcgtgctcgcggctgctcggcctcgactaccagtccaagcgcggctacatcggcatcgagtactacggccgcaccgtcacggtcaagattctccccgtcgggatcgacatgggccagctcagatcggtggtctcggcgccggagacggaggatgcggtgcggcgggtgaccgaggcgtacaaggggcggcgcctcatggtcggcgtcgacgacgtcgatctgttcaaagggatcgggctcaagttcctggcgatggagcagctgctcgtggagcaccgggagctcc

SEQ ID NO: 23183 - DNA, 1276 bp, Zea mays
  Clone ID: LIB3594-042-G6_FLI
ctctaagccaaagcaagttgctaggtcctttgaaccagcaactgaagcttcctcgtctcatcatcgagaccagtaagcaacatggcggctaatctcaagtgggctcctgttctagccctcgtcgtcgtcgttgctgccatggttggcaccacgagcgccggcaacatcgcagtgtactggggccagaacggcaacgaaggcagcctggcggacgcctgcaactccgggctctacgcctacgtcaacatcgcgttcctcacaaccttcggcaacggacagaccccagtcctcaacctcgccggacactgcgaccccggctctggcagctgcaccggccagagcagcgacatccagacctgccagtcgctgggcatcaaggtgctcctctccatcggcggcgccagcggcagctacggcctctcctccaccgacgacgccaacagcgtggccgactacctgtgggacaacttcctgggcggcagcggctcgtcccgcccgctcggcgccgccgtgctcgacggcatcgacttcgacatcgagaacggccagtcggcgcactacgatgacctggcgaacgcgctcaagggcaaggggagcgtgctgctgacggcggcgccgcagtgcccctacccggacgcgtcgctggggccggcgctgcagacgggccagttcgacaacgtgtggatacagttctacaacaaccccgggtgcgcgtacgccaacggggacgacaccaacctggtgaacgcatggaacacgtggaccagcagcatcaccgcggggagcttctacctcggcgtcccagcgtctccccaggccgcgggcagcgggtacatcgaccccggcaccctgacgggcacggtgatccccgccatccgaggcattggcaactacggcggcatcatggtgtgggaccgctttaacgacgtgcagaacaactacagcagccaggtgaagggcagcgtctgatgggcataccgcatacgaagcttcaagctacagcacctagccatgcatatatatatagtggctattcgtcaagttatcggactgctagatacaaatataataagagcggatcatcgggagacaaagacgcatgtcagctattgtctcgttttctaagcaacgagcgagagctgcatgcgctggttagatttaatatggatattgcccatacgttatgtaattaaatcaaataaatgttaagttcatattgaatgtgtcgaatcccatggtacaaccctatttaatatgagtctcttagggtttctat

SEQ ID NO: 23184 - DNA, 1389 bp, Zea mays
  Clone ID: LIB3594-042-H8_FLI
gaggcaggttggtgtgcgttgattcctgcgctgcgcctcaaggccaacgcccggcgaggacaggatgaggggacagcgggcaacgagagggaggaaaatcccagtccaactctaggcgcttcccttctcccttttcctttcttcttccccgaggcgctggccccgctcaggtcgggacctgccgccatttcagaactcctagcttcttctaggtcggggttgctgcgcaccttgcgtaccctgggttgagcatcattggagtggaagaaaggaatcatgttcaggagaaagcatgcttctcattccaactcaactgatgctgagcagcaagaagcaaagataaatgaattaaaatctgcacttggtcctttgtctgcccatggcgagaagtactgcagtgacacatgtttgagaagatatcttgaagcccggaactggaatgtcactaagtcgagaaaaatgcttgaagaaagtctcaaatggagggcaacttataagccagaggatattcgctggcctgatgtttctgttgaagcggaaacgggaaaaatgtacaaggcaaattttcgagatagagaggggagaactgtaatcattatgaggcctacaaaggagaattcaacgtcccatgacggtcagattcggtttcttgtgtatgttttggagaatgcgatcctggaccaacgtgaaggtcaagagaaaatggtatggctgatagacttcacaggatggacaatggcccatgccacacccataaagactgcaagagaatgtacaagcatcctgcaaaatcattaccctgagaggctggccattgcatttctgttgaatcccccaaaagtattcgaagccttttacagggctgtcaaatatttccttgacccaagatcgatcgagaaactgaacttcgtgtacctgaaggatgaggagagcatgaaggtcctgtacaagtgcattgatcccgtggtccttcctgtggagttcgggggaaagaacagtgttgtgtacaaccatgaggactactccaagttgatgctgcaagaagatatcgaaacatcaagcttctgggaggatgatgcgaaaactgttaaccatgctatcaatgggaccttggttcctgatgttgcatctcagctgtcacggattgctgctaaagccagttaatgagctactacgatgggagctattcagaatgctttaatggagtaactagaaagtcgagcgccaataaaatgttcatagtaaacagaaatagagcaaataacagatgagatatcacttgtccatagtcgaaatagttgcacttatcgaacactttattcagtacacgatgagttacaggagactatcgtaatgatgtaagaggtagaagtgctacctgcttaatgt

SEQ ID NO: 23185 - DNA, 1703 bp, Zea mays
  Clone ID: LIB3594-043-B6_FLI
tctcactccacgtcgcaagggaaatggccaccgcctcgctcgcactgctcgatcagacgctgctgccgtcccctctggcgtacaacggcggctccgaccgcctcagccaggagatcttctccatcctcgagtccaacttcctattcggcgcgtcgccgctggagggcggcgcgtgctccgcgggccgcgtccgcgtgctgtccatcgacgggggtgccgacggcggcgcgctggccgccgcagcgctggtacggctcgagcgccgcctgcaggagctctccggcaaccccgccgcgcgcgtcgcggacttcttcgacctggcggccggctccggcgcgggcgggttcctcgcggcggcgttgttcgcgtgccggatgcccgccgaggcggcgcgcgacgtcgtggccaagaaccggaaggtcctgtccgggcgtggcgggggcctgatgtcgttccggcgccccgaggccgcgttccggaaggtgttcggtgacctgacggtgcgcgacgccgccaagccgctgctgatcccgtgctacgacatggccaccgcggcgccgttcgtgttctcccgcgccgatgccgtggaggccgacgcgttcgacttcccgctgtggcaggtgtgcgcggcggcttgcggcgtgggccccgcggaggtggcgtccctggacgggcgcaccaggctgcgcgccgcgtcgggggcgggggcaggcgggggcggcgcgtcggccgccgtggccaacccgaccgccgtggcgctgacgcacgtgctgcacaacaagcgcgagttccccttcgccgccggcgcgggagatctcgtggtgctgtccctcggcgggcgcgccgcagcctcgctgggccggctctcgtcctccagcctcctgcgcatcgccggagcctgccaggccgacatgtgcgcgcggattgttttgttttgcaggttgaccaggccgtgtcgatggtgttcggggagagcagagcgaccaactacgtccgcatccagggcaacggcattgcgcccggcgagacggcggaggcggcgctggcggagcggggcgtggagtcggtgctgttcaggggaaagaagctgatggcgcagaccaacggcgagcggctggacggcgtggcggagcagctggtccgggagcaccaccgccgactggagagcaagacccccgtggtgctggtgaagccctccgccacgccgcggacgtcttcgtcgtcggcgtccacgctcatcaccgtgtccaccaactcgtcgtcggagtcgccctgagaccgagacgacgagcgaccgaccgagcgagccgtcaacagacagacagaagcagctcggctttaactagcgtggccttgctttgttttcagcttttttatttattggttcgtttgggtttctagtttagcgcggcgccggcgccggtgctcggggttttgacttttgattgcctgccggcgccgcctgcgcgctcgctcccggtcccggccgcctggcgcggccgggaagaaagatcgaggagggctgtcgagcggcgaaggcgccagagatttgtgtacgtagctagaggaaggagatgtgcctgtatgtgtgcgtgtgctgcaaacgcagtgtatgtacgtgcgtacgtagtagagtgcccggagcttggatgatattgcaatgcgatgtgacgatgctactgtcggtgtggcgtttactgatc

SEQ ID NO: 23186 - DNA, 509 bp, Zea mays
  Clone ID: LIB3594-043-C4_FLI
ccccgctctcccccgcccgcaatcccagctctctcttcctccttcccactctccccgcccgcaatctgcccgcaatcccacgctcgcgccgtcgatgactcgccccaggaaatctcgcctccgcaacctcctccacgcaccgtcaatggaaggtccacccccacgtcgtctatggaaggtcgcgccgtcaatggaaggtggcaggtgctcgccattgaaggtgctcgcgtcccgaacttgcatacgcagctagaaggcggttttgaatcagtttttgattttacggcaaggtccaagactttcaccgtcctcttcagcagcagtacaaaaagtgattttaccttttgtctctgtgtcttgtttttattctagaatttgtagcaaatgaagaaggacgaggacacccatccccttgtttgtaacaatggagtgtttcagtacaaaaatgcaatccagaagtgtttttaaatgtttttataattcctcgaaaagaaagaacaccaggacac

SEQ ID NO: 23187 - DNA, 477 bp, Zea mays
  Clone ID: LIB3594-044-G7_FLI
tcagagcccttcctcttgtgtccgtgcaaattggtgatacttgaacagggatctcctccatattagtgagcaggatgtataatcctcccagtgggcaggacatgtcctactacgatcatgtgcagaagcgccatgaggagaagggctgcctatatgcatgcctgttcactgcgtgctgctgcttctgctgcttcgagacctgtgagtgctgcctcgaggccatctgctgctgctgctagttctgcttggagggcatgggcgtccatcatcgtggagatgtggccatgcgggacacccaccgccgaataaaatgctgtacttatatgcacgcacgttagaaatgcattagtgtctgtttgatgtgatcttgtgtgtgtgcgcgcgcatcttcatttgcactggaaaatgctttattatttgtgaaggtctgtaaatctgttgtatgtatcttggtcagatgaactctattattgtgcc

SEQ ID NO: 23188 - DNA, 952 bp, Zea mays
  Clone ID: LIB3594-046-A9_FLI
gcgtgcgctctgcccctccggcgtccgccgccgccgtcgccctatcccaggtgccgtggtctccatctcccggagcttcgccggcgacgagaatcctccagcatctcggcgcgtgtagagccatgctgggcgcgcgtgtgcagctgaaggggtggcaacaggcagctgttgcatttggttctgcgtttggggccttgcttgaccctaggagggctgatcttatagctgctcttggagagactactgggaaaccagcgtttgagcgtgtgctgcaacgaatgaagaacagtgcagaaggcagggaagttctttcggagcgtcctcgcgtggtatcctcgcaggtttcccatgcctgggacatgcctcagaacacatttggcgcggcgtatgctcagttcatgggatcaaggaacttctcaccagacgatcgcccgcctgtccgtttcatggacaccgatgagctcgcctacgtcgcgacacgtgctcgcgaggtgcacgacttttggcacgtgctgtttggtcttccgacgaacctgattggggagaccgccctcaaggtgatagagtttgaacagatgttcctcccaatgtgcatgctgtcggtcgtcggtggctctgcgaggttcagtgacaaacaaagggcgctgtttttccagcactacttcccatgggcaacaaaagctggtctcaagtgtactgatctgatgtctgtatattacgagaagcactttcacgaagacctggaggaagtgagaaggaactggggaatccttccttgccccagtcccaaaaagagcagtgtataggccggcattttctgcgtgaactttctatctgtttcttctttggtttctgttagttgctcagttctttttggaataaaatcatgagctaatgttgatgaatactgatacgttaccgagttcgaagtatggttagcaagttgatgtgc

SEQ ID NO: 23189 - DNA, 1665 bp, Zea mays
  Clone ID: LIB3594-046-B3_FLI
ggttagattccgactgcgaggatgacttctacagcgtgaatggaggtaatcaaacctttaaacacatgtttatttactataaatgtttaaagaagttctattctagttttagagatagcttcttataccctggccctgcaaaactgagattactttggcaccagttagtgctcaagttgatcgtgccatttcctttttttttaggttctcctattattataccagaaacatgtgcagcgtggattgttccacttgttacgcacaagatgcatgtgctgtgctaggttccttgatgacacagctttatctgtctctagaatctaagggcgtcagcaatggctgtctgatgtggagcttagagaagaataaaaatagtaatttatctcaccactagtatatggtcctacacttaatacactcagttttttgaaatacgtgaaatctcctatctatttactcgtcactagctattttcgttttctccacattttctatccacgtagtaaagagagtgaatctaactagtgaaatagctagccattggggacaccctaagactatctctaacaaattagccaaatggctcgtcaagccaaattttagctactcaacagcaaaataactctgcaacatactagctatctgactcgtcaagctatttgactctccaaattgacttactcactagtcaaatttggctagccacctgaatagtaaaactagatagattagatagtctgttagagtgagatgctacatttagattgtatttttttatgaaaaggtaaatagagagttaaacagagggaaaaaaataaagagtctcttggagatgcttacctaattttcgctctgattgcctatcgaaacaaaaagtcgatgccttcgattttgtctttgggcgctatcattatggacatggaccccccacctttagcatgtggtcctctatcaatcagtctagcaatatcccggaaacattaacacgttcatttatggactttgacattctcaaggaagttctgatgcacccaagtttattaatgtgatttgcttcagttgctgcataaccataggtcgtgctctttatgcagatttcactccgtctcgtggcagcacacccgtctaccagcccagagcgcagacggtgatgagcagcatctttcagccggacacgcgcagttccaaatcaccggagccttctccgactggacggaggaagctcgctgagctgctgcaggaggcaatgcaagacggtcccgaagaaagcgccgacgagcagcagcagcagcagcagtcgcgatctgctggtgctgccgctgatgggaagccgccggtgtctgagtccacgtccagctccgcttgcagcaccgtgccaactccggtcgcagtcgccaagagccggaaggagaaggcgtggtacaccggacgctgttgcctgccgagctttgttcatagcctgaccttagacgagagtgagagggggcagaagatgagctctaggccatgtgctgtttgacggtggggctccagtgccctcctgagtcctgccctgagctgtatttagcgcgatatgttatctgaatgcccgattgggacgctgaagctactgtattgagatttgagagtactatatagtaatcaagtggataataggcactcgtt

SEQ ID NO: 23190 - DNA, 1364 bp, Zea mays
  Clone ID: LIB3594-046-F12_FLI
gcgaagagacctcgggagtgagtgggccgctgggagagcagacaacactgcaacggggtgcgcgcccgcccgtgccgttctccgtcgtcaccgttcgcccgccgccgatccatggggtgggcgctggctctgcacggcggcgccggggacgtgccgcgcacgctgccgcccgagagcagggagccgcgcctcgccacactccgccgctgcctcgacatcggcaccgccgcgctccgggagggccgcaccgcgctcgacgttgtcgagctcgtcgtgagggagctggaggactgcccgcacttcaacgccggccggggctccgtgctcacctccgccggcaccgtcgagatggaggcctgcgtcatggagggcgccaccctgcactgcggcgcggtctccgggctctccaccgttgccaacgccgtctccctcgccagactcgtcatggagaagacgccgcacatctacctcgccttcgacggcgccgaggccttcgccagggaacagggggtggagactaaggatccaagccactttatcacggacaacaatatcgagcgtctgaggcaggccaaagaggccaacagggtgcagatcgactacacccagccagcagcaggccaaagccaaaaggcccaggccgtggtggacgacaactgccagacgggcacggtagggtgcgtggccgtggacgcggcgggcaacctcgcgacggcgacgtccacgggcgggctggtgaacaagatgcccggcaggatcggcgacacgcctctggtgggcgccggaacgtacgccaacgcgctgtgcgcggtgtccgccacgggcaagggcgaggagatcatccgccgcacggtggcgcgcgacgtcgcggcgctgatggagcgcggggacgcgctcccgctgcgcgacgccgcggcgcgcgtcgtggcgggggcggcccgcggcgccgtggggctggtggccgtgtcgcgccagggggaggtctgtatggcgcacaacaccaccgccatgttcagggcgtgcgccaccgaggccggccacaccgaagtcggcatctggacggacgccgccgacgcaggcacgggcgcggacggagagactgtcagcgtcgcgctctagctctaggcatttcatccccgtgtggcgtattctatcgttcgcgtcccattattgccacctgtccgatagacaacttgttctcgatccggtaatttcaccgtgcttcagctgcgtgtgtttggaaaaattgattcggtttcgggtattgttaagagatcgatgggagaagtgaaacattgttgggcgttcagtatgcttttgtaataccttttgttttcttaaataaagtcctaaggagtgttggg

SEQ ID NO: 23191 - DNA, 1422 bp, Zea mays
  Clone ID: LIB3594-047-C10_FLI
ctagttggtacctttgctgcctgctgcaatcagtgatctgtgccgcctggggtctcggaccatcagatctccagctagcttccttgctacttactcccctacccgctgcaccctcgccatggatccgccgagctccgatatcgtagtcgacactccatacttccgcatctacagtgaccggcgcatcgaccgcttggtcggcaccgataccgtgccggcgggctttgatcccaccaccggcgtcacctccaaagatgtcgttgtagacagcgacgccggcgtctacgttcgcctgtacctcccggacacggctacggggtccgatgattccaagaagctcccggtgctagtctacttccacggcggcggctttgtcacccactcggcagcgtctccgccctatcagtccttcctcaacaccctggccgcgaaggccggcctgctcatcgtctccgtgaactaccgcctcgcgccagagcacccgctgcctgcaggctacgaggactccttccgcgcgctcaggtgggcggcctctggtagtggggacccctggctgtcacatcacggcgacctggcccgcatcttcctggccggcgacagcgccggcgggaacttcgtccacaacatcgctgtgatggcagccgcgtcggaggtgccagtgcgaatcaggggcgcggtcctcctgcacgcggggttcggtggcagggagcgcatcgacggagagacgccggagtctgtggcgctgatggagaagctgtggggggtcgtgtgcctcgcggcgacggacggcctgaacgacccgcggataaatccgttggctgccgccgcggcgccgagcctgcggaacctgccgtgtgagagggtgctcgtctgcgcggcagagttggacttcctgcggccgaggaacagggcgtactacgaggccctcgcggcaagctggcggagcggcacggtggagtggttcgagtcgaagggcaaggagcacgtcttcttcctctacaaccccggctgcggcgaggccgtggagctcatggatcgactggtcgcgttctttgctgggaactgaaattcgtcatgtgtggatgtgaccgcgaccacatccacatccagtgcagtgagacggatggatcaaacgaagatgcagctcatcgctgaatcgaatgattgagctgggtccaggaaaagaaaactaaaagtgactagaataattgagatcggagccttggattgatcagtttgtgctatcaatttactgcacgggtcagcgtctcttgttttctttttcatcgagaataatatactagtaggaccgaaactatctcagcatccgaaagtatcagcttatgtcgatcctttcgtgtaggcgtttttttcctttgcatatattattgtataactcttctgtgtcaatacatgtccaat

SEQ ID NO: 23192 - DNA, 831 bp, Zea mays
  Clone ID: LIB3594-047-C8_FLI
gaacgctatcccatcttctcacacaaaaatatccgcgcgaccccgacctccccctcccactccgggcagcaagcagcagccagcaggcatggggatacctgtggtggttcccgtcgcggcggcctactcgtgctcctcctccctcgccgcgccaccgagggccgccgccgccgcggcgagggcgccgagccgcgcgcacgtcgcggcggccgggatgtcctccagggcgtcctccttcgccgggggcagcggaggcgacctcgcggcggtggccgcgtcggtagccgcgcggcccaggagagcgggctccgggggaggcggcgcgctcgggtgcaagtgcctcttcgggctcggcgtgccggagctcgccgtcatcgccggcgtcgccgcgctcgtgttcgggcccaagcagctccccgagatcggccgcagcatcggcaagaccgtcaagagcttccagcaggcggctaaggagtttgaaactgaactgaagaaagagcctggggaaggcggcgatcagcccccacctgcaacccccacagcggtaagtggcggggaggagaaggggcttgaggcatctagtagcaaggagagcgcgtgaggatcaggatctatctagtgttgtttatgaaaattgtattctgggcttctcgagttagcagttcatatccttttaaccgcatcgcggtttcaggccatgtagcgatattgtttgtagtttgtaccgggaataacatatttggttgagcttctacgtattgaagaaacaacttatctgtgaagctgatgtgaacaaattctatttattatctatttttagtttgttctgag

SEQ ID NO: 23193 - DNA, 1971 bp, Zea mays
  Clone ID: LIB3594-047-D7_FLI
acaataaacaacagcttcaccctcctcctccagtgcaggccgtcggcggctggcggcgtcatttctcctccttcctctggcctgccctgccctgccctgcccgcgcgataaccatctctcgcaactcctcttcgtactcctcgtctccaacgccggcaacaactacagagcttcagcttcccaagcgcgagacatgcgtgcggaaacacagacggcggagtagcgtagcgccacgatgggattgccaagctggtaggtagccaagaagacatgagatgggggcgtccttgggctccgccgccagcaaggaccggcagcaggagcacggcggcgaggctccgcgaccagatccctgcaagaagacgcggctctcgtcccctctctgcactatccacggtagccacggccacccgaggctgatcccagggctcccggatgaggtctctctgcagatcctcgcgaggatgccgcggatggggtacctcaaggccaagatggtctcgcggagctggaaggcggcggtgaccggcgcggagctgtaccggctgaggaaggagctcggcgtggccgaagagtggctgtacatactgacgaaggcggcggcaggtgggcagaagctggtctggcacgctctcgatccggttagcaaccaatggcagaggctgccgctcatgcctgggatcgagtgcaggagtggcggcgtgtacgggctgggcttgcgggacctggtgagcgtcggcgtaggtatcttcgacgtcatcagaggctggctcgggcagaaggaactgtcaggcggcgtaccaccgttctgtggctgcgccgtcggcgccgctggtggctgcctctatgtcctgggcggcttctccggagcttccgcgtcgaagcgcgtgtggaggtacgacccctccgccaactcatggcgggaggtgagcccgatgcgcgccgggcgcgccttctgcaaggcgagcctgctgaacgacaagctgtacgtcgtgggcggcgtcagcaagggcgagaacgggctaatagctccgctccggtccgccgaggtgttcgacccggcgactggggcctgggccgagctgccggacatgctgttctccaagtcgcaggccatgccgacggccatagctgacctgctcaagcccgtcgccgccggagtgacctcgtacggggggaagctgcacgttccccagagcttctattcctggccattcgccgtcgacgtcggcggagaggtgttcgatccggagacgaactcgtgggagcagatgcctgcgggcatgggcgagggctggcctgcgaggcaggctgggacgaggctgagcgccgttgtggaaggggatctgtatgccctggagccgacgacctcctcttccggcggttgtgagatcaagatgtacgacgcgcaggaggatgcttggaaggtcgctgtgagccaggttcgtgctggggcatttgacgagtcggacagcccttgcttgcttgctgcgtttcttggaaagctccatttggtcgtcaaggatatgggcagcaggatcagtgtcgtgcagatggactctctgatgaagccagtggattcgccagccctttcggctgccacgacatgccgaaccccggatgtctcctcggagcagacacatgtctggaaagccattgcatcgaagaacattgcagctgctgaacttgtcagctgtcaggttctcagcatctgagttcgtaaaatcgagcttctctggaacttctttgtgtaagtctgtgcagtagatgtgtttctgccacacatctgaacatcagagactatttctttctttcagcaatgcacaattgtttgtgcaatctgcgtaattgttatctgtgtatataacatcacatagaactgaataaggttgacgcagctttgtccaatcccaaaggcaacggcgccgactcaatcaatcaccggaccaatctgaaccctgttcattgttc

SEQ ID NO: 23194 - DNA, 499 bp, Zea mays; identical to SEQ ID NO: 23075
  Clone ID: LIB3594-048-B7_FLI

SEQ ID NO: 23195 - DNA, 1029 bp, Zea mays
  Clone ID: LIB3594-048-D10_FLI
aaacacaatcaactacacgaaggaatgatgatagctgtgctggacagctggagcaccaactctcatcaaaccgactccgcacacgttgacgaatcggggtctccctttcgtgcttagtgcaagcgaattcaatcctcagattctacgcaaaaaaagcttaatcggagagccacggagatcagatcatcagctccgcagacgcgcaaatggcatcgccaacgaatagagcgcttgaacggtacaagagcgccatcacggccgccacgtccgtggtgggcgcggccatgctgctgcgtcggctcgtcgctggcgtcctcccagccggcacgccgccgctggtgggcgcgctgctcctcctgccgccgccctccgcccggcgccacgccgtggtgatcgaggagttcgacggcgccttctacaaccgggtcttcctagcggtcagggcgtacgtctccacgctcctcgccgcggcgccgaccggcgcgccacccgtggtcaaggccagcctgccgcgcggcgccggcgccggcgcggagcagatcaggctcgccatgggccccggcacggccgtcgtggacgtgttccgcggcgccgagctcacgtggcgcctgaggagtcacggtcacggcggcggcgcgggcgaggcgttcaggctcagcttcgacgggcagcacagggacctggcgctcggcgcctacctgccgttcgtcatggcccgcttcgaggccatggcgcgggaccggaggcaggccaagctctacagcaacgagtgggggaagtggcggtccgtcaggctccgcaacgcctccacgttcgcgacgctggccatggacgcggcgctgcggcaggacgtgctggacgacctgggcaggttcctgggccagaaggagtactacgagcgcacggggtgggcgtggaagagaggctacctcatccacgggccgccggggaccggcaagtccagtctcgtggccgccatgtccaaccacctccacttcgacgtgtatgacctcgacctcggcgccgtcc

SEQ ID NO: 23196 - DNA, 1372 bp, Zea mays
  Clone ID: LIB3594-048-D3_FLI
ccagcgatacagatccttgcacggacacaagggctccgcgctcccaccggatcggatcccgtcccgatggctcccactcccactcacacggcggcggcggtggcgctcgccgcgcacgactcgtccggccacctcgcgccgctcaccatcacccgcaggagtaccggggacgacgatgtagcgataaagatcctgtactgtgggatgtgtcactctgaccttcacagcatcaagaacgagtggcacaacgccacgtaccccatggtccctggtcacgagatcgccggagtggtgacggaggtgggcaagaacgtgaccagcttcaaggccggggaccgcgtcggcgtgggctgcatggtgaactcgtgccagtcgtgcggcagctgcgacgaggacttcgagaacagctgccgggccgtcatcttcacctacaactccgtcgaccgcgacggcaccgtcacctacggcggctactccagcagcgtggtggtgcacgagcgcttcgtggtccggttccccgacgcgatgccgctggaccggggggcgccgctgctgtgcgcgggcatcacagtgtacagccccatgaagtaccacggcctgaacgtgccggggaagcacgtcggcgtgatggggctgggaggcctgggccacgtcgccgtcaagttcgccaaggcgttcggggccaaggtcacggtcatcagcacgtcgcctgggaagaagcaggaggcgctcgaccggcttggcgccgacgccttcgtcgtcagcaaggacgccgaagaaatgaaggcggctgcgagcaccatggacggcatcatcaacacggtgtcggcgaacctcaccttggccccgtacatgggcctgctcaagcccaacggcaagatgataatggtcggcctgcccaccaagcctctcgagatcccgccctttgatctcatcattgggaacaagaccctggccgggagctgcatcggcggcatgagggacacgcaggagatgatcaacgtggcggccaagcacggcgtgacggcggacatagaactggtggccgcggactacgtgaacacggccatggagcgcctggccaaggctgacgtcaggtaccgcttcgtcatcgacatcggcaacaccctcaagaattcagagtgatcagacctaaaacgccggcgacacctctactgctgctgcttgttgtgccctgtcggctttatacgatgaaccgcgtcctttttttttctgtgtcagtgataatattttagctaaggcagacgtaaacgtagttcgcgaggattgccttcccatgcatgttatggaagttggatgcttttattgttgttgccgtaaaacgagatatgatgcagcatttttttatttt

SEQ ID NO: 23197 - DNA, 1372 bp, Zea mays
  Clone ID: LIB3594-048-G5_FLI
gcgcctccatttcggcctctgtcccttgcaagttcaatctcacctccaaccatgggtaaagagaagtcccacatcaacattgtggttattggccacgttgactctggcaagtcgaccaccacaggacacctgatctacaagcttggaggcattgacaagcgtgtgatcgagaggtttgagaaggaggctgctgaaatgaacaagcggtccttcaagtacgcatgggtgctcgacaagctcaaggctgagcgtgagagaggtatcaccattgatatcgctctgtggaagtttgagaccaccaagtactactgcacggtcattgatgcccctggacaccgtgacttcatcaagaacatgatcactggtacctcccaggctgactgtgctgtccttatcattgactccaccactggtggttttgaggctggtatctccaaggatggccagacccgtgaacatgctctccttgcgttcacccttggagtgaagcagatgatttgctgctgcaacaagatggatgcaaccactccaaaatactccaaggcacgttatgatgagattgtgaaggaagtctcatcctacctcaagaaagttgggtacaaccctgataagattgccttcgttcccatttctggttttgagggcgacaacatgattgagaggtccaccaaccttgactggtacaaaggcccaaccctgcttgaggctcttgaccagatcaccgagcccaagaggccttcggacaagcccctgcgtctgcccctccaggatgtgtacaagattggtggtattggaactgtaccggttggtcgtgtggagactggtgtcatcaagcctggtatggtagtcacctttggtccaactggcctgactactgaggtgaagtctgttgagatgcaccatgaggcgcttcaggaggctcttccgggcgacaatgttggcttcaacgtgaagaacgttgctgtcaaggatctcaagcgtgggttcgtggcctccaactccaaggatgaccctgccaaggaggctgccagcttcacctcccaggtcatcatcatgaaccaccctgggcagattggcaacggctatgccccagtgctggactgccacacctcccacatcgccgtcaagtttgctgagctcattaccaagatcgacaggcgatctggcaaggagctcgagaaggagcccaagttcctgaagaacggtgatgctggtatggtgaagatgattcccaccaagcctatggtggtggagacattctccgcgtatcctcccctgggtaggtttgccgtccgcgacatgaggcagacggttgctgttggagtcatcaagagtgtggagaagaaggacccaaccggcgccaaggtgacca

SEQ ID NO: 23198 - DNA, 761 bp, Zea mays
  Clone ID: LIB3594-048-H6_FLI
cacagtcctacgagcagtcgcacgcaagtgtcaagagacaaaacggtcgacatggctcgcacgcaatctgccgtagcggtcgccgtggtggccgcggtgctgctgctggcagcggcggcgacgacctcggaggccgccatcacctgcgggcaggtgagctccgccatcgcgccctgcctctcctacgcccgcggcacggggtccggcccctccgcgtcctgctgtagcggcgtcaggaacctcaagagcgccgccagcaccgccgccgacaggcgcgccgcctgcaactgcctcaagaacgccgccaggggcgtcagcggcctcaacgccggcaacgccgccagcatcccctccaagtgcggcgtcagcatcccctacaccatcagcacctccaccgactgctccagggtgaactaaaacctagaccacgcgcgacgacggccgcctgatcgatcgaccaaccattccgccgtcgccgccggccggatcatcgatcgtcgtcatgatgatatctatcaatctacgcgtgatgatcgatggctacttgtctactgctatgtactactaaataaaatctctccgtgtgtgcacgtacgcttgcatgtgcatggtagcatgtatgtacgacgtcgtccatgtatgtgtgtgtgacgtgtgagacagagagagagagagagagagagagagacaggatcgatcgagagacggtcatgtccttttggctgtttggtttattcatatcacaacttttgagtgtatac

SEQ ID NO: 23199 - DNA, 1173 bp, Zea mays
  Clone ID: LIB3594-049-A3_FLI
ggagggaggaaggagacggtcgatcagagtctgagacggaggccgatccaccaccgcagcgacgagcgggaggagatgaagatcatcattgacacggatcccggcatcgatgacagcgtggccatcctgatggcattccagatgccgggcgtccaggtcctagggctcaccaccatcttcggaaactgcaccacagagcatgccacacgcaacgccttgatcctgtgcgagaaggcaagccatctagaggtcccagtagctgagggcagccatgagcctctcaagggaggaaagccgcacgttgctgacttcgttcatggacctgatggcctcgggaacgtagatcttcctgatcccactatcaagaaagtggaggaaagtgctaccgacttcttggttgataaggtctcgcgatttcctggagaggtctctgtgctcgccttgggtcctctgacaaacatagcattggccatcaagaaggatccctcattcgtgaaaaacgttaagaagatcgttgtgctgggtggagcgttctttgcggctggaaatgccactccttccgctgaagcaaatatccacagtgatccggaggcagccgacatggttttcacttctggggcggacatctacgtcgttggcctcaacatcacaacgcaagtcagcttcacagataaggatctcctggagctaagaaactcgcaagggaagtacgcacagttcctatgtgatgtatgcaagttctacttggactggcacaccgagtcttatggtgctcctgtgattttcctccacgatccggtcagctttgccgcgctagttcgtccggagctgttcacgttcaagaagggcgtggtgagggtggagacgcagggcatctgcgtcgggcatacttccatggacatgttgctgaagaagtggaactcagagaacccgtggactggctactcaccgatttcggtcgcatggacggtcgatgtgcccaaggtggtcgcgtttgtgaaggagctcgtcaccaagccgtgaaccaagttaactaacgtgttgtggtctcgcgcaccagatgtgcagcaaatttgagatgtcgatatatttactcacattcgaagcactgcaaacactattatctcaatagttggttcctgtggaggattgcaaatcaatttgagatgtttt

SEQ ID NO: 23200 - DNA, 1249 bp, Zea mays
  Clone ID: LIB3594-049-B7_FLI
ctagtgagtgagagagagagacagagagatcatcgatcgatcgatcgacgaccatggcgaggcaacgacaagttgcttccatgcttgcagctgctctgctcgttgcgacgttcgcgtccattcctacaaccgtgcactccatcggcgtctgctacggcacgctgggcaacaacctgccgtccagcagcgacgtggtgcagctctacaggtccaagggcatcaaaggcatgcgcatctactcccccgacgccaaagccctcgccgccctgcgcaactccggcatcgcgctcatcctcgacaccggcaacggcggcggcgtcctgggccagctcgccaggagcgcctcgttcgcggactcgtgggtgcagagcaacgtgcgcccctactaccccgccgtcggcatcaagtacgtcgcggtgggcaacgaggtgcagggcgacgacacgcgcagcctcctcccggcgatgcgcaacctggacgccgccctggcgcgcgccggcttcccgggcatcaagtgctccacgtcggtgcgcttcgacgtggtcgccaactcgttcccgccctccagcggctccttcgcgcagggctacatggcggacgtcgcgcgctacctggccggcaccggcgcgccgctgctcgccaacgtgtacccttacttcgcgtaccgggacaacccgcgcgacatcagcctgggctacgccacgttccagccgggcaccaccgtcagggacaacggcaacggcctcaactacaacaacctgttcgacgccatggtggacgccgtcgtcgccgcgctcgagaaggccggcgcgcccaacgtcagggtcgtcgtgtccgagagcggctggccctcggccggcggcttcggggccagcgtcgacaacgcgcggaaatacaaccagggactcatcgaccacgtcggccgcggcacgcccaagaggaccggcccgctggagaccttcgtcttcgccatgttcaacgagaaccagaagggcggcgatcccacggagaagaacttcggcctcttctacggcaacaagcagcccgtgtacccgatccggttcaactaattaagagtggcggatcggaggaataatacatcttcatcaatcaattaacctaataatatgctacatgaataagctgctgcgtgcatgtatgtggccgccggacttgtggaagagcggtgcaattaactgtatgcacgtactctatctatatatgatgaataaaaagagatagaattctg

SEQ ID NO: 23201 - DNA, 1093 bp, Zea mays
  Clone ID: LIB3594-049-D4_FLI
cgtggaagccaactacattgtggtcaagtcgtaccagtacacgtcgttgacgagcgtgatgctgctggactgctggtcgatcccgtgcgtcatcctgctcacctgggtgttcctcaagaccaagtacggggcgaggaagttcctgggcgtcggggtctgcgtgcttggcctcatcctggtcgtgttctcggacgtccacgcctccgaccgagccaaagggcctaacccgttgaagggcgacctgttcgtgatccttggttcgatgctctacgcctgcagcaatgtcaccgaggagttcgtcatcaagaaaagcaacagggtggagctgatggcgatgctggggcttttcggagcgcttgtcagcgccatacaaattagtgtacttgagcgagaagagcttcactccattacatggactagtggtgctgtgctcccttttctcgggttcgcggtagcaatgttcctgttctactcggctgtgccagtaatattgaagttatgcggcgcgaccatgctgaacctctcgctcttgacctcggacatgtgggctgtcctcatccgcatcttcgcttaccatgagaaggtcgactggatctacttcgttgctttcgccgccactgcgggcggcatcgtcttgtactcgtacaagggctccaatgaagtggaggagacggcacaggtggccggggccagcgacgagcacggcaagggccgggacgaggaggctgggacgcggaacccagcgtgaagctctggcgccagccagcaatggaggtgggttgccccctgccaggcatccaggagtgacgagttgttgttgcatgccttgacggcgagtgtagcagagaacttggtcaagtgtcgcaggagactgcttcaagatttgacgacggagatagtattggtttttatgtaaaacaagaacagttggtaacataccgacaccgaaccgtcgtcagaaatgattagatctaagaatcgaagattttacaggtgtttttggtaggtgtgtttggttgagaaatagagcggtttcatttttattttctgatgtttgatttccaataaaagataagcagagcacagttttcgt

SEQ ID NO: 23202 - DNA, 493 bp, Zea mays
  Clone ID: LIB3594-049-F4_FLI
caagtttagattcttgttcacgcgttcaaagatgcgtggggaaaacaacatagtcctccttctcctcctcctgtttgctgtaatttctccgaaccaagtaattggtagtgcttgtactccggaacagaaggctgccatcctaaatcaatgcgaagagtacatcaagcctggatacccccttatactgccatcgtacgccagtgtgtgttgcgacaaggtgagagatgtgccaaatagggacatgaactgcatcgtcgatctgctcacgcctccagagaaggcgaaacacggtgtcgacaagataaaacgtctgaaagatctctgcgacaactcgcctcatcatcaggtggtggtgtagacagacagcagctgtcattgctaatggagttcggaggcaagatatatggtctagtaaataaagtcgtcgatcaaagcatgacaactgtcaaatgtatctttgattaagtaaagtatcactcaagatttccagttt

SEQ ID NO: 23203 - DNA, 1146 bp, Zea mays
  Clone ID: LIB3594-049-F6_FLI
cccacggcagaattccgattccggccgcctcctatacatagccagccttccaccctctcccctcccccaacacagagcagcgagccgcgcgcggaggcgaggcgttcgcacacctcgcccgcgccaccaccaccgctccgttgcgcccgccagccgtcacgcgtgacgtttcccggggggccgggggagagagaggcagaaggaggaggcacggagaggacgagacaggatgctcgggttcaggcagatgccgtggtcgtcggcgcaggagcaggagcaggcgccgtcggagcagctgtgcgagggggtgtcggccgtcgtggcggcgcgccaggggatggagaagccgctgacggctgtggcggaggcgttcgaggagctggcgcgcggcatggaggccgatggcggggagctccgcctcgctcccttcagcgactcctgcgctctcgtctccgtgctcttcagcagcctcgggatggccttcaggttcgccgagatcgagtacgtcaccaaggtgaacgatctcatcggtgccggcaagtcgtaccgcacgttgagcgacatcctcgacaaggacatccagaatgactgcgtgaagaagcagggaagccactcccggaacttacgcagggtccgtctcggcctcggcctcattaaagccctcttcgagcaattcctcgataccgaggggacattgtatgatgctgctacgatagcttacgggcaggtctgcgcgccgtttcatagctgggcgatcaggaaggctgttggtgctggcatgtacactcttccaactagggagcagttgatagtgcggctgaatgaaactgatttctccgtgcagaaggagatgaggagatacattgatgcttctagtcctatcatagagtacatcgacaaccttttcctctcgaggaacattagcctagattggtgagctgatctgaactggactggactgaagatcaagtctgcagcttgttcacaaagccgttgttggtaccatcgatttattgttcatagttatttattcagccttgttgggtggtggatggatgctcccttttcttcctttgttgcacgcacgggtctcgtgcatgtgttgtacaactgcatgataattctagcatggacattgatgttctt

SEQ ID NO: 23204 - DNA, 1530 bp, Zea mays
  Clone ID: LIB3594-049-F7_FLI
ctgatgaggcagcggtcaaggacatggagtcatgaatctaggcagccatcaccaggagttgtacggacacaacttgcatctggataccccacagcaagctatgagttccgcccagagaaacggctaagggagttaagggaggatccgcagagcatggtgaagcagctattaaccaagcgtgctgaagcattaagtgaggagaggatagaggagttccttaaccttgttcagcaagctcgtggagttgtatcaattactggggagccaatccagcggttaggtgcttacctccttgagggtttggttgctagacatgcaaactcaggtacaaacatatatcgtgccctgaagtgccgtgagccagagagtaatgaactcttgtcttacatgaagattttgtataacatctgtccgtacttgaagtttgggtatatggctgccaatggggcaattgcagaggcattaagaaatgaggacaggatccatattattgatttccagattgcccaagggacacagtggataacactgatacaagcgctagctgcaaggcccgggggtccaccacacgtgcggatcactggaatagatgacccagtgtcagagtatgcccgtggtgaaggtctggaccttgtagggaagatgttgaaaagcatgtctgaggaattcaggatacctttggagtttacccctctgcccggtatttacgcaactcaagttacaaaagaaatgctggacattaggtcaggcgaagcacttgctgtcaacttcactctgcagctgcaccacaccccggacgagagcgtggacgtgaacaacccacgggacgggctactccggatggtgaaaggcctgtctccgaaggtgaccacgcttgtggagcaggagtcgcacaccaacacgaccccgttcttgatgcggttcaccgagaccttggactactattcggccatgttcgagtcaatcgacacgaacctgccacgggacaacaaggagcggatcaacgtggagcagcactgtcttgccaaggacatcgtgaacatcatcgcctgcgaggggaaggaccgggtggagcgtcacgagctcctgggcaaatggcggtcgaggctgaccatggccgggttcagaccatacccgttgagctcgtacgtgaactcggtgatcaggaagctccttgcctgctactcggacaagtacaccctggaagagaaggatggcgcgatgctgctcggctggaagaacaggaagttgatatctgcttctgcttggcactgacagtaacgttttcagaagaccggaagtacacgtcaactcttacatatatgtatgtatgtatgtataatgaattacctggtctgctttccgcaaaaaaggacgccctttgttgtacatgtacatgatgctgtacccttagttttcctgaagtgcagaccagagaagagaatattgacattagattgtagctgctaagctgtatggtaattacagtttttcttttgctctcatgtattcacccctgtcatggacttc

SEQ ID NO: 23205 - DNA, 1898 bp, Zea mays
  Clone ID: LIB3594-050-B12_FLI
cctgcccgccccgcccgcgcgctccgctccgtgaactatatctatctatcacctgctgctccaaggaggcggacagaggcaggcaggaaggcactcacttctccaggagcccggagtcggcagcaagagagaatggccgccgacgccgccgccgccgccacccttcgtactgctctctcccaagcaacagggcaagagcagagagcttcactgctgtgcacaccgaagcaccgagttgctgccagcaggagaagcttgagattcaccactagggccagctcgaatgcgggcgccagtgtgagcatcccgaagcaatggtacaacctcatcgccgacctgccggtgaagccaccgccaccgctgcacccgcagacacaccagcctctgaatcccagcgacctctcccctctgttccccgacgagctgatcaggcaggaggtcaccgacgagcggttcgtcgacatacccgaggaggtcatcgacgtgtacaagctctggcgcccgacgcccctgatcagggccaggaggctggagaagctgctcggcacgccggcgaagatctactacaagtacgagggaaccagcccggcggggtcgcacaagcccaacaccgccgtgccgcaggcgtggtacaacgccgcggcgggggtgaagaacgtggtcaccgagaccggcgccggccagtggggcagcgcgctgtccttcgccagcagcctcttcggcctcaactgcgaggtatggcaggtgcgcgcgtcgttcgaccagaagccgtaccggaggctgatgatggagacgtggggcgccaaggtgcacccgtcgccgtcgacggcgacggaggccggcaagaggatcctggaggcggacccgtccagcccgggcagcctcgggatcgccatctccgaggcggtggaggtggcggccaccagcgccgacaccaagtactgcctgggcagcgtgctcaaccacgtcctgctccaccagaccgtcatcggggaggagtgcctggagcagctggcggcgctcggcgagacgcccgacgtcgtcatcggctgcaccggcggcgggtccaacttcggcgggctcgcgttcccgttcttgcgcgagaagctgcgcggcaggatgagccccgcgttcagggccgtggagcccgccgcgtgccccacgctcaccaagggcgtctacgcgtacgacttcggcgacacggccgggctcacgccgctgatgaagatgcacaccctcggccacggcttcgtccccgacccgatccatgcaggtgggcttcggtaccatggaatggcacctctgatctcgcacgtgtacgagctgggcttcatggatgccgttgctatacagcagactgaatgcttccaatgtatcctactctaccttttgcaatggcaacgagacttgtcaacaaggaaatggatgaaagaagaacaacaccgtaatgctaacgtcttgttttgttgatgaactgtggagcagctgccttgcaattcgccaggacggagggcatcatcccggcgccggagccgacgcacgcaatcgcggcggcgatcagggaggcgctggagtgcaagcggaccggggaggagaaggtcatcctgatggccatgtgcgggcacggacatttcgacctcgccgcgtacgagaagtacctgaggggagacatggtcgatctctcgcacccggcggagaagctggaggcctccctcgctgccgtgcccaaagtctgacggcgttggagccaacagcacatgcgactggaatgggacgaataatccattgatatcaggttcatgaatcttgtggtgatccatcgcccatcggcagtgggatacttgtgttccttatgaaatgaatgaataaaatttcaataaaagcatttattttatcat

SEQ ID NO: 23206 - DNA, 739 bp, Zea mays
  Clone ID: LIB3594-050-E4_FLI
gtaaagtcccgcagtgacttgccagttgccactgccagagcggtcaccgaatctgaggtctgagcccagcgggccgcggcggctatgtcctcatcctcctccttccccaactcccgcttccccttcgcagccggcgccggggcctccggcggaagcgggagcagcgtgcggccgtggggttcgagcggcgggacatcggtgtcttcatctgggaaacggatacagaaggagctgctggacctcaacgcctccgactgctccgcggggcccaagggcgacaacctctaccactggctctccacaatcatcgggccccaaggatcgccgtatgaaggagggatatttttccttgacatagtgtttcctcctgattatcccttcaaacctcccatggtaacattcaaaacaaggatttaccactgcaatattgattccactggtaaagtgcatttggacattctgaaggatggctggagtccagctttcactatttctaagactccccacttatgatgagcatttcacgtcagtatctgactgatagagctaaacacgatgaaatagcagctgagtggacaatgagatttgcaagataggggatttgtttgtatctaagcatggttgacattgtaaaaaaacaactcttaatgtggcctgagatggtgaatgttggcaaaggagccatgtttcgtttgatgtgatgtgacataaatgtgtactttatgcttgagtattattt

SEQ ID NO: 23207 - DNA, 786 bp, Zea mays
  Clone ID: LIB3594-050-H10_FLI
cctgcagtcaccactcccaagccagtacccacagtcctacgagcagtcgcacgcaagtgtcaagagacaaaacggtcgacatggctcgcacgcaatctgccgtagcggtcgccgtggtggccgcggtgctgctgctggcagcggcggcgacgacctcggaggccgccatcacctgcgggcaggtgagctccgccatcgcgccctgcctctcctacgcccgcggcacggggtccggcccctccgcgtcctgctgtagcggcgtcaggaacctcaagagcgccgccagcaccgccgccgacaggcgcgccgcctgcaactgcctcaagaacgccgccaggggcgtcagcggcctcaacgccggcaacgccgccagcatcccctccaagtgcggcgtcagcatcccctacaccatcagcacctccaccgactgctccagggtgaactaaaacctagaccacgcgcgacgacggccgcctgatcgatcgaccaaccattccgccgtcgccgccggccggatcatcgatcgtcgtcatgatgatatctatcaatctacgcgtgatgatcgatggctacttgtctactgctatgtactactaaataaaatctctccgtgtgtgcacgtacgcttgcatgtgcatggtagcatgtatgtacgacgtcgtccatgtatgtgtgtgtgacgtgtgagacagagagagagagagagagagagagagacaggatcgatcgagagacggtcatgtccttttggctgtttggtttattcatatcacaacttttgagtgt

SEQ ID NO: 23208 - DNA, 1863 bp, Zea mays
  Clone ID: LIB3594-051-A4_FLI
cgatcactcgctgctcccctctctcgccggagcgagccccgggccggatggcggcggcagcagcagctcctcccgccgccgcgatcgcgtgatggacgccgacgccgacgccgccgcgatccgccgatggacgacgccggaagggcaccaccacccgcgccagcggcggtgaccgtctccgccaccgccgcacccgcgcctaccccgccctccgccacggtcgccgccgacaagtcctccctcgaccccgacgcgctttatgaagaggggatgtggcaacagatggccatgaacagcggtgccacaatgcaacctgggtcatatcctgagcgaccaggtgaaccggactgcacttactacctcaggactggattgtgtcgatttggcatgagctgcaggttcaatcatcctccggataggaatctggctattgcctctgccagaatgaagggagaatatcctgagagagtgggacagccagagtgtcagggaaaaggccggaattgcagggagggtgcagctaaacacattaggatatccacttcgcccgaatgaaaaaggagtgtgcgtattatttaaaaacaggacaatgtaaatacgcaaatacttgtaaattccaccacccagaacttttcaatgtggtgccttcgtcacgtggttcacctatttatacttctgtacattcctctgcaagcgctggtccacagtcatatactggaactatgtcaagctggacttttccacgagcttcttttataccaagccctaggtggcaaagtccttcaaattatgcaccaatgattgtacctcatggccttgtccaagtgccgagctggaattcatatcctggtcagctgcagtcacctggggctcaacaaacttatggaagttcacaacaaggcgaagctagtgcaggaaaccagggaatgctatcaccctatagatccagttcatttcctgtgcctcaatatgtgttgcagagggataatgtatttcctgagagacccgatgaaccagaatgccaatattacatgaagacaggagattgtaaatttggtgcagtgtgcaagtttcatcatccccgtgtgagatcacagccccctccggattgtgtcttaagtccaatgggccttccaatacgtccaggtgaagaactgtgcaaattctattctcgttatggcatctgcaaattcggcgccaactgtaaatttgatcatcctacaatggctgctccaatgggagtttatgcatatggtttctctgggtctgcttctgtcgcacccgcttcaactaatgcacctatgacgcgacatcttcttggatctccatcaggttctggatatatgtcttaggtgtctttttttcagttgacctactttgatgtataaaatccacggcatcgcctcaggcgctgtgaatgtttctcctaacttcccgccgggatgaagttctgtaaattgagttgctgccggagatgtacagcccccctcccccaattaatccagaactttgggaataactgttggaacctaataaacttcagatacagaaacgctggttttcaggtgcttgcactattttgatactgctgcacctatggtcctaacagttgaggtaggaattcctctgaaggagctgaaacctgtagctgcaggtgtgcagttgaaattatattattgcgtcaatttatttggaacctgtattcagctggtgttggggcagatattggcattcctcttatctgtgaatgctggttttctgacatgaacagtgtataccagcctacggcttctgccaagacagtaaactcaggacctgtttgggactgttccactattcaaaaatgaatttgaatctgggatc

SEQ ID NO: 23209 - DNA, 1439 bp, Zea mays
  Clone ID: LIB3594-051-A5_FLI
ccaaggcaaccaaaccatctcgattctcgactcgtggggaagtttcgctctcgccggcgtcgacggcctagggttcgaggaacgtccgtccgtccgtccggggaaggagcggtagggaggcggagatgatcgaggtggtgctcaacgaccgcctggggaagaaggtgcgggtcaagtgcaacgaggacgacaccatcggcgacctcaagaagctggtggcggcgcagacggggacgcgccccgagaagatccgcatccagaagtggtacaacatctacaaggaccacatcaccctcaaggactacgaggtccacgacggcatgggcctcgagctctactacaactgagccgccgcccctctctccctctcgtcaggtactagcagtagcagcgactggtttcctctacaactcgaattcctttcgattcagttcctgcgcgcctggccaccgggaactttaattgttcatatgatccaattcgagtatttgtagttatattcgttatattgatcgcatagtgctgaggctatttacgatcgtttatagggaaccgaacatatgacatgtggtgataaaatagaccagttattatgttatgattgatgcagaacattgtatagtcatgtttagcaagagaccagaaagagtgtatcctttcagcctacccagagaacttggttgttcaatcatgtgcctcactgaatattgttagatgcacaggatggatgtaattctgaaaacttgaatggttatcaagaagtacttcataagatgccagtatctgttgtagcaaaagaaatgtggctatgattgccagtatctgttggcctgattaatgacaatttctagtgtagttattttttttcactgcacaatgcaacatattatgcactggtagtttggaaaattatttacagcctggagcattgcatcaaatcgctggagattggaaaactacttataagttcaatacatgccgactatttgctttccaaatagttgccatgtgcgcattatcaacgactttgaacatttcagattcctggcaagtttgtttaagcttgaattcaagaaagctgcaacgaacgcgtagatctctatgctattagcatgacttgtgcacctttacccaggctaattcacatccacgtttctgtctatgatttccttgacatattccttctctgctaaatcgctgttcaattcccatgcaggttggtctgaattctgaagtcatgggtgcaattcgcttcgcggtgatctcttaagctcatcacatatataaaagcaacctcagtgggctatgtaagacatggcgtgccaaactatcagtgaccactgacagctttgcaatacgttgttgtatggtcaacctgcaaacttggtgtactgctactcgtactataaataacatagggttttaaccttggttgtggt

SEQ ID NO: 23210 - DNA, 746 bp, Zea mays
  Clone ID: LIB3594-051-B3_FLI
cagaggtgggctggcttctcctccccctcttatcaagtcctcctcgggttagggttccttagggttttgtggaggggcgatggcggcggctgatgtggagtaccgttgcttcgtcggcggacttgcctgggccaccagcaacgagtcgctggagaatgccttcgcctcctacggcgagatcctcgactccaaggtcatcaccgaccgggagacggggaggtcccgcggcttcggcttcgttaccttctcctccgagaactccatgctcgacgctatcgagaacatgaacggcaaggagctcgacggccgtaacatcaccgttaaccaggcccagtcccgtggcggcggcggcggcggcggcggcggtggctacggcggcggtcgcggcggcggcggctatggtggcgggcgccgtgacggcggttatggcggcggtggcggctacggcggtcggcgcgagggtggtggcggcggctacggaggcggtggcggctacggcggtcggcgcgagggtggtggtggcggctacggcggcggcggcggcggctggagggactgatgtgtggccccatcctggcttcggccgagttatcttatctatctatagtatcgtgttaccgttcgcttctgtcaccgtgttagtgtccgttctacctttggattaggtgttggtaccccttttgttcgctttggttgctcccgctatgaaacgagacgagagaagaatgagcaaggtttttgttcgc

SEQ ID NO: 23211 - DNA, 875 bp, Zea mays
  Clone ID: LIB3594-051-C10_FLI
cgagagcgcgattcattccgcgcgacgcaaaaccctagcccatccaccgatccttgtcatggcggccaccaccagccaggcgagcctcctcctgcagaagcagctcagagatctcgccaagcacccggtggatgggttctcggctgggctggtcgacgatagtaacgtattcgagtggcaggtcaccatcatcggcccgcccgataccctatatgatggagggtacttcaatgcaataatgagcttcccagaaaattacccaaacagcccgccatcagtcagatttacctctgaaatgtggcatccaaatgtttattcagatgggctggtgtgtatctctattcttcatccacctggtgaagatccaagtggttatgagctcgcaagtgagcgttggacacctgtgcatacagttgaaagcatagttctgagcattatatcaatgctctctagtccaaatgacgagtctgcagcaaacattgaggcagctaaggaatggagggataagagggaggatttcaagaaaagggtcaggcgcatcgtgcggaaatcacaggaaatgttatgaagaaaatggaatactggggaagtcaaccgtgccatgtcaggctacgagattttgctttcaacctcaaaatgctcatctgacatcttgtgtattttccatttagcgtctgttcattggtgcaccagaaatgcattgggacgtggtgtatcgtgtggcctgggctctactaatgtttgacaatcctgaagtgccaccagtggtgaacctggtataagcaggcgccattcatgtcagctaatcgttgagaaaacatatcagtgaaatcgtgcaactgttagtgtaatgaggcagttcctgcttacatatt

SEQ ID NO: 23212 - DNA, 1530 bp, Zea mays
  Clone ID: LIB3594-051-C11_FLI
ctccttcttccccctctcaaggctcccctcctccacagcctgcagcccagctcacgaggaccaggaggagaagaagttgcatagccgcccatctgcatccacactccaacaataaactaagcagggcgctgcacgaggatggggtgcggggcgtcgagccagaaggacgccggggcgccgcggaggcggccggtgagcgtcggcgacgtggtcgtcttcctcccgggcctccgcgtgccgagggccgtcgacttggcccaggcgctcggcggctgcctggccaggagcgccgtggaccggctgtcggctctgcgatcgcgggtcgtcgacatggcaatgcgagagtcggcggcggcgctcaagcccaggcggagggcggcggcacggcacgggtctagtacagccaatcttctacaggccctcgaagactacttgccggctctgctaggactggtaaaagaaggtagcgtcttgaggaacaaagtgcacttcacctggagtaaccaggaggataatgctgaggagacggccatgccagacgcctggtacgaggtgctgtccatgctgcatctgatggccatggtctgcctgctgcaggccaacgccctgcttctcccgaggtcatacggcgatggctatgccccaagggtttctgaagagagtcgacgggctactgttgatgtcttcttgaaggcagctggatacctagactgtgcagttcggcatgtactcccgaagatgccactggagctaaggagacaacttccagtagacctggctgaaggaaatctcaaagctctaagcctccaagccctgggtcagggggttgacatgcagcttggtttggctattgatagtccaaaggccactttagcagtaaaacggcgcttagcctgtgagatggtcaaatattggcaacaagttcaagagagcattccagagcttcctatctctgatggatggggtaaaaagcaccggctctttataaagtggaaatatgttgaagctaaggctgcagcatactatttccacggtttgattcttgacgagggaaataccgaaaaatcccatggaatggcaatagctgcactccaagcttcagaggaatttctaaaagaaagcaaaagggtttcagaagccttccatgcaactcctccaacatcgaggagtcccaatccattcggaacagcaaaatatctgtttgacaagatcccaagagatgcttccagcaaggttcgaatcaaccaggacctgtatactcaagaaaaggtcattggagcgccacccccattaccagattttgcattggcgctaacacctgaagaatatgatcttcctccactagatccactttggaacaaagaagacacaagccattaagtgtatatgcagcagaatggttgcttctggcaaaaatattggctctggagagaaaggaaggaccaagatctgccatgtcaagagctgatgtgtaatgaatgaagtgtacaaagtattttcaaacaaaaatacatgttcacaaatttacgc

SEQ ID NO: 23213 - DNA, 932 bp, Zea mays
  Clone ID: LIB3594-051-C12_FLI
cgcctatgcgcccgcagcaaccaacgaggcaacggatcgagttcctctccgaactccaactctgcgccgcaatccactcaagaaggttagccctcgtggtctcggatttggataatcctccgccgaggtatgaaacaggaggcggccaccagcatagtggtgacccaggaggacgtcctgcaccactacaaggagcctccaccccgccgcgaggacgatccgccagcactggctgcgtcgctgtcgttgccgtcgtcactgtcggaggacgatggcgacgccatgccgcagccatcttcatacgcggtcttgccgcgccgggaaggcgagctggtgtctgcggaggagctgctgctggtgccgccgctcaacttcgccatggtggaccacggcgtgtaccgctccggattcccggacgcctccaacttgccgtttcttgagacgctccgactccgctccgtcctgtgcctgtgcccggagccatacccggaggctaatctggagttcctccgtgcccacgggatcaagctcttccagttcggaatcgacggctccaagttttggacttttgatactgaaataacaggaaccatttgtgaacataccagaagatagaatccgtgaagctctagaagtcatcctagatgcaagcaaccatccggttcttattcactgcaagcgaggaaagcatcgaaccggctgtgtggttggatgctttaggaaattgcaacgctggtgtctaacttcaatatttgacgaataccagcgttttgctgctgccaaaacaagagtttctgacctacggttcatggagctatttgatgtatcgagcataaagcatttagcatttgagtcgtctgtatgatagtaacattggtgcatgataacaactcaatactggttccattacggtgtcatctttttcatttaag

SEQ ID NO: 23214 - DNA, 1051 bp, Zea mays
  Clone ID: LIB3594-051-E12_FLI
aaccaccttcccaaatctcagtagtcgcctctcgtcgtcttcgtctagcccggcccgttccaaaacctccgtagccgccgccgccaccccggcgaccgaagatgatctccccggacgcagcccgcaacgtagtcggcatcatcggcaatgtcatctccttcggcctcttcctgtccccagtgctgacgttctggcggatctacaaggccaaggacgtggaggagttcaagccggacccttacctggcgacgctgctcaactgcatgctctgggtgttctatggcatccccgtcgtccaccccaacagcattctcgtcgtcaccatcaacggcatcggcctcgtcatcgaggccgtctacctcactatcttcttcctctattccgacagccagaagcgcaagaaggcgttcgcgatcctggccgtggagattctgttcatgctcgccgtggtgctcggtgtgatcctcggcgcgcacactcacgagaaacgttccatgatcgtcggcatcctctgcgtcatcttcggctcgatgatgtacgcctcaccactcactatcatgagtcgagtgatcaagaccaagagcgttgagtacatgcccttcctcctgtcgctggtgagcttcctcaacggctgctgctggacggcctacgcgctcatccgcttcgacctctacgtcacgatcccaaacgccctgggcgcattcttcggactcatccagctgatcctctacttctgctactacaagtcgacccccaagaatgagaagaacgtggagctgcccaccgtctccagcaacgtcggcggcggcaacgtcaccgtcagcgttgagcgatagataatgtagctgccgccgcccgtcgagaacgaactcgacgagacgtgctttacccacaagtagttttggccttgtctaattgctcttctcggatgatcgtttaagtgagtgttagttagttttgccctgcatgtcatgtcaggaacaattaatatatccatgtggctgtgtttgccattctagataattaagaacaatcgtatctgattgctacc

SEQ ID NO: 23215 - DNA, 745 bp, Zea mays
  Clone ID: LIB3594-051-H2_FLI
aacattaaaaccatcatttgcagcggcggctgctgccggcgacgcgatgtccaagcaaaagtccgtgatcaggctgggcgtaccgaacgacaagaaccggtctaaggccatgcagatggcatccaagtttgtgggagtgaactcggtggggatcgccggcgacgccaaggaccggctggaggtggtgggggagagcgtcgacatcacctgcatgatcaacctgctgcgcaagaaggtctgccgcgccgacatcgtcgtggtggaggaggtcaaggacaagaagaaggaggaggaggagaagaagaagaaggaggaggaagagaaaaagaagaaggcggaggaggaagccaagaagaagaaggaggaggaagagctcaagaagaagctctgcccgtacccgtacccgccgccgccgtgctccggtgcctgttgccgcgggccgtcgccgccgatgtttctgtgcgagccggaacagccagcgggctgccacatcatgtgacgatgaagtgaagctccttagtgctcaagatggatcctgcctgcctgggctcaacaatatgcatgcttgtgattttggtttgccacacatcatcgaccggtcagtttcactccgtgaataatcgtcccgtccgaacttgtgcacatgcgtggttgtggttttgctttggcatctgaattacaatcctaagtgatcatggaatttagatcactactatatatatatatatataagtatttttttgtg

SEQ ID NO: 23216 - DNA, 740 bp, Zea mays
  Clone ID: LIB3594-052-B1_FLI
cgccttgacacgcagactaggcgccagccttctgcgaactgtctctacccttgacgaaggaagaggcagccttctcaccgtcgcacccggcgatgcagcggcacgtcgcctccggccggccgtcgggcacggacggctccgacttttcttaccgcatggtcgtcgaatcccggtaccagagggtcgccgagggcagatcccgcctcgcgcgcctcatcctcgtgcaggcgctgcacctagtggccggaggcttgcttctattgctgtcgttgtccaagggggcggcggtgaacaagttcgccgtgctgtccatggccgcgggattcctggctatagtggtgggggaattagggcgaatgcggaccatgtcagtgctgcttcggctctacacaagcttgtcatcaattgcggttgcattctctgtgacgtgcattatccggtcagagttgttcttaaaggttatgaagcaaaacacagaggccatcacaagctacgaaatgcttgatgcggttcgtgttgctcttggtatcctgctgcaaatggtggttatagctacaactaccagactcctgcagaatatgtctcctcccaagagagcttcatgaatgctatgaaattttagctttgtatcaagtagtaagggatacaaacttcgagttaaaaatattggccaagtgcgatagtcttgtaccgaagatgctactggtgtacaactgtcaggaaatcgtggtttacttgtt

SEQ ID NO: 23217 - DNA, 1319 bp, Zea mays
  Clone ID: LIB3594-052-B11_FLI
aagtgcccatcggagctggagctggaggccttcctccgcggccgggaggacgccacggcggcggcggcggcggcggcggtggccgagcagaagcctgcgcacgacgtcgctgcgctggcgccgttcggcgccggtggcgtgttcccctccagcgatctgtccgccttcagcttcgctgactcgaacaccctcaatggaactggaaacatccataatcacctttggtcccataaccacaacgtcaggcatcccgcagtctccacgacgatcgagtcgcagtcgtcgatctgtgcagctgcagcagcaagtccaacatcggctaccaacctgtacctgaaagagagccaggctctgggcggcacgagtggttccgactccgacagcgattcgctgctggacatcgagggtggcccgtgcgagcagagcacgaacccacaggacgtgaagaggatgcgacggatggtgtcgaaccgtgagtctgctcgacggtccaggaagaggaagcaagcccacctagctgaccttgagacacaggtcgaccagctgcgaggcgagaacgcgtcgctcttcaagcagctgacggacgccaaccagcagttcacgaccgcggtcacggacaacaggatcctcaagtcggacgtggaggccctcagagtcaaggtgaaactggcggaggacatggtggcgcgcggcgcgctgtcgtgcgggctgggcagcctggggctgtcgccggcgctgaacccgcggcaggcgtgccgcggccccgacgtgctgtccgtgtccggcctggacttccccggcgccgacgacgcctgcttcacggggctgtccccggcggagcagctgcagctccagagctcccccctgcagagcatcgccgccagcctcgagagcctggacaaccggatggccagcgaggtcaccagctgcggggggcccggcgtcgacgtctggccgtgggaccaccactccaacggcggcctgtccaagtgaagccggagacgccgggtgggagtggggtgagactcgcgccgctcgccgacggcacctatcctgtcctagtgtatgcgtatatcgatatgcatggcgggcgctagctatgaccatgagccgccgttatttctgtgttcgctggagtggtgaaagtgaacggacttgagtttttcagagtccctcgtctccgtcggtacatttactagttctgtaatagaactgactagcttaagctcgtgctactacatatatatatgtatgctgagagactgaactcgaagcataatcatgctaccatattatgtcatcattacatttctatctct

SEQ ID NO: 23218 - DNA, 1539 bp, Zea mays
  Clone ID: LIB3594-052-D10_FLI
ctccagagatccacacgaccacaccgacccaccaccatctgcatcggcaatggacgccgcgccacccaccataaccaagtccccgccgtccctggttccaccagcggggcccactcccggtggttccctcccgctctcctccatcgacaagaccgccgccgtccgtgtctccgtcgacttcatccaggtcttccccgcccctacgtcggggaaggaggactggagcccctcatctgcgatcgcggccatgcgcgagggctttgccagggcgctcgtgccgtactaccctatcgccggccgcatcgccgagcccgtgcctggtgagcctgagattgagtgcacgggggaaggggtgtggttcgtggaggctgaggcaagctgctccctcgaggaggcgcgtaacctcgagcgcccgctgtgcatcccgaaggaggagctgctcccgcgtccgccggccggtgtgcgcgtggaggacaccctgctgctcgcgcaggttacaaagttcacatgtggtgggttttctgtgggcatttgcttcagtcacttggtgttcgacgggcagggtgctgcgcaatttctgaaagcagttggtgagatggctaggggcctccctgagccatcgatcaagccaatctgggctcgtgatgccatccccaacccacctaagccacccctaggcccgccaccgtcattcaccgcattcaacttcgagaaatcagtcgtcgagatcgctctggacagcatcaagcgcgtgaaggatcaagttgcaagcgaaaccaaccagaagtgttccactttcgacgtggtcaccgccatgatcttcaaatgtcgcgccttggcagtcgacttcgcacctgacgctgaggttcgcctgggctttgcagccagcactcgccacctgctgagcaatgtgctgccctccgtcgatggctactacgggaactgtgtgtacccaggtggtctcaccaagaccagccaggaggtgaaggaagcttcactggtggagatcgtgaccgcgatcagggaggccaaggaggctctgtcgtcgaggttcctcgactggttgagcggcggcgccaaggagaaccactacaacgtgtcgctggactacggcaccctcgtcgtgaccgactggagccacgtgggtttcaacgacgttgactacgggttcggtgagccaagctacgtgttcaccctgaacgacgacgtgaacatcgttccctccgttgtgtacctgaagcctcccaagccgaagcagggcatcaggctggtgctgcagtgcgtggaagggcggcactctgccgtgttcagcgaggagctgcagaagcacgcatagagcgagtgtattccatcccacagtggagattgttgtattttgttgtgtcgaattgctgcccccggaatttgcttgcaataagatagggttggcacgtgtttatactctgtactgttatctcagcacgttacattatacatgtattgagtgagtattgacagtggtgaaagaataatagtgttccatttgaaacaaattatttc

SEQ ID NO: 23219 - DNA, 921 bp, Zea mays
  Clone ID: LIB3594-052-E11_FLI
ttgaaccggaggctaccgctgcctcaagggcctcctcgctcgctcgccagtcgccacccgctcacggagacagagaggccgatggcgagctcgctggcccgcctgggagcggcgctgccacgcgcgcgcccacgcgctgcgacccgcaccctgccaccgccgcggtgggacgccgcggcgctcggcgcctcccgccgcgccgcaccgaacgtttgcaggtgcctagttcattccgacgttaaagtagcccctacatcggacttcaaggacagtagcaaatctgaaacttggaggatcaagatgctctacgacggtgattgccctctctgtatgcgtgaggtaaacatgctaagagaaagaaacaaatcctatggagcaataaagtttgttgacataagctcgaaagattactctccagatgacaatcagggccttgattatgaaacttccatggggaggatacatgcggttctttcagatggaactgttgtcacagacgttgaggcatttagaaaactgtacgaggaagtaggacttggatgggtttatgctgttactaagtatgagcctgtagctagcatggcaaatgcagtatatggtgtgtgggcaaaataccgtatgcaaattacaggtcgacctccgctagaagagatcatggcatcccgaagagctgcaggtgaatgtaaagatgacaaagtatgcaagatgtgagcataaagatgttctactgtgctacatacctcgcctctagccatgctttatataggctaaggctcgtatatatggctttaacagtacaaatagtcgcagttgtatcagaaaaaaagatgaatagcttatgtaatggtttatcaaagtacatattattgtacatttgtatgtacactgtactggttcacgcatgtaaaaacgattcaccac

SEQ ID NO: 23220 - DNA, 939 bp, Zea mays
  Clone ID: LIB3594-052-E5_FLI
gggcaacttcgtgggcgcgctgctgggcgccaacatggggctcagggagggccccgtcttcttcttctccgtggggctggcgcactacagcgtgctgttcgtcacgttgtaccagcggctccccaccaacgagacgctgcctaaggagctccacccggtgttcttcctcttcgtggcggcgcccagcgttgcgagcatggcgtgggccaagatcacgggcgagttcggctacgggcccagggtggcctacttcatcgccatgttcctgtacgcgtcgctggcggtgcggatcaacttcttccgggggttccgcttctcgctggcgtggtgggcgtacacgttcccgatgaccggcgccgccatcgcctccatccgctactccaccgaggtggacaacaccttcaccaaggcgctctgcgtggcgctgtccgtgatcgccgtgctcacggtgacggcgctgttcgtcaccacgctggtgcacgcgttcgtgctccggaagctcttccccaacgacatctgcatcgccatcacggaccacaagatgaagcccatcatggagctgcacgagagccatggcgaggacagcagcaccaacagcaacgacatcgaggccggcgccggtggcaaacagtgagggacgcgacgcctagctaggaagcatgcataagcaatgcacgcgcgcgcacacacccaagtcgccgagcttcacgcacgccaagcgtggggggatgacgcgaccgagttcttgcttggattggattggatctttctataggattgcctacttggttcgatggcgcacgctgaggacctttgatggattgcatctattagttactctatctactactagtcagtagagaactacttgaatgtacagagtgggctacgttgtatgaaacgcggctgcttatttatcgtggaaaacattatgcatgc

SEQ ID NO: 23221 - DNA, 800 bp, Zea mays
  Clone ID: LIB3594-052-G7_FLI
tcaccaaaccaaaccgctctcgagtctccatccattctctccgctcatccgcagctctctagtctccagctctagctagccttagcctcgtccaagggacgaaggggccaccatgagcgtggtgatcctggacggctccacggtgcgcggcttcgtggcggacgaggcggccttcgcgcgcagcctggacgcgcgcttcgccgcgctggacgccaacggcgacggcgtgctgtcccgcgccgagctccggcgcgcgctcgagtccttccgcctcctcgacggcggcggcttcgggtccgcccagccggcgccgctccccgccgaggtcgccgcgctctacgacgccgtcttcgagcagttcgacgccgaccacagcggcgccgtcgaccgcgccgagttccacgacgagatgcgccgcatcatgctcgccgtcgccgacgggctcggctcccagccgctccaggtcgccgtggacgacgagggcgggagcttcctgctcgaggcagccgagcacgaggccgctgggatcgccgccaagatcgaagccaaccgcaaggcggaggcggaggcggaggcggccaagtgacgacgtgtccctcgtgcgggccctgcgcttgattttctgggtgtttgctactacgtactagtactacttctacttacctggcggccgacgtgccgcctcacgtgtacggtatactacgtaactagaagcggccagcaccagctacacaaatcactgctgatgctacttgtgaacggaataaaacctgtcaatcatttttagtggtcttgcttgc

SEQ ID NO: 23222 - DNA, 791 bp, Zea mays
  Clone ID: LIB3594-052-G8_FLI
tcctaactacctccacccccgcacgcacaactggccgcaccaaggcaaagctagaagaagacaacgcaaagggagaggacagaggaggagcagaggacgatgggcagcggcggcgctaacactgcccccctcatcaccccctacaagatgggaaaattcgatgtttcccacagggtagtcctcgcaccactgacgagacagcggtcctacggcaacgttcctcagcctcatgccatactgtactatcagcagagggcgactaaaggaggtcttctgatagctgaggccacgggggtttcagacactgcccaagggtgcgtctgtcgtctgctagaccatcaggctactacggctgcttgaaatctgtgtggtcatgctaaatttcatcattcagtagtttagtcgatgtctgaataaagatgtgttttctgtatgcgcacaaggtacaaggacactcctggcatttggacccatgagcaagtcgaagcatggaagccgatcgtagacggggttcaccagaaaggagggatatttttctgtcagatttggcacgtagggagagtctccaattccagtatgtttacgacctctaacgcagatcggttctcaaagctataaatttaacggcagtctagctagtcagcttgcaagagaaaattggattcagagttatccatgaagtcttcatggcaacattagctgtgtttgtcatagaccaagatgtttatgaaagcgctcatactatttgtactacagtttttttttgtaataaaagtgccattataccgacc

SEQ ID NO: 23223 - DNA, 822 bp, Zea mays
  Clone ID: LIB3594-053-B12_FLI
cccgcggcgacggtgacgacgaccgcgcgagcgccgccgactccctactgcatcaggtgcctcggccttcgtcgtgctctccgccggcaacgagtatagacgggcgcgcatggccaccttcgagctgtaccggaggtccaccatcggcatgtgcctcaccgagacgctcgacgagatggtctccaacggcaccctcagcccggagctcgctatccaggtcctcgtccagttcgacaagtccatgacggatgctctggagaaccaagtgaagagcaaggttactgtcaagggtcacctgcacacctacaggttctgtgacaacgtgtggaccttcatcttgacagacgcaagcttcaagaatgaggaggccacggagcaggtgggcaaggtgaagattgtggcatgtgattccaaattgctcggacaataggcctgtgtaccctcgaggtcaaggaaggaagcttttaagtgcggcgaggcggggtctgtctgcgcgtcagctgtacacgcctaggctaccgcgaggcggggtctgtctgcgtcagctgtacacgcctaggctaccgcccgaacggcatttcatttgccttcttcgtactgtatgtgtatcttcttttttccccttgtatacaatctgctgcagctataccggccaagagtatggcatggtatggcggcaggcagccgcaaacttgtttttacctacttggtgtagcgcctgtgtaacagttttcgatcgctcttgcttgttgtgttgtcgatgctaataccgcagtgtaattgacgaaatgactaaaatgaagagtagtgtagtagatgtcc

SEQ ID NO: 23224 - DNA, 437 bp, Zea mays
  Clone ID: LIB3594-053-E1_FLI
tctcttctaaccagccaaggcgcatctagcgagctgagcagcaatggcggctgctacttcttctaggcgccctgcagctgctctgcttgtcctggcactggcactggcagcagccgtcgtggccctggcggccgagggggccaggtacccgccgctggctccgggcctgtcgttcgacttctacaagaagagctgccccaaggcggagtccatcgtgcgggagttcctggcgtcggcggtccggcagaacgtggggctcgccgcggcgctgatccggctccacttccacgactgcttcgtgcagggctgcgacgcctccatcctgctggacgccacgcccacccagcccagcgagcagcagtcgccgcccaacctcacgctccgccccgccgcgttcaaggccgtcaacgacatccgcgcccgcctcgaccaggcgt

SEQ ID NO: 23225 - DNA, 1183 bp, Zea mays
  Clone ID: LIB3594-053-E12_FLI
ttgaaggctgcccaacccttgcgccggtaggcggtggcggtgaggatagagggttacctgaggaggcagtgatggcggccacgattcagtacaaccggagcaacccggcggtgaagcggatcctgcaggaggtcaaggagatgcagtccaacccctcacccgacttcatgtccctccccctcgaggaggacatcttcgagtggcaatttgctatccttggtccgagagacagcgagtttgagggtggaatttatcatggcaggatccagctaccttcggattatccattcaagccaccgtccttcatgctacttacgccaagtggacgctttgagattcagaagaagatttgcttgagcatatccaattaccaccctgagcactggcagccttcatggagtgtccgcacagctttggtagccttgattgccttcatgccgacgaacccaggtggggcattgggctcactggattacaaaccagaagacagacgagcacttgctataaaatcacgtgaggtgccgccgaaatttggctccccacaacgtcagaaactaattgatgagatccatgagcaaatgctcagtaaggctcctcctatcccccaaacgctgccaaatgtgccaaacgaggagctcgcacctgactcttgtgatgagcatgcagacaaggtagatgaaggtggcaacacatccaagtccatgtcaggctcgtcgagtggccatcctgtgcctgaagctgaatcgctggctgcagaaaacacgggtgaagcatcagcagttgaggttgccaaccatcaagtgcctgaagcgagccgtagagaaagcattccaagagttccttcgtctctgcagaatgctgctattgcaacccagaagccaaagcatgacaggctattgaccttggccgcatttgggttgactcttgctattatggcactagtgatcaagaagttcttaaaaatcaatggcttgggcggtttcattgagggcaagttctgagtaggattgtgcataagttggatgtacgagatgactcattcctcgtactcagcatatgctataagctatataaccccgtaagatttgtaattgtttagttatagatgaaatcaaaatggaacggtactatcaataccccattgtatatgtacactggattgaaaattgctgagtatttaagc

SEQ ID NO: 23226 - DNA, 1576 bp, Zea mays
  Clone ID: LIB3594-053-H7_FLI
tatatatatacacacaccaagcaagcagcaatgcaagctgaaagagaagctacagccagcaacagcaagcaggctgaaccaaactccagcgagcaagcaagctatagctagctagtagccaagcagaagccaaatacccaaaggcgagcgatggcgcccggaagcatcgccagccggtggcgcgagctccagggcgcggactcctggtcggggctgctggacccgctggacatcgacctgcgcgcgaacctgatcgcctacggcgagctcacgcaggccacctacgacgggttcaaccaggagcggcggtcgccgcacgccggcgcctgcgtgttcggctactccgacctgctggccggctcgggcgccgcggcggccgggagctacgccgtcaccaggttcatctacgccacgtcggcgctccccggcgtgcccgaggcgttcctgctgctgccgctgccggacctgctgcccgagtcctggagccgggagtccaactggatgggctacgtcgccgtcgccaccgacgacggcgtcgccgcgctcggccgccgcgacatcctcgtcgcgtggcgcggcaccatgcgcggcctcgagtgggtcaacgacttcgacttcacgcccgtgtccgccgcgcccgtgctgggccccgccgccgccgccaacccgttcgccttggtgcaccggggcttcctctccgtgtacacgtccagcaacccggactccaagtacaaccagaccagcgccagagatcaggtcctggcggaggtgagcaggctggtggcactgtacaaggacgaggtgacgagcatcacggtgtgcgggcacagcctgggcgcgtcgctggcgacgctgaacgccgtggacctcgcggccaacggcgtgaacgcgccgccggccgggtcgtcgcagccgccgtgccccgtgacggcgctggtgttcgcgagcccgcgcgtcggggacggcaacttcaagagggcgatcgcgtcgttcccggacctgcgggcgctccacgtgaagaacgccggcgacatcgtgccgacgtacccgccgctggggtacgtggacgtggccgtgcagctgcccatcgccacggggcggtcgccgtacctgcggcagcccgggacgatcgcgacgctgcacaacctcgagtgctacctgcacggcgtggccggcgagcagggcagcgccggggggttcaggctggaggtggaccgcgacgtcgcgctggtcaacaagggcgaggacgcgctcaaggaccagtacccggtgcccgcccagtggtgggtcgccaagaacaagtgcatggtcaagggcgccgacggccactatgcgctccaggacttcgagcagatctgatcatgcatgatgcaggtgtcgtgcgtgctggtaaactactagtacctctctatcggtcgatcacgatgtacgaataatgggcgtcgtcgatacgcatgcgtgtatgatcatccagatccaggttgtgtgtgtgtgtgatgcttctcacctcttcctcctacgaaccggagattgtgatggggagtcagttataattataaataaaccatcctctgat

SEQ ID NO: 23227 - DNA, 780 bp, Zea mays
  Clone ID: LIB3594-053-H9_FLI
aaaaccctagccgccgccaccgaagcggcctcccaggtaagcaagagcgtccaccccgccgccgccatgaagcgcaatccccgcgtcacgagctctcgccggaagtgccgcaaggcgcacttcacggccccgtcctccgtccgccgcgttctcatgtccgccgggctgtcgacggagctccgccacaagtacaacgtgcgctccatcccgatccgcaaggacgacgaggtgcaggtcgtgcgcggcacctacaagggccgtgaggggaaggtggtgcaggtgtaccgccgccgctgggtcatccacgtcgagcggatcacccgcgagaaggtgaacggctccaccgtgaacgtgggcatccacccctccaaagtgatcgtcaccaagctgaagctcgacaaggaccgtaaggctctcctcgaccgcaaggcccggggccgcgccgccgacaaggctaagggcaagtttactgccgacgacgtcgctgcagccgccgctggtggcgccgccaccggcgcctctctccaggagatcgactagactcttcacggtcatctgatggttgtcgtaccgccttttcctcatctcttttgtttttgctaccaatgattatgtgatagaggttttatgttatttgaaaactgctctgtgcctggatgagagtttttggaacataatgtgaacctgtgtgtctgtgacctgagctttgaagatctcattatgtggttaatgtctccttgtagtatcttctaaatggttgctgtgatttgtcttcactct

SEQ ID NO: 23228 - DNA, 1535 bp, Zea mays
  Clone ID: LIB3594-054-E10_FLI
cagaggagacaaagaatatcgtgtgtaatgaaattgtgagtgcatatgaactggatggccatccggattatgattattgctatggagatattgtcgttcgcttgccgcctgtctcacctgtaattgaatcaaccaataacaaggatcaaatggaactagataggacggtcgatgcctcggaaggatttgctgcctcaaatgatgcaccctctaatactagtgcaagtgaacaacttttgcagaaggaatcctgctcgcagtttacaagcctctcatgggctggaaatatagttggctttcaagacggtgagattgaagtcatttggggtgatgggtcgatttcaaaggttgggcctcatgaaatatatgttgttggccgtgaagatgatgatgcctcactagatgacggaacagcctctgatggtgctagctgggagactgttgatgacaatgaaatggatgtacttgatgattctgcaaagggcacgggtggaagaaagtgggtaaaaaaagtacagcaggaatggagcatacttgagaagaacctaccagactatatttatgtcagagtctttgaggatcgcatggatctcttgagagccgtgattgttggagcaagtggaacaccctaccaagatggcctgttcttctttgatttctaccttccacctgagtatccgcaagttcctccgtcagcatactaccattctggtggtttgcgtgtaaatccaaacctgtatgtggatggaaaggtttgcttaagtctcttaaatacttggaccggcagagggaacgaagtgtgggacccatcatcatcaagtattctacaagtactggtttcacttcagggattggttctcaatgaaaaaccctattttaatgaggctgggtacgagaagcaagttggtactgttgaaggggagaagaatgcagtgccgtataatgagaatacgtacctgctgagcgtgaaatccatgctgtatatattgagacggcctcctttgcattttgaggattttgtgaagagccatttccgcaagcgtggccactacatccttaaagcctgtgaggcatatttgcaaggaaatgttgttggcactctcactgacgacgcatgcaccaccaacagaagcacggagcactcgagctctgtcggcttcaagcttgcactagcaaagattttaccaaggttgattacagccctgaaggagcatggagctgattgcgaccaatacgagcaccttggcaaaacagaccccgttagagagagctgatcattgagtgacttgtacttggatcttttgccttttatatctgttcttttttcgggtttcagaaaagatggtgacttaataccaccaggctgttttcgtataaatgtacattcaaagtttgttgtttccgtcaaacatttggaaaatatggccccaaatgatttattcgatacatggagccgagctaccctgtacagttgcgccgtgtttggttcgatgtaatgtaacgttatcagatttcttggagtattcgataatgtt

SEQ ID NO: 23229 - DNA, 1228 bp, Zea mays
  Clone ID: LIB3594-054-F4_FLI
ctctaagccaaagcaagttgctaggtcctttgaaccagcaactgaagcttcctcgtctcatcatcgagaccagtaagcaacatggcggctaatctcaagtgggctcctgttctagccctcgtcgtcgtcgttgctgccatggttggcaccacgagcgccggcaacatcgcagtgtactggggccagaacggcaacgaaggcagcctggcggacgcctgcaactccgggctctacgcctacgtcaacatcgcgttcctcacaaccttcggcaacggacagaccccagtcctcaacctcgccggacactgcgaccccggctctggcagctgcaccggccagagcagcgacatccagacctgccagtcgctgggcatcaaggtgctcctctccatcggcggcgccagcggcagctacggcctctcctccaccgacgacgccaacagcgtggccgactacctgtgggacaacttcctgggcggcagcggctcgtcccgcccgctcggcgccgccgtgctcgacggcatcgacttcgacatcgagaacggccagtcggcgcactacgatgacctggcgaacgcgctcaagggcaaggggagcgtgctgctgacggcggcgccgcagtgcccctacccggacgcgtcgctggggccggcgctgcagacgggccagttcgacaacgtgtggatacagttctacaacaaccccgggtgcgcgtacgccaacggggacgacaccaacctggtgaacgcatggaacacgtggaccagcagcatcaccgcggggagcttctacctcggcgtcccagcgtctccccaggccgcgggcagcgggtacatcgaccccggcaccctgacgggcacggtgatccccgccatccgaggcattggcaactacggcggcatcatggtgtgggaccgctttaacgacgtgcagaacaactacagcagccaggtgaagggcagcgtctgatgggcataccgcatacgaagcttcaagctacagcacctagccatgcatatatatatagtggctattcgtcaagttatcggactgctagatacaaatataataagagcggatcatcgggagacaaagacgcatgtcagctattgtctcgttttctaagcaacgagcgagagctgcatgcgctggttagatttaatatggatattgcccatacgttatgtaattaaatcaaataaatgttaagttcatattgaatgtgtcg

SEQ ID NO: 23230 - DNA, 1191 bp, Zea mays
  Clone ID: LIB3594-054-G6_FLI
caagcccatccctcccgcccgccaggtcccgcgagatctctcacagccccctcagatccgcctcccctcgccgccggcgcgctcgcgcgctttccgcacgcccgccgccatgtcgcacaaccacggcgacacgatcccgctccacccctcgtcggcgcagtccgacatggacgagatcgagagcctcatccacgccgcgccatccccggccaccgtgctccccgcgcggccaccgtctccgacgcgggcctccatccccgtttcttcctctccggccccgtcgcccgtccccacgaagccgcctttccccgccgcttccatcccaatctccgtctccgtctcccccgttcccgttcccgcgtccgtctccgtccccatcggcgccgacgggtttgggtctccgcccaacacgctcacggagccggtatgggacaccatcaagcgagacttagcacgcatcgtcagcaatctcaagctcgtcgtcttccccaatccctaccgcgaggaccccggcaaggcgcttagggactgggacctgtggggtcccttcttcttcatcgtcttcctaggcctcacgctctcctggtcggcttccgtgaagaagtctgaagtatttgctgttgcattcgcggtcctggcagctggtgctataattctgaccttgaatgttctgcttctgggggggcacatcatcttcttccaaagcctgagtcttcttggctattgcctatttccattggatgttggtgctctagtttgcatgctgaaggacaatgtcatacttaagattgtcgtggtgacaatcacattggcttggagctcctgggctgcgtatccattcatgagcgctgctgttaacccaaggagaaaagctctggccctatatcctgtcttcctcatgtatatctcagttggtttcctcataattgccattgattaacggggttgagctttgtagtaacatctgaagagttgagagtttccttggatggttgaaccaccagaatacatacaagtttgagtagacaatgcttctatccttgtaccctcgtggagtctttgtgaattgcctcgtaggaattttggtttttacatgatcttgaggcataaggttgtaaaattagtcgaaaatctgtatctgttgtaaagggcatggactttggaccactgaaatggctgtcaagctttcgt

SEQ ID NO: 23231 - DNA, 2538 bp, Zea mays
  Clone ID: LIB3594-055-D9_FLI
tccactcctaaacccagaacccagcccgccgcaaccctagccgccgccgccgcgcgccgccggcaccacaccactgccgtcgccacccccatggccgcgccgtcagaggacgcgttgcggcgcgcgctcgcggctcgcaaggctgctgtggacgcgcaagccgaggccgtgcgcgcgctcaaggccggcggcggcgcgtccaaggccgacgtggacgctgcggtcgaggcgctgaaggcgcttaaggttgaggccggcgccgccgcgcgcaggttgcagcaggcggtcggggcgggcgcgggtggcgccgcgagggaggagctgcggcaggcggtggtgaacacgctggagcggaagctgttctacataccttccttcaagatctaccgcggtgtcgcggggctctacgactacgggccgcccgggtgccgcgttaaggccaacgtgctttccttctggcgccagcactttgttttggaagagaacatgttggaggttgactgcccctgtgtgacgcctgaggttgtcttgaaggcatcaggccatgttgagaagtttactgacctcatggttaaagacgagaagacaggcacatgctaccgtgctgaccacttgttgaaagatttttgcaaggagaagcttgagaaagactttgccttgccccaagagaaggctgatgaatttaagcgtattcttgctattttggatgacctctcagcagaggaacttggtgcaaagattaaggaatacggcattgttgcccctgatacaaagaatccactttctgatccctacccattcaatcttatgttccagacatctattggccccactggtcttagcgtggggtatatgcgaccagagaccgcacagggtatttttgtaaacttcaaggatctgtactattacaatggccaaaagctcccttttgcagctgctcaaattgggcaagcctttagaaatgagatctcgccacgacaaggacttctccgagtgcgtgaattcacattggcagagattgagcattttgtggacccagaggacaaatcacatccaaaatttgttgatgttgctgatttggagttcctgatgtttccaagagagctgcaactctctggggagtcagccaatctaatgaagcttggggaagcagtttcaaagggaactgttaataatgagacacttggttacttcattggaagggtctatcttttcctgacaagcttgggaattgataagggccggttgcgcttcaggcagcatctacctaatgagatggctcattatgctgctgactgttgggatgctgagatagagtgctcgtatgggtggatagagtgtgtgggtattgctgatagatctgcatatgatttgaaagctcacactgacaaaagcggtgtccctcttgttgctcatgaaaaattctccaagcctagagaggttgagaaacttgtcatagttccctcgaagaaagacctggggctggcttttaagggcaaccaaaagatggtcctggaagcattggaggctatgagtgagaaggaagcatttgagatgaaagctgaactagagaccaagggggagacaaattttaaagtgtgcacacttggaaaagacgtggtgattacaaagaagatggtatcaatcagcatggagaagaagctggaacaccagcgagtcttcaccccttcggttgtcgagccgtcattcggcataggacggatcatctactgcttgtttgagcactcgttttacacaaggcctagcaaatcagaagaggaacagctgaatgtcttccggttccctcctcttgtggcccctatcaagtgcaccgtgtttccccttgttaagaatcaagagtttgacgatgctgccaaagtaatcgccaaggcattaacaactgctggtatctcccacattattgacactactgcaatttctattgggaggaggtacgccaggacggatgagatcggtgttccatttgctgtaacagtggattcggcaacgaacgtgacgatccgagagagggacagcaaggagcaggtccgcgtggacatcgacgaggtggcacccatggtgaagcagctgacggaaggccaaagcacatggactgatgtttctgcaaagtatcccgcccatgtcggcccccaaagtgagcaggagtgaagaatcgccgccctgatgtctagtctagccatcgaccgagaaggcgtcgggatgagccgtcttcattctccaattgccgagaagattgtgtggcctaaacataaccgcttttggtattgacattatccagaaaggcagttttttcccctcatacatacatggcacttgctatagcagttggatgttatgaagtctgcagatgtcaccgatgtttttgtttcttttaaatgcccctttcttgatgtattctcacccatacaaaacataccatttgaggtatttctgaactagctgtccttttgtaaggtcagactgggaattgttcagctatctacagtggaattggaaatttcagttacttgttatctc

SEQ ID NO: 23232 - DNA, 748 bp, Zea mays
  Clone ID: LIB3594-055-F11_FLI
cacacagcagcctttttgttctccccgcgagcgctctctttctctatcgactggcgacgactccgccaccgccgccgctctacgcgagacgcccaggtcttcgccaacgacgagcatccgggttagagaggaagaaattgcaaccgaaacaatggcggcagattccggcgctcgcagacaaccaagcttcaccaaggtcgaccagctgcgccctggaacccacggccacaacctcatcctcaaggttgttgactccaagatggtcgtccagagaggccgcgagggagggccccagggaagacagatgaggattgcggagtgcttggttggtgatgaaaccggcatcattgtcttcactgcaagaaacgatcaagtggatgtaattaggcctggaacaactgttgaactgaggaacgcaaagatcgacatgttcaagggttcgatgcggcttgcagtggacaagtggggaattgtgaaagctgctgaaagctcagctgagtggacagtcaaggaggacaacaacctgtccttaattgagtttgagctggtgaccgtgacggagtgaaaaccgccattgcttaggagtattgttggtttgctgtgttgttgaacctaatcatcatcgccaatcaataaggactcgtggttgatgttctcggcatcggagttgcgtattgctgtaccgttgcttgcttactgtgcgttgtggctacttttgactgctatcgaataataataaattggtgtc

SEQ ID NO: 23233 - DNA, 1044 bp, Zea mays
  Clone ID: LIB3594-055-H9_FLI
cgccaccttcgtggacgccgacgacgaggccgccgtgcgcgccgcggtggtccccggcgagacgcgggtggtgtacgtggagaccatgtccaacccgacgctggccgtcgccgacatccccatgctggcgcgggtggcgcacgaggccggcgccaagctcgtggtggacaacaccttcacccccgtggtggtgtcgcccgcgcgcctcggcgccgacgtcgtcgtccacagcgtctccaagttcatcagcggcggcgccgacatcatcgccggcgcgatctgcgggccggcgagcctggtgaacgcgatgatggacctgcaggagggggcgctgatgctgctgggccccacgatgaacgccaaggtggcgttcgagctgtcggagcggctgccgcacctgccgctgcggatgcaggagcactcgcgccgcgcgctggcgttcgccgagcggatgcaggggctgggcctgcgcgtgctgtacccgggcctcccgggccacccgcaccacgcgcgcctggccgccatgggcaacccgggctacggctgcggcggcatgctgtgcctcgacatgggcaccgaggagcgcgccaaccgcctcatgcaccacctccagaacaccacccagttcggcctcatggccgtcagcctcggctactacgagacgctcatgtcctgctccggcagcagcaccagcagcgagatgccgcccgaggaccgcgcgcgcgcgggcatctccccgggcctcgtccgcatgtccgtcggctacaacggcacgctggagcagcgctgggcgcagttcgagcgcgcgctcgcgctcatgcagacgccgacgcccacgcaccatctcaaggccgccgccgccgaccgcgacggccccgaagccgccaacaaccaccaccgcaagcactgacgcgcttgcgcttccgagcgtgcatggcctgtgtggacttgtgtgtgtcgtgttcgtgtatatactactagtgccattcaagcaagaatattaaacaccatctgatccctctggttcagatggatcgatatgcc

SEQ ID NO: 23234 - DNA, 488 bp, Zea mays
  Clone ID: LIB3594-056-B5_FLI
cacacacacacgcaggcagcagtcaagcggccaacctctgtttcacaccgtacatgcgtgccacgcccacaccgcagcccccgatgtcgtcgcagcgcccgggccgtcaccagcgccgcgcgtcgcagagcgtgttcgtgctcccagagaacctggcctccctcgacgtcgacgcggcggccgacgcgggcgccaaggccggcgggccagaaggcgccggcgccggcgccgagcagcaggcgaggccgcccgcggggcgtcaccaccgccgcgccatgtccgtggccgcggccgtggcctccagggagcttgagctgatcaaggaggacctcggcagctacaactacaaggtcggcgcctgagagagagagagagagaggagccggcacgctgcgtcatgtgtatagagcttgtgggttaaccgtacccagagctggctttgatcgacgattaacagtggcttaattacatggtctctctcttgctct

SEQ ID NO: 23235 - DNA, 570 bp, Zea mays
  Clone ID: LIB3594-056-C4_FLI
cttctccaggtaaggaaagggttcgtactcatggcgccgccgcagccaaagtcgggccttttcgttggcatcaacaagggtcatgtcgtcaccaagcgcgagctgcctccccgcccgtgccaccgcaaggggaaatcaacgaagagggtgtctatggtcaggggcctgatcagagaggttgctgggtttgctccttatgagaagcgtatcactgagcttctgaaggttggcaaggacaagcgtgccctgaagcttgctaagagaaagcttggaactcacaagagggcaaagaagaagagagaggagatggcgggcgtcctcaggaagatgaggtcggctggtacgcacactgacaaaaagaaatagagagcatttcaagttcatggagctggctgccagagattatgttccagtgtctgattttccatacatgtagaacctaatagacatgtcaaagtattatgtatcgaaccagctcatgggattttgctccttccaatgcatccagggtttatgtatcgaaccaatttatgggatcttgctcttattctaatgcatccatggtttgtg

SEQ ID NO: 23236 - DNA, 1608 bp, Zea mays
  Clone ID: LIB3594-056-C8_FLI
ctggtgctctgtccacctctctcgctctgggccgccgccgccgccctaagccacgtgctgaggctttcgttggtctcttcgccggcgacgagcacccagcagttctgtagaaatggctgatggtgaggacatccagcctcttgtctgcgacaatggcactggaatggtcaaggctggttttgctggcgatgatgcaccaagggcggttttccctagcattgttggccgtcctcgccacactggtgtcatggtagggatgggacagaaggacgcatatgttggcgatgaggcacagtccaagagaggtattcttacgctcaagtacccgattgagcacggtattgtgagcaactgggatgacatggagaaaatctggcatcatactttctacaacgagcttcgtgttgccccagaggagcaccctgtgttgctcaccgaggctcctttgaacccaaaggccaacagggagaagatgacccaaattatgtttgagactttcaatgttcctgccatgtatgttgcaatccaagcggtgctctcactctatgctagtgggcgtactactggtattgtactcgactctggtgatggtgtgagccacactgtgcccatttacgaaggatatgcccttcctcatgccattcttcgtttggatcttgctggtcgggacctcacagactccctcatgaaaattctcactgagaggggttactccttcacaacctcagccgagcgagaaattgtaagggacatcaaggagaagctagcatatatagcccttgactatgagcaagagttggaaactgccaagaacagctcttcagttgaaaagagctatgagctacctgatggacaagtaatcaccattggtgcagagagattcaggtgccctgaggtcctcttccagccgtcgatgattggtatggaggctgctggaatccatgagacaacatacaattcaatcatgaagtgtgacgtggatatcaggaaggacctctatggtaacattgtgctcagtggtggttcgactatgttcccgggtatcgctgatcgtatgagcaaggagatcacttcccttgcaccaagcagcatgaagatcaaggtcgttgcaccgcctgagaggaagtacagtgtctggataggagggtcgatcctagcctcgctcagcactttccaacagatgtggatatcgaaggaggagtacgacgagtctggcccggcaattgttcaccggaagtgcttctagggtttcacaagttcctcgtcgttacctagtctcaaattatgtcccctccatttctcgagatatgtgtggcagatttgcatgatacgtttgtttgtttccatcggacctgaagtcttcttggggataggctcccccctttgtatgttgtggctccaatccatgtgcgagcacgctgtgtctgtcgtgacacctggttcgtgagatgggttgtcaaacttgattggtttgttgtgcgtggctggaagagctgatagttatatatttggcttggactgtgccgcttgtatgtatctgaattctgaaagcgttgtaatctgagcatccgtgcaaagtatgaatggcccttttatatgggctggatt

SEQ ID NO: 23237 - DNA, 484 bp, Zea mays
  Clone ID: LIB3594-057-E8_FLI
cttgggtttggttcagccaaaatgatcaggagaatagtcggaatcgctcacgtagaggatctcgagtcaatcaaggatgccagcaagagagcggagtgcgagcgtgctgccctcaactgtgcgaagacgatcctcaagggaagacaccagttggagacgatcgagcaagtcgtcgagcatatccagtccttcgatcaggactgagaagacgacagtctatttgtgcgctgaagcctgaaggagacatactctcgtcaattaacccacgcatgcccgagtatcgatgaatcgtctgttttgtagtgatgaagcgcccggttgtttgtgatctctgtattggttgctaggtgagaaaagtatgtggtctcctggcttgaactgtgtgtacactattattccgggccggcatagcgagcagctgaataatgaaatgtacgggtcctcagtgaccatctcagtgcatataaacacgtgtgttaccaat

SEQ ID NO: 23238 - DNA, 824 bp, Zea mays
  Clone ID: LIB3594-057-F8_FLI
cttgcttttgtcatcttgcttaatttttaatagtgtagtactaatgccttatttttctgataatatgctaatccacaggatgatgggattctggtgattccaactgctttggggtgccccccaaagcttaacgctaagctactcacatctgaaatctacaattctcagacactacgtcttttatctttagctagcatgtcaggatgttgccaggtttctattcctttgggtacgcatgataagtgtcccatttcagtttcatttattgctaagcatggtggtgatcggtttttgttggataccactcaaaccatgtatacaaccatccaagagcaagtggagatactagcgaaatctagtgtttcaagtaaacaagcaatgaatgaagaagcagctgaagcttcaggtgtatagggtaatgctgcatttaaggaaaagcaatggcaaaaggcagtaaattactatactgaagcaataaagttaaatggaaaattggctacatattacagcaacagagctgctgcctttctagaactaactagttaccgtcaggctgaggcagattgtacaagtgccgtcgaccttgatccaaagagcgtgaaggcctatttacggaggggcactgcaagggagatgctaggttattacaaggaggttgttgatgatttcaaccatgcccttgttctagatgttagactacccgtctagggtttctgttattccccttgtaataaccgttataccccctgtgtaatgggtctggcccaattactcactctattaatatcactcctaaccctggttagggtatgggttcctattct

SEQ ID NO: 23239 - DNA, 670 bp, Zea mays
  Clone ID: LIB3594-057-G2_FLI
cgtcgtcctccattaatattggcagcaagctaggatcatcagcatctgagcttatatattactacatcgatcggttgccaaatggcggggatgacagtcggcaataagctggcgctggctgcggtgctgctgtgcgcggcggcggccatggccacggcgcagcaggcctccggcgtgcgcgccacctacaacttctacaacccgcagcagaacaactgggacctcaacgccgtgagcgcgtactgcgcgacgtgggacgccagcaagccgctgtcgtggcgcatgaagtacggctggacggccttctgcgggcccgccggccccaccggccaggccgcgtgcgggcagtgtcttctggtgactaacactgcgacgggggcgtccatcacggtgaggatcgtggaccagtgcagcaacggcggcctggacctggactacgacacggcgttcaagcccatcgacaccaacggccagggcttccaggccggccacctcacagtcaactaccagttcgtcaactgcggcgacaactgaactgatagattattcacctgtgcatgcacctatatgtactagcaccactattccaagagttatatggatgtgatcccacacgtaagagccaataaaacatatatacgcccagtggaataaactgaattacctaagt

SEQ ID NO: 23240 - DNA, 2348 bp, Zea mays
  Clone ID: LIB3594-058-G11_FLI
ctcctcatcgcctcatcgtcatctacctcgctcgcaccacacgcgaaaccgaacaaactactcgtacaaactacaaagagaagagacaagtgtatttattttattaatcattagtactattgattagtattattgaaacagaggcattgccgatactcacgccggcgaccgatgggatcggagggtgagatcaccggcccgctcctcgcgtcgggcgccggcgcgccggcgccggaggcggtgcccccgtggcgggagcaggtgacggctcgggggctggcggtcagcgccgtcctgggggtgctcttctgcctcattacgcacaagctcaacctcaccgtcgggatcatcccctcgctcaacgtcgccgcggggctgctcggctacttcctggtccgcacctggacggcggcgctcgagaggttcggcgtcgtctccaagcccttcaccaagcaggagaacaccgtcattcagacatgcgtcgtcgcctgctacggcctcgccttcagcggggggtttggaagctatatgcttgcaatggaccagagaacctatgaacttatcgggccagattatcctggcaacagggccgtggatgtcaagactccttcactgggctggatgattggattcatgtttgttgttagcttccttgggctgtttagtcttgttgcactacgcaaggttatggtaattgattacaagctgacttatcccagtgggacagccacggctatgttgataaatagtttccacacaactactggagctgagcttgcagacaagcaagtcaggtgtcttgggaagtacttgagcattagttttatatggaactgctttaaatggttcttcagcggtgttggagattcttgtggtttcgataatttcccttctttgggacttgcagcatttaagaatacgttttattttgatttcagcccaacctatattggatgtggtcttatttgtccgcatattgttaattgttctacacttcttggtgccataatatcgtggggtattctttggccatatatctccacaaaagctggggactggtatccagctgaccttggaagcaatgacttcaaaggactctatggatacaaggtttttatatctgtatctgtgatacttggggatggtctttataacctcatcaagatcatttatgctactatcaaggaaataatgaatgcacgggctaagcaaggaagactgccactagcccaagttcaggatggcgatgaaggttcaaatttatcagctgaggaaaagcatctgaatgagacattcataaaggacagtatccctccctggttggcaggatctggttacattggccttgcagcaatatcgattgcaaccgtcccaatgatctttccgcagatcaagtggtaccttgtcctctcggcatacgttgttgctcccctcctcgctttctgcaactcatatggcactggactaacggactggaatcttgcgtctacatatggaaagatcggcctcttcatttttgcatcatgggttggtcagaatggcggtgtgattgctggcttagcagcctgcggtgttatgatgtccatcgtgtccactgcagccgatctcatgcaggacttcaagaccggttacctcacactctcttcccctaggtccatgttcgtgtcgcagttgatcgggaccgcccttggttgtgtcattgctccactcaccttttggctctactggtcggctttcgatattggtaaccctgacggcgcattcaaagctccatatgctgtaatcttccgtgagatgtcaattcttggcgtggaagggttttctgcactgcctcagcactgcctagcgatctgctcgtttttcttcattgcatctctagtgatcaacctcctcagggacgtcaccccaaagaatgtctccagattcatcccaatcccgatggctatggccattcccttctacatcggtgcgtacttcgccatcgacatgtttgttgggacagttatccttttcgtctgggagagggtgaaccgcaaggagtgtgatgacttcgcaggtgcggttgcctctggcttgatctgtggtgatgggatctggactgttccttctgcgatactgtcaatccttaggattgacccgccaatttgcatgtacttcaagccatcccttagcagctaaagttgggacaagtgttatccattttctgtatatcaaaataggacctaattgtgtatatctttaatttactacatgtaaactgttctaggaagaaaagctgtagcctaatgcaatctgttgattcttatttgcgtatgataatccagcattcgtttatcctggttctgtgt

SEQ ID NO: 23241 - DNA, 477 bp, Zea mays
  Clone ID: LIB3594-059-D6_FLI
ctcaggcgagcagcggagccgagcagagcctcgagatcccgcccaccatttgccctccggccgacgcggagccgatcgcttcaccggcagcgaggacgatgggttccgtcgcggaggactccaccgcggcagcggcagcagcggcgtcggtagtgttccgctccaagctacccgacatcgagatcccgcggaacctctcgctgcaggcctactgcttcgagcggctccccgaggtgtcctcccgcccctgcctcatcgacgggcagacgggcgccgtgcacacctacgccgaggtggaccgcctgtcgcgctccgcggcggcggcgctgcgcgggctcggggtgggcaggggcgacgtggtgatggcgctgctccgcaactgccccgagttcgccttggtcttcctcggcgcggcgcggctgggcgccgccaccaccacggccaacccgttctacaccccgcacgagatccaccgcc

SEQ ID NO: 23242 - DNA, 1309 bp, Zea mays
  Clone ID: LIB3594-059-E1_FLI
cacagcagcagcaacaacaacaacctccactgccgcaacccaccgagaggcgagaccggcggcggcaaaaggacgatacaaaagcagccagggttgctggcaacagcgtcggtcgcctgcccgctcgccatggggaggtcgccgtgctgcgagaaggcgcacaccaacaagggcgcgtggaccaaggaggaggacgagcgcctggtcgcgcacatcagggcgcacggcgaggggtgctggcgctcgctgcccaaggccgccggcctcctgcgctgcggcaagagctgccgcctccgctggatcaactacctccgccccgacctcaagcgcggcaacttcacggaggaggaggacgagctcatcgtcaagctgcacagcgtcctcggcaacaagtggtccctgatcgccggaaggctgcccggcaggacggacaacgagatcaagaactactggaacacgcacatccggaggaagctgctgagcagggggatcgacccggtgacgcaccgcccggtcacggagcaccacgcgtccaacatcaccatatcgttcgagacggaggtggccgccgctgcccgtgatgataagaagggcgccgtcttccggctggaggacgaggaggaggaggagcgcaacaaggcgacgatggtcgtcggccgcgaccggcagagccagagccacagccacagccaccccgccggcgagtggggccaggggaagaggccgctcaagtgccccgacctcaacctggacctctgcatcagcccgccgtgccaggaggaggaggaggagatggaggaggctgcgatgagagtgagaccggcggtgaagcgggaggccgggctctgcttcggctgcagcctgggactccccaggaccgcggactgcaagtgcagcagcagcagcttcctcgggctcaggaccgccatgctcgacttcagaagcctcgagatgaaatgagcgcgcttctaccctctctgtgtagcttctccccccccgtcgtcctcgtttttgttttgccacacctcacatggatgatgaattgatgatacgtggttggttagttttttcgtaggtgaaaaatacgcgatggtgagcgagtgaaagagagattttgtgccctgggtcctcctccctgctctctcttgctgctccattttgcctccctctgtcctctctctctctctctctctctctctctctctctctctctctctctctctgtatctctgtaattaccatcgccaaatgatcatgggggcaatatcatgctaggtctctggaaattgacgctaatcccgtttccagg

SEQ ID NO: 23243 - DNA, 1834 bp, Zea mays
  Clone ID: LIB3594-059-E4_FLI
cccactttccaattcgacatcttcgccctcgaatcgagcttccctccaccgaatcgagttcctccatccaaatcgagctcattgccgccggatcgaggtctgcgtggatcgagctcgagctttggagaaggagaggaaacgggggacgggcacggggggagcaaggcaaccaaacgggtggagggaaacacgccaaacaggctcctcgatcgttccgggctcgggctgccacccgccattcggtgtcccctccttgacaggtgcccgagccgcgccgagctccagcctcatttccacggtccgcgccggcactcttccctctcccgatcgtcctcctcgtcgcctgccgcctcttccttcttcccactccactagcttcaggttggactgcacaacgtggagcggagatctatccgaacacgggattgattcatctggtggtgttacaacatagggtttttgatatagcaatgggattactcatgtataaatgaacaaagtttggagacagttggacctgacaattgccactttttacatgttttaactcattttttttctgggaaacaagtaattctgaagttaccttggaagtcctttgcgcttttgactggtcgggttgcataggccattgttgagaggtgatttggcctaagaatgggggctccaaaacaaaggtggacttctgaggaagaggctgctcttagagctggaatagcaaggcatggagttggaaaatggcgcacaatattgaaagatccagaatttagttccaccttatgctaccgctcaaatgttgatctcaaggacaagtggcgaaacatgaatgtgattgtcagtacatcgagttctcgtgacaaggcgaagtctgcattgaagagaatacgaactattcccaagaataatgagcacaccatggcaattaccagagttacttctgatattgatgatgagattgttgacgaaaagcctatagtatcattgcctagtgaagcaaagaacacatcaagttcgaagaaatctcacaggctagataatattataatggaggctataaagaacttaaatgagcctacgggatcacacagaactactattgctaattacatagaggagcaatattggccacctagtgattttgatcacttactatctgcaaaactgaaggacttgtccaccagtggcaaattgataaaggtgaaccggaagtacagaatagcacctagttcacccaattcagagcgccgaagccccaaaatgccactgttggaagatgtccaaagagagcctgtcaagatatggagtgatgatactaaaacccttaccagatctcaagttgatgctgaattggcacgtatggcaaccatgactgctgaggaagcttcagtggcagcggctcgagcagttgctgaagcagaggccatcatggcagaagctgaagctgcagcgaaagaggcagaggctgcagaagcagaagcccaagccgcacaagcatttgctgaagcagcgtttttgacattgaagaacagaaatgctggaaaattgatggcctaaggttgatcctacttggactctcggcctcgcggctgttctgaaacggcttttctgtgccatgtagatttgtacaacagtacgtgtttactacacttcggtttaaagcagctgccccggtgagtgtatcaccttatgttagtgggagccatgtgaaaactccagcctccagcgcactagtagcaacaatagcagcttgccacaacgccattcagaaaactgggtggcataaactcttccagtgtcaaatgtttcgctaacgatttgcagtattgcattgtgc

SEQ ID NO: 23244 - DNA, 1022 bp, Zea mays
  Clone ID: LIB3594-059-H10_FLI
cacgtttgctcgtaactcatatcaaacgtcaagatgtcgggaggaatcgacgttctcgccctcaaggaggaggatgttaccaagatgctcgctgcatcgtctcacattggcaccgacaatgccaacttccagatggaacagtacatcttcaaacgtcgtgctgatggcccttacatcatcaaccttcgccgcacctgggagaagttgttgctcgctgcccgtgcaattgctgccattgagcacccagctgaggtttttgttatctcaagccgtccctatggtcagcgtgctgtcttgaattttgctgcccacactggtgccactgctattgctggccgttttacccctggcgctttcaccaaccagattcaggctgctttccgtgagccccgcctgttggttgtcactgacccagcaactgacaagcagcccatcactgaggcgtcatatgttaacattcctgttattgctttctgcaacactgactctcctctcagatttgttgacattgccatcccctgcaacaccaagtcccaccactccattggtctgatgtggtggttgttggcacgagaggtgctgcgcctgcgaggtcagattccccgtgaatctaagtgggatgttgtagttgacttgttcttctacagggatcctgaagaggctgaaaaggaagagcaggctgccaaggaagttgctgctgtacccataaaggttgagacagactatgctgccattagttctgcagcaaactgggatggtgaggctgcaccagttgtgggcgccacggagaactgggacggcgaagcagccgccccggctgctgctggggctgctcctgttgctcctgcagctgttgatccagcaactttcgttgctgctgctgctgcttcagacaactgggccgatgaggcatggcaggctcagcctggtgcccctgcggcagcccctgccactggcagctggggagctaatgctcaatggtagataaagagaacacctgtgaaataaaatggtcaacccat

SEQ ID NO: 23245 - DNA, 1166 bp, Zea mays
  Clone ID: LIB3595-001-B4_FLI
gtagcagcagcacaactgcacgacccctcgccggccatggaggcctccgccaccggcgccgcggatccgcacttcccgatttacatctcctcggacgaggaagacgggcacgcctatttcatcgagtcctatagccccgaggaggtccagattcagcagaccattcttctctccctgtatacctctcgcgcccagacggccgccgcctgctccgcttcctcctcttaccctactggtgcctcctccacccctaaggccggtacctcctccacccctaaggaaactcctatcgatcacaaaagaaagcgcaagcttaaactagaagacgacacgaacgactccaaaatgaagcggtccacgcgcaaccgcttcaactgcgccatctgcttcgagatggttctggctgcggagaagtttgttgtgagtcactgccctcacgcgttctgcaacagttgcatcggaaggtatgtcgccggcaaggtagccgacaacgtagccgtgatcgggtgccctgaccccgcgtgtgagacggggtttattgagatggatctgtgtcgggatatcatcccgcctgaactatttgaccggtggagtgtcgtgctgtgcgaggagctactgggtgatgataagttctactgtccgttcaaggattgctcggcactgttactaaatgatgattcggcgaagatcagggaaacagagtgtccccactgtcacaggctgttctgtgctcgctgccatgtgccatggcacgatgggatcgagtgcaaggaatttaggaagcttggggatgacgagaagggggagaatgatttgatgcttaagaaacttgctgacaaggagaaatggcagaggtgccccaagtgcaggatgtatgtttcgcgaaaatctgggtgcttgttaataaattgcaggtgcaaacagtacttctgttaccattgtgctgcaccaatggatagggaaactcactattgtgagaattgcaagcactagagaagtagattaaggtctttttagataatgagtaggtaaagctcttagttaacaatgcaggctccgtgcgcagtcgtaggtgatacctaagtagaattttatccccttttagtggaagtaagttccacctttctgccatcgtgatattgttgagctatagagttgatgtgctg

SEQ ID NO: 23246 - DNA, 1236 bp, Zea mays
  Clone ID: LIB3595-001-H8_FLI
gctcgttggtcagtcgccgtcagcccaatacccaccatccccaccaacggccggccgccgcggcggagcggagcagagagcaaccatggcgtcgaagcagatggaggagatccagcggaagctatccctgctggagtacccgcgggcgaacgcccccgcgcaatccctcctcttcgccggcgtcgagcgctaccgcctcctcgagtggctcttcttccggctcctaggcgacagatcgcccttcacgcagcagaactggcaaggggatagcctggaccgcgacgaggagaacaacaggatccaacacctggcggagatagccaacttcttgggcatcacaccttcggcggacaccgaggcgattcagggtcgaggtagctatgaggagcgggtggaactgctccatcttattgttgacctagtggaagctagttgctacgctgacaatccagaatggagtgttgataagcaattggagaaggatgtgcaactagtagattcaattgctgagaaacaagcccaaattttttcagaggagtgcaagcttttccctgcggatgttcaaatacaatcaatttaccccttgcctgatattgctgaactagagttaaagctctcggagtataccaaaaagatgtctaatctgcagcaaatggttcaggagttagcatcgaagtatgattataatccaaatgaagactatgcggagacagagttgaagttgagggaatacttgcaatcatttttggaaacggttaaatccttcaacacaatatatactaaggaaatccatccttggacccacatgatggaagtgccacaattgcatggcttcggtccagctgctaatcgcctcttggaggcatataatacccttttaaagttcttgggaaatctgaggagcctccgagattcatacactgcaatggctgctggttcactgtcggcttctaatgagccttcatctgtgaccaagattatttcagactgcgaatctgcactcaccttcttgaatcacagcctttccatcctttcaacttccgtggcacgtgagcaggggggaacgctatgattttacagtatttggatagtaagatatagtcagtgaacttatgtatgtaagcttctattaattcaattgtttgcttcctataaaaaatcagttgtttgcattttaatttcagctagtgcatgtactccctttgatccaaattataaattgttttgatattttcc

SEQ ID NO: 23247 - DNA, 1094 bp, Zea mays
  Clone ID: LIB3595-002-B8_FLI
gtggcatcaatcagggtgcccaagacccaacgcgccaggagggagcttctcaagcacgcgcccaagcttgttgagaccagcaagaagacactgatcctccatggtaccaagactagtgctgtgttgaactctgtgctgtcagatatttaccacctaaagcgtgataatgctgtgaaatataccaagaagaatgacaacattaggccttttgaaagtggtggagaatcttctctggaatttttctccctcaaggcagactgtagccttatagtgtatggttctcattcaaagaagaggcccaacaatctgattttggctagaacgtatgaccaccacatatatgaccttgttgaagtaggagttgagaactacaagtcaatggaatcttatgtttatgataagaagctagcaccattacttggatcgaagcctttctttgctttcataggggaacactttgagagttctgaagagctgaaacatttgaaagaagtgctgcttgatcttttcagaggagaggtcgtagagaatctgaaccttgccggtgtggatcggatctatgtgtgcactgcaatctctcccaccactgtctacatgatgcactgtgctctccgtctaaaaaggtcaggtacatctattcctaggatggagctggtcgaagttggaccttcaatggatctggttgtaaggaggcacagacttccagctgaaagtttgaagaaagaagctatgaagaccgctgaacatgctaagaagatgaaaaatgtcaccaaggatccagtgcagggcaagctgggcaaggtctacatgccagaccagcaggttggaaagttgaccttatcaaacgacgtaaagggactaaagagggagcgccgcgaagccaagaaaaatcaggactcaaagaagcaaaaggtcaaccctgagtaaagagcactgaagtttacctttgtatctgtttccaactgctgtgttatccaagtagaagttgctcgctgtcagattagtgccatcttgttaggctaaagatctctgtacgactttcacatcagtattgtgtaccaatccatgttatgacataagcatggaattttgag

SEQ ID NO: 23248 - DNA, 743 bp, Zea mays
  Clone ID: LIB3595-002-F7_FLI
ctcctcaccatttcccaaaccctacccatacccccgccgccgccgccgccatgccgcccaagctcgacccgtcgcaggtggtggaggtcttcgtccgggtgacgggcggcgaggtcggcgcggcgtcgtccctggcgcccaagatcggcccgctcggtctctccccgaagaagatcggcgaggacattgccaaggagacggccaaggactggaagggcctgcgcgtcaccgtcaagctcactgtccagaaccgccaggccaaggtctccgtcgtcccctccgccgccgcgctcgtcatcaaggcgctcaaggagcccgagagggacaggaagaaggtcaagaacatcaagcacagcggcaacatcggcctcgacgacgtcgtcgagatcgccaggaccatgaggaacaggtccatggccaaggagttggccggcaccgtcaaggagatcctcggcacctgcgtcagcgtcgggtgcaccgtcgacggcaaggaccccaaggacctgcagcaggagattgatgacggcgaggtcgagatcccgtccgcttgaagactagacatcgaaggggacttccattggtgctgctgaagtgttgttgttctgcatgctgtcgatgtacctttttcaagcaacgcgagccatctatttcttttgtctagctatgttagtgatatcttgtgagagacctcaatgttaccaccgtatctttgtctttgttggatggagagatttaagcacctt

SEQ ID NO: 23249 - DNA, 772 bp, Zea mays
  Clone ID: LIB3595-002-H3_FLI
gctggcttctcctccccctcttaccaagtcctcctcgggttagggttccttagggttttgtggaggggcgatggcggcggctgatgtggagtaccgttgcttcgtcggcgggcttgcctgggccaccagcaacgagtcgctggagaatgccttcgcctcctacggcgagatcctcgactccaaggtcatcaccgaccgggagacggggaggtcccgcggcttcggcttcgttaccttctcctccgagaactccatgctcgacgctatcgagaacatgaacggcaaggagctcgacggccgtaacatcaccgttaaccaggcccagtcccgtggcggtggcggtggcggcggtggctacggcggcggtcgcggcggcggcggcggttatggtggcgggcgccgtgacggcggttatggcggcggtggcggctacggcggtcggcgcgaaggtggcggcggcggctacggaggcggtggcggctacggcggtcggcgcgagggtggcggtggcggctacggcggcggtggcggcggcggctggagggactgatgtgtgggcccatcctggcttcggccgagttatcttatctatctatagtatcgtgttaccgttcgcttctgtcaccgtgttagtgtccgttctacctttggattaggtgttggtaccctgttgttcgctttggttgctcccgctatgaaacgagacgagagaagaatgagcaaggtttttgttcgcagctatttttgtccaatgatattgatatattgttcc

SEQ ID NO: 23250 - DNA, 687 bp, Zea mays
  Clone ID: LIB3595-003-A8_FLI
ctctaccaagtggcatcgttctttacactgatgacgatgaatggtctacctggaagaagataggagatgaagtcttacacatcgagctgcggaaatgggcagacgttatggtgattgctccattgtcagcaaataccctggctaagatcgccggtgggttatgcgacaacctcttgacctgcatcgtgagagcgtgggactacagcaaaccgctctttgttgccccagccatgaacacgttaatgtggaacaacccattcacggagcggcatcttcacacaatcaaccaactgggcatagccttgatccccccagttaccaaaaggctggcctgtggcgattacgggaacggcgcaatggccgaaacctcgcagatccatacttccgtgaggctcgcgtgcaagacgcaaccgcacgatgcgagcagttcactcgcgggtcctgtcagtaataaccggccatctagctgatgcagcggttggccacttgattgtcaagcttaggaatttgttttatctgcagtgtgcatctggagtgttgtaccagattttttttcaactagagtttgtgtgtattgaattagggggaaaggttgttgtcacatgataacaataacttccaatgatgactctattcagtttgtaattgtctgtgggagtacaattatgcagctgtattgtctgctac

SEQ ID NO: 23251 - DNA, 472 bp, Zea mays
  Clone ID: LIB3595-003-C6_FLI
gtcccggtggaccaggtggcgctcaagcttgctccgtgcgcggcggccacgcagaacccgcgcgccgcggtgccgccgagctgctgcgcgcaggtgcgcgccatcgggcgcgtccccaagtgcctgtgcgccgtcatgctgtccgacaccgcgcggaaggccggcgtcaagcctgccgtggccatgaccatccccaagcgctgcgccatcgccaaccgccccgtcggctacaagtgcggcccatataccctgccatgaggtgatcatgaggagccaagtgatggcgggcagtgttgtggcagtggcacctgaaggactccaaactctgactgccaatatgccgtgacctctgtcgcatcttactttccaaagatcccgagaataatgtggctgtaataatgcctcaactttggaataaaattgtatctttttcaccaagtcgataacactgtaaaatgcaattgacaagaac

SEQ ID NO: 23252 - DNA, 1939 bp, Zea mays
  Clone ID: LIB3595-003-H7_FLI
gaaatatccacagcgaaaactaaaaacattcctccgcgacggctccaggctgcgaagtctcccaccaacgcgcgccgatccggaccgaaggcctcctgcagtcctgctctccgtctccctcgcggcctcgccccgtggatctccgctccggccgacgggcgcgatggcggagccggagcgggagcagcgcccgctgctagaggtagagcaatccgtcacgtccataccggaagatcatgaagccacatgttggggctgtgggctccggcttgtttttgcgggttactcgcctatctataagtgtggctggtgtggagccatcacgcaaagtaaccagaccacaaggaaacctgatagtgtatggttttcccactggaggcgcgtgcgggacagattctttgtcaccgtgctcatcctcttcatgctctttgtgatatgtggtggggtctgggcggtatatcctattgttttcaaaatcagcaacttctgtggcatctttcactgcatggtaacagctgtgttagctgtatttaccatcacaagctactgcttggcctcttctaaatctgcaggcgcgccaacaaatgtacgttggggcagctatcccttggttgggaaaagggatcttgagaactatactttttgtacatactgtaataaaccaaagccccccagagcacatcactgccgatcttgtaaaatgtgtgtggtggacatggatcatcactgcccatttattggcaactgtgtgggagcttcaaatcatcaagtgtttgtcatttttcttatttctgtggtcattagttgttcttatgctgctgggatgaccatatatgcaagctaccagatatggccctctgttgattttccaaacctagcatcatctcgtgattcaatgagcttttggaaaatatggttggagattattactacggttgcaggctctgccttcttcttgtcagcaagaggtctagttctggtatatctagcattcgctagtttatcagtcaatgctggtataggtgtactactgtgccagcagcttagttatatctacgaaggaaacacatatctcaaccatctaagttcaccgaatgcgttgcatggagagaggggtttgcataatattattagattttttgggtgcccttatccaatttccagagttctgttgcgatactcgaatgctggcaagttgcaggataattcagggtcaaaacttctctagaggtttcagtgatacactcttactgttccagcaactgaggcagtgtatggaattagttgttccgagtcaagatggttctgttacctggaatcatgatttgtgaacctcagttgaccatcaacagattagtttgagtaactgaagttgttcagggacgcaacactcatgacagtccatgttctggactctggagaggagttgttcatgtcactcacattgatttggtagaacagctctggcagatgctgaagtaccatgtggcctgcgcattcattgcctgcagacaatcataaggtgctgatggcattgcaataaattgcagtatctgaaatcccgcaccatgcatcatcactgcctttttcgatagggctgaagatggaagcttcacgcttttggttgctgcagaagaaacggacatcaggattaaatctgacagcggctttgagtggtgctaggatgtttggaaaaatgtgtgcctccttgatgctaatacacggacatgtatataggaaaatgatacacccagcctagtgaggttaaccgagagccaacaaattagggttatctggagcctaacagttcattaagtacaacaaaactcggggagagatccgatcgccccaaaattctagtccgatggggaagggtggttctcccttttagggctagtttgggaacctactttttcgaaaggattttcatttttctaag

SEQ ID NO: 23253 - DNA, 1038 bp, Zea mays
  Clone ID: LIB3595-005-H7_FLI
accaaccacaaccagcgtcagctcctccacgtacagtacataataagctaacagtccattccgtgcgcagccacaaagctagcttatttcccttcccttcacgcggcaagcggcggccggccttccgccgccatggccaccaccaccgcgcccgtcctcctcgtcttcctcgttgccattgccacgtccgtcgccccctcattccccatcctgacgatggcggcggacgcggacaacggcaccacccacctgagcttcttcatgcacgacatcacgtcgggcgccagcccgaccgcggtgaaggtgatcaaggggcccggcgcggggtccaccccgacggcgccggcgctgggcatgacgttcggcgacaccatggtgatcgacgacccgctgacggaggaggcgtcgcccgcgtccgccgcgctgggccgcatgcagggcttctacatgctggcgtcccagaccggggcggcgcttatggtgtgcgccaacctgctgctcacgtcgggggcccacaacgggagcacgctcgccgtgctgggccgcgacgacaccggccaggacgtccgggagatccccgtcgtcggcggcaccgggacgttccggatggccacgggctacgtgctgtggaagacgccggatgggatcaacggcaccgacgccaccgtccagctggatgtctacgtcaccacggacggcaacggcaccacggacgccggcgacgccgacggcggaggcggatccccgtccgcagggtcagggtcgtcggggtcgtcgggaggctccaagtccacctccggtgccgagagtaggaggaggaggatgaccggcgggtgggtcgtcgccgtagtggttgcggtggttggatccttctgggtttggtgagcaacgacctgttgacgaaggatgggggtgggtgggtggtgtgtgagtggggtggtggtcccacatgctggtgggtgagagtgggtgcatgtgctctgctgcggcatgtcggttgccggcatcattcctatctatctgtattggacttgttct

SEQ ID NO: 23254 - DNA, 1006 bp, Zea mays
  Clone ID: LIB3595-006-A10_FLI
gcattctcctcgctcctgctgccatcgtttttcctttttcctggacagccactgcaactcctcccaaatcctcccacccggtttagccggctccgctgccaccgccgcgactccacctctgtcgccaccatggtcaagtccaaggccatcagggtccacgagctgggcggccccgaggtgctgcggtgggaggaggtggaggtcggggagcccggtgaaggggagatccgcatcaggaccaccgccgtcggcgtcaacttcatcgacatctactttcggaagggggtctacgccgcgcccaccatgcccttcaccccaggaatggaagccgttggcgtcgtcaccgctgttgggcctggcctcactggcaggaaggtgggcgatgttgttgcatatgccggcaaccccatgggctcctatgctcaggagcagatccttccagcggctgtcgctgttcctgttccaccttccgttgatcataagcaagcagcttctgtgatgctcaagggcatgaccgcccatgttctgcttcgccgggtattcaaggcttccctggagtgcttggcgtcccgcggcttcctggtgtcgtttgggcagtcgtcaggcaaacctgacccaatcccaacgagcgacctggcttccaagtccttgttcctcactcgtcctagcctcatgcattacactgctacccgtgatgagctgctggagtcagccggcgaggtgtttgccaatgtcgctaacggggtgctgcacgtccgggtgaaccacacgtatccattgtcggaagctgcccaggcccatgcagatctggagggcaggaagacatcagggtccatagtgctcatcccgggatagactcaagggcatgtgaatgaataaatggggtgatctggttatgggaacggcgtaataataattatatctatgctgtttatgcggtatgttcgagtctgtttctgagttcctaaatctgaatgaataagtggcgcccttgtgttgttgggtc

SEQ ID NO: 23255 - DNA, 798 bp, Zea mays
  Clone ID: LIB3595-006-H9_FLI
gcggccgcggcgccgccagcggtgctgcaggacggagcggtcactgtgctcatcaccgccggcgcctactctcttgtgcgcgtcttcgacgagctcaccgagcggcggctcatcgaaaagagcttgagcaggaaggttgtgcacgtgctatccggcgtcctgttcatgtcatcttggcccctgttcagcaattcgacagaagcacggtatttcgccgcggttgtcccgttcctgaactccatgaggcttctgatatatggactccgtctctacactgatgaagctctggtaaaatcagtgacacgtgaaggaaaaccagaggaattgctgagaggtccactctattatgtcctggtgctgctgttcagcgttttagtcttctggcgtgagtcccccatcgggatcgtctccttgtcgatgatgagcggtggcgatggttttgctgacattgttgggaggaggtatggctcagcgaagctgccattcaatcggaagaagagctgggccgggagcatctcgatgttcatttctggtttcctgctgtccgcgatgatgatgctctacttctcaagcctgggttacattgatgttatctgggaagaggcacttggtaagctggcgcttgttgcactagcagcgacagtagtggagtgcgttcctgtgaccgaagttgtagatgacaacatatctgttcctttggccaccatgctggtagcttttctcttgtttagctccaaccgcacaatagttaattaaaatactactagtgcattatttaagacatgtgatgagttcttc

SEQ ID NO: 23256 - DNA, 321 bp, Zea mays
  Clone ID: LIB3595-007-A12_FLI
ctacgacgggcaaggattcatgtccctccagctagaccgtagccaagccaagttcaccttttacgacgtcgacgggaaggcgctgtacagttacacacggtcgagcctgatggaaacaggccaccacctccaagcctccggctacgtcaacgaggaatgaagcaggggcgagtcagcatgcagcgctggagaactgagatcgatatatgcagttcaagcgtaaaaatagtgcaaatattcattatcaagcatctctcgatattttgatataattctcgagcgcttgatgtggttcatctgtcaagggcaacagttaagttt

SEQ ID NO: 23257 - DNA, 594 bp, Zea mays
  Clone ID: LIB3595-007-C11_FLI
accctagcttcgctcgttgcggcggcgagccggcgatggcgaagtctctgcgatccaaacgcgagaagcggcttcggacgttgcgccgggagatagcggagccgttctacgacaagaaggaggccgccaagctcgccgcgcaggccgccgccctagctgctgccccgctcccggtccgcgggcccccgccatcccaggatgccggcagctcccgcgcagctagctcggcctcggctatggatgtggagatgtctgatgcagggaacaacaggtctaagaccttcttgaggccacttggcagcattagcaagaagaaggtgcagcttcatttgaagatcaagaaagacaagagaaaagctaggaagaagggaaagttttcttttaagaagtagaggagtgtatgataaatcatgcagttttgttcccagtttgtaaaacaaacgcactgcagtcatgtcatgtggtgcacctacctaagtccattcgtgggtgacctactattaaatatgttgaaatgggtacgaaaaaaggatagtgctgacctatcagctgtttctgttctgcgggtataaatgtcaagtactcaaattgctg

SEQ ID NO: 23258 - DNA, 855 bp, Zea mays
  Clone ID: LIB3595-010-B8_FLI
tgtaaggtagtagaaattatggggcagcaacagcaagcatgctcacatgatgcttgtgaattatgatgatcatggtttctgtgacagatgctaatcatgaaaactggggtcgacctgattgattctcagatgccatcaattataggtttgtgttaagtaaactagtttttttttaacaaggaccaaggggcataaccccgccccccctattaccaagataagtaagcctaatcctggatcaattcgactactggtttgggcttcgccttttttttgaattcttgtggacctactccattaaaccgaatctgggtcggcgtggtatacctaattattaggcgggaagggatatgcacacgaagttcaaatgcaaccacaggaaaatctaaacaaaacacccccccgttttttttttgcttagtgttgctggattaacaggtcgcggcaaactagtactagtgtttataactttcttgcgtcatctaggcgattggatttctggccctatacctacgtgaataaggtgtcgaacaatgtaatcaatgcacatgttgcttaatttcacatttctgctcgattcaattcaattggaaggctactagtttttaggccagccagtttccgagaagttagggtgcgtttggttgtgggacagtcaggatagagacgtcacgttcctctaatccaattttgagggacactgaagacaacactgggataatgttcatggaatcatcacggcttcatttgatcgtaccgactcgatcaaacgacgttgtacgcattgtgctgtgctttgtaacaaattgaatctgtatgatgctcgatcttctttagcacgtagcttatgtgtcc

SEQ ID NO: 23259 - DNA, 605 bp, Zea mays
  Clone ID: LIB3595-011-A7_FLI
cctgctggccgcggcggcggcgacgacggcggtgctgctgctgtggccggccgcctgcgtcgcggacgacgacggcacgacgttcccgccgtcggcgttccccttctgcccgacgcggccggccggggtctccacggggccgttcccctggtcgccgccgccgccgtcgtcggtggcggtgttcccgcaggatccggggttcttgacgtcggacgcttgcgcggtgccacggctgccgctgctcgctgtgttctctgttctcttggtgtttttgcagtgactcgctcgcggttgctgccctggactggatgcatatctatccgtagctgcccagttcagaaaattaaggtttgctccaacgacaggcctttgtttcatacagctctgtggaaaagaaaagaaaaaaaatctactagctttcccctgcagcagctctgtttttgagaacgtagctctgctttgtttcttcacaggcgaaggaatatcttcgtgtataacccgtagctagcttcattcacgtaattcaggctttagcttggataatagtaaaactagtgtcactggcgttgaaggttctgaaatcccagtagctttccttcagactt

SEQ ID NO: 23260 - DNA, 1022 bp, Zea mays
  Clone ID: LIB3595-011-D5_FLI
acgatacgttgcagtggtttgcagatctcgctgtattaaacatcaacgaccttgctgagcaagctgaactccaagcttgtacgaatgattccagtaactacgagtcggattcattcgagtccttgacactgaagctggaagagaccaagatcgacgatctctggagcaggccactggaacctgaaaccgcaaccgatgaacagacagtttcagctgctcaccttctcaccaagcccagaaggggccagcaaaggagacggcggcagaagcgagatttccagagagatgtcttgcctggcctttcgtcgctttcccggcctgagatcacagaggacgtccagttgctcgaggggttagtccaggcttccgggggatcctgggagtcgagcttgactaggcgaggacgttgtggtgggcgtgctagaggcaggaaacctcggaaaactgtagtaaccgtaattgtagaggaggaggaagaggaggaggtagaggttagcccaccgccaaaacctgctggcactggggaattggaagccgatggcaggggtatgatcgggtggggcagaacaacaaggcggtgtcgcagagcgagatgtccgtcaggtaacagcatggctactgcgtcttgagtgggagggtatttcttggcagcaagcattggacctgattaggtactgggtggttcacaattgttgtattgactccgatggatgggctggtggtataaggtgatccccctcatatgagtgtcggcctactggtctcagcacaactttcgtgcttttgggtcgaaacatggtttacgttcttataataagttcggtaaattagctggcgagacatttctgcgacagcattgtactaagctgttccaggttatgaggcccggtgccccggtatatattcattgtgagaaaaactgcaatgcatgtaaaccaccttgatctctgaagaatagctcatcacatgtgtaacaaaagggtgtgaatgaggctctgagcctgtattctttttgtagctgt

SEQ ID NO: 23261 - DNA, 1451 bp, Zea mays
  Clone ID: LIB3595-011-E11_FLI
cgggaaccagctcctcttcctcctgggcctcggcttcaccaacgcctcctacgccgcggcgttccagccggccataccggtgttcacgttcctcctggccgcaatcgtcggcgtcgaggtgatcaacatcttcacgaaacacggggtcgtcaaagtcctcggcacagccgtgtgcgtctctggcgccgtcctgatggtcttctaccgaggcccatctctgatcgggaccggaggcgcggccgatgcaactgccctgtcagtggttattgaccacagccatgcctataactatgctcctcagtggctggccgcggccatgctccggaacggcgtggaggcatggcatctcggcgtcgtctgcctcatcggaaactgcttcctgatgggcgcttacctcgtcatccaggccccggtgctgatcaaataccccgcgagcttatccctgaccgcctactcctactccttcgcaaccttgttcatggtggtcaccggcgcgttcgccaccagtgggctccacgagtgggcgctgacagcgaccgagatcttagccatcttgtacgctggagtcgttgcgtcctgcctgaactacgcgatcatgacctgggcgaacaagatcctcgggccgtctctggtcgccctctacaacccactccaaccggcatgctctaccttgctctcgaccatgtttcttggaactccaatttacgttggaagtgtgattgggggactcttcatcatcgctggcctttacctggtcacttgggctcgctacaaagaggctcagagcgctctggtagccggttatctgcgacctcttcttctgccgaccaccaaggcagaaggaagctccttcagggggctccattgatccttttacaccccaggcagagaggcagatggatttttgcctcaagtgtttctctaggccagcggcgtcagcagatttagttttcatgtctttgttgtataccaatcttgcatatatttggtttgtactttgcacggcagtttacacggtagagatggccagtactagtaccattttttcaagcattcaagcaaggttccattgtcagggaagaacggcagggcactgaagaaaatatcgtatcctgaacattgtattctggtgtcccaatcggcatttttgaagatgcccttttggttgtcctttcgacttcaacacttgtgtctgtaaggctagctgcagctgggtttaacgtcaccaacgaaagaatatgaatatcattttcatgcctaagaagtgaagctgcagtgcgctagagctatcgtgctcgtggcaagatgaactattcttctgtgatgatggaacctaacccgttccctgtattcaagggagagtcaaaataatactccaaagttcacgtactcgtgtatcagattttggaacaattggacaaagtagtctcgtattgtgccctttttgttct

SEQ ID NO: 23262 - DNA, 589 bp, Zea mays
  Clone ID: LIB3595-011-F8_FLI
agaaggtgataataagtatcaatctgaggaacatggtctacaggatgccaagaaaggaatgctttttattgactttcctccagttctgcaacttcagttaaaacggtttgaatatgattttgtgcgggatacgatgctcaagataaatgaccgttatgagttcccacttcaattggatcttgatagagatgatggaaaatatctttctccagacgcggatagaagtgtgcgtaacctatatactcttcatagtgtactggttcatagtggtggagttcatggaggacactattatgcctttattcgtccgaagctgtctgatcaatggtacaagttcgaggatgaacgagtgacgaaagaagacatgaaacgagcattggaggaacaatatggtggtgaagaagagctcccgcataccaaccctgggttggatactgcaccgcttagatttaccaagcattcaaatgcttacatgcttgtttacattcgagaaagtgacaaagataacattatctgtgatttggatgatgaagatatttcagaacaccttaaggttaggttgagaaaggaacatgaagagaaggagtac

SEQ ID NO: 23263 - DNA, 1071 bp, Zea mays
  Clone ID: LIB3595-011-H1_FLI
caaaaaaagtacagcccatgttgtggatctatatacggacatgcacgcatgcatgattcaaattcaaagatgcatgcaagtatagtgatcacgagcaacacgctgcacaacacgatcggggaccattttgtagtcgatgtcgtcttgcccttcgttcgtcgagctccaggcggcccgcccccgccagcagcattcgattcaaaagatcgatccgtgctctcggttcagagcccgaataaagtcagccaccaactcgtgccggacaagctagatagaaaaaaaaaacattggaatcaataaagcttgccgccgcctcgacgacatctcgtgccgatcccaacagtcatgttccaattgctctcttggctgctgcttcctcttcttccctcttggtcttggcggcggcttctttttcccttcttcggcgaagaaaatggccaggcacccaggcgtcgactggtcgacgacggctctgttccaacaagtccgcgtcgtcggcgtccggccgggcgcgatatgcatctgcatgcagctgggcatggcgagcgcgctggagacgctgtgcgggcagtcgtacggggcgaagcagtaccacatgctgggcatctacctgcagcggtcgtggatcatcctgtcggcgtgcgccgtggtgcagctccccgtgtacctgttcacggagccgctgctggtggcgctggggcaggacccggacatctcggcggtggcggggaccgtggcgctctggtacatccccgtgctcttctccttcgtctgggccttcccgctgcagatgtacctgcaggcgcagatcaagaacatgatcatcacgtacctcgccatgctcaacctcggcctccacctcgccctgtcctggctcgccgccgtccacctccgcctcggcctcgccggcgtcatgggctccatggtcgtcgccatgtggatccccgtgttcggccagctcgccttcgtcttcttcggcggatgccctctcacctggaccggattctcgtccgccgccttcgccgacctcggcgccatcgtcaggctctcgctctcttctggtgtcatgct

SEQ ID NO: 23264 - DNA, 741 bp, Zea mays
  Clone ID: LIB3595-012-C6_FLI
aggaagatggggctcgcgttcgggaagctcttcagccggctcttcgccaagaaggagatgcggatcctcatggtcggcctcgacgccgccggtaaaaccaccatcctctacaagctcaagctcggcgagatcgtcaccaccatccccaccatcggtttcaatgttgaaactgttgagtacaagaacattagcttcactgtctgggatgtcgggggtcaggacaagatcagacctctttggaggcattacttccagaacacccagggtcttatctttgttgtggacagcaatgaccgtgaccgtgttgttgaagccagagatgagctccacaggatgctgaacgaggatgagctacgtgatgctgtgctgcttgtttttgccaacaagcaagatcttcccaatgccatgaatgctgctgagattactgacaagcttggattacactccctgcgccagcgacactggtacatccagagcacttgtgccacaactggcgagggtctgtatgaaggcctggactggctgtccagcaacattgcgagcaaggcttgaggcctaccttgaatgtcaaccgcgaactgactaggagctccggatgtatcatggaaactcaggacagaatcgcagttgcaacctgttagatgtcttctaccggcactatatatattttttgtttgatgtgtaatgatgttactgttcaacgtttattaccctactatactgttggatgttctttggacc

SEQ ID NO: 23265 - DNA, 1156 bp, Zea mays
  Clone ID: LIB3595-012-D10_FLI
atctgacggtgcatgccatgcccatgacacccctcgagtgcgacatggcccctgcagcttctcgccagtcgtggcctcttcctcgctgcggcctgctggtcttggcccttgcactggcgacgaccgccgcggtgggcagcgcgcagctgtcgtcggagagctactacgacgcgtcctgccccgccgcccttctcaccatcaggaccgccgtctcgacggccgtgctgctggagccccgcatgggggcctcccttctccgcctccacttccacgactgtttcgtgcagggttgcgacgcgtcggtgctgctagacgacacggcgagcttcaccggcgagaagggggcggggccgaacgcggggtcgctccggggcttcgacgtgatcgacaacatcaagatgctgctggagctgctgtgcccgcagaccgtctcctgcgccgacatcctcgccgtcgccgcccgcgactcggttgcacaactgggaggaccatcgtgggcggttccgctgggcaggagggacgcgaccacggcgagcgcgtccctggccaacagtgacctccctgggcctaccagcagcctcaacggcctgctcaacgctttctccaacaagggtttgagcagcaccgacatggttgccctctcaggtgcccacaccgtcggccgggcgcagtgcaagaactgccgggcccggatctacaacgacaccgacatcgacgcctccttcgcggcgtcgctgcgggccagctgtcccgcgcaggccggcgccggcgacggcgcgctcgagccgctcgacggctccacgccggacgccttcgacaacgcctacttcggcaacctgctctcccagcgcggcctgctccactccgaccaggcgctcttcggcggcggcggcggcggcgcgactgacggcctggtcagcgcctacgcgtccaacgccggccagtggggggccgacttcgcggcggccatggtcaagatgggcagcatcagcccgctcaccggcacggacggcgagatcagggtcaactgccggagagtgaattaattatttattacagccacgttgattgcatttgctcttggggtagtggactagcgtgcatattttgcaaagaggcagagaagaattgaaatggagcctaagctcatatgtat

SEQ ID NO: 23266 - DNA, 1051 bp, Zea mays
  Clone ID: LIB3595-013-H11_FLI
cgcaccgacaccgactccgagccccgccgcgccgcgctacctccgctcctctcttcgcccctgccggcgtcgaggccgaagcgaaggcgagcatgcatcacgaccccaaccccttcgacgagggcagcgccgaggacaaccccttctcaaatggaggagccggaggcggcaagcagcagtacggcttccggccgactgagcccgtcgggttcggcggcgctagcaggggcgacgccgtcgttgacgtcccgctcgagaccatgggggactctcggagcaaggtgaaggagctctcgtcgtgggaatcagatctgaagcggcgagaggcggatatcaagaggagggaagaggcgctgaagaatgctggcgtgccaatggaggagaagaactggccaccattcttccccatcatccaccatgatattgccaatgagataccagcaaatgtgcagaagttgcagtatcttgcatttgcaagctggcttggaattgtgctttgtttgtcctggaacttcgttgctgtcatagtctgctggatcaaggagggagattcaaagttgtttttccttgcaacaatctatgctttgcttggaattcctctgtcatatttgatatggtacaggccactctaccgtgcaatgaggactaacagtgctttcagttttggatggtttttcctgtgttacctgatccacattggtttttgcataattgctgccattgctccaccaattgtatttcatgggaaatcattaactggtattctggctgcgattgacactttctctgaacatgtgataattgggatcttttactttgtggggtttgcactgttttgtctggagacactgctgagcattggggttcttcagaaagtgtacatgtacttcagagggaacaagtgaagccagtcatgatggagagttacgtttgttgagaaaatttggagttacttgtggctacttgtagcacatgttcattcgatggttttgtgcatacctgtcagtacaccttgaatctataatttcttatgtcagttattggtgccgag

SEQ ID NO: 23267 - DNA, 1388 bp, Zea mays
  Clone ID: LIB3595-015-H8_FLI
cacttgccgactacaacatccagaaggagagcaccctccaccttgttctccgcctcaggggaggcatgcagatcttcgtcaagaccctcactggaaagactatcaccctcgaggtggagtcttctgacaccatcgacaacgtcaaggccaagatccaggacaaggagggcatccctccagaccagcagcggctcatttttgccggcaagcagctcgaggacgggcgcacgctggccgactacaacattcagaaggagagcaccctccacttggtgctgcgtctcaggggcggcatgcagatcttcgtgaagactctgaccggcaagactatcacccttgaggtcgagtcttctgataccattgataatgtcaaggccaagatccaggacaaggagggcatccctccggaccagcagcggctcatttttgccggcaagcagctcgaggacgggcgcacgctggccgattacaacattcagaaggagagcaccctccacttggtgctgcgtctcaggggtggcatgcagatcttcgtgaagacacttactggcaagacgatcacccttgaggtggagtcctcagacaccattgacaacgtcaaggccaagatccaggacaaggagggcattccaccggaccagcagcggctgatcttcgccggcaagcagctggaggatggtcgcaccttggctgactacaacatccagaaggagagcaccctccacctggtgctccgcctcaggggtggtatgcagatttttgtgaagacattgactggcaagaccatcaccttggaggtggagtcgtctgacacaatcgataatgtcaaagccaagatccaggacaaggagggcattccaccggaccagcagcgcctgatctttgctggcaagcagctggaggatggccgtaccctcgccgactacaacatccagaaggagagcaccctccacctggtgctccgcttgcgaggtggtatgcagatctttgtgaagaccttgactggcaagaccataaccctggaggttgagagctccgacaccatcgacaacgtgaaggcaaagatccaggacaaagagggcatccccccagaccagcagcgtctgatcttcgctggcaagcagctggaggatggtcgcaccctagcagactacaacatccagaaggagagcactctccacctggtgctccgcctccgtggtggtcagtaagccatggttcatttaagctgctgctgtacctgggtatctgcgtcgtcgtcgtctaataaacatctgtggtttgtgtgtcatgaatcgtggttgtggcttcgttggtttaatggacctgttgtgtcctctgtgttgtacccaaaactcttctgcagcagtatggcttgaatccttgtg

SEQ ID NO: 23268 - DNA, 763 bp, Zea mays
  Clone ID: LIB3595-016-D2_FLI
ctcagaggagctggcaaacgactgtgataataaaaggctaaatccaggaaatgacaattatccactttcaacagcaggtgcaaataatttgtttttgggtattgagcaaggagctggaagcagcaatggccaggctgctttttcgaaatttgactatgggagctcaatgtcattaccatctgggcagggaatgtctggtcttatcgtaaaaggggcaaaatggcgcgacggggactggttgtgcaacaactgcaacaaccacaactacgcatctcgtgcgttttgcaacaggtgcaaaactcagaaagaatctgcagttcaccctggtgtgctatagcttgcttttgctggttcatattgttggactcgtttgttgcagggtatgttgctgcctgttctagctgcttcctcaagactgcagtttgagttttttcggttctgctgggtttttgctgctctcaaatgtttgtctcgatattccattagtgcttgttgaagttcccgatttatttatggtataagcgcttgaataaaatatctctggaaagtactggcctaccgcctaccatctgtttttttccaaatatttttattagttgttgtacaatgaggcaaatggtgatatacttatgttgtactttatgaactctgtaggattagtgcaccaaattaaggttttgtggccatgtttcagtcgtcgggttgaaaaagggaactataccatgtaatttcattacagattattattttttcctagaactcc

SEQ ID NO: 23269 - DNA, 636 bp, Zea mays
  Clone ID: LIB3595-016-F11_FLI
caaccgataatccgccggcgttgagatgttggtttatcaggatctcctatctggcgacgagctcctgtcggattcattcacctacaaggagctcgagaacggcgtcctgtgggaggtcgagggaaagtgggtcacccaaggtcctgttgatgtggacattggtgccaatccatccgccgagggtggtgaggacgaaagcgttgatgacacagctgtgaaggtggttgatattgttgacacattccgtctacaggagcaacctccttttgacaagaaatcatttgtgtcttacatcaaaaaatacatcaagaatctcactgctgtgttggagccagagaaagcggatgagttcaaaaagggtgtcgagggtgcaaccaagtttctccttagcaagctgaaggacctccaattttttgttggtgagtccatgaaggatgatgcgtctgtggtattcgcctattacaaggatggtgccactaatccgacattcctctatttctctcatggtcttaaggagatcaagtgctaggcgtgcggcgaaattagttacccatgttgggtactatctatgtactattattatatccaaaactatagttgtcctggctgaattgaactcaaaagggtttgtttgag

SEQ ID NO: 23270 - DNA, 674 bp, Zea mays
  Clone ID: LIB3595-017-C12_FLI
cattcgcagtcggccgtgtcctcggagccgcgggagatggcggatcaggagaccgtagctgtggttgaggcacctaccccggttcttggggaaccgatggacctgatgactgccctgcagctcgtcatgaagaagtcaggtgctcatgatggccttgtgaagggtcttcgtgaggctgccaaagccatcgagaagcatgccgctcagctctgcgtgcttgccgaggactgcgaccagcctgattatgtcaagctggtgaaggctctctgcgctgagcacaatgtccacctggttactgtgcctagcgccaaaactcttggagagtgggctgggctttgcaagatcgactctgagggcaaggcgaggaaggttgtaggctgctcctgtgttgttgtcaaggactacggcgaagaatctgaaggccttaacatagtgcaggagtacgtcaaatcgcactagatacagtctgtcagtatctggaagttgtgttcaacactacattttgcacctgagtttaaatatgtgtttggttcttgggctttgctaggagattagaacagttttcaagtgagcctaggatccatgtgaacgatttgaatatctcgcctcttgtcttgcaagtgttctcatctgctgttaatacaaaatcagcaagagctagtattttgttcttc

SEQ ID NO: 23271 - DNA, 516 bp, Zea mays
  Clone ID: LIB3595-017-E2_FLI
cgcctcctcacaggcacacctcacacgagcagcagcggacgataagagatgtgctgaagctgaacggtggccatgtccaccggacgcacagaggaggccgccgggagcgcggagacggcgtgcgtgacgggcgccggcgggtacatcgcctcgtggctcgtcaagctcctcctctcccgtggctacaccgtccacggcaccgtccgcgacctcagtgacaataaaaccgctcatctgaagcggttagagaatgcttccgaaaacctcaagcttttcaaggctgatgtccttgactacgacgctatggcgggtgcagtcgcagggtgccagggagtctttcatgtcgccactcctgtgccttcagggaagatcaccgatccagaggcaagtttttttttttctgtaacattcgtttacttttaatcacaaataattgggctcaaagtcagttcttcgtcatcaattaaacatctgtttgcccacaaaaaaaaattaaagattatgaaacatgctgag

SEQ ID NO: 23272 - DNA, 666 bp, Zea mays
  Clone ID: LIB3595-017-G10_FLI
aacctagcagctcggcgctccctcttctgactccttcgaggtactcccatcgctatcgaccgggtcctcgagcgcgggagatggcggatcaggagaccccagttgcagttgaggcccctaccccggtccttggggagccgatggacttgatgactgctctgcagcttgtcatgaagaagtcgggtgctcatgatggccttgttaagggtcttcgtgaggctgccaaagcaattgagaagcatgctgctcagctttgcgtgcttgcggaggactgtgaccagcctgattatgtcaagctggtgaaggctctttgctctgagcacaacgttcacctggttactgtgcctagcgctaaaactcttggtgaatggtctgggctttgcaagattgattctgagggcaaggcgaggaaggttgtgggttgctcctgtgttgtcgtcaaggactatggcgaagaatctgagggccttaacatagttcaggagtacgtcaagtcacactagatacagtgcatcggtatctggaacttgtgctctacactagctttaagacctgaatttaaatttgtgctggttcttgggcttttctaggagattatctcaattcttgttttaagtgatgtcatctggtgttaatacaaatcattaagcggtggtattctgcttc

SEQ ID NO: 23273 - DNA, 1453 bp, Zea mays
  Clone ID: LIB3595-018-F10_FLI
gagaagcccctcctgtcgcacctcaggttcttcccctgggtcgtcaatgaggtgtacttcaaggtctggaggcaagggaggaccggctaccctctcgtcgacgccggcatgagggagctctgggccaccggctgggtccatgaccgcatacgcgtcgttgtctcgagcttcttcgtcaaggtgctccagctgccatggcgctgggggatgaagtacttctgggacaccttgctggatgctgaccttgagagcgacgcgctaggctggcagtacatttctgggtctctccctgatggccgtgagcttgaccgcatcgacaacccacagtttgaagggtacaagtttgatccgcacggggagtacgtccggcgatggctaccggagctggcaaggctgccaacggaatggatacaccatccctgggatgcacccgagtctgtgcttcaggctgcaggagttgagctaggatctaactacccacgccccattgtcgagttagatgcagccaattccaggttgcaggatgccctgtcagagatgtgggagcttgaggcagcctctcgtgctgccatggagaacggaatggaagaaggcctcggcgattccacggatgagccaccgatcgacttccctcaagaactacggatggaagtggaccgacagccggttcaacctgctatccacgcaccgggagtgactggtcggagacgagaggatcagatggtgcctagcatgacttcctcgttcattagagctgagaccgaactcactgcagattttggccacaccagtgaggacagtaggccagaagtgccatcaaacatccaccatttgcaggctcgcccggagagggaagagacagttgacggtggcactggcaatgctgtcagggtgcatggcaaccatcaccagcagaaccttcagaacaacatgcaccgcgtgctaggtatcgctccatcgatttcagaggcatcaagcagttggacgggcagggatggtggagtggtaccagtctggtcgcctccggcagcttcgggacactctgattcttatgctgccgatgaggctgacatttccagtaggggttatctggacaggcatccacagtcacatacgatgatgaactggagccagctctctcagtcattgacaacagggtgggaagtggataattagcgctgtgtgtccggatttaattgcttaggatttcggcagagagaattatacatatgtaaattatcagattttgttcgtctatatagccttggtgtgcatgcaagtcatcaatcatgcagcttcctggatgcaataatggttatgtgaagctagttgtacagaaccttgtggtataggttgctaggtgtccacaagatatatgtattattcgtcagaagagttttctagcatcaggttcattttgtatctggttactgtcttattatagtctttggtg

SEQ ID NO: 23274 - DNA, 1003 bp, Zea mays
  Clone ID: LIB3595-019-A6_FLI
cagctagactgtcctgctctgcttcggcgctactgtgcagtgtgcacagccagccagctctgcagcagagcagagtccggctgtgagccctgaccagagaggattcagtgccatggagagacctgcgcaggcgcccacgcagctgccgccggggttccggttccaccccaccgacgaggagctggtagtgctgtacctccgccggaaggccctggctcgcccgctgccggccgccgtcatccccgtcgtccacgacgtcgccgggctcgatccatgggacctccctggggcaagcgaaggggagggttacttctttagcctgcggcgagcgccggcgaccggccgtggcagccgcaggaggagagctgggagcgggtactggaaggccacgggcaaggaggagccggtgttcctgcagtgcggcggcggcggcgtaggcggcaagaggcagctgctcgtgggcggcaagacggcgctcgccttccaccgcagtgagccgtcgccgccgtcgtcgtcgcggacaggctgggtcatgcacgagtaccggctcgccgccgcgtcccgcggcgtggccgagcagaggaagaagaatgcgagccacggttgttgcgatgctgagccgggagagtgggtcgtgtgccgggtctttctgaagaagggagcaagaagaagcaggccgggccgggatggtaaccacagcagagctctgagacaccgcgcatccgctgcgccgccgcagctccgggaaggtgtgggaggacggcagccgttgctgttcccggcgccacagtcgccgtcctcaagctgtgtcaccggcgttaccgacttgtcagacgaagaagacgaagtcagcagcggcagcataacaagagttgcacctcagagagaggcctgatggggattttaagtgttccctcccccctctctcatggtcccgtagcccaacctttttctggtaccatacaatgatgatgagttaagcacgagataatcaggtttaggc

SEQ ID NO: 23275 - DNA, 939 bp, Zea mays
  Clone ID: LIB3595-019-B2_FLI
ctcggtaaagaaggacgtggattcgtacacaatccgcggcactaacaaggtcgtccatgtgggcgactgcgtgctgatgcgggcgtcggactcggacaagcagccgtatgtggcgcgggtggagaagatggaggccgacggacgcggcagcgtgcgggtgcaggtgcgctggtactaccgccctgaggaatccaagggcggtcgccggcagttccacggcgccaaggagcttttcctttccgatcatttcgacctacagagcgcccacaccatcgaggggaaatgtgttgtccactctttcaagaactacaccaagcttgataatgtcgggcctgaggacttcttctcccgatttgagtacaaggcggccaccggttcgttcacccctgaccgcgtggcagtgtattgcaaatgtgagatgccatacaacccggatgacctcatggtgcagtgcgaagcttgcaaggactggttccatccatcttgcatggctatgaccattgaacaggccaaaaaactagatcactttgtttgctcagactgtttgaaagaaaatggttcaaagagactttcaaatgtatatgccacttcatcaaattcttagcccaaggatgaatcaataaggcagacgaggtgaaaactgagtgccaacatccaggggagatgtgctgcttctgtggcgaatcagcccttgcactggcgagagcagaggtgtacagtgcactagaaaccagtgtttgctgtggtttgttcgatgtaactagccagtgtggcatgtcatgcagttgttggtagatcagtcattgtgttgacttggtcagcttaactcaatacccccttcgttgattactttgttgctatggcggtgcggcatgatcgattactgttctattaacatatgacttttatatgttgatataattaaattattttgatact

SEQ ID NO: 23276 - DNA, 1431 bp, Zea mays
  Clone ID: LIB3595-019-D9_FLI
tccatatttgcattcttcaccctcgcttcacgtcaccaccattgccatccaagaacaaattaagcgggacactggaaacaaagagagacatgggccttcgcggcggagctcttgccctgcttctgctcctgttcgtccacggaggccagcgagcagcagaggccggcggggacgcgttcgtgagggtccagggcacccgcttcgtgcaggacggcaagccgttcttcgccaacgggttcaacgcctactggctcatgacattcggcgccgaccccgcgcggaggggcaaggtcacctcggcggcggcagcgcgctgcagtactctcccggccgctacaacgagaacaccttccaggggctggatttcgtgctgtctgaggcaaggaagcatgggattaagatgattctgagcctcgtgaacaattacgacagctttggagggaggaagcagtacgtgcagtgggcgagggagcgggggcagaccattggatctgacgatgagttcttcactaacccctttgtaaagggcatctacaagaaccatatcaaggccgttctgacgagggtgaacacgatcaccggcgtggcatacaaggacgacccgacgatcatggcgtgggagctgatgaacgagccgcgttgccagtccgacgtgtcgggccacgccatccagtcgtggatcacggagatggcggcgcacgtgaagtccatcgacgggaaccacctgctggaggccggcctggagggcttctacggcgcgtcgtcggcccgcaggtccgcgaacccgtcggggtaccaggtgggcaccgacttcatcgccaacaaccgggcgcccgggatcgacttcgccaccgtgcactcgtacccggaccagtggctgggcggcctggacgcgcaggcgcagctgcggttcctgggcgcctggctcgacgcccacatcgccgacgcgcgggcggtgctgcgcaagccgctgctggtggccgagttcggcgagtcgcgccacgacccgggctacagcggcggccaacgcgacgcggtgttcggcacggtgtacgccagggtctacgactcggcgcgcgccggaggccccgcggcgggcgcgctcttctggcagctcctggcggaggggatggactcctacggggacggctacgaggtcgtcctcccgcaggcgccgtccaccgccggagtcatcgccacgcagagccggaggctgcagggcctcgccagggcgttcgtgcgcgcgcgcaaggcccaccaggggaaggcgggcaagggcgctaagggtggcggcaactgaaagtggggtgaaacgtgtgtggcgagatcaagaagagtgtgtgtgtgtatgcgtcgatgtctcctcgagatgatttgaagattcatccgggagccaagagttacttctacatactatctagcgttgtcctc

SEQ ID NO: 23277 - DNA, 348 bp, Zea mays
  Clone ID: LIB3595-020-B9_FLI
atacgagacctcgacgtcgaccaccacacagacctaaccgagagaatggcagcagcagcgatgaacgggcactatttgcatgcatttggcagggagaggacgacgctccacgccgccctcggtgggcgcagagccgcggacgtcatcctgtggagggacaaggcggcctcggcgtgcatcctggccgcggcgacggcggcgtggggcctgttcgaggtggcggagtaccacctcgtcacggtggcgtgctacgtcgccatggtcgccatgctcgtctccttcgtctggaccaacgcttctgcgttcttcaacatgtgagtgagcaataaaaataaaaagcatccttcg

SEQ ID NO: 23278 - DNA, 1038 bp, Zea mays
  Clone ID: LIB3595-020-D3_FLI
cagggaatagcgtcaaagtgggaaagcatccgagttgaggatctcaaagttggcaaggacgaagttgtgattgttaattgcctatacagattcagaaacctgattgatgaaacagttgctgtagacagtcctaggaatagagtgctcaacaccataaggcaagtaaacccagcgattttcatccatggaattgtgaatgggtcatacagcgttcccttcttcatcactcgtttccgtgaggcgctgttccatttctctgcactgtttgacatgctagagacaactgtcccacgggatgatgcacagcgtgcgctcatagagagggaaatgtttggccgagaggcactcaacgttattgcatgtgagggctcagacagagttgagagacccgagacatataaacagtggcaggtgaggaacctcagggctggatttgtccagtctccgttaaaccaagaaattgtgatgaaagccatggacaaagtaaaagacatttatcacaaggacttcgtcatagatgaagacaacggatggctcctacaaggctggaaaggaaggatactctatgcaatttctacatggaagcctaagaataactaggttcttggtctcacgcgtaatctctcctattccatcgatggtggcagctaattaatcagtcctgctatcttataacatttgggccttgacctgtgaacctgtctgatcaaggcaatggcttgaagccggacaatgatcaacatggaggtttgctagatttacatctgtccagccagtactctgataaactggaaaagagcagctgtagacgtctctaacttggtgttggtaccatcacctttatttaattcgtagttttcttctttccatttacttctatgaccggcctggcgtcctattaccaacaaccagatcaccgcttctagttcaaaatggctaggcaaactacctactatcttgagcttaatatttttgacttgtatccatccatgtcaaacatcagttcggttttcagcacctgcagatcagaaattcccc

SEQ ID NO: 23279 - DNA, 631 bp, Zea mays
  Clone ID: LIB3595-021-A9_FLI
cttctcctcccccaccggttcgtgttcaggttctggttcgtgggcgagagggaagagatggcggcgtcggacgttgagtaccgttgcttcgttggcggcctcgcctgggccaccgacgaccactccctcaacaacgccttcagcacctacggcgaggtcctcgagtcgaagatcatcctggatcgggagacgcagaggtcccgcggcttcggcttcgtcaccttctccacggaggacgcgatgcgcagcgccatcgagggcatgaacggcaaggagctcgacggccgcaacatcaccgttaacgaggcccagtcccgcggcggccgtggaggcggcggtggcggatacggtggcgggcgccgtgatggaggcggctacggcggtggcggtggaggctacggcggtggtcgtggaggctacggcggcggtgggggatacggtggtgcaaaccgcggcggcggctacggcaacaacgacgggaactggaggaactgagcggtggggtccgctgaggcctagttatcttgttcgcttctgctaccgtgttcaccctagtctagagggggtttatcttcgtctgtggtcgtctcgtgtccgtatgtttcgtttcgtgttcgttgttgttgttgcc

SEQ ID NO: 23280 - DNA, 1634 bp, Zea mays
  Clone ID: LIB3595-021-F5_FLI
cgtcttcgtactcgcctatctccgcgactcaaagcttcttccatttcctaccgccgccgctgcagctccaccccattccgtcgacaccatgagggagtgcatctcgatccacatcggccaagccggtatccaggtcggaaacgcgtgctgggagctctactgcctcgagcatggcattcaggccgatggtcagatgcccggtgacaagaccattgggggtggtgatgatgctttcaacaccttcttcagtgagactggtgctgggaagcacgtccctcgtgctgtttttgttgaccttgaaccaactgtcatcgatgaggtgaggactggcacctaccgccagctcttccaccctgagcagcttatcagtggcaaggaggatgcagccaacaacttcgcccgtggtcactacaccattggcaaggagattgttgacctgtgccttgatcgcatcaggaagcttgccgacaactgcactggtctccagggcttcctcgtcttcaacgctgttggcggaggaacaggctctggccttggttccctcctcctggagcgtctgtctgttgactacggcaagaagtctaagcttggtttcactgtgtacccatccccccaagtttcgacctcagtggttgagccatacaacagtgtcctgtccacccactccctccttgagcacactgatgtggctatcctgctggacaacgaggccatctatgacatctgccgccgttcccttgacattgagcgcccaacctacaccaacctcaacaggcttgtgtcccaggtcatctcatccctgactgcctccctgaggttcgatggtgctcttaacgtggatgtgaatgagttccagaccaacttggtgccctacccgaggatccacttcatgctttcctcctatgctccagtcatctctgctgagaaggcctaccacgagcagctgtctgtggccgagatcaccaacagcgccttcgagccatcctccatgatggccaagtgcgatccccgccatggtaagtacatggcctgctgcctcatgtaccgtggtgatgtggtccccaaggatgtgaatgctgctgtggccaccatcaagaccaagcgcaccatccagtttgtggactggtgcccaactggctttaagtgcggcattaactaccagcctccaagtgtggtgcctggtggtgacctggccaaggtgcagcgcgctgtgtgcatgatctccaactccaccagtgttgtggaggtgttctcccgcatcgaccacaagttcgacctcatgtacgccaagcgtgccttcgtgcactggtatgtcggtgagggtatggaggagggcgagttctctgaggcccgtgaggatctggcagcgctcgagaaggactacgaggaggttggtgctgagtttgatgagggtgaggaaggtgatgatggtgatgagtactagaagtatcctgatgcggtcatcgtcaggcttgtgtgctgctcttgtccccgttgtggtttgcaacacctgatgttgtaagactttctggttatgtccgccccgctgtgccactgggttattaagaacgtcgttatggatggttgtctacactacattattgcttctcgatattggaaaactgttatgcgcc

SEQ ID NO: 23281 - DNA, 1311 bp, Zea mays
  Clone ID: LIB3595-022-C8_FLI
ctcctagctcctctactcgccagtcgccatgggcaagattaagatcggaatcaacggcttcggaaggatcggcaggctcgtggccagggtcgccctccagagcgaggatgtcgagctcgtcgccgtcaacgaccccttcatcaccacggactacatgacctacatgttcaagtacgacaccgtccacggccactggaagcacagcgacatcacactcaaggactccaagacccttctcttcggtgacaagccggtcaccgtctttggcatcaggaaccctgaggaaatcccgtggggtgaggctggcgctgagtatgtcgtggagtccaccggcgtcttcactgacaaggacaaggctgctgcacatctcaagggtggtgccaagaaggttgttatctctgccccaagcaaagacgcacccatgtttgttgttggtgtcaatgaggacaagtacacctcggatgttaacattgtttccaatgctagctgcaccacaaactgccttgctccccttgctaaggtcattcatgacaacttcggcattgttgagggtttgatgacaactgttcatgccatcactgccacccagaaaactgttgacggaccctcagccaaggactggagaggtggcagggctgccagctttaacatcattcctagcagcaccggtgctgccaaggctgttggtaaagttcttcctgatctgaatggcaagctcactggtatgtccttccgtgttcctactgtggatgtctcggttgttgacctcaccgtcagaatcgagaagggggcctcctatgaggatatcaagaaagctattaaggctgcttccgagggtccactcaagggtatcatgggttatgcggaggaggatctggtttctaccgacttccttggtgacagcaggtcgagcatcttcgacgccaaggccgggatcgctctgaacgaccacttcgtcaagctcgtctcgtggtacgacaacgagtggggctacagcaaccgcgtcgtcgacctgatccgccacatgttcaagacccagtagaggggttttttccccctgcttctcatggatggttgctgcttgtgtatgccgagaataaatgtggatggcgcgtgcctctgggtcgccaggttcatgctgagtctggacatgttttgcacttttgcttcccttcctgctaccatctgtgacagaaccgctcgctaatatgggacctgagattagctttttgctgcttgtggtgaggttgcagttttgttctgtgtttctgtgttgttagcaatcctatgattcaggtgttcgttatatag

SEQ ID NO: 23282 - DNA, 768 bp, Zea mays
  Clone ID: LIB3595-022-D8_FLI
cggcttttggcagctacaaaccacccaaaagccacccccagaaaccggcggtccttgggtgttccggatctgagccagcagctgagaagaggatgagcgccgtggccgccatggcgacgtcgtcgctgaaccccaacgcgccgctcttcatcccggcggcgtaccggcaggtggaggaattctcgcccgagtggtatgagctcgtcaacaccaccgcctggttccgggaccactggttccgccagcaccagcaccacgaggccgccttcgccgccgccgccgacgccgagctcgacgtcgccgcgctcctccccgacgactccgtcgacctcctcgacaccgacgacctcttctacgcgcctgacgtccaccacccccacaacgccaagccggcgctgctgcccgggtacgacctcgacatgctcagggcgctgagcctcagctccccccgggccgccgccgcgccgtcgccgtcgccgttgctgcgcgcccagcagcagaggcacgcggacaggccggcgcaccacgccaggggcgccgcgcgccgcgtcatcatccaccagcctcgctagaagcagcctgctcatggcgggccgccgccatggctgttgtgcctagtgtaacctcaagcaagtctagtctgtttctgtctgtgtatacgactaaaaaaacaacagatggaagattcggacgaggcggccagtgctctctcctcgtagccagcttctcctgttccagctcagttcttgttcatccagcagagcaccc

SEQ ID NO: 23283 - DNA, 1539 bp, Zea mays
  Clone ID: LIB3595-022-E11_FLI
ctccgagtccgtgaattcacattggcagagattgagcattttgtggacccagaggacaaatcacatccaaaatttgttgatgttgctgatttggagttcctgatgtttccaagagagctgcaactctctggggagtcagccaagctaatgaagcttggggaagcagtttcaaagggaactgttaataatgagacacttggttacttcattggaagggtctatcttttcctgacaagcttgggaattgataagggccggttgcgcttcaggcagcatctacctaatgagatggctcattatgctgctgactgttgggatgctgagatagagtgctcgtatgggtggatagagtgtgtgggtattgctgatagatctgcatatgatttgaaagctcacactgacaaaagcggtgtcccacttgttgctcatgaaaaattctccaagcctagagaggttgagaaacttgtcatagttccctcgaagaaagacctggggctggcttttaagggcaaccaaaagatggtcctggaagcattggaggctatgagtgagaaggaagcatttgagatgaaagctgaactagagaccaagggggagacaaattttaaagtctgcacacttggaaaagacgtggtgattacaaagaagatggtatcaatcagcatggagaagaagctggaacaccagcgagtcttcaccccttcggtcgtcgagccgtcattcggcataggacggatcatctactgcttgtttgagcactcgttttacacaaggcctagcaaatcagaagaggaacagctgaatgtcttccggttccctcctcttgtggcccctatcaagtgcaccgtgttcccccttgttaagaatcaagagtttgacgatgctgccaaagtaatcgccaaggcattaacaactgctggtatctcccacattattgacactactgcaatttctattgggaggaggtacgccaggacggatgagatcggtgttccatttgctgtaacagtggattcggcaacgaacgtgacgatccgagagagggacagcaaggagcaggtccgcgtggacatcgacgaggtggcgcctgtggtgaagcagctgacggaaggccaaagcacatggacggatgtttctgcaaagtatcccgcccatgtcggcccccaaagtgagcaggagtgaagaatcgccgccctgatgtctagtctagccatcgaccgagaaggcgtcgggatgagccgtcttcgttctccaattgctgagaagattgtgtggcctaaacataactgcttttggtattgacattatccagaaaggcagtttttttccctcatacatacatgacacttgctatagcagttggatgttatgaagtctgcagatgtcaccgatttttttgtttcttttaaatgcccctttcttgatgtattctcacccatacaaaacataccatttgaggtatttctgaactagctgtccttttgtaaggtcagactgggaattgttcagctatctacagtggaattggaaatttcagtt

SEQ ID NO: 23284 - DNA, 1101 bp, Zea mays
  Clone ID: LIB3595-022-G1_FLI
ctccttgagatctccagggtacgagcgcattcgcgattttggccgcctccgccgccgtccggggagatggcgggtctgggaaaggcgatgtacgcggtggggttctggatccgggagactggccaggccctcgaccgcctgggctgccgcctgcagggcaagtacttcttccacgagcagatttcaaggcatcgcaccatcatgaatatctttgacaaaacccctcatgtgcataaagacgcatttgttgctccaagtgcatcccttattggcgatgttcaagtcgggtcaggagcttccatttggtatgggtgcgtcttaagaggggatgcaaacatcatacaaattggatctgggaccaatatacaagacaattctcttatacatgtggctaaatctaatctaagtgggaaggtctttccaacaaccattggtaataacgtcacagtaggtcatagtgctgtgttacaaggatgcacggttgaggatgaggcttttgttggcattggggcaaccctattagatggtgttgttgttgaaaagcacggaatggtggctgctggagccctcgtacgacagaatactaggatcccttgtggagaggtatggggagggaaccctgccaaatttctgaggaagctcacagatgacgagatcagtttcattgcggaatcagctgccaactattccaatctgtccaaggtccatgctgctgagaatgccaaacctcttgaaaagatcgagtttgagaaggtgttgggcaagaagtttgctcaccaggatgagtatgattcctcgattggcgtcgctgaaggggcaccaccagagctcacgtccccaaatccagcccaatgaacctctgtttctgttttctctttggcgccttaatcattttctgttggacagtgctggatcgttgatcggggtactgttccatgacactggtggtttatgtttacttttcctccccaataatcttgggtcgagcgatgttataaagctggccatgcacttcttccagattctgtattcggcatgtttaagatgtgctcccttgaaagacagaccccaaatagacagaaatgcattgtttttacaggt

SEQ ID NO: 23285 - DNA, 444 bp, Zea mays
  Clone ID: LIB3595-023-H4_FLI
ctaaacagtgtctcattggctttctcctccccctctctgctatcctccattgcaagttgtttggagcttaagcgaacagcatatcccggtgagtttggggcagatcctggcgaccgagcatcgattttcgatgagaacccgacgaatctcatcggtcgcagccgctgcgcgctaggtgggaactcgagcaaggcgagatcgaggcgggatccagaggctaagctacggtttccgacgcggatccggcggttctcggtcgctgcgcgccagatgagaatcgccgttgttgctcggtaaccgtcgtgttgtgtgtagaatctggttgtttgtcgacgagaacctctaccgcagtgaagagagaaaggttgttttaggcattgttgtgtgatgtaatagcatatttataagtttattttgtgtgctatatattttagttagatgctt

SEQ ID NO: 23286 - DNA, 659 bp, Zea mays
  Clone ID: LIB3595-025-A11_FLI
tcctagcccagcgcgccgcggcgctaactggccagctggtagtgatggcaaccgagccgccgccggcagcggagaagaagaaggcgccgctccccaaggtggtcacgctcaataaagccctcaagctggcccagacatgggtggacaaaatgagtgcatcggagccggatgaacccaacgataaggatttcgagggccggccaccaaagctcggtcttggtgctaaagcggcacctggtgtgaagcgtgtggttcccactgacccagttgagaggaggttgcttgggaaggtgaatgcgcagaagaggaaggccttggaggatgatgatagaaatgctcaggtggcgaatgaggctagcgacgacgatgagcctgaaagcaggaccagtgcctttaacaagaagaggccagtgccttcagttacttctacacctttagggaagaaggctaagtgacaagctatatgcatagactacctgagtgatctgcttgttttgatcacgtttcgtactaactcccagactgatgctattttcataaggcatagtataccttctcatactccagtttgtgattcctgaatttaaagggatagctgtgcttgatattgttaaggctcattgccgattcagaaattcacatactctctgtttaaagct

SEQ ID NO: 23287 - DNA, 1089 bp, Zea mays
  Clone ID: LIB3595-025-B11_FLI
acgcactcctcccatccgaaaaccgaaatcccccactcttctcacccgtttccccactcgctcgctgacacatcgcacattcgcaccataccagataccaccgccgctgcacacaaacccagaaaccaccggcaataaacaactcccgctcccagtctccgatccgaggaagccggaagaggggatttcgagccgcggcgatcggggctagagtggccctcgacgcgtccgcgggtggaattgccgagaagccgagagagagggcttggagcggagttgcgggaggtgggagagaaggcggcgatggggcgcctgttcctgatgcacctggacggcaacgtctacagctgcaaacactgcaagacccacctcggcgttgccagcgacatcatctccaaggccttccagtgcaagcacggcaaggcgtacctcttccataaggttgtcaacgtgacttctggagtaaaagaagaccgcatgatgatcacaggaatgcatactgtttctgatatcttctgtgttggctgtggatccatagttgggtggaaatatgatgctgcacatgagaagggccagagatacaaggaaggcaagtttattctggagaggtacaaggtgtcgggccctgacggaagccaatactgggttccacaagatgctcacttgggcggaagcgacgccgatgacatataaaacacgatccaacaagctcaagcctgtcgttgatcccctgtaaataacctgggtggcgttgctctttaggcagccgacagccggggattgctccattgaaataattcgccggcgtaaattgttgctgttccaggtgacatgatcgtatccctccctccctcccgttgtccctggaagtcattagatgttaccgctgtatatgtgcgtaacctgtgttgcttataagtccatctgagttgtatgccaagcactagtgaccaaataagtaaagtaaatttctcaagtgtctggtcgacctgggtgtcaagcgagggcagtatgtacaaatctgcattgtattgtgtgttcggttccaacgtcactcttaaataaccgaatagctgcacgcttgttttt

SEQ ID NO: 23288 - DNA, 543 bp, Zea mays
  Clone ID: LIB3595-025-G11_FLI
ccccaccaacagcaagcgaaaatctcccgatcccctctggtctccgcggcgaagatgtcggggcgcggcaagggcgggaagggcctgggcaagggcggcgcgaagcgccaccggaaggtgctccgcgataacatccaggggatcacgaagccggcgatccggcggctggcgcgcaggggcggcgtgaagcgcatctccgggctcatctacgaggagagccgcggcgtcctcaagatcttcctggagaacgtgatccgcgacgccgtcacttacaccgagcacgcgcgccgcaagaccgtcacagccatggacgtcgtctacgcgctcaagcgccagggccgcaccctctatggcttcggcggctaggctaggccggccgcgcctcgctgtcgtcgctgcggttctattgtttttgcaattcgcaagtagtggctcggtggcgaaaatgctggttactgtggcactagatcaagcatgttgtgcgtgtctgaagaaatgccaattgtgacttgctgtttgttcaaacatgctccacatttcaac

SEQ ID NO: 23289 - DNA, 678 bp, Zea mays
  Clone ID: LIB3595-026-A9_FLI
acccaaactgccatgcgtgagaatagatagacagaaagaacaggaaccaaccaacacaagacacaacaagctgcagccgcggcaggcatggggcaccgcgccactgacaccgggccccaccaccattaccacccgacgcacactttatttagcccacgtcactcgcagaccgcaccggacaagtccacgcgacagtcactgctagctacgtaccgggctacgtacgacacacacacacagagagagacgccagtaaccgtagcgtactgaacagcaaaatcccgtgtcatactgccatgtacgcgcgcgagcgactaccccgccacgcgcgcacgccgatcccctgggccctggccgccgccgctgcgtgcgcacggcctcactcgctggccttctcgggctcctcaggagcagcagcctccgcctcggcggccggctcctggggaccagcaggagcaggagcctccggctcgtccgcggcgagctcctcgagagcagcagcctctgcctcggcgacaggctcggccgcggcgggctcctcggcaccagcaggaggagcagcctcctcctcggcggctgcctcctgctcggccgcgggagtctcctcgggaccagcaggagcagcagcctccgcctcggcggccggttcggccgcggcgggctcctcgtcactcgcag

SEQ ID NO: 23290 - DNA, 183 bp, Zea mays
  Clone ID: LIB3595-026-D9_FLI
cagaagattgaaattttctcactcatgatgtttgttcttatcctgcgtgtatgctcagttttctttcttgagttactgtattacctgggtaactgttcctcacttcatggatgattctgctgaagttgaatgatgactattgtactcaagtgtatatgctgagattgaaaatttctgctacat

SEQ ID NO: 23291 - DNA, 455 bp, Zea mays
  Clone ID: LIB3595-027-B9_FLI
ctttcgtagggaagcaaaacgagctttggcaaagcaaaggcagctagaagcaagtagtgctggtgatgaccaagcgggtgaagtcacgcatacaaaggaaaaggtatcagctgctgctgctaaactctgagcttggcaatcattggatgtccctgggcaaataatgggaggcttgctgcttgatacaaactggggaaggtttctagtgcaataactataccccttttcagggagcaggcggtttatcttaagccagcgtattgtaaacacttgtcacgaggtcgaaattttgtacaatttgaaaattcaagagcctgaattgtggggcagtttgtattgtagaatctatcagagactcagagctaaattggctagaggtatgactcctagctcatttcagtttcatccctatgttgcttaaagattagcaaaaatgccaaaatgaattcatcggt

SEQ ID NO: 23292 - DNA, 1135 bp, Zea mays
  Clone ID: LIB3595-027-C10_FLI
caaaaggccctgaaggcggtaagaccgagctgcacctgcactagaggtgaaggggtgtgagggagaagaaaagcgagtagcccgtgagctgctgcggtgcgagggagcccagggtttcgtctcgtctggccctcttctcttggcgcggccatggacgcctacgaggccaccaaggtggtgttctcccggatccaagccctagacccggaccacgccgccaagatcatgggcctcctcctcatccaggaccatggcgagaaggagatgatccgcctcgccttcggccccgagtctctgctccacgctgtcatggccaaggcgcgcaaggacctcggcctgctcctcccggcctcgccgacctccgttgcggccgccggccacgcgccgttcctgcagctcccacgccagaactccgggcgcgcgggcgcgccgtcgccgctctcggtgtcctcgccgtcgtcatggagccacgcgcccgtgttctccaggagcaacagcacgagtaatggcaccgcggaggaggcggcgggggctggggaggagctgcccagtcccgtgaacggcggcgcggcgccgttctttcctcgtcaggccggcgacgcgctcctggacgacttgcagctgcaggagcagctcgcgttcctcaacgagggcggcgggaacccggcccaccagctcctggggttcgacggcggggagtgccggagccccggtcccggtgatgccgatgggatgttcgcgttcggcctcgggtggcacaacgggggcccagcgcaccgtaggagttcgtcagtcaacgagctctgccttggcggcggcggcggcggcggcgatggtttcggttggaagccctgcctctactacgcgcgcgggttctgcaagaacggcggcagctgcaggttcgtccacggcggcctctccgacgacgctgctgcgctcgctggcgccaagatggaggcagccgccgatcagcagcagcagtgccaggacttcctcatccgctccaagggccagcgcctcggccccgccgccttcccctactcccccaccggctccctcccaggctcgccctccgccgctagcaagtgcctcagcttcctgctgcagcaacagcagcagcagcacgacagagccg

SEQ ID NO: 23293 - DNA, 1733 bp, Zea mays
  Clone ID: LIB3595-027-D3_FLI
tgcttcagcccattattaatgtctgagaaaaccccttagatgtcataaaaaggagattggggtagacagagaggatgcttgtcgaagggttcagtttggtgtggtgtgctgatgattgttactgctgttgatgtttggatgaattgctcaagtggctgacagccgagatgtggatatggcaaatgctgatcatcatggcagatagagacagatacctcttctttttcgaggactttaatttttggcattttccttttaaatgcacacccatcattatctggaataaattcctgcattaggagccagtataaggttctgaacacacctgattgctttcaatgccatgccacagtgaattaaatgttctcaaaattttatcaagcaaataccattgtgtcgtttctactatgttcatcttttaggaataatcatacaatactggtaccttacaagctcatcacaatctaaattgatagaacaaactgctgaaactatctctgcataaaaaagaagtttttgacctgcacatcatctctttgctgttgatgcaagatattgacaggaagactttagaaattttatttcaggtaaagaagatctaggaaggaagcaaatcttatggcttctaagccaactgtagttgattgcattttcttcacatatcattgataaaagcatgtagccttgactgatagaatggaaaggaggtgagcccctgtgtgcccatcacaagatgccagctatctgatcaactaggtgaacggtggtcacacatagacagattttaggagcaccatgtccagctggtagtggggcacaacagtgaggagcatgacacacatatgcccacaccaagcaaacttgctacattagtcccggcagatgcattcaccattggaacatattctgttgtcacgttgtcttttcaaggagttctttaattctgcaatatatttgcaaattgatttagttgtcgtgtgtacccacattaccctgcagtttctgcctttttattctgcattcaccattgctgtcctacccccaccccacccccagcggaacttttgtgttcctactttatgccgttcttgtaaattgtaaacatttttaaagcctttctatattgatacaggctggacagaaatcctggcagcagtttggggagaaaaagatgtgcaagtggagaggtccaacaaggtacaatggactaagggaggaattcttctcttggagtgggggttaaagtggcttatcttaacatgcatccgatcctctctctctggggtttgtgataacaagattcaaaggatgatgcctcgtcaatagggttcctgtttttctccttatcatccatgaaaccttgcccccacccacccacccaaaaaaaaaataaaaaatggaaggctctcttgtggggttgctaaataatttggtttggtgttctggtctgttttcggctagacacattgatgtcataatcgaaacgcacatgaaggctggcagcagcttgtgatctgaatccaagtccattgttcactttgtggccctggaagagccagaatgaaaacttgactgtgcatgcacatacatgtagcgggtaaaacctcccttgtcgtgacttgtgtgagttttgccatatgacttgcaaacagtaaaatgattgtgcatatgctggaccatgattcatatatatggcaagaggatgaaaaatcattcgcttgcagaaatggacc

SEQ ID NO: 23294 - DNA, 818 bp, Zea mays
  Clone ID: LIB3595-028-D11_FLI
tcggataccattgacaatgtcaaggccaagatccaggacaaggagggcatcccacccgaccagcagcgcctcatcttcgccggcaagcagctggaggatggccgcaccctggcggattacaacatccagaaggagagcactctccacctggtgctccgcctcaggggtggcatgcagatttttgtgaagacattgactggcaagaccatcaccttggaggtggagagctctgacaccattgacaatgtgaaggccaagatccaggacaaggagggcattcccccagaccagcagcgtctgatctttgcgggcaagcagctggaggatggccgcactctcgcggactacaacatccagaaggagagcacccttcaccttgttctccgcctcagaggtggtatgcagatctttgtaaagaccctgactggaaaaaccataaccctggaggttgagagctcggacaccatcgacaatgtgaaggcgaagatccaggacaaggagggcatccccccggaccagcagcgtctgatcttcgccggcaaacagctggaggatggccgcaccctagcagactacaacatccaaaaggagagcaccctccaccttgtgctccgtctccgtggtggtcagtaagtcatgggtcgtttaagctgccgatgtgcctgcgtcgtctggtgccctctctccatatggaggttgtcaaagtatctgctgttcgtgtcatgagtcgtgtcagtgttggtttaataatggaccggttgtgttgtgtgtgcgtactacccagaactatgacaaatcatgaataagtttgatgtttg

SEQ ID NO: 23295 - DNA, 1294 bp, Zea mays
  Clone ID: LIB3595-028-F11_FLI
tgtttccttctccgtcagccgcgccgccgcccgcctccccaactgtcaggcgccgcgatggaggctctccacgaggagatgcccttcgacctcgacttccacccgtcgtctccgctcgtcgtcacctccatcatcaccggagagctctgcctgttccgctacggcccggagtcgcagcctgagaggttacttttgttaaaagcccacaaggagtcatgcagagctgttcgttttgtggactcaggaaaagtgattttgtcagggtcagctgattgctcagttcttgcctcagatgtagaatcgggcaaggccattgcccgcttggaggatgcacatgagaatgccataaaccgccttgtctgtcttactgaatctacaattgccacaggtgatgatgaaggctgcattaaggtatgggatacccgggagcgatcttgctgcaacagttttgaagtccacgatgattacatttcagatatgacctatgtggctgagacaaatcagatactggccacaagtggggatggaactttgtctgtgaacaacctgcggaggaataaagtaaggtcacgatctgaattttcagaagatgagttgctatccttggtgttaatgaagcatggtaaaaaggttgtgtgtggaactccaagtggagcactcttattatattcatggggatactttaatgattgcagtgaccgctttatcggacacacgcagtctgtggatacaatgctgaagctggatgaagacactttggtttctggatcatcagatggtgtgatcagattggtgggcatcctacctaataggataaaacagccacttgctgaacattcagaataccccattgaggcccttgctttgtcaaacgacaagaaatatttaggcagcatctcacatgataaaatgctgaagctctgggacttggaagaactcttgagtggcccacaggtagccaatggtgatgaacctgctgaagctggtagtgatgacagcgatgacgatagcgatgatgatgtgatggatgtagacatggcggcaacctcttctaaaggttcaaggagtaaaaaggcaggtaaaggacagagttcgagtcggccggcatcggatttctttgcagatctatagtcgtcaagtttcctaagttagaagctgtgtactctcctctctggttttttttgggttactgtacgcgagtgcgtgtgcgagtgggcaactttgaccgccggtgcaaggcatgccaaatgttgttttatttataagtatattgctgatggcatttatcagaagt

SEQ ID NO: 23296 - DNA, 1267 bp, Zea mays
  Clone ID: LIB3596-019-D9_FLI
ctcctctaaacccttcctctccctccggcgccggcgccgacatggccgtccactacctcctccgccgcggggtctccggtggctcactgctccaccctatccacggtctcttcctcgcctccaaggagcttgggaggcgtccgtttggctctgcggcggcgggagacgcagcggccgagctgaggggcgcgcgggaggacgtcaggcagctgctcaaggccacctcctgccatcccatcctggttcgattaggttggcatgatgctggtacatatgacaagaacatttccgagtggcccaagtgtggtggagctaatggtagcttgagattcgaagtcgagttgaagcatggggccaatgctggtcttgtgaatgctctgaagctgatccaacctatcaaggacaagttttcaggtgttacctatgcagatctgtttcagcttgccagcgccacagccattgaggaagcaggtggccccaaaattcctatgatctatggaagggttgatgttattgcccccgaacaatgcccaccagaggggaggcttcctgctgctggcccaccttcacctgcggaacatttgcgtgaagtattctacagaatgggcctgaacgacaaggaaatcgttgcactgtcaggagctcatacacttggacgtgcaagaccagagcgtagtggctggggtaaatcagaaacaaagtacactaaagatgggcctggtgcacctgggggacaatcttggacatctcaatggctcaagtttgacaacagctatttcaaggctatcgaagaaaggcgagatgaagacctcctagttctgcccactgatgctgtgctgtttgaggattcctcattcaagatctatgctacaaaatatgccaaggatcaggacgcatttttcgaggactacgctgaagctcatgccaaattgagcaatcttggggcaaagtttgacccgccaaagggtatctcactcgagtagttgtggatggaggtgactgaacaggaaggatcatgtttcttttcgtgaccattttcgaaggttggcaaggaaaagtcattggagttcaatgacagctccacaaattggattcaccgattaaaggatttttttcttagcgtgccctgtttttttagtagtatgctacactatgaataaagcaacacctgtcatttcaagataaatatttgttacactaactaactgaaagcatccgaatcctaagtggtttcggtgattaatgacgacataagattgttataact

SEQ ID NO: 23297 - DNA, 199 bp, Zea mays
  Clone ID: LIB3596-020-C4_FLI
gaaagcatctgtctttcctacttggccggtctgttttaccgttagaaatcctcagctatcgttgtgttcttgtggttcagtcccttgttgtagtgatgcctgcgggttttcctaatgtagtgctgaacggtttcataaactcggatattggtgcatatgtaacagatatagctaagtcaagttgttgcttggtttgcat

SEQ ID NO: 23298 - DNA, 1312 bp, Zea mays
  Clone ID: LIB3597-017-F4_FLI
caaagctccaactccgacgagaaccgccactcctcgaaatctcgaaggattttctgcggcgaaccccttcgtgacgtgacccaatgggagaggcctcgccgtcgatcgccaaggacgtcaccgagttgatcgggaacacgccgctggtgtacctcaacaaggtgaccgatgggtgcgtcggccgcgtcgccgccaagctcgagtccatggagccctgctccagcgtcaaggataggattggctacagcatgatcacggacgcagaggagaaagggctgattactccaggcgtgagtgttctgattgaaccaactagcggcaacacaggcattggactggcctttatggctgctgccaagggctacaaacttacactcacaatgcctgcctccatgagcatggagaggaggatcatattgaaggcttttggtgctgaacttgtccttactgacccactcttgggaatgaaaggagctgtcaagaaagcggaagagatacaagcaaagacacccaactcgtacattcttcaacaatttgaaaatccagctaacccaaagattcactgtgagactactgggcctgaaatctggaaagctacagcaggaaaaattgatggccttgtatctggtatcgggacaggaggtaccatcaccggtactgggcgatacctcagagagcaaaatcctaatgtcaagctctatggtgtggagccagtggagagtgctgttttgaatggtggaaaacctggaccacacaagattcaaggaattggagctggttttatccctggagtcttggatgttgatctccttgatgaaactctacaggtttcaagtgatgaagctatcgagactgccaaggctcttgctctgaaagaagggttgttggttggaatctcttctggtgcagctgcagctgcggcagttaggcttgctaagaggccagaaaacgccggaaagctatttgttgtcgtgttcccgagcttcggcgagcgctacctctcatcggtgctgttccagtccatcaagaaggaagcggagagcatggtggtcgagccctagagcacaaaattctgggcttctggcaaactatttcctgagacgttcaccatttccatcacagaaaaataaagctcgggtgccttctgttgatttcgacgtacatttccctgccgatggtgtccagcccactgttgtcgctggagaacacgtcgtttttagacttgtgatattttactactgttttgacactcgttgtatttctgtatatcgcgtcagactgtgaaataaaagcagtacagtgtgtttcttgc

SEQ ID NO: 23299 - DNA, 703 bp, Zea mays
  Clone ID: LIB3597-018-E8_FLI
agaagaaaggcatagcagcgggcagcggcatgggcaccagccccgtcatccctgcgacgatgctcttcgtcgctcttcttgtcgctgtctgcttcggcgccaccgccgccaggtccagccacgcccgccacaccgacgccgacgacgcgattcgtctccccagcagctttggcgctggtggtcgaccgtggaattgctgcgactccgctatcaaggacgcctccctgccggcgtggcgctgcaacgacgtggtggacaagtgctccgccgactgccaggactgcgaggcgtcgccggccggcgacggcttcgtctgcggtgactttatcttaagcctgaccgagcccccggtctgcacaccgaggccgtgggactgctgcaggacatggatcagtacgagcaactagctcagctcagctacttgctaaaagtagcgtagcgcagcgcgcgcggctacttgctagtatacgtacgtccacaaataaaaataaaagtggctagcgtacaaagctaacatctggttgttcgtcccgacatggacgattagcctagctcgatcgctagctgctgccactctcgttcgatttaatttcatccccatgtgtggcggtgtagggagtgtggatatgatcatccaataaagtagtctactgaaaatgaatagtcgttgatcatattaatatacatccatctcattttgttc

SEQ ID NO: 23300 - DNA, 942 bp, Zea mays
  Clone ID: LIB3597-019-A10_FLI
cgctgctttcagatatctcaccggaccgtcgtcgtcggcccctccgagaacataccaccgcgcccgccgccgcgcgcgccaccacgtccacgtacgccggccggccaccaagcaagcatggatacggtttcacagtccgagcacctgtgctacgtccgctgcacctactgcaacaccgtgctcgcggttggggttccatgcaagaggctcatggacacggtgactgtcaagtgcggccactgcaacaacctctcctacctcagtccacggccccccatggtgcagccgctctcgccgactgatcatcccttggggccattccagtgtcagggaccctgcagtgagtgcaggaggaaccaaccgctgccgctggcctcgccgacatcgactgacctcaccccgagaatgcccttcgttgtcaagcccccggagaagaaacatcgcctcccatctgcttacaatcgcttcatgagggaggagattcagcgcatcaaagctgcgaagccagatatccctcacagggaggccttcagcatggctgccaagaattgggcgaagtgtgacccgcgctgctcgacgactgcctctactgccacttctaacagcgctcctgagcctgctagagtcgtcgtgcccactcctcatgtaactgagccacgctttgatctggaggatagggccaaggagcatgtcattgagagcttcgacatcttcaagcagattgagcgcaacatctagatgtctccatttcgagtaccatcagctctatatataacctatgcatgcatatgcatccccatcttgtactttttacccccatgttactgttgctattattcttgctcttgttggattgtacgcaccctttaattgacagttgctaccctatataatgtttgccatcttatatattgtcgtcgttccttatatagggttatgatc

SEQ ID NO: 23301 - DNA, 729 bp, Zea mays
  Clone ID: LIB3597-019-H12_FLI
ctgacggttgctctagatccgttcatcctggtggttttgtgaggtcgaaagcggcgagcgaattagaagatgctggacaagctgtgggacgacgtggtggccgggcctcgcccggagacgggcctcgagaagctccgcaaggccaccaccgcccgcccgctcgtcatcaacaaagacgcggacggcggcagctacaagcgggcgcagtcgatgccgtcgaccccgacgacgccggtgacgccgtcgtcgtcgtcgtcgtcgacgacgccgcgcggcgccggcaacgtgtggcgcagcgtcttccacccggggagcaacctggccaccaagggcatgggcgccaacctcttcgaccggccgcagcccaactcccccaccgtctacgactggctctacagcgacgagaccaggagcaaccaccgctagatcgggcgagatggatggacagtgaagaggccatgtttgctggtccttgtggttatctaaaacgcacgcatgctctattatagctagtcatcactatatatatacttgtgtttgtgtattgttgttcttgttctgctggtgtctccgccgtttaatttgacctatgttatggagtgagtgatatatgtgccgtcactcctagtatatagtagtgagtgactagttggtatgtgtagtactgtactatcttttctccatatgcatgttttgccagcgcgtaatgaatgtaatgtcagtactgct

SEQ ID NO: 23302 - DNA, 312 bp, Zea mays
  Clone ID: LIB3597-020-B10_FLI
tgaacgcgagagccgaccgtctcagtgtgcgcgcgaagaagagaaggaggaggaggaggaggaagaagaagaagaatgtatccggccaagcccaccgtcgcgaccgccagcgagccggtaaccgggatggcggcgccgccggtgaccggcatccccatcagcagccccggccccgccgtcgcggccagccagtggtcctcgggcctctgcgcctgcttcgacgactgcggcctctgctgcatgacgtgctggtgcccgtgcgtgacgttcgggcggatcgcggaggtcgtggaccgcggcgcgacgtcgtgc

SEQ ID NO: 23303 - DNA, 737 bp, Zea mays; identical to SEQ ID NO: 22079
  Clone ID: LIB3597-063-E9_FLI

SEQ ID NO: 23304 - DNA, 1630 bp, Zea mays
  Clone ID: LIB3600-008-D4_FLI
gtactctccctcccgaggtcagtcccaacccaaaatggtgaatcccctcctcatcttcctccccttcctcagcgtcgccgccttgcccggcaacgccgacgccgcagggccggacccatgcgcaggacggcggatccacatccgcggcttgcccccgcgcttcaacaccgacctcctccgccactgcggcgccaacgccttcccgctcgccgacccgtccgccgcggccacctcggtcccgccctgcgagtcgctcgccaaccacgggctcggccctcgcactcaccctcgcagccggtcctggtaccgcaccgacgcgaggctcctggaggccttcttccaccgccgcatcctggagcgggactgcctcgccgacgacccagccgatgccgatgccgtgttcctgccctactacgcggctctcgacgcgctgccgtacgtgatcgatccggccctgctcgacgaatccgcgaggcacggcgtggcgctggcggagttcctgtcgcgggaccaggcgcatatcctgtctcgccggcacgggcatgaccatttcctggtggtcgcggggtccgcgtgggactacgcgcagtcgccggtcgcggagccgaggctatggggctcgacgtcgctgctgcgactgccggagctggccaacttcacgttcctgactctcgagtcccgcacgtggccgtggcaggagcacgcgatcccgcacccgacgtccttccacccgtcgtctctcggccacctccgcgcctggctcgcccgcgcgcgccgttcgcgtcgcgccacgctgatgctcttcgcgggcggcgcctcccgcccgtcccggcccaacatccggggctccatcctctccgagtgcgcgaaccgcaccgacgcatgcgtggtcgtcgactgctccggcggcaaatgcgcgcacgaaccggtccggtacatgcgccccatgctgcggtccaagttctgcctgcagccgccgggggacacgccgacgcggcgctcgacgttcgacgccatcctcgccggctgcgtgcccgtgttcttcgaggacctcgcggcgcggaggcagtacgggtggcacctgcccccggtacggtacgatgagttctcggtgcacatgcccaaggaggccgtggtgttcggcggggtccgaatcgtcgagacgctccaggccgtgccggaggaagaggtgcggaggatgcggcagcgcgtgctggagatggcgccgagggtggtgtaccggcgacacgggagcacgcccgagctgagagaggccgtgaaggatgccgtcgacctcgctgtggatggcgtgctgcagaggattcggtggcggacgcgtgcactggaggacggaccgccggagaggatttacgcgcaagaggaggacagcgtcgacagatagaggatgaggaccattcccttcggctgcaacaggacatccacatccaatagtgaaatacagtgtgtacatgttgctgttgtagtggagaaatgagatttgtgttcagtgtaactgcagtagtttagtatggtgcgaacttgttggcttcttcgtggtgaatccgtgaatggcatttcgaacagtccatacctcacccaaggagccatgacacgaaatcatttttgaacc

SEQ ID NO: 23305 - DNA, 765 bp, Zea mays; identical to SEQ ID NO: 2540
  Clone ID: LIB3600-010-G2_FLI

SEQ ID NO: 23306 - DNA, 770 bp, Zea mays
  Clone ID: LIB3600-011-D6_FLI
gtcgtcgtcgtaagctgcagctagtgtggactggagatccaccactccaccagtccggtccatctgctggacctcgattggtttcttcttacctaggaacatccggggatgtcgactcctgcgaggaagaggctgatgagggatttcaagcggttgatgcaggaccctccggccggcataagtggcgccccgcaggataacaacataatgctgtggaatgctgtcatatttggacctgatgataccccgtgggatggagatatcctgcagaatcagtggagtccgatatatgatgtagctgcgatactcacgtcaatccagtcattgttgtgcgatccaaacccgaattcgcccgctaactctgaagccgcccgcatgttcagcgagaacaagcgagagtacaaccgcaaagttcgggaggtcgtggagcagagctggacggcggactgatgatgccctgtgttgcgtcgcgctgtgctgcgcagctgctcactgcgccccgcgtccgtccattccataccaaaaaaagaaaatggcaaagccgaactcagctgttgctgctttcgttgccctgtgtcaagacgactgcttctctatgaacattttaccttcctgtgctgtatctggaatacaaacttaattatctctagcactgtggcaacatcttatcttatatgaaatttcctccgggaaaacgagaatgatttgcttgggtgattatttcatgaccagccaggttgctgtactaaactatggtacttatttcagct

SEQ ID NO: 23307 - DNA, 896 bp, Zea mays
  Clone ID: LIB3600-024-F3_FLI
aaacccaggtgcagctggttctggttaccaaggtggacccccaggctcaaatagaggaccttggggcagtcaagctccatctgcatatggaactggagggtatggtggcagtgctggctatagtgcttggaacaactcttctggtggtggcaatgctcccactagtcaagcccctggcggacctgcgggctatggaagccagggttttgggtatggtggatatggaggtgatccatcgtatggtagtcatgggggatatggagcttatggagcgcgaagtgatggtgctggcaatcctgctactggtggagcatctggatatggtgcagggtatggaagtgggggtgccaactctggctattcaagtgcttggagtgatccttcacaaggtggtggatttggtggttcagtcaatggaggttctgaagggcaatcaaactatggcactggctatggcagtgtgcagcccagggttgctcagtaaagaaggcattttgagtgtctgaaatgaaccagcacatctgggcagtctatgtattgatttgtcattccagttctgatttgttctcagcattctgaagattgcccatttgctggttaaatcagtatttctccgggttggaatgcttgatcctttagtggcttactactagaacttgtagtcaataagtagctataatgtggagtagcagtatcttgcagaatgcttttattaatttctacatttagctttatctatctgtgtgctttgccatgagtggagtttcaggttccttcatctctagttataagctagagtagcttgactgcttatggacaaaattatctagttgtacctctattctacagatcatacattcgtgtttgatggtagtatttatgctggatattgtacc

SEQ ID NO: 23308 - DNA, 658 bp, Zea mays
  Clone ID: LIB3600-044-E8_FLI
cgatctcaaaggggcaggctcgtaatttttccgctgcgccggcgtctgtccataaaaccctaaaacctccggctgatcggttggtgttgaggcgagtggaagcttcgagttttttttttttcttccttttggcttactgcgcaagaagaagggtaacaagaggacggcggcgatggcgaagaggctgctcccatctctgaaccgggtgctggttgagaagctggtgcagcccaagaagaccgccggcggcatcctcctcccggaaacatccaagcagctgaatgctgctaaagtggtggctgttggccctggtgagcgcgacaaggcaggcaatctgatcccagttgctctgaaggaaggtgacactgttctcctgccagagtatggtggaactgaagttaagcttgcagctgataaagagtacctcctcttcagagagcacgacattttgggcacacttgtggactgattcagagcatcagcaagcctgtcactagtcgttggttctagacttctagtgtgagatgcgtagtatcagattctgggatcaaaatccctaagaactctgaactgtcgtgatgtcatagattttgtgatgaaacatcataattgcctgcttcttgttgcaagcgaacttttgcgtttaaaatggttccct

SEQ ID NO: 23309 - DNA, 768 bp, Zea mays
  Clone ID: LIB3600-044-F6_FLI
atcgccggcgccgcaacttcgctgaggaagcccgcacccctgcccggatccgatggccaacagcaacctcccgcggcggatcatcaaggagactcagcggctgctcagcgagccagcaccggggatcagcgcgtcgccctcggaggagaacatgcgctacttcaacgttatgatccttgggccggcgcagtcgccctatgaaggtggagtttttaagcttgaactctttttacctgaggaatatccaatggctgccccaaaggttaggtttctgacaaagatttatcatcccaacatcgacaagcttggtaggatatgcctcgacattctcaaggacaaatggagcccagcacttcagattcgaacagttcttttgagtatacaggctctactgagtgcgccaaatccagacgaccctctttcggataacattgcaaagcactggaaagccaatgaagtagaagctgtcgaaacagctaaggagtggactcgcctgtatgcgagcggtgcatgagaacgcagtgatgttcttgatgtaataacccatcatacttcagtcctcatctattgccatttgcttgataaaaaataggctggagatatttgccatggaatgaagtctctacatgactatcactctgaattgtttggttgtacacctgtggtcggttccctttaccttggggcacctttgacaaatcagtatctgtggtagaacttgctgatactgtaatatatttgttacttcatgtagaagagcttctcaac

SEQ ID NO: 23310 - DNA, 935 bp, Zea mays
  Clone ID: LIB3600-054-G4_FLI
tgttcctccgattaacggaccggccggcgacgtgcatagcaggtacgcagcagctctagctagcaatggcgcctccccgccggccgagcatggggcggcagaagatcgagatccggcgcatagagagcgacgaggcgcggcaggtgtgcttctcgaagcgccgcgcggggctgttcaagaaggccagcgagctgtccatcctctgcggcgccgacgtggccgccgtcgtcttctcccccgccggcaaggccttctccttcggccacccgtccgtggagtccgtcgtcgagcgcttcctcgcctcgtcgtccccctcgcctgccggtgccggtgccggccactccgccagcggcggcgaggaccgcgcggtctcggagctgaaccgccagcacggcgagctgcgcgcgcagctggacgccgtgaaggcgaggcaggagcgcgcggacgaggcgatccggaaggagcgcgaggcggggagcccggcgatggcgtggatcgacgcggaactgagcgggggcgcgatggggcacgacgacctggtcgcgttctgggccgcgcttgcgggcgtgcaggccgccgtggcggccagcgccgaccggctgctgcgcgacgcgctgctcgtcgggcgcaggggccggcagcagcagcagccggcccagcttgccgggggtggtggcgtggcctttgacgtcggcgcgtttggcggcgttggcgtgcaggtgcagccgcctccgggattcgccggcgtcgtcgacctgcaggggttcggggggcaggctgcggccatcctcggcgccggcggtccctcatgagtgatcgaatgcgtgtgtgcatacttcactcaagttgtttggagataacgtcgcaaataaatttgcgacaaatgttttggttaatttgttcgtatgcattgttcgttctcaccttgctctatt

SEQ ID NO: 23311 - DNA, 333 bp, Zea mays
  Clone ID: LIB3595-030-C8_FLI
gacaattcgttgctcgcgatcctcgcttcgggatccggaagagatggccaagtcgaagaaccacacggcgcacaaccagtcgtacaaggcgcacaagaacggcatcaagaagcccaagcgccaccggcagacctccaccaaggggatggaccccaagttcctgaggaacctgaggtattcaaggaagggcaacaagaagagtggtgaggctgaggagtaggaaggaaagcatggttgtgtttcctatgttttagctcagttgtaaggtggaacttaggaccttttgctgccgaaatgtttttatgataatcatgttttgaagagttacggttt

SEQ ID NO: 23312 - DNA, 343 bp, Zea mays
  Clone ID: LIB3595-030-D1_FLI
ctagccaggtccagggaggcgccgccgctaagaaggacgacgacgagtaggcctcgccgcctcggctcgcccgcccggtcccgtcgatcgccagcaagaaccaacaagcccttctgtctgtttaattccagtatcagttcgattctcatgttgaataatcatgatcatgtgggtttaggtgtcgtgctcacgagtatgtagtgtagctcctgctagcacagagcacagcacagagccactgggcgatcgacgggccgtgcatggcctgtagataccatctcatatgttcaccactgctactttgctcatgttgggggcctctcctgaactgggttcctggatg

SEQ ID NO: 23313 - DNA, 695 bp, Zea mays
  Clone ID: LIB3595-030-E10_FLI
agaacatgcaggagaagatcaggagcatgcctaaggactttaggccagccactcctaaagggccggacccgaaatggcgatacatgtggagagtgggtcctcgccctacaaacacccgttttaaggagctgaactcagaacctgttatccctgagggattacctgagtgggaagagatgatggattcctggggttctaaaatgatttctgcaattgaggttgttgctgagatggctgcaataggctttggcctatcgaaggatgcatttacttctttgatgaaagagggaccacatctcctcgcaccaactggaagtgacctgcagcgtcatggttctgagggcaccgtttttgctgggtatcacaccatccaccatacgacttaccgccacaactatggccactacaccgtctggatggactggatgtttggtacgctccgtgagccagatgatatcctcaagaaggcctgagttcgtcgtagctgtggttttcctacggtgctggatgtgcttggtctgttctgtccccagtgcctctaatccgctgagcctgttcagcgctctgtttctgtaggctttggtgtgctatttagtttgctaggttttatatgttgtgcttattctgtaatttagtgatgtttgtctcatgacgcaacggagttcaggacgaataaaaagaaagatttgctagac

SEQ ID NO: 23314 - DNA, 1532 bp, Zea mays
  Clone ID: LIB3595-030-E6_FLI
ctcgcagtagacgagagacgacccaagacttcctcaccctccctttgcttcctgcgcaattcctgcggcagcgcctttgtttgtttcaatggacagcgactacattgccagcctgctcatgggctcatccgcccctgcactcagcttcgccgcgctggacgccgggttcctcgacacgctacgcggcggcggcggcgggggcctcttcggggtgcccgcggaggcagggtgtggcggcgggtctccggaggggtcgtcggtgtccgacccagcgtgggcgcgcgctagggactacggcaatgccaggaaacgcaaggcgccgcccacggggtccgccggtggcaaggaggcctgcttgagcaaggttgcggaggccaagggtccggacgggaagaggtgcagagtagtgggtgccagcgacagtccggtgaagccgaaggaagaggaggaggaggcggcggcgagcgacgccttggttgaagtcaaagcgcagaagaagggcaaggggaagagctcgaagccggcagtcgaaccgcccaaagactacgtccatgtccgggcgcggcgggggcaggcgactgacagccacagccttgcagagagggttagaagagagaagattagccagaggatgaaatttctacaggacctagtgccaggatgcaacaaggtggtcggcaaggcactcatgctcgatgagatcataaactacgtccagtcgctgcagcagcaagttgagttcctgtccatgaagctcgccactgtgaacccagagcttgatttcagcaacctatcgacacccctgcacaaagacatgtaccaacagccatgtggtggcccttcggcaagttcggtctttccactggaaagcgccggcgcagcttttccattctgcgagcaggcggatcttttccacagctttggctcgggtggtagcggtagcggtagtggtatggaggatcagtgctctctaagcctgctgctagacacggctctgccccacgcggccagcccacagtttgcttttcaaaagcagcaaagggacttgtgggaggatggcctacagcatgctttgcctacccctactaccggtagcgagcaaaggcaggaggaggatgggcttttagtacccgacccttgatggccagttgcaagctgatcaggcgaaggctgagttctagcccgtccctggtgatctgcaagggctggtatttttgtacataggtggtggtggtaccaagacctgtgtgtgggctgtgtgtttcaagcagagctctcctctgctaagctgaccatcattagcgtttaggcctgcgactgcgactgcgagctgaaattcattccgtgatactgctgcacgtatgtcacatggcgactcgattcttgccccccatagagatcgtgcgacccatctcgtgaaaaattggagtaggtcgtgtgctaggtagatatggcgcaaatattacatgcgccatcatctgaagctgtactgattattactcctatgtaagaccgctggtggctggtactgg

SEQ ID NO: 23315 - DNA, 318 bp, Zea mays
  Clone ID: LIB3595-030-G11_FLI
cagggaaaacaccggcctggcttagctacatgccgttctggccgaccatgtgatcggctagcacacgcacaccccaaactcttccaggtcctaaagaatctccaagtattgcatttgtgagacagatggctacaaggacattgtaaatgtatattttggagtttgtaagcatcttgaatggtgcacgtgcgatcctgcaaatcatctgtggcccatgttacaacccacagattcagggaaaaaatatcgaatgattatgtaattaaaaaaagtttaaaacagttttaatggcgaaaaattgctgtggtcatcttgttc

SEQ ID NO: 23316 - DNA, 773 bp, Zea mays
  Clone ID: LIB3595-031-B1_FLI
tacagcctctcttagcttagcagctccagcaccggccggccggcaccacaacaatggccaccgtcctgagcagcctccgcgcgccggcctcgaccttcccctcctctctccgcgtcgcggcagcaccggcggcgccggccaccgtggcgctgctgcctgcggcgggcaacaaggtaccgggcatggccgcccgtggcgccaggctgcgcgcgcaggccacctacaacgtgaagctcgtgacgccggagggggaggtggagctgcagtgtcccgacgacgtgtacatcctggaccaggcccaggaggaaggcatcgacctgccctactcctgccgcgcggggtcctgctcctcctgcgccggcaaggtcgtcgccggcagcgtcgaccagtcagaccagagcttcctcgacgacgaccagatcgccgccggatgggtgctcacctgccacgcctaccccacctccgacgtcgtcatcgccacgcacttggaggacgagctcaccggctaatcatcatgtgttacatatgcatgcatgattgattaagcgcgcgcgtagtactgctgttgtttgttggttttgcatgcaactcatgtaagcgtggagttttcaaccgatcgatccgtggagagagagaggccctattacataccttgtgcgtgtatgcttattatatttgccgtacgtgttgagttgttgttaattaatatatggcctaattgtaatcttgttttataatttgctattttgtttcttttcgatctgtttatatat

SEQ ID NO: 23317 - DNA, 811 bp, Zea mays
  Clone ID: LIB3595-031-G4_FLI
gatcgcgagcggctccggacgtcggctgggtctccgacctcatcaactgagggaaactcctgaaactaccagcatcagccgtgcctcctctgaacggtgcttatccatggtaagtgcgtgagggaagcttattagaggcgtcactgcacagcagcaggagaggaaagtagttcgtgggaaaaacaaaaaaaaaaaaatatttttctagatttgtactaagatgatccttgtacatattttcctccatgtgtgaatattcccggatggctgttggagggaggggaggcagggaaaggttgatttgttgtggggtttcagatgatggcatgccagtggggaggtagaagggatggccagtaaaacacaaaaggatcaaaggagacatggtatgcgaccagaccatgcatgaggtgtctagatgtacatagcgtctgtgtagtgtacctgtgtgttgtgtgtgtgtggaggtagagcgtggagaggcgaccatgtcggcgatccaagactggaagtaaagatgactggatttttttctatggccgcactgcaccggcggcggctcccggtgacgtttccggcaagaaggcctggagcggttccagaacaacatcatcgtctcgactctcgagtacttgtcattccaccgttcattctgttatttattatctggtattactgctctgtaattttctcaatgtatttccttattgatctcgtctgctctagctaggggccgggagcatctatgtaccttgcactactatgtgctactgtttctgctgataaggaaataattaagaccggccttgtt

SEQ ID NO: 23318 - DNA, 862 bp, Zea mays
  Clone ID: LIB3595-031-G8_FLI
tctctcttcccttctcgtcttctgcaagaagccagtgaccgtctctgtttctctcattccctttcatcactctgctggtctccctcttccacctctggtcttggccatggcctccagcgcctcccggttcatcaagtgcgtcacagtgggggacggcgccgtgggaaagacctgcatgctcatctgctacaccagcaacaagttccccactgattacatacccactgtcttcgataacttcagtgcaaacgtggtagtcgacggtaccacggtgaatttgggcctttgggatactgcagggcaggaagattacaacagactgaggccactgagctaccgcggagcagatgtgttcgtgctcgccttctcgcttgtcagccgagctagctacgagaatgttatgaagaagtggctaccggagcttcagcattatgcaccgggtgtccccatagtgttggccggaactaaattggggaccactggatatgcttcatcgtttatcctaaggttggaaaggtgctggtgctcgactccttgcacaccgagccttcgacctattcaaaattcctcagcatcttagagctggcatttaggttttataagctacaaggtggaaagtacgacacgtccaaaaaaggcgtgccactagacatccattataactggccgtgccataaacaaccactcggatcagtcctatgtgggttctacgtgtgcgagttaatgagaatgaacgaacgatacatcacgaaccctggcaaggtattattagtaatagtcacgtatgtatttatgtcattaaagatgcaaatgtgttattattgagtataaatagatgatgttcataaacttcctttacaac

SEQ ID NO: 23319 - DNA, 800 bp, Zea mays
  Clone ID: LIB3595-033-B6_FLI
ctctctctctctctctctctctctctctctctctctctctctctctccttcctgggagccgtgttaattgctctcttgttgtggagcagcaggagccgaggaggacggcggcggcggcggcgagaagagatggccgacggcagcagcaactcatcggcgtcggtggccatgggacaggaggtgcaggctttcgttgagaacaagtatggtggaatggtgcctaagaagcctctgatttcaaaggatcaggagcgcgcctattttgattctgcagactgggtccttggcaagcaagctgcaaacagcggcaccgcacgggctgcgactgctatcgaattcttgaagccaaagctaaagaggacgccccatcaccagcttccccctcgcaagccgacctgtgcgtccagctgagctcaagacagtgcgaaaatccaaagggccaggcttacaaaagctccctggctgggagagacgatgaagagcgttatcaagttttttttagttggttgcattggttaggaaggcaaattcaggattgatgagccctgcatttggctttgttcgcagcactcgctgaattattaatttaagcatgtgggggacatagataaaactagactcctgctattatatgcttaattgtggaagtggtagatgacacccatctgtttcaatgtatctttggtcggcagatgaaatgtatcctctctatctacttggcttctccctttctttactagacctcatatataatattcaccgaaaagagaatgaacgaatggatattccaatttgggatg

SEQ ID NO: 23320 - DNA, 778 bp, Zea mays
  Clone ID: LIB3595-033-C7_FLI
gcagccttccggttcaggccccgtcgcatctctcctcgtcggccagctgcagggcacctagcgcgtggtcggcgagcgcgcgggcgggcggcagggggcgccgcggcggcgagcgcgcaggcccccactcacagacgactgggccggccttcactgctacttcggccccttcgtcgccgacgagaaccaccgcttgttcgggggaattttttctaggtgctggttggaatggcaagtacagcatgctttgtgattgtcagtaagaatgacatcccaatctatgaggcagaagttggatctgcacccaaaaaagaagatttgtcttatcaccatcagtttattctgcatgctgcattagatgttgttcaggatctagcatggacaacaaatgcaatgttcctgaagtcagttgatagattcaatgaccttgtggtgtctgtttatgtaactgctggtcataccagattcatgctgcttcatgactcgcgtagcgaggatggaataaaaagcttttttcaagaggtccatgaactttacatcaagatattcctcaacccgctttacctgcccggctctcgcatcacatcctctcatttcgataccaaggtgagggcgctcgcgaggaggtacctgtaatacgggcatatgctggggtttcatcgtaaagcaggcacgccgatttttttgtgccatcatcatctgataacacatacgtctaatttttcttggcgttggctttgttatgaccgacctatggatcattttttttttcgagaac

SEQ ID NO: 23321 - DNA, 1102 bp, Zea mays
  Clone ID: LIB3595-033-D6_FLI
cgtcaggggcgaggtttcatcaacctcagtacctcaccctcctctcccggagagcctctcgcctccgctccgctcttctgccctgcccttccccgccacaccaaccaaggcgccaaaaataaacgccgttgccgctgcgccctgccgcctcgtcttcgcggaggcctcgtcgcgcgacgatatggagctcgccgaggcgccggcgcccgtgcccgacgaggacgggctggacgaacgcggcgtggcgctgcacctcccgaggctgctggccggcgtcgtctccggcgccctcactggcctcttcgctctcgctggagctctgaccggggcagtcaccggcgcggtggcgggcagggcttccgacagcggcggcgtcctgcggggagctggactgggggcggtcgccggagctgtcctctccattgaggtccttgaggcttctcgcgcttactggtgctcgtcggaccggctgggctcgcacggcggagcatcgtccatggctgatttcattgagcagcttcttcgtgcccggtttgtgcaagagcaatttactgcttcaggatatgcatcatatcgctggcagctcagcatatcatattttggtcaggatgacctatacgacatctttggggacatttcatctgaagggctctcgcaagagtcactgaagaaactaccacatcatgtggtcagtgaccaccagacgcgggacttactcggcgaaatcctgtgttgtcctatctgtctacaggacattgtggccggtgagacagcgaggaggctgcccggctgctctcacgccttccaccagccttgcgtggacagatggctcgtcggccatggctcgtgccccgtctgcaggcaacgcgtgtaaaagatatataggcgacctgcgtacgtacgtagacgaagaaatagctgggtggagtgaagagaaatgtttgctcgggcacttcgtattagaggtacatacgaatctgcctgttttcactaccggcggaaacggccgtgcgcatctggcaatctcacttcgtttcttgcaccccggttccaacgtgtaatggcaatggaataagattgctgtcggagcagttcctgtttc

SEQ ID NO: 23322 - DNA, 1387 bp, Zea mays
  Clone ID: LIB3595-033-H5_FLI
tctctgtctgccggcgcgatggaggatgctgccgagagccgcaagctcttcgtcggcgggatcccggccggggcgcaggaggcagacctgcgggcccacttcgcgcgcttcggcgaggtgcgctccgtcgtcgtcatgcgcgacagggagacgggccacggccggggcttcggcttcgtcgagtttgaggacaaggcagccgccgccgccgccgccgcgctgggcgacgcggacaggcccaggcacttcctctgcgggcgcgcggtggacgttaagagggccagggcaagagctccacgaaaccagcgcgagcagcactcccagcctcatcaggtcgaacaaggcttagaccaggggaaccaggacaatcagtaccccatggggaacggcaccgcggacagtggtgacaacgtgaactacggttcaaaaaaggtcttcgttggcggactgcaggatgacaccactgaggaggagttccgggcctactttgagacgtttggcactgtaacggatgtcgcggtgatatatgacagcgcaacgaaccggtcgagggggttcggcttcgtcacctttgattcggaggaagcagtagggaaggtgatgcggcagagctttcacgacttgaacgggaccaaggtagaagccaagattgctatccccaaggacgagcagtattaccgcaacagagggcgtggcgcacgctcctctggtgggagggtccctgctggctatgaaggctccatgtaccaaccgccatacaatgctggatatggctcctacaatggctacatgccacaacctgttcacgtgcagccctactttcctgccccctattttcctgtggcgggttatccctatgggagtggatacccaagccaagtcgtcatggcaaacgctcctgatatgatgtcaagatgggttcctccagcttatggaaattatcctcaaatgtatccatggtacattctatacagagctggttatggtggtccagccacctcttttcagcatggaattaatggtggaggagctgataacaaaaaggatcaaactaatgtagatatgcagcaagctgacaacacttctagcgttacaacgatgttggaacatatgaagctaggttcacaatgactttcaggactaatacttctacaatggtgacactggagtacaacaattgtttgggaactcgcaactgtgaagacgacttggacttagattctttggttgacaagtatatcattagaattcttccagcttacctacgattcctattcctcccgcctgtaaactagtaaaagcatgctgcaagttgttactggctcccctcccctcttgtaccaatgttaaattcttacgtcgtttaatgcatcagaatcatactgtt

SEQ ID NO: 23323 - DNA, 613 bp, Zea mays
  Clone ID: LIB3595-034-C4_FLI
agctccaaacgaccacaccgcacacgccgataaaaccgctccacccactccgcccactccccctctgccgtcgcctgtccactttccccgtgcttctccgccgtcgaggccgcgtcccagtgcgaagagactccgactcagatggccagccgctgggtccggcccgaggtgtacccgctgttcgcggcgacgggcgtggccgtcggcatctgcgggtttcagctcttccggaacatcactggcaacccggaagtcagggtaaacaaggcagggagggcagctggtgtgcttgagaaccatgaggaggggagacgttacgccatgcatggcctaagaagctttgtgcacgacaagactcctgagatcatgcctgcagttaacaagttcttcactgaccctaagtgaagcatgttgattggcatactactactactacttgctactggggattttacactttgctggcaactcaatatgttggggacatccatgacctctaaaagtactttgagcgcttggtgatgacttggtatatgtatgatggtggatgagtttgatcgtccatgcttgatgttcatattcatctgtcatctggatttgccgcacttcagtg

SEQ ID NO: 23324 - DNA, 916 bp, Zea mays
  Clone ID: LIB3595-034-D9_FLI
gcgcatgcaggtagcaatggcgggggagacgaaggacctggtgctgctggacttctgggtgagcccgttcgggcagcgctgccgcatcgcgctggcggagaagggcatcgcctacgagtactcggagcaggagctgctgggcggcgccaagagcgacatcctcctccgctccaacccggtgcacaagaagatccccgtgctcctccacgacggccgccccgtctgcgagtccctcgtcatcctcgagtacctcgaggaggccttcccggaggcttcctcccccaggctgctccccgacgccgcctacgcgcgcgcgcaggcccgcttctgggcggcctactccgacaagatctacgaggccggcacgcggctgtggaagctcaggggcgacgcgcgggcgcaggcgcgcgccgagatcgtgcaggtggtccgaaacctcgacggcgagctaggggacaaggccttcttcggcggcgaggcgttcgggttcgtggacgtggcgctcgtgcccttcgtgccgtggctccccagctacgagcggtacggggacttcagcgtggcggagatcgcgcccaggctggcggcgtgggcgcgccggtgcgcgcagcgggagagcgtggccaggacccttcacccgcctgaaaaggtggacgagttcatcaacctgctcaagaagacctacggcatcgagtagtagagcggactactactagcagcggagatggtaccgtacgtacgtggcggccatgcagtttttgtttcggtttgtttaacgggactccatgaatggatggaactcttcttcggctccgtgtgctacatacacatcacttaggccttgttcggttattgatattccatgtggattgaagtgtattgggtgggattaggatgaattttgacttgctatggattt

SEQ ID NO: 23325 - DNA, 901 bp, Zea mays
  Clone ID: LIB3595-034-H9_FLI
agatcccgccaccaaccgatccggcgccctccagcatggcgggggcgggggcgaaggcggcgggagccctggctctggcgctcgtgctcgcgctcgcgggggccaactcggagggcgacgcgctctcggcgctgcgccggagcctcagggaccccggcggcgttctgcagagctgggaccccacgctcgtcaacccctgcacctggttccacgtcacctgcgaccgcgacaaccgcgtcacccgcctagatcttggtaatttgaacttatctggtcatctggtgcctgagcttgggaaactggagcatcttcagtatctggaactttataagaataacattcaaggaacaatcccttctgagcttggcaatttgaagaatctaataagcttcgacttgtacaagaacaacatttcggggacaatacctcctgcccttggaaagttgaagtcccttgtattcttgcgtctcaatggcaatcatttgactgggcccatcccaagggaactcgctggaatatctagtctcaaagttgttgatgtttcaagtaatgatttgtgcgggacgattcccacgtctggaccatttgagcatattcctctgagcaactttgagaagaacccgcgcttggaaggtccagagctacaaggcctggccatatacgacaccaactgctagagggcaccacgaagaaaagaactgctagaaagtaacgagcgaacaaggttaccagaaattgggcgatatagatttactaggtctggatctgtaatcctccctgcatagctcttattcgtaactcgctgtcggcacgaaagttggtgtgtgttttagcagaatgctttctgtccgtgaaagtaaacttgaaactgcttattacgactgaaatgatattgtcgttc

SEQ ID NO: 23326 - DNA, 1354 bp, Zea mays
  Clone ID: LIB3595-035-A4_FLI
ctccgcggctcttaacgccgcatccactcgccggttcttaacgccgcccgccgcctcctccgcggctctgccctcccgccgctgccgccgcctacccaggaatcaggatgcgggtgaagaagcggtcgaagcaccgcaaagcggtcaagttctacgccacatgcttcggcttccgcgagccctataaagtcctcatcgacggcaccttcgtccaccacctcctcacccagcgcctcctcccggccgacgaggctctccgagacctcctctcggcctccaggacgccagccctcttcacctccaagtgcatcctcgcagagctcagacgtctcggcaagtcacatgccgaatcatttgacgccgcgcagcttctcaccacaaccaagtgtgagcatgacaaggtggtcggtgcagttaactgtgtccagtcactgataggtgataaaaatcctgaacatttcttcgttgccacccaggatcctggtctccgagaaaacttacgagagattcctggggttcctgtgatatatggtctgaagaactctttatgcatagaacggccctctatgcagcaacgcaagtttgctcaattggatgaggagaagcgtctcaatatggatatctctgaatacaagaagttactgaaggctgcatcagaaggaaagacaattgccagtgaaaatggaagtggcgaagaacaacatgagatgcctattagttctcttgtaaaaaatgcacttcatgttactgataaaaccaagtttaagaggaacaaagcaaagggtccaaacccactctcctgtaagaagaagaaaccaaagctccccacggctattcaaaagcaggcaggtacggctgatggcgaggcaaagaggaagagggttcggaagcggaagagaggccaaaaagataacaagcaattggaggctgcgaactagaaggatgggcttgcgtaggaagtttcagtgctcttgctagacatccatcctgactccggagcaagtcaactatggaggagttcctttctcccacacaggattcagtatgccatgccataccatgctcattatatgttgaagatgcttcttgcaacgtaacacttgattggttatggtgatcgtgaatccttctctagaggatgttattggatgtttcttttgtcgcaagatgcaactttaaatgttttttgaagcaaaagtttgatgccagtagctctaccaggttcttgcttgccctgctacatgtgtgatcccattcttcaattgtaagatgtgtttgttgagaatatgtataatagataatacttctattattttagattttagacagtagtaaccttagtttatttggacct

SEQ ID NO: 23327 - DNA, 664 bp, Zea mays
  Clone ID: LIB3595-035-B5_FLI
caaccccaaaccaatccgtcgcagacactcaaggtcgcaggatgccgccgccgcgtgagcaccaccagccccaggacgaagaggacgacgataccgcaggcgttgtcaagctcatcagcgccgagggcttcgaattcgttgttgacaggaaggccgccatggtctccaacaccctccgcaacatgctcacatccccaggcggcttctctgagacgcgccagggcgaggtccgcttcccagagatccccaccaacatcctcgagaagatctgccagtatttctattggtcgctccattactccagtgggaaggagacagcggagtttccaatcgaaccggagataaccctggagcttatgatggccgcaaactatctggacacttgatgaggagcctgagggatttgatctgatctgatccgatccagtgtggtctggcacaatgtaatgtaaaggtgggagggaagcagaaaccaaggaatacattttgcaatctacagtgtgtgctactatcaactcttggtagtgttttgttgtctcctgggaggccgtgactgctgctgctgtttgatgtatgtattactttttgctttggacggttccgatggaaaaccgaacggagacgctttgatatattgttgctgaattctgatcgtgtcgctaac

SEQ ID NO: 23328 - DNA, 1287 bp, Zea mays
  Clone ID: LIB3595-035-F10_FLI
tctaataacagcagcagcagcagccgccatggaagccagcagcaagaagctccaggcgttcatcctcacgctgctgctggtgctctccaccgccgtgactcccatcctctcgctgtcagtgccagacgacgaggtagcctgcgactgcgataaacccaaggcgcccaagccgtcgcacccgcccaagaccaagccctcccacccgtcgccgtcgccgaagcccaagaatcccaagccacccaagggcagcaccgggtacccagcgccggggcaccaaccgcccaagagcccctcctaccccccggtcgtcggccctcccaagggccccgtcacgcgcccgccagtcatgcgtccgccggtcgtcggtcctcccaagggccccgtcacgcgcccgccggtcacgcgtccgccggttgtcggaccaccggtgacctacccgccgatcaccggccctccgacgacgccgcctgttgtcggaccaccggtgacctacccgccgatcaccggccctccaacaacgccgcctgttgtcggcccaccggtgacctacccaccgatcactggcccgcctgcgacgacgcccccggtcaccggtccgcccgtgacctaccctcccggcggaggcgggggaagctcgacgccgtgcccgccgccaccgagcccgacgccgacgccgtcgtcgcctacgtgcccggctgactcgctgaagctgggcgcgtgcgtggacctgctgggcgggctggtgcatatcggcctcggcgaccccgtggtgaacaagtgctgcccggggctggtggagctggaggcggccgtgtgcctctgcaccaccatcaagctcaggctcctcaacatcaacctctacctgccactggcgctccagctcctcctcacctgcggcaagacgccgccgccgggctacacctgcaccgtctgatctggactagctggcagcccccggctcatgcgtccatttatccgtgaacatgggttttggagtgagctagcatccagttcatcggtcgtttgaagagagatcgacatgagaggatgtcgtctgcttcgtcgttccaagctgaagaaggcacgccggaggaggaagagagtaacaacggccgggtcgatcagctaacgatggatcgatcatttttttccccatatttattgtgttgcgtctgctgtagtttctaattttctagatgtgctttcggtttggtctgtagaccctgcagcttgatttggttaagtttgatttgatgcaagggaaatgggtggcggttgattgctaat

SEQ ID NO: 23329 - DNA, 173 bp, Zea mays
  Clone ID: LIB3595-036-B5_FLI
ggattgggagaagaggtggacgaagaatagtggagtaataataatggtggtggtgcagtggcggtggttgagggcccgaaacgatgaacagatgggttggattgggttgggtgtatgtatgtgtcacacgcaactttggacagaactattatactagtactaagcttctcgtc

SEQ ID NO: 23330 - DNA, 1044 bp, Zea mays
  Clone ID: LIB3595-036-D5_FLI
actcatcgcgatcgcctgctcgatcgatagttcaagctgctagcctgctacatgagacgagacacgagagagaagactagctctcgcagttgcgcttcttgcttccttccttcttgctcactctcagtctctcgttcgctcatcagctctttcccacctgcatggatccctccgggcctggcccgtcgtcagtcataggggcagctggaggcgatgaggcagcggccgtggcgctgcagcggccggcgcagctgagtagatacgagtcgcagaagcggagagactggaacacgttcctgcagtacctgcggaaccaccggccgccgctgacgctggcgcggtgcagcggcgcgcacgtgatcgagttcctcaggtacctggaccagttcggcaagaccaaggtgcacgcagccgggtgcgcctactacggccagcgcgcgccgccggggccctgcccgtgcccgctgcgccaggcgtgggggtcgctcgacgcgctcatcggccgcctgcgcgcggcgtacgaggagagcggcaggacgcccgagtccaaccccttggcggcgcgcgccgtgcggatctacctccgcgaagtgcgcgactcccaggccaaggcgcgcggtatcccctacgaaaagaagacgaagcgcaagcgcgcgcagcagcaggccacggagccttcgacgagctcgtctgatgctgccgccgggagtggcagggctagagcagcagctgctgcggcgtccgctgctcaggctggagggagtagcgctgcaccgagctccacttgagagtacagtagacctgcagatctttgtttaattatattaccatgttcgcgtgtatcgtaagattaatttgggctttgattctagttttgctccacatatgcttcttgcttctttcttctctcggcagtttcattctctttgtagcttgtttttggatctttttttctttccgatttattagataggtcagtatatatatggctagaatttgtagtaggctaaggatcggaggtggaatgggctgatttaattaatc

SEQ ID NO: 23331 - DNA, 1017 bp, Zea mays
  Clone ID: LIB3595-036-F11_FLI
ttcctctcccgataagagtgaggcctcggctcagcttgagcttcccctccctcccctcctgcgctccagctcccctccatcctcggccaaaaattctgcggcgagctccgatccggtgcgactactaacccacgccgcagaagccgcgcgtcctgatcgcgcgggggtcgaggagaggggaagcgcggcgccgcggttgcctgccaccgcaccgccgcaggagaaggaagaggagcccgtatccctccgccccgctgcccgccggaccgatggactccgagcactggatctcgcgcctggccgccgcgaagcgcttctacgcggcgcagctcggccacagcgatcgggccgggatggatgagctggagatggacgaggaggtcaggcccgagttcccctgcccctactgctacgaggaccacgacgtcggatccctctgcgcgcacctggaggaggagcacccgttcgaacccctctctttgctgagccgagatctacgggaagcccacttgcaggtgctcctcggaggaggcggacagagatccagcgacaacagcagcagcagcagcgccacgaacatttcggctgatcctcttctgtcgtcgttcggccttggcttccctacctcagacgcggagcaagcatccaagtcgactgtttccattcctgatgatgcaacgacggtgaaagaagcgcccgctcaggcacggaagctaagtatcgattcgtcgctcacaagtgaagaaagggagctgaagcggaagcaagcccgcgtcagagccacgttcgtgcaggacctgctgctctctactctattcggcgactgatgacgaaccagagcgagcctggtattatcactggaaggtgcagagttgatgtgggcgtgatgtatctttctaagttattgtaagccggtctctgtcttcacaactgacgatctgtgtgtggtacgcaccacgcacgcaagtcgcggttgtgcgtgtacgtctgaactctggagcattggtttgttgtacc

SEQ ID NO: 23332 - DNA, 539 bp, Zea mays
  Clone ID: LIB3595-037-B3_FLI
gcattggcttgggatcacctctgcatctcgcctgggatctgctagcttgatctctcctagtcctagcccattcgcttctcctgttcgtcgctcttaatttgcttgctcgatccctggcagtggcagctgctgcaatggcttccggtggcgcgtcgtcactggccttggccgcgctgctcctcgtgagctgcgcctcggcggcggtggcgaccaagtacaccgtcggggacgcgtccggctggacgaccaccggcgactacgccacctgggccagcggcaagaagttcaaagtcggcgacagtctcgagttcaaatacgccggcggggcgcacacggtggacgaggtgagcgcggcggactacgccgcctgctcctccagcaacgcgctcagcaccgacagcgccggcgccacgaccgtgaccctcaagacggccggcaagcactacttcatctgcggcgtggcgggccattgcagcagcggcatgaagctcgtggtggacgtggccaaggcggtggccgccccggcgccggccccagcc

SEQ ID NO: 23333 - DNA, 515 bp, Zea mays
  Clone ID: LIB3595-037-H11_FLI
ggctcccccgaggagttcctctcgcaggtcgactacctgctcggcaagcaggcctacggcggcaagaccgactccgagggcgggttcgagaccgacgccgtggccaccgccaacgtgctggagagctccacccccgtggtggacggcaagcagtactacagcatcaccgtgctgaccaggacggcggacggcgacgagggcggcaagcaccagctcatcaccgccaccgtctccgacggcaagctctacatctgcaaggcgcaggccggcgacaagcggtggttcaagggcgccaggaagggcgtcgagaaggccgccgcctccttcagcgtcgcgtgaccgacgtaaactattgtttctttgatgcttttcatcagggatgcacatgcacgcaccgtgtgtacgtagagagctaggcatggcctggctcgccatgcttgttgtgtgtttctttgattgtacatgagaggacccgtttctgctgccatccaagttgtttgagaaatcttggtact

SEQ ID NO: 23334 - DNA, 888 bp, Zea mays
  Clone ID: LIB3595-038-A11_FLI
ccaaaaaatactcggccactgcgctatctcgcccaccaagccagcaccagcagcggcgcgcgatggccaccgcgccctacgcctcctccctcttcctggcttcctcccccatctccaccgcgccacgaatccgcgccgggccctgccctccgtccgcccagccatccctgcggctccggccgaggccgtccccggcagccgcggccgccgtccaggcggagcaccagcccgcgttgaccgcggcgccgaagccacccgcgctaccgttccgcgtgggccacggcttcgacctccaccgcctggagcccgacctcccgctcatcatcggcggcatcaacatcccccacgaccgcggctgcgaggctcactctgacggcgacgtgctgctgcactgcgtggtggacgcgattctcggcgcgctggggctgccagacatcggccagattttcccggactccgacccccgttggaagggcgccgattcttcggtgttcatgagggaagctgtgaaattgatgcatgaagcaggctacgagctgggcaaccttgatgctacgctgatcttgcaaaaaccaaaaattagcccattcaaggagacaatccgatcgaatttgtgcgacctacttggggcagatccatctgtggtcaatctcaaggccaagacgcacgagaaagttgacagtctaggggagaacaggagcatagctgctcatactgtagttctcctgatgcgaaagtagaaagaacaaatggcagctaattgtatcatgctacacggaaaaggttgttatcttatacttgtgattgttgagtgatctagccagtatggaaaatcttcatgtggtagaaacaataaagctgattgcaatgagaatttttctgtatttc

SEQ ID NO: 23335 - DNA, 1027 bp, Zea mays
  Clone ID: LIB3595-038-A6_FLI
ggcagaatcgggatgggatttcagctctcgatggatgaggaattctactgacatgacaacattggcaaccacttacacaatacctgtggacttgaacacatttctttttaagatggagctggatattggtgccttggctaaagtcgtaggagataatgcgacttcagaattttttttaaatgcttcgaaagcacgtcatattgcaattgactctattttgtggaactctgagatggaacagtggcttgactattggcttcctggtgatgcagactgtcaggaagtacacgaatggaagcctaactcacagaaccgcaacatatttgcttccaacttcgttccgctgtggctaaatgcataccattccgaattcgtacgctttgctgatgaggcaaaatcaaacagagtcatggcgagcctcaaggcatctggattacttcatgccgcagggatagcaacttccctgacaaacacgagccaacaatgggatttcccgaatggatgggccccactgcagcatcttatagctgaggggctgctgcattctggatcagaggcaaaaaaactagctgaggacattgctacgaggtgggtgagaacgaactacgccgcttacaaagcaacgggtgcgatgcatgagaagtacgatgttgaggcttgtggagaatctggaggcggtggagaatacaagccccagactggttttggctggtccaatggcgtggtgttgtcattcttggaagaattcgggtggccagagggcaaggaaatagcttgttgagcggcgaagcgctcacgacagggtggatctggtcttgccggagagcaatctggttaggcatcgttcatgtcacacatgtctagctacgagagtggcgcattgccttctgcagttcgtcaagtgcgtttgtgtgttcttgtttgcttttagttgcgactaggctgtagatccttcttgtatcacaacaatatatgtactgctactgtaccggccccggcctcttgtttaatctgaaatgctcattgt

SEQ ID NO: 23336 - DNA, 848 bp, Zea mays
  Clone ID: LIB3595-038-B1_FLI
cgcaccacaagcgagcgagggacccggggcggaagaagagagagaagacgtctctctcctctcggcgtccccgttccccaacctctcgtctgctgcctgcctgcctgcctgcctgcaaaaaggagtttgtcatggcgtctaagcgcatcctcaaggagctgaaggacctgcagaaggacccccccacatcatgcagtgcaggtcctgctggtgaggacatgtttcattggcaagcaacaattatgggaccacctgacagtccctatgctggtggtgtttttttagtgaacattcatttcccgccagattaccccttcaaacctccaaaggtttctttcaagacaaaggtcttccatcctaatatcaacagcaatggaagtatatgccttgacattctcaaagagcagtggagccctgctttgacaatttctaaggtcctgctctccatctgctccctgctgaccgaccccaacccggacgaccctcttgtcccggagattgcccacatgtacaagacggaccggccgaagtacgagtcgacggcccgcagctggacgcagaagtacgcgatgggctgacgaacgctttcctgctcgtccacccgactggcgtctcaagaaagtcgttcctgggcgccattgttcccttggatttgttgttggtcgtcgtgtgtatccctgatccatctaggatcatcgtattgtattgtagtgtatgtatatcgtcggcctaccatcgttgccattcaccatagtgaggtggttggacatgcttcgcctatatgcacctgtgcttgccgtccttcgggtcggtgctctttggttaatgttcatcgaagacgttgattt

SEQ ID NO: 23337 - DNA, 692 bp, Zea mays
  Clone ID: LIB3595-039-B9_FLI
aggaagaagagatcaatggcgtccgagcagggagtcgtgatcgcgtgccacagcaaggctgagttcgacgcccacatgaccaaggcccaggaagccggcaagctggtggtcatcgacttcactgccgcctggtgcggtccatgccgcgccatcgccccactgttcgtcgaacacgccaagaagttcactcaggtcgtcttcctgaaggtggacgtggacgaagtgaaggaagtcaccgcggcctacgaggtcgaggcgatgccgaccttccacttcgtcaagaacggcaagacggtcgcgaccatcgtgggtgccaggaaggacgagctcctggcccagatcgagaagcatgccgcgcctgcgcctgcgtctgcgtctgcctaaaggagatcagtcgtcgccgtcaataagggccagcacgtatggctgtaaatgttgtcgttatcagttctggctttgtcgtttgtgggcgattgtgaactagtagtatgtttgtttctatccgagccggaggcgatacttaaccatggatacttgttgtgagttcgtttctgttcgcgtgtgactcttgaattgaatcaaccagctcaccactgcaccaggccgtggtgagtggtgacagtgatttcctgttatcatgaatgatcctatggatggatatagaataatagataaatcacgttgcgctgcag

SEQ ID NO: 23338 - DNA, 449 bp, Zea mays
  Clone ID: LIB3595-039-F2_FLI
gtcgtctgctgcggactccgcctccattttgctctgtttcttgcaagttgctcttgcggtagttcccccaactgccaccatgcagaacgaggagggtaagactgtggacctctatgtccccaggaagtgctcggccacaaacaggatcatcactgccaaggaccatgcctctgtccagatcaacattggccacttggatgcgaatggcctgtatgatggtcacttcacaacgtttgctctctctgggtttgtccgtgctcagggcgacgcagacagctccttggacaggctgtggcagaagaaggctgatatcaagcagtagattttacatctagtttaccaagaattggacactgccttagctatgttttgaattcatgtcactatatgcaatgttgtgatttcagctggtaccttaaatctgaagatttagtatctttgttgggttc

SEQ ID NO: 23339 - DNA, 191 bp, Zea mays
  Clone ID: LIB3595-039-G7_FLI
catctcgcatatcttgtgtaagtatcaggatgatatggttcaaaatttaaacatatcatctcgcatatcttgtgtaagtatcaggattccccaaacccacgagatatgcgagatgatatggtttaaattttgaacggaagttgcggatccttttattttttaaaatctcggtgcaatgtttatcactcgtc

SEQ ID NO: 23340 - DNA, 320 bp, Zea mays
  Clone ID: LIB3595-039-G8_FLI
ctaaacccgaagacgctgcaatttgaggaggggatgtcagttgtcacagaggagagagtcatttttagggctagtttggaaatctcatttttttcaagagatttttattttcctaaaggaaattagtttatttttctttgagaaaatagaattcccttgggaaattagagtttctaaacgagcccttaatttcgtaaaattatgtccggagtccatatttcctatcggagcaccatggtccttgaacttgcaaaactatatggtgcaaaccaaatattgttttttcatccgtgttgacgtcttgtgtggcatactttgac

SEQ ID NO: 23341 - DNA, 1617 bp, Zea mays
  Clone ID: LIB3595-040-A2_FLI
ccgcccgtccccgatctccgatcccctcgtcgatccaaagatgcagatcttcgtcaagaccctcactggaaagactatcaccctcgaggtggagtcttctgacaccattgacaacgtcaaggccaagatccaggacaaggagggcatccccccggaccagcagcggctcatctttgctggcaagcagctcgaggacgggcgcacacttgccgactacaacatccagaaggagagcaccctccaccttgttctccgcctcaggggaggcatgcagatcttcgtcaagaccctcactggaaagactatcaccctcgaggtggagtcttctgacaccatcgacaacgtcaaggccaagatccaggacaaggagggcatccctccagaccagcagcggctcatttttgccggcaagcagctcgaggacgggcgcacgctggccgactacaacattcagaaggagagcaccctccacttggtgctgcgtctcaggggcggcatgcagatcttcgtgaagactctgaccggcaagactatcacccttgaggtcgagtcttctgataccattgataatgtcaaggccaagatccaggacaaggagggcatccctccggaccagcagcggctcatttttgccggcaagcagctcgaggacgggcgcacgctggccgattacaacattcagaaggagagcaccctccacttggtgctgcgtctcaggggtggcatgcagatcttcgtgaagacacttactggcaagacgatcacccttgaggtggagtcctcagacaccattgacaacgtcaaggccaagatccaggacaaggagggcattccaccggaccagcagcggctgatcttcgccggcaagcagctggaggatggtcgcaccttggctgactacaacatccagaaggagagcaccctccacctggtgctccgcctcaggggtggtatgcagatttttgtgaagacattgactggcaagaccatcaccttggaggtggagtcgtctgacacaatcgataatgtcaaagccaagatccaggacaaggagggcattccaccggaccagcagcgcctgatctttgctggcaagcagctggaggatggccgtaccctcgccgactacaacatccagaaggagagcaccctccacctggtgctccgcttgcgaggtggtatgcagatctttgtgaagaccttgactggcaagaccataaccctggaggttgagagctccgacaccatcgacaacgtgaaggcaaagatccaggacaaagagggcatccccccagaccagcagcgtctgatcttcgctggcaagcagctggaggatggtcgcaccctagcagactacaacatccagaaggagagcactctccacctggtgctccgcctccgtggtggtcagtaagccatggttcatttaagctgctgctgtacctgggtatctgcgtcgtcgtcgtctaataaacatctgtggtttgtgtgtcatgaatcgtggttgtggcttcgttggtttaatggacctgttgtgtcctctgtgttgtacccaaaactcttctgcagcagtatggcttgaatccttgtgaagtttgatgtttgaacttaaaagtc

SEQ ID NO: 23342 - DNA, 924 bp, Zea mays
  Clone ID: LIB3595-040-A6_FLI
cactccacagcagtagcaagagggatagagcaaggccacacacacacacacaccactaggctaggttagccttttaatcgtcgtcgagaagcaagaagggcgcgcacgcaagcaggcaagcaagaagagagccgatcgaccgagagctagcacgcgatggcgaggtcttccaagatgatggtggcggcagctctgctggccttggccctggccgtgtcgaccgccgaggcgaggaacatcaagaccacgacgacggagaagaaggacgacgcggtggtgcagccgcagaccttcccgcccttcgaccgcctcggcggcggcgcgtccccggcgttcggcggcctccccggcggcagcattcctggcagcagcattcccgggttcagcatgcccggcagcggcagcagcctacccgggttcagcttgcccggcagcggcagcatgcccctcttcggcggcggctccccgggcttcagcggcttcggcggcatgcccgggtcgcccaccgccggctccgtccccgagcacgccaacaagccctgaacgccaacaagcgtggtagtagagtggtgctactgttactgtagtacgtcgtcgtcttcatgcatgcgtggttcgtggtttcccctagctccatacgagcagtagttgggccttgcacgtaccgtacgtctagctagctatatatatatagcttgtgttctactgccttttagtttaattacctgcctgcattggagagttggatctgtttcatttggtggtgtttgctttactattaggtcagtatctgtttgtggagacttggtgtttaatttatttagccgtttgtgactggttgtagctagcggtggtgcggtggtgatgttcttgaggcatgaataatgctacatgcatgtgatgtatccatgttttgtgtgtggt

SEQ ID NO: 23343 - DNA, 855 bp, Zea mays
  Clone ID: LIB3595-040-G10_FLI
ctgtttgcccatccatccacccatcgtcttgcacgtccaagaaatcgagaactcacgcaggcgtcgcccacttgccctcttcgtcctcctcccgtcgtgaattccacgctggttcagggatgtcgatcgagctcctgacgaaattcctcacattgctgttcgggtatgccatgccagcgctggagtgcttcaaggcgatcgagcagcggcccggccgggcagatcagctccgcttctggtgcgagtattggatcatcctagtcctcctcgtcatgttcgacgaaattgctggggttctcatttctaagatcccaatgtactacgagctgaagctagccttcctcgtctacttgtggtacccaaagacaaggggaacggacatcgtgtacgagaccttcctccagccgctggtgatgcagtaccagcccaacatcgaggccaggctccagtacctgcgcgccaatgccggtgacatcctcgtcttctacctcaagaacttcaccgagagaggctacgagctcttcctccgagtgcttgactacgtccggtcgcaggcgtccagagggtcaagaacacggagtttcttctcgttccgaggtgaacgttcggagaggccaagcttcaccgatgactatgtcactggcggcgaccggagggacgggggaaggcaccgtcgaccacgcagtggctactagtagaccaagtagtcactggatgtataggatgtgcacagaaacatatacgattactggtatagtgttaggtaggagtaggatcaaatcaagcaaaccttacggacagaacttgtaggatccactggaaaaacagatagcttcttataaattttctattcat

SEQ ID NO: 23344 - DNA, 893 bp, Zea mays
  Clone ID: LIB3595-041-B2_FLI
ctgctagctagctcttgtcttgtcactgagtgagcagaaggagtgtgtggtggagtgcaaaccaaatcaaacgaagaaaagtgggagcgaggaggaagaaaagaagaagaagaagacgacgacgacacccaccaccagcagcaagcagcaatcagcaaccagcataacgaaatgtcgatcaagtactgcgaccagcacaaggactgcgagcggcagcgtctgtaccgtcgcttctgcgccgccctggtgggcgtcatcgtgctcgtcctcctcatcgtgctcatcgtctggctcgtcctccgccccaccaagcctcgcttcttcctcaacgacgtgagcatcgtgtgcatcaacgtcagctccgcctcctacctcaccgtcaccatgcaggccacgctggcgtcgcgcaacaccaacgaccgcgtcggcatctactacgaccgcgccgacgtgtacgccgagtaccgggcgatgcagatcacggtgcccaccgcgctgccgcccttcttccagccgcccaacgacgccgccgtctgggcgcccttcctctccgcctccaacgtcccgctgccgccctacctcgccaccgcgctcacacaggacgagacggcggggtacctgctcgtcaccatccgcgtcgacggctggatccgctggaaggccggggccttcatcaccagccactaccacctcagggtgcgctgccccgcgctgctcaccgtcaacgacggacaaggaagctacggctccaacgccggtggggggctcggctacttcaagttccagcgcgcagcaccctgcatcgtagacgtctgagatcgatctcgattcaaaaatcacattaaagaagctcggccgggatgaattgaacaagaagcccttttctttttcgt

SEQ ID NO: 23345 - DNA, 787 bp, Zea mays
  Clone ID: LIB3595-041-C4_FLI
gttatcatctccccttgcgctggttgctgatccgtgctctgcttatcgaatctcctccttggccgcagggtccggcggcgaagggaaggcaagatgtacaccgcgaggaagaagatccagaaggagaagggccttgagccctccgagttcgaggactccgttgcccaggctttctttgatctggagaacgggaaccaggagctcaagagcgacctcaaggacctgtacatcaacaatgctatccagatggatgttaccgggagcaggaaggctgttgtcatccacgtcccataccgcctgcgcaaggccttcaggaagatccatgtcagactcgtcagggagctggagaagaaattcagcggcaaggatgtggtaattgttgctacaaggaggattgtgaggccacccaagaagggttcagctgttctgcgccctcgcaccaggactctgactgctgttcacgatggcatcttggaggatgttgtctacccagctgagattgtggggaagcgtgtcagataccgtctggatggttccaagattatcaagattttcttggacccaaaggagaggaacaacactgaatacaagctggagacctgcactgcggtctaccgcaggctgtgtgggaaagatgtggtctttgagtaccctatgaccgaaaatgcataaatatgatgccctctggatatctccactctatttcgttgattctgaatgttatgttgggtctccctatgtacttcaaaaacatagttttgatgctaaagttgcctagcaatttggt

SEQ ID NO: 23346 - DNA, 1149 bp, Zea mays
  Clone ID: LIB3595-041-D6_FLI
caatataaactagctgggatcaaatacaggagcacctcgagtctgagagaatggctaacactgctaagggtaaggtctgtgtcactggggcgtctggtttcatcgcctcctggctcgtcaagcggcttcttgagtctgggtaccatgtcctgggtacagtcagagacccagggaatggcaagaaagtagggcacctctggggcctggaaggcgcaaaggaaaggctgcagctcgtgagagctgatctcttggaggaagggagcttcgacgacgctgtgatggcttgcgagggcgtcttccacaccgcatcgcccgtcgtcaccggatctaattccaaggaggagatgcttgattcagcaataaacggcacgatgaacgtgctacgctcgtgcaagaagaacccatcgctcaagagggttgtcctgacatcctcgtcgtcgacagtgaggatcaaggacgaagccgacctgccccctaacgtgctgctggacgaatcgtcgtggagctccatcgagttctgcgaaagtctccagatatggtacgccgtcgcaaagatcctcgccgagaaggcagcctgggagttcgccggagagcacaggatcgacctcgtcaccgttcttccgaccttcgttgtcggacctactctgtctcctgagctcggccccaccgcttctgatgtcctcggcctgttccaaggagagacggggaagttcacgacgtacgggaggatggggtacgtccacatcgacgacgtggcgaggtgccacatgctggcgtacgaggccgcgggcgcccgagggaggtacatctgcagcgcggcggtgctggactgcggcgacctcgccgccctgctcgcgcggcggttcccagcgtaccccgtcccgaggagcctgccccgcgcctacggcgagcagtcgtacggcttcgacacgtccaaggcccgcgcgctggggctggcggaattcaagggcgtcgaggagatgttcgacgacgccgtcgcctcgttcataggccatggccatctccccgccgccgaggaacgccggcacgcgtagcctcttggtctgaaactacatgaatgaacgtatcatgtactaattaaattatttaatacttttaactagcatctaatcatgccgtttagtcttt

SEQ ID NO: 23347 - DNA, 863 bp, Zea mays
  Clone ID: LIB3595-041-E8_FLI
gtggaaggcgctcgtgacccggcccgtggagatggctggcgtgaaggagccgatcgaggtgaagttccggctgtccgacggcaccgacatcgggcccagcaagtacgatcccaacaccaccgtcgccgcgctcaaggagttcgtcctcgcccggtggccgcaggataaagaaatagctccaaaaactgtcaatgatgtgaagctcatcaatgttggaaggatactggagaatagcaaaactcttgctgaatctcgtgtcccagttggagaagttcctggaagtgtgattacaatgcatgttattgtgcggcctccccaatctaaaaacagtgagaagcaacagtcaaactctccgaagccaaacagatgtggatgcacgatattgtgacgttgatgcaagtagcaatgtgtatatcggtgtccacagagatcaatcacaagttcatttagcaattgattcaatctattcttcacaaccctgaagttcatttagagatggtgttacggccagtcacatatctggcttgagaaattgatgcttgcggtcgtgttcgagtgtgcaaggagttcacagggtcctggtaaaaccctgaaatcggtgtggactcaaggaattggatgtttgctattctgtaatgtgtggagacagtgataccagaagtgagttgctgcatagttacatcggagacaattcttttttcgtaactcggttgcgtgtatcagtatttctgttttgtaatagaaaaaggttgaccggctattgttggcataaagtggtaaggaatgggggtcccctaaggaatgctgtggtttgacatgggaagatgaaagtgaataatgagtaccattctggttcacctttt

SEQ ID NO: 23348 - DNA, 255 bp, Zea mays
  Clone ID: LIB3595-041-F7_FLI
cgagccatggagctccgcgagctgggcggtacgggtctccgcgtcagcgccgtcggctttggtgcctctccgcttggcaacgttttcggggacgtgccccgcgacaccgcccgcgccgccgtccgccgcgcgctcgacctcggcatcaacttcttcgatacctcaccgtactacggtggcacgatatcggagtcagtcctcggcgattgcctccgccacgcggccgttccgcgggaccgagtcgtcgtcgccacc

SEQ ID NO: 23349 - DNA, 1306 bp, Zea mays
  Clone ID: LIB3595-041-H3_FLI
gccgatggccaggtcgaccgtctcctccgcgcgcaggaggacgaccaggccgcgcgcatcggcgaggaggaggaggaggagcagatcgagtaccccttcttcaccgagggctcgcaggagcttctcaaggcgcgccttgacattgcacggtactcgctgccccgtgccaaggccaggatcgagagggccaagcgacgccacgaggaccctgatgaggatccagaggcggaggccgaactcgtcgtcaagcaggccggggagtttgtgctcgagtgcagtgagattggagatgatcgcccgctcactggctgttccttctctcgtgatgcatcgatgctcgccacaagttcctggagtggaatagtcaaagtatggagcatgccacaaataactaaggttgcaaccttgaaaggtcacacagaacgtgcaactgatgttgtcttctctcctgctgatgactgcttagcaacagcttcagctgatagaactgcaaaattatggaaaccagatgggtcacttttgatgtcttttgatggccaccttgatcgtcttgctcgccttgcttttcatccatctggaaagtaccttggtacagctagctttgacaagacttggagattgtgggacatcaatactggcaaggaactgctactccaagaggggcacagcagaagtgtatatggagttagctttcaccctgatggttctttggcagcatcttgtggtcttgatgcatatgctcgagtatgggatctgagatctggaagattgttctttacactcaagggccatgtgaaacctgtcctaggagtcagcttctctcctaatggttatctggttgcaactggaagtgaagacaatttctgtcggatatgggatttgaggaaaaggcaaatgttgtattctattccagctcataagagtattatttcacatgtgaaatttgaaccccaagaagggtattatttagcgacttcttcctatgacaccaaagcagccctgtggtcagctcgtgattacaaaccaatcaaaagtttggtgggccatgagtcgaaggttactagtttggatattagtggagatggacagaagattgtgactgtgtcgcttgatcgtacgataaaaatttggtcatgcagaagtagcacacaagataatgagatggaactggattgagacaattgggttcattgttgccagccccgcttctctattcatcagctagaagtagatattctccctttttgctgatcagacattccaatcagtcattggtgctattgcacggaactatttcatagcatgt

SEQ ID NO: 23350 - DNA, 719 bp, Zea mays
  Clone ID: LIB3595-042-C3_FLI
cgctgttgtctctgaggagaagaaaagacttgttgcttaccatgaggctgggcatgctttagttggtgcacttatgccggagtatgatccagtggccaagatatcgattattccacgtggccaagctggtgggctcacctttttcgctcctagcgaagagaggctagagtccggattgtatagcagaagctaccttgagaaccaaatggctgttgcacttggtggaagggttgcagaagaggtgatctttggagacgagaatgtgacaaccggagcatcaaatgatttcatgcaagtgtcgcgggtggctcgccaaatggttgagagattcgggttcagcaaaaagattggacaagttgcagttggtggagcaggaggaaaccctttcttgggtcaaagtatgtcatcgcagaaggattactcgatggcaacagcggatgtggttgatgcggaagtgagagagctcgttgagaaggcgtacgtgagagcgaaagagatcataacaacacaaattgatatcctacacaagcttgcacagctccttattgagaaagaaactgtggatggagaagagttcatgagtcttttcattgacggacaagccgagttatatgtttcttaaaatcaactaattggcttgtaataataccaattagcttcgatctatacatactgtatgttaatatacattgacatgttcagagacttttctttttctt

SEQ ID NO: 23351 - DNA, 885 bp, Zea mays
  Clone ID: LIB3595-043-D3_FLI
cccatcgagcccctagcgccggcgcccagcggcggtatggaggctggtggcgaggagttcgcgatcggcgtggtgctctccgccaagaccaccctgggggaggagttcgagggccagatcgtcgccttcgatcgaccctccaacctcctcgttatccaggagggcgtggggagggcggagagcggggagcggcggaacgtgagggtgctgaaggcgaactacatccgggagttctctgtgctcagcaagggagacgatcctctcgatcctgccggttgcatgctggaccttaactccatttatgcccgggaggatgctgcactcagaattttttcaggatttctgggatctcattaaaaatgatatttggaatatgtgtgatgatttcagcaaaggcaagcagagattgaagctgagagaattggtgttggtgtcaccccagaagctcaaaatatattcgatgcgctgtccaagacgcttccggtgcagtgggacaagactgacattgttgtaatgaaggaggttcgtgtacgcagcccgtacctgcccgaaaatgttagtggaggaacagctgcagcaaacgaacgtgttaagaaagtgattgactttgaaaggaaaagattacattcacgtgcacctggccaattctcttaacctaaaaggattgatttttttttttacattagcatgtgtttctgatactgcggcccgttttattattctcatcggtggggttttccataaaatatttcagcaaaaatgtggtaataatcacatcaactagcttgtttatgaactgtttgatagatgacatgttgtaattgaattgattataagccctctgtatttaggactgttagattgataataatctcctcttttttg

SEQ ID NO: 23352 - DNA, 718 bp, Zea mays
  Clone ID: LIB3595-043-G8_FLI
cctctctctctctctctttctcgcgctcgctttgcttcctcgtcgaggtccaagttcctgcattgatggcgaccgaggtggctgagactcccgcgccgttggcggaggcggtccccgagacccccgcggaggcaccggcggcgcccgccgccgaggcgaagcctaccaaggccaagaaggcctctgcgcccaagaagcgtgccaacccgacccacccgccgtacgccgaggtaattgcagcctttgtgccacgttagcttgcacccatgtcgtgtatgtcgcgtctggatctgacggaattgtggacggtttgctggtgcgcagatgatctcggaggctgtcacgtcgctcaaggagcggacggggtccagccagtacgcgatcgccaagttcgtcgaggacaagcacaaggacaagctcccgcccaacttccgcaagctcctgctcggccagctcaagaagctcgtcgccggcggcaagctcaccaaggtgaagaactcctacaagctgcccgcacgcgccccggccgccgccaagccgaagcccaagtccaagaccgctgtgaagaagcccaaggccggtgccaagaagcccaaggccgccaccaagcccaagccgaagcccaaggccaagtcccccgccaaggcgaagcccgccgcaaagcccaaggcagccgcgaagcccgccgctaagccgaaacccgcagcggccaagccca

SEQ ID NO: 23353 - DNA, 723 bp, Zea mays
  Clone ID: LIB3595-045-E6_FLI
ccctcgttcctgtcgcgcagccacgacctccacttccacatctcccccggcgtcggcgcggtcagttgaaccatggcggactccaaggccacctcggcggtcaccctccgcacccgcaagttcatgaccaaccgcctcctggcccgcaagcaattcgtgcttgaggtgatccaccccggccgcgccaacgtctccaaggcggagttgaaggagaggcttgccaaggcgtacgaggtgaaggaccccaacaccatctttgtcttcaagttccgcacccacttcggaggaggaaagtccactggtttcggcctcatctacgacaacctcgaggctgccaagaagttcgagccgaaataccgcctcatcaggaatggtcttgctactaaggttgagaagtcccgcaagcaaatgaaggagcggaagaacagggccaagaagatccgtggtgtcaagaagaccaaagctggtgacgccaagaagaagtaaacgttcgtttacatttgtattactgttctgggctctgggtggtctagctgcaatgtcataattatggtcgtgttaggttttgttccacccttggcactgaagtgattttttttgtaattcctcggcactgaagtgaagttttgtctgaatattgcctcgtaacataattgcccggtccctgttctagttgtggcgcagtctggtttgttttgacatttgttttcaaggttcatcctt

SEQ ID NO: 23354 - DNA, 741 bp, Zea mays; identical to SEQ ID NO: 23264
  Clone ID: LIB3595-046-A7_FLI

SEQ ID NO: 23355 - DNA, 1224 bp, Zea mays
  Clone ID: LIB3595-046-C7_FLI
cctgatgctatgctagctagtcagcccggccctggtcttagcagtgggcggtgtcagtgtgcgccatcgccccccactcagactcagccactgctgcagtccgccggctagtacacgtacgacaggctgtaccgaggttcagttcggtagtgtagttgtaggttgcgatggcgaggcggctgctggcggcggtcgccatagtagtcgtggccgccgcgctcgcgtgcggcgcgggcgcgcagctctcggcggggttctactcgtcgagctgccccgccgtgcacagcatcgtgcgccaggccatgtcgcaggccgtcacgaacaacacgcgcagcgccgccgccgtgctccgcgtcttcttccacgactgcttcgtcaatggctgcgacgcctcgctgctgctggacgacacgcccacgacgcccggcgagaagggcgccggccccaacgccggcggctccaccgtcggcttcgacctcatcgacaccatcaaggcgcaggtcgaggccgcctgccccgccaccgtctcctgcgccgacatcctggcgctcaccgcgcgcgacggcgtcaacctgctcggcggcccgagctgggccgtgccgctgggccggcgcgacgcgacgttccccaacagcacgggcgcggcgacggacctcccgggcccggactccgacctggccggcctggtggccgggttcgccgccaagggcctgagcccgcgcgacctcgcggcgctgtcgggcgcgcacacggtggggatggcgcgctgcgccagcttccgcacccgcgtctactgcgacgacaacgtgagcccggcgttcgccgcgcagcagcgccaggcctgcccgtcggccgacgccgacgacgcgctcgcgccgctcgactcgctcacccccgaccagttcgacaacggctactaccggagcctcatggccggcgccggcctgctgcactcggaccaggagctcttcagcaacggcgcactcgactcgctcgtgcgcctctacggcaccaacgccgacgccttctcgtcggacttcgccgcgtccatggtcaagctcggcaacatcggcccgctcacgggttccgcgggggaggtcaggctcaactgcaggacggtgaattcgaattcgtgacttcaggacggtgaatgccaccatttttaattctttttccctacaaggagttgtagaatttgcattccttcaacgatttcgaatttcg

SEQ ID NO: 23356 - DNA, 530 bp, Zea mays
  Clone ID: LIB3595-046-C9_FLI
ctaagtgtaagagcggcggatgcagttctggcccgcgcggccggcgtcgctcgtggggctcctgcacgagtacgccctggccccggccggtgggtggacgtgcccgtgctcgcccgcgacgagctgctcgtcgtcgtcggcgaggagatggagatcatgagcaacgcggtgttcagggcgcccacgcaccgcgtggtcaccagcggcagggagaggatgtcgctcgtgctcttctaccagccggagccgcacaaggacctgcagcccgcggaggagctggtgagcgaggaccggcccgcgatttacaggaggctcaaggccaagaccttcggcgacgggttctgggatgcgttcgcgctcggcgagcgcaccatcgacttcctcaacatcaaggtcgacgacaaggagcatggaggcggattagtaacctcagcgccagcttgacgccatgcatgtgaacgaactactgtacacgatgtatcactggtagtgtaatgtaataagagacatggagcggttttccatgcaat

SEQ ID NO: 23357 - DNA, 1056 bp, Zea mays
  Clone ID: LIB3595-046-F8_FLI
cttaacaccccagctggtgccttgccctgtggtcctcgctccttgatccactcctcctgcagctcctcctcgcacagcacgtctcctctccccagcctccctctctttctctgtccttggtcctctccccagcagcctccctctctctttctctatccctggtcctctccagataacctgacacagtggtcacgcttgacaaggagagagaaaggcgttgcagcagctgatccgcgcccgcccggccgggagcgcggcgcaggaggcgtcgagcagcgaggtgcggcggcggcggtggcgagctggacggaggaggggaccacaagaagcggcggctgaccgacgagcaggtagagatgctggagctgagcttccgggaggagcggaagctggagaccggccggaaggtgcacctggccgccgagctcgggctcgaccccaagcaggtcgccgtctggttccagaaccgccgcgcccgccacaagagcaagctgctcgaggaggagttcgccaagctcaagcaggcacacgacgccgccatcctccacaaatgccaccttgagaacgaggtgatgaggctgaaggacaagctggtgctcgccgaggaggagctgacgcgtttcagatccgcgggcaaccacgcggtctccggtgacggcggagacgtcatggcccgtgccgtctgcagcgggagcccgagctcatcgttctcgactggcacctgccagcagcccggaggaggcggcggcggcggcgatcacctgggggacgacgacctgctctatgttcctgactatgcctacgctgacagcagcgtggtcgagtggtttagcctgtatggactgatgtaatcgatggtatggtatgccatcgtcgtcggcagattaattctagctagctactcatcgtagcgtgtcattgctgtgctgaattgctgatttctatgtgcgccctcttaatcatatgtacataaatcaagctatcaattactggcaaaatatagccagctagcagcaactagtactttaattcagatgtgtgttcttactgctaccc

SEQ ID NO: 23358 - DNA, 620 bp, Zea mays
  Clone ID: LIB3595-046-G4_FLI
cgcgaggaaagtctccagaagaagcgctgcgatgggtttcccgcctccgccgccggtgtgccgccgatgggccactccaccgcgctccagcagaagtcccccaatcgaagaggtgatcagcacaggagtggtgtcgcgattcattgagtttcttacacgtgaggaccatccccaactccagtttgaggctgcatgggcactcaccaacattgcatcaggcacatcagagaacactaaggtggtcgttgagagtggtgctgtgcgcctgtgcccatctttgtcaagctactcaactccctcaagcgaggatgttcgtgaataggcatgcactaaattacaagagatgtgtcttattatgacccggggcagatccagaatttttctatgacccaagccaaatctaccaaattttcttctttttattttatcttaactattttgtaccatattaaatagagacttatatagagttacatggatcaagccctgggccacagatcgggtggcctgtggtgtagatctgccactgattatgactatggatgagacttttgtgatgtaattgatgagactatggatttaaatattgttatgtgattgtgtgtgagatattttatgtg

SEQ ID NO: 23359 - DNA, 624 bp, Zea mays
  Clone ID: LIB3595-048-B9_FLI
gcgcgctttcctcagagcggaagcgcgtgggcgtcgaccagctcggcctcttctacaccgccgacaccatcatcggcaacaggggccaccacggcacgtcctcggcagcggcgacctgtacgcggtgtgtgctggtgatgcaagtggcggcgtgggcgtgggcgtgggcggcctatacgaggtcgtgtacaacaacgtcgttagtctatgtgtcaaggccattgggtggaggcccgagcggaggttcaagtggaagctcctcgacggctcgacggggagaagaggagcgcccacttccctatggtcctggtccagatgcccatgtataacgagctggaggtgcataagctgttagcggcagcatgtgagctgcagtggtcgaaggacaggataatagttcaagtggtggactattctactgatccctttatcaagacctgaagatgaaagaagagcaccggcccactttgcttcataggaccactatatggaatggtatgcagttggtggactctggcttttgtagcgtaacatagtggtccatggtgcacttagaaaggacaatctaatcatgatgcaatgacatcatatgtgattcatgatatagcatcgacatcatggttc

SEQ ID NO: 23360 - DNA, 938 bp, Zea mays
  Clone ID: LIB3595-048-C11_FLI
tccaaagtcgataccatcaaaaagaaaaatcaagtcgacaccatccaaaaaaaagagccagcactatcaggagaactgatggtttatcctgacagacctagtgaacctgactgccccttctatgtgaaaactgggtcctgtaaatttggggcaaactgtaagtttcatcacccgaaggatataactccaaacatgcagggtccagcaagtccaaaaaggtcggtcgctgcaaaagagcaccacgcagcagctagagcgacattacaagaccagatgtaccagcaacaaaaattccctgagcggcctggccaaccagattgccggtactacatgcaatttgggaaatgtaaatttcaatcagcttgtatattcaatcattcaaaagacatactttcaagtgggtggcatccagcagaatgcccattctacatgaaaactaggacatgccaatttggatcagcttgtgagttttatcacccaaaagatcggtgctcaggcagagggggagtgattgatggtactgactatggacatgattttgccacgaagtcacggaatgttctgcaggaactggcaatatatcctgaaaggcctgatgaacttgagtgttctcactacatgaagcatggctactgtaaatataagatgaactgcaaatttcatcatccaagagatcgtcttccaaagaaataggaccatttgctacaaccactgttgtaactggctgtcgttgatgagtggagcaagtactgatgatgggacagaaatgcaggaaggaagccatagtcttccttttttgaagagctcgattctactcatgtctatgtcgaatttctgccctagtgtcgttagagttctcgtaccagatgcgaactgcctggtggcttcccaactcccgttcattcatatactaccaaacattgctgtgatctagatct

SEQ ID NO: 23361 - DNA, 936 bp, Zea mays
  Clone ID: LIB3595-048-D10_FLI
catctcctccattctcctaactccagcaacgaacaggcttctccggcccccctcctcctcattcttctatcatagctagctagctagcttcacatcagcagctacatactcacactcaccgatagatacagacctcagagcaccacactcctagctcagagcacgcatccgcatggacagcctcttctccccgcgctgcgtgtgggtgaccgggcccatcatcgtgggcgcggggccgtcggggctagccgtggcggcgtgcctgcgcgagcagggcgtgccgttcgccgtcctggagcgcgccgactgcatcacctcgctgtggcagcggcgcacgtacgaccgcctcaagctgcacatgcccaagcagttctgcggccagctcctgcgtatgccgttcccggacggctacccggagtacccgacccgccgccagttcgtcgactacctcgagcgctacgccgccgagttcaagatcaagcccgagctcggcaccgccgtgctgtctgcgcgctacgacgagacgtcgtcgggcatctggcgcgtcgtcaccaacggcggcgacatgaagtacatcttccatggggccactggagatacggctggtggaagccggcgccttcgacgcgctcatggacctgttggtcagccagggcggctccatcaaccagtacgagacgccacggtgcatcgagccgggcggcgccgcgctggagctgctcgactccaaggccaccgcctcgttcatcagcccgtgccccgtgtaagctttcgggcttctggtgactgaggttgttccgagctcgatctgctactctaaagctagctaatcctctgctggatctaaataatctgagaattttcgtctgggttatcccgccccgttacattgtacttctgtgaggctttgctactatgcaaagaagcctttttctt

SEQ ID NO: 23362 - DNA, 193 bp, Zea mays
  Clone ID: LIB3595-049-D11_FLI
ctcttctcttccaccaaaccaagtgcggccagagaaatttctcccaaatttcagatcaaatcctcgaaatctccgacacctagccccccggagacttctcctcaacagtgtcgcgatccgtctcgatccggcatggagcgcgtcttctccgtggaggagatccccaacccctactgggttccgccgcaccctc

SEQ ID NO: 23363 - DNA, 940 bp, Zea mays
  Clone ID: LIB3595-049-E4_FLI
ctgaagaagctaagatcaacaacccaagcaagaacctgaaaacctctgcagtgaagtgtggagaggcaaatgactgtttcctaaccagacggtctgctgatcaatctaatgacaagaaatttagcaaaaaactgtgtagctctgcggtacaagctactgacagctgccagaacatttctggaatgaaacttcctacctctgttggcgtggctgtagaacaaagtaccagcactgcattctcggaggccacaaaagtgtataaagagtttgagaagcaggttaagaggactgtataccttgacaacttgtcttgcctagctacagatggagtcattacgacggctttgaaccagttcggtagtgtcaaacacgttagttttctgaccaactatacagttccatttgacattcccaaatctgcattagtagaaatggaaactgagaaggatgctgattctgtggtcaagatactagatgagttcccattcatgatatctgggatgccaaggcctgtgagggcgaagcatgccacagctgaaatgttcaatgaccgtccatgtaaacctggtataaagttagaattccgttgggtgggccctacagaccctgattatcataatgtcagaaagttcaagtttttgtccaagaggcatgagttggagaacttagcactgatcaagaatgaactgcgagaggagcaacttctcgcgaggcatcagcaggacaatctaaattttcattacatgaagcttgagactgtagacagcatgattacgagtggctgcatcaatcgcctgactcacatttacaacctccgtttcgctgacatgtattgagagtgtcaggtgtacatggacttgttttgacctcggaacatacctgttgggtggaattgagctgtgaacatgatgttacgatctgattaaagtctgcttttaat

SEQ ID NO: 23364 - DNA, 217 bp, Zea mays
  Clone ID: LIB3595-049-H1_FLI
gcagctcctctgaggttgctcgcgtttcttggcggtgcggggctgttcttcctgggcccttgaacgaagatataaaagaactagcgatgtgatccgcgtaaatatatactccgtatatagcatgacatgagtatctagtttgtcttatatggtaaaccatactaaattttcttgtatggcattaaaaaaaattaagactttatttagttatttgact

SEQ ID NO: 23365 - DNA, 1243 bp, Zea mays
  Clone ID: LIB3595-049-H3_FLI
tttatatgcaggcttgcgcctgtcacttctcccctgtccttgctccccctcgatcccgcatcagtgcgtcacattcaccgggaatggcaacgctcaaggtcccagccactgttcctcccgtcgccgatgactgcgaccagctgcgcaaagcattccaagggtggggcacgaacgaggcgctcatcatctccatcctcggccaccgcgacgccgcgcagcgccgcgccatccgccgcgcttacgccgaggcctacggcgaggagctcctccgctccatcacggacgagatctccggcgacttcgagagggccgtgatcctgtggacgctggacccagcggagcgcgacgcggtgctggccaacgaggcggcgcggaagtggaagcccgggaaccgtgtgctcgtcgagatcgcctgcacgcgcacctccgcgcagatcttcgcgaccaggcaggcttatcacgagcggttcaagcgctcgcttgaggaagacatcgctgcgcacgtcactggggacttccgcaagctattggtgccacttgtaagtacttaccgctatgatggaccagaggtcaacacaaggttggcatactcagaagccaaactacttcatgagaagatccatcacaaggcttacagtgatgatgagatcatcagaatcctcaccactaggagcaaacctcagctgattgctacattcaatcattacaatgatgcatttggccaccgaatcaacaaggatctgaaggctgacccccaggacgagtacctcagaacgctgcgggcgatcatccggtgcttcagttgccctgacaggtactttgagaaggtggctaggcaggccatagcggggctaggcacagatgagaactccctgaccagggtcatcaccacccgcgctgaggtggacctcaaactgattaaggaggcgtaccagaagaggaacagcgtgccgctggagcgggccgtcgcgggggacacctccggcgactacgagagcatgctcctcgcgctcctggggcaggagtgatgagccgtactggtgcgctggtgcctttctgaccggcgccgtggtgtttgttcgtgatcgtaataaacctgattgcctagctgtacgtgaggctgtttcttcggtcctggtactgtcgctgcagcatgcatagcagtggaccagtggtgataaataagttactgtgctttcgacgaatgaaccctttttttgtgtctaagttgtggaacctcgag

SEQ ID NO: 23366 - DNA, 474 bp, Zea mays
  Clone ID: LIB3595-049-H8_FLI
catgggggtggaactgcagctcccagctcggacggtccagccaagaggacatccctgcactggtggactctctgagcagggagaggctggtatcggcctcggctggtcgagtccattcagttgctctaacgtcgaaaggtgaagtttggacctggggatcgggcaggaatggcaggctaggcctgggcagctccattgatgaggcggcgccatgtcttgtagataccctggaaggggtggaagtcttgcaagttgcagcagggatggaccataatctcctcctggttgccgagtaggtataggttggtatgctggtgaactgaaagatggtactccatttgttcttaactagctgaatgctcgtgcgttgcaacggaaatatataataccagtatactacgataacttatatacaaaatgtgtgttataccgttataagaaaatgtttcataatcaatttgtgattctggccat

SEQ ID NO: 23367 - DNA, 245 bp, Zea mays
  Clone ID: LIB3595-050-A1_FLI
ctggtcaggggaaactgggaaaagtaatgattttgtccccattttctctgtaatatttttttttggcacgagatatgatgcgatcgagcgcgggagcgagttttgagtatggaataaggccctgttccaagaatgcgaagtagacgccggcactgttggttttggggggtggtgatgtatttcttattatgagattagatgtgaatagtgtctagtcagtatcgtaatctgaacgtttcatgctc

SEQ ID NO: 23368 - DNA, 595 bp, Zea mays
  Clone ID: LIB3595-050-D10_FLI
gccgttctctcacctgctgcatcgctgcttccgcctccgccctacaaggctacaccagatgcccagattttcgtccggttcttctccggcaacgagcagccaccaggtgtcttggtatttgcaaacagtgacaaaaggttctgcttcgctgtagagtcatgtctgcaaagatacgcgtagtgatgaagtcttttatgagccaaagcaaccaggtctcagggcttatgccattcacaaagaagattggactacctgaatcacgagccctgtacaccgtgttgcggtcacctcatatcgataagaagtccagggaacaattctcgatgcatgtcaagaaacagtttgtggaacagacagccaaaccacacgaacttcacaggaagttcttctggttaaaacgcctgcggatacctggggctcagtatgaaatccaaatttctttcaagacacgtctcgatatggcgagcctaaggtcccaagctccttgctgactctcagatcttccttaccgtcctgaatgtttgaagtgacttgtatccatcgacatttcatatgttatgaagacatgcttattttgatggcttttgaaaaaaac

SEQ ID NO: 23369 - DNA, 2658 bp, Zea mays
  Clone ID: LIB3595-050-F4_FLI
ttgtcttcggtgttgcagacgtgttcttcccacgcatgcttttaatctttttaaaatctccatttgcgtaagctcagtctgcagtttacaaatgctttgagtcctgcgctcctgtcctgctgttcttgtctagcagtaaacaagtcatttcctttgttgtcacatggtggctcgccgagtgctggtgcacacattctctcctcgttccaccttgctgctgctgctgcagttcttggcacggccttgtattgtatgaatatgattgtatcacatgccatgtgactatgtgagtagctgaccacggctcactgcgaggcgcacaggtacagcagcgcaggcgcagcggcagcccgccgctggatctctcccgaggctccggcgatggagcggtcctgctacttcccgctgcggtgggagagcacgggcgaccagtggtggtacgcgtcgccgatagactgggcggcggccgacggccactacgacatcgtccgccagctgctgcacctcgaccccaacctgctcatcaagctcacctccctccgccggatccgccgcctcgaggcgctgtgggacgacgacgcccgcttcgccgacgcggcccggaaccgcgcgtccgtcgctcgcagcctgctgctggagtgcgagtgcaggaaccaccgccccgccgcccccggcgccggggagaacacgctgctccgggccgggtacggcggctgggtgctctacgcggcggcgtcggccggggacgccgcgttcgtgcgggagctgctggagagggacccgctgctcgtgttcggcgagggcgagtacggcgtcacggacatgttctacgcggcagccaggggcgggagcgcggacgtgttcaggctgctgctcgaccacgccatgtcgccgaggtgctcgacgagttgccggaacggcgaagccagcgccaggcgcagctccgtgttccggcttgagatgatgagccgggccgtccacgccgcggcgaggggcgggagcgtggagatgctcagggagctgctcgaggagtccagcgtgtcgacgtatctcgacatccgtggatccaccgtgctgcatgccgccgctgggagagggcagctgcaggttgtcaagtaccttgtggcctctttcgacataatcaattcgactgataatcacgggaacacagcgctgcatgtagcggcctaccgagggcaccaacctgtcgtggaagccttggttgctgcgtctccatcaaccttgtcagttgtcaacaacgccggtgacacgtttctccactcggcagttacaggattcaggaccccaggattccgacggctcgaccgccagttggagctgatgaggtacctcatacgcgagagaaccgcggatatccagaagatcatcaacctgagaaacgacgcgggccttacagctcttcacctggctgtggttggctgcgcacacccggatctcgtcgagctactgatggccaccccgtccatcgacctgaacgctgaagacgctaatggcatgaccgcgctggcgctgctgaagcagcagctgcgctcagcgacgtccgaccggctcatcaagcagatcgtctctgccggaggggtcttgaactccagcatcctgagaacccggtcagccatcgcttctcagatcaagatgcagggcgggatcgcgagcagccccggcaccactttcaaggtatcggatgcggagatattcctgttctccggcatgggagcggcggagtctctgaggccaagctcctgctccagcaacgggaaggatgatgaccctactcacgcagacgcagactgcgccgagaaccgtggatcgtcggagaagaggctgagctccgcgagccgggccaaagaccgcctcaagatgatgctgagatggcctcgccacaaggacaagacgcccaagaagtcagaggacagcagcccgctggggtcgatcagcaggctgaacgagcacggggccgagacccctgctccgctgaggcagaagtttaccaagacgacggcgctcaacggcaagcggaccctagcggtgaagagctccaccccgagctcctcatccaccaagaagaagctcaacacgaagctcatccacggcatcatggaggccatgccacagctggcgccatctacggcgcggtccgcgtccccgacggacactttcctgaggtcctcggtatcgtccacgccgcagccgctggcgaagctgaaggacatctgcctcgacgacgagatctccatggtgacgccgcccgccggcaggctgaaggatagtgacgacgccatggaggacccctcgtgctccaacaactcgtccatggacgacggctgtggcgccgggacggcagagagcgcggcccggaagcacgggtgcggcaacgggaggctcatcaacatctgctttggcgcgcagggcctcaccgtggaggactcggcgagcgggcagcagacgagcaagatgttcaagcagcagtgcctcagggtgtcctgattgacggcgtggtgtctcgactacaacagcgtggtgtgattggtttggtgtctcgcgtgcagctatgtgtgcttgtttgctttgctccttgcacagccagcggtgaactggtgatccaatgaacttgtgcttgtgttaactgtgacgttgacg

SEQ ID NO: 23370 - DNA, 1639 bp, Zea mays
  Clone ID: LIB3595-051-D3_FLI
ccccacttcaccgcgcggaaaaaacaaagagattcccctttgctctacaggaagcgccgacgccgttgatggaattcggaaggaccaaagctgctgccgtagccctgatccccgaagcgaccttccgccggtccagtctgtccttctcggcctccgcgacgccgtggtcccgggaggtgtgggtcaacgcatccaaataacggctcttccagaggaaaacactgctgaatttctcagctggtgcctagtggtgggaaataaagctagggacccagcatccttgtgatagcaatcacatcattggtgttgttttttcagcttacgctgaaactagactgatcaagaaggcgaccagctgtcaaaatgcatagacagaagaacccaaactctgggtgggctgcgtttgatcgcaagcagcgcagtgcagatggcagtgggtatgaaggtgatgctgatccatttccgtctctctcaaattctggagcctctaatattgctagtagctccattacagaaaagaatgggctaaaacgaaagccctttgcttcagtggttcgcccttctgttgattctggagctgttagtactggatgcggaaataagaattctgctaatcacgtggacagcgggaatcacggtgcaatctctgcacctcttaataaagttaagatcttgaaagatgcacacagttgggccgacattcacttaattgaggatgtactagctgctgtgaataatgatgtcggacaagcatctgatttgttgaaagttatggactctcctgccttgcagactggagagggcagaacatctggccaactggctgatgtgatgaataaaacacacggatcaccatcagaaagtgctgcagcaggcaaagcaaatccagatagctcacagttgttgctgcccctgatgaactttccctctatacccttgcagcctgaattcgaagatattgatgatgaatacttcagctaccggaaagatgcattgaaaatgatgagggctgccacaaagcattcccagtctgccagtaatgcatttttgagagatgaccatgctgctgccaaggaactttctctcagagctcaggaagagcgggcagctgctgaaaagctaaataacaaggcagcggaagaaatttttcgccttaggaatagcaataatgacatctggaagatagacatgcatggtcttcatgcatcagaggctgtggcagtattggagaggcatctccacatgatagagttccagcaacctgggaataagtcagcctcatctgaggacttagctaagttggaatctgcatattctgaatcaaccactggttcaaacattgagcttgctgctgagaaggtggtcttacgccggcctaagcagtctatcttacatgtgatcacagggatgggtaaccatagcaaagggcaggcttcactacctgttgccgttaggggtttccttattgagaacgggtatcgatttgatgagctgaggcctggtgtttttgcggttcgtccaaaattccgccgcaggtgaacctgtggaagtttgtacaattgtaacatggtggtggcttggggtgattatgtgctctaaattttacactaaaatttaaggatcaaatcggattaggatc

SEQ ID NO: 23371 - DNA, 1840 bp, Zea mays
  Clone ID: LIB3595-051-D9_FLI
gcttgatatctctgggaatcgcttcaatggaagcctccctgatgatattgcctccttatctggcctccgagttctcgacatctcaacaaacaatttctctggcccactacctgctgctgtgagtaagcttggagctctcactgatattgatatatcaacgaatcagttcacggggccattgcctgaggatcttccggataacctccaatccttcaatgcatcctataacgacctttccggtgtcgtgccagagaacctgaggaagtttccagaatcttctttccatcctgggaactcaaagttagaatatcctgctagctcgtctggatctggcagttccccatctgggtcagcaggtggaaaatcactcagtacaggtgctaaagcagcaatcgtagcagctagcattgttcttcttgtcatcctcatacttattgccattgtatgccactacaagaggatctcacggcagttttctagctctgaaaaggtttcagacaagagcctccacaggaccactaaagacagtgctgtcatgcaaggaaaggacaacaaaggtggtttggtgtcagcagatgagcttgccactcctcgaaaagggtctacatctgaagcactcagccaggaagagaagtcagccgcggggggcttctcgccgtccaagggcagccggttctcgtggtcaccggactctggagaggcatatgggcaggaagggctggcgcggctggacgtgaggtcgcctgacaggctagcgggggagctgcatttcctggacgagacgatcacgctgacgccagaggagctttcgagggcgccggctgaagtcctaggcaggagcagccacgggacttcgtaccgggcgacactggagaatggcgtgttcctgaccgtgaagtggctgagggaaggcgtcgcgaggcccaagaaggagttcgcgaaggaggccaagaagttcgcaaacatccggcatccgaacgtggttggcttgcgtgggtactactggggcccgaccccgcatgagaagctcatcttgtcggattacgtcgctccggggagtcttgcaagcttcttatacgatcgaccaggaagaagaggtcctccactgacctgggcgcagcggctgaagatcgcggtggacgtggcgcgcggcctcaactacctccacttcgaccgcgcgatgccccacgggaacctcaaggccaccaacgtcctgctggacgggctggacctgaacgcccgcgtggccgactactgcctgcaccgcctgatgacgcagtcgggcgtggcggagcagatcctggacctaggcgtgctgggctaccgcgccccggagctggccgcgtccaagaagccggcgccctcgttcaaggccgacgtgtacgccttcggcgtcgcgctgctggagctcctgacgggccggtgcgccggggacgtcgtctcggggcccgagggcgccgcaggcgtcgacctcaccgactgggtccggctgcgcgtggcggaagggcgggggtccgactgcttcgacgccgccatggcctcggactctgagagcaacccgcaggctgtgaagggcatgaaggaggccctgggcattgcgctgcggtgcatcaggccggtctccgagaggccggggatcaaatctgtgtacgaggatctttcgtcgatctagctagtcggtagcgctagcctcgtcgcgtaggcgtagcttttagattaacactgcgtgttaaaattgtgtgcgtgttcgtcttgaactcgtagaactgcgtagcgaatccaagtgttattatggcctcaccttgatgccagcaatttgaaatgaagaatgtgttgcatt

SEQ ID NO: 23372 - DNA, 1332 bp, Zea mays
  Clone ID: LIB3595-052-A12_FLI
ccatcgcgaacgagatcacgggctggtttcgcgggccgaccatggggacgctcatccggccggggcccgccgcgtcgcctctccccatcgcttccccctcctcctcatccgcccacgtggctgtcgttggcggtggcgcgaggagcttgcggcatcgggtgtcggtgtcggtggcggtgttccggtccccgagtacgcaggttctggcgacgagatggcgccgccggagaggtatggttgtgcggtcggatgtcgtcgccggtggcgcagccgccgcggcagctggggattcgacgcgggcgctcccaggtcagcaattggcttcaagagtcagaggggtttgcttctatttggtgactgcagttgcagcaatctttttgtttgtagctatggttgtggttcatccacttgtgttgctatttgaccggtaccgtaggagagcacagcactacatcgcaaagatttgggctacggtgacaatctccatgttctacaatcttgaggtcgaaggaatggagaatctgcctccaaatagctgtcctggtgtctatgttgctaaccatcagagcttcttggatatttatacccttctaactctagggaggtgcttcaaatttataagcaagaccagcatctttatgttccctattatagggtgggcaatgtatctcttgggtgtgattcctctgcggcgtatggacagcaggagccagttggattgtctcaaacggtgtgtggacttggtaggaaaaggagcttctgtatttttctttccggagggtactcgaagtagagatggcaagttaggtgtatttaagcgtggcgcattcagtgtcgccgcaaagacaggagctcctgtgatagctattactcttatcggaactgggaaattgatgccttctggaatggaaggaattctcaattcaggttcggtaaaggtgattattcaccgacctattcaaggcaatgatgcagaaacattatgttccgaagcaaggaatgtgatagcagacactcttcttctgcatggttatggagcccattaaagcaagtggggtgctttggtctgttttttcttctgaacgagtgctttggtctattctttagtggacttttcagagcacaagacttgagagttgagacaaagctcgttgcagatgtaatcctgtaaaggcaagagggaggaaaatggcgtgaattggcggttgtaacatgtggtcttcaatttgttgtaaaccctacttatttttgttggtttgatagtacaaagaaatgtaaaaggcagaggccatcttcattggatggaaaatgaagctcacgtgatattttgcc

SEQ ID NO: 23373 - DNA, 236 bp, Zea mays
  Clone ID: LIB3595-052-A9_FLI
cccttgtttgccctctctgtaggagctcgtcttctttagaacagttgccatctctgtcaagagtttgctaatgctatgttagatgagtttctcacgtggctgaaacgtttcagagagtttgcgttagtttggcttgcctattataccttatctggccttagctttttctatggaaatctgccttgaaatgtctgatccgtgattatgcaactctatctaaactactgttatgctgc

SEQ ID NO: 23374 - DNA, 662 bp, Zea mays
  Clone ID: LIB3595-052-C10_FLI
aggctggtacgactgctagccttcctcttcctggtctgcgcttgcctcgtgatggccgccatggtggcgacgacggacggcggagcgagcttagcagggccgtcgtcgaacagcgctgcgtcgtccgccacgaagacgggcggctcgccggcgtggcgttcaggcgggacggccgcagacgcgttccggagcagcgagaggaggatccccaaggggcccgacccgattcacaacaggcgtgccgggaagacgacgaccgcgccgcgccggagagactagctagccggaggccggccgggggcggcggcggcggcggcaacagaagctaccactgccggtgctcatcgtcctgcacctgaagcagcagcagcagctgatctgatcgacatacagttcgtgttcggcagctagcccctagccatgctcggagaggtttaattaattacgcagcggactccttcgatgggggtggatttttggtgatcattctgggggtatgtataaacctgcaacctacccttgcaaggattagtttttcttcttctgtttttcttctttcaagtttcaccgaggtggagtggaggttgaccgacattctgttcttcccgcatattcttgtgagattttgattccaatcagtgtctatcaattcaatttcgatc

SEQ ID NO: 23375 - DNA, 1375 bp, Zea mays
  Clone ID: LIB3595-053-A5_FLI
caaacaaattgtttactagcctaagtgtaagagcagcacgatggtgcatcaggctcagggacagatggtgcaggaggtggccgccgccggcctccccgcgctgccgagccggtacgtgctgagggaggaggaccgcccaactggtgacgtcgcggcacccgagttggccttccccaccgtggacgtcaatgtcttgccgaccccggtgacgtggaggaggccagcaagctccggtcggcgctcgaatcctggggcctcttcaaggtgaccggccacggcatgccggtatccctgctggacggcatccgggacgccgggctggagttcttccacctgccagcggcggagaagctgaagcacgccaaccgggacgacgccggcgagttccagcccgagggttacggcatcgaccgcgtggacaccgacggtcaggtgctggactggtgcgaccggctgtacctgacggtgcagccggaggaggagcggcggatgcagttctggcccgcgcggccggcgtcgctcgtggggctcctgcacgagtacgccctgggcagcgagcaggtggccaggcgcgtgctccgggccatggcgcgggtgctggggttcggcgaggggttcttcctcgggcacgtgggcgagaagggcggcacgtacgcgcggttcacctactaccctccctgcccgcgcccggacctcgtgtacgggctgaagccccacacggacaactccgtcgtcaccgtgctcctcctcgaccgcgacgtcggcggcctccaggtgctgctcagggggcctggccccggccggtgggtggacgtgcccgtgctcgcccgcgacgagctgctcgtcgtcgtcggcgaggagatggagatcatgagcaacgcggtgttcagggcgcccacgcaccgcgtggtcaccagcggcagggagaggatgtcgctcgtgctcttctaccagccggagccgcacaaggacctgcagcccgcggaggagctggtgagcgaggaccggcccgcgatttacaggaggctcaaggccaagaccttcggcgacgggttctgggatgcgttcgcgctcggcgagcgcaccatcgacttcctcaacatcaaggtcgacgacaaggagcatggaggcggattagtaacctcagcgccagcttgacgccatgcatgtgaacgaactactgtacacgatgtatcactggtagtgtaatgtaataagagacatggagcggttttccatgcaatataatctagtttatcacaggatctggttggtgttgatgtgcaaaccgtaaggagccgttctgttgtgtagaaatggtgacctgaaactattccaaaacgaattactttttaaatttatataagttttgaac

SEQ ID NO: 23376 - DNA, 554 bp, Zea mays
  Clone ID: LIB3595-054-C11_FLI
ctggtctgccattccctcgctccttcccgtgaaccacaaacctaacgcggagcggcgcgggccggccgccgggcgaggtgcgcgtagctgccgtcgattgtcgccggatccatccaccatgggcggtggcaacggccagaagtccaagatggcccgcgagcgcaacttggagaagaacaagggggccaaggggagccagctcgagaccaacaagaaggccatgagcatccagtgcaaagtgtgcatgcaaacattcatgtgtaccacgactgaagtgaagtgccgggagcacgccgaggccaagcatcccaagacagacgtgtaccagtgcttcccccatctgaagaagtgaaaggcctgaacttagcaaccagtgctggtttggtcactacgatcgggccagggggcgttccttgtgttgagggtgttcattccgtgttatcttcccgtcagtcatgcgtcctgtcctatgttaacctacataagaaagcgatgtggtgtccacttctagtgaaactactgtctgctgttaaaacctggttggtttcagaacg

SEQ ID NO: 23377 - DNA, 1013 bp, Zea mays
  Clone ID: LIB3595-054-C3_FLI
cttgttagtggtagcaagtcgggagaacttatattatgggacccaaaaactgggaaccaattgggcactccacttatgggacacaggaaatggattactgctgtatcatgggagccagttcatttgcagtctccgtgccgccgctttgtaagtgcaagcaaggacggtgatgctcgcatttgggacatcaccacaaggaaatgtgttatttcccttacaggtcacactagttcagtgacctgtgtcaagtggggtggagatggtttgatttatactggttcccaagattgtttaatcaaagtatgggaaacttctcagggaaagttggtcaaaacattgaagggtcatgggcactgggtgaattcgcttgctttgagcacggaatatgttctccgtactggagcatatgaccacactggcaagacattttcgactgcagaggaaatgaaagaggctgctcttgcgagatacaagaagatgaggggtaatgctccggagagactagtttctggttctgatgattttacaatgtttctttgggaaccaacaattagtaaacaacctaaagctcgcatgactggtcatcagaagcttgtaaaccatgtttacttttcccctgatggacaatggttggcaagtgcatcctttgataaatctgtcaagttgtggaatggtatcacaggtaaatttgttgcagcattcagagggcacgttgcagatgtctaccagatcagctggtctgccgacagtaggcttctactaagtggaagcaaggattccactctaaagatctgggatattcgaacacacaagttgaaaatggacttgccgggccacgcggatgaggtgtacaccgtggattggagccctgacggtgaaaaggtggcgtctggtggcaaggatcgggtcctcaagctatggatgaactgattgattattatatatctatgcttgggcgaattatatattgtagtgatgataattttgaaggtatactgagatcaattaattgt

SEQ ID NO: 23378 - DNA, 583 bp, Zea mays
  Clone ID: LIB3595-054-E10_FLI
caacagcctgcgacacttgctagcctgccaaggagagaggacgctgaggcttgtgccttctacatgaggtctggcatgtgcaggttcggtgcgcactgcaagttcgaccaccctcctcgcgaggaggctatttccgagctgcaggcagccggaaaggaaggaatagaagggccgagcctcgtccagcgcgaccatgatgtctaatactgtatcctgcttcagtatgtaataccatgtgaatcgcactgttagttaatgcttggtgctttcagtcttgttgggagtctgactcgtaaagctcattatcatcggaagtgtttgtcggaggagtgctggcactaactatttatcttcagttggttgtcgtgttgccaacttgcgatgtcaaggtgcatatttcagttttttagagtaaaaatgcactttacatcctgccgccaaacttaactatgggcctgtttatggccctgtttggtttagcttttttttaccagcttttctaaaaatctggttgtggaaagaatttgagtatcgtgaagattacatgtggagaagatgaagtggtccaaagggtccatgatct

SEQ ID NO: 23379 - DNA, 308 bp, Zea mays
  Clone ID: LIB3595-054-E2_FLI
tacagaatagggtacgtcaggtattggcttctgttcatcctactgatgatgcttaaggaatgtatacaagaggacggatatctatgctgccaaacaaaaaaatggggcacaaaagaatttagtgcctgtttttgggaagtgatgtgaactgaatcctggaaggggcaaaaaaaaaaaatgttggaatccaattgttgaaaattcttcattctaaacatgaggccgttggtaaaaaatgtctacatgctgtaaacatactatattttgacattattatcacagttaatatatactggacatgctgtttt

SEQ ID NO: 23380 - DNA, 605 bp, Zea mays
  Clone ID: LIB3595-056-E1_FLI
tcctttttttcttcttcttttgaaccttgcctctcgtcgacatctgaccgacattgatcaagattttttttagtaccgagtgacgaagagttgatatggagctgacgatcatttgaattgatttcgttgtgcaagacttgtattacataaacatttaaatacatgtagctgaacatttcagtagaaatgctacggttgtggtctcccatcgttgactttcattagcgtggtggtaaacatcggttctgctcctgtcctgtattcatcggatgcaagtataacacaagcttggcttgggaggaggaagcacaaggagctattgccacctagcaaaaggataaaagggaggatgacgaattggcgatgtgtttgtgacacgctgccctcaagtgtggatgatgagtgcagatatgttggtgactgtgccaaggctgtcaagtgtgtaaacgaacgctgccttcgtagttctgacaactgcgactgttctgtagctaaacctatttgctatctttatgataaagttatctaaatgggacggtccttgaccgattaattgcacgatctaatgtgagaaaaagtacataatcgcttggattgcatcaggt

SEQ ID NO: 23381 - DNA, 721 bp, Zea mays
  Clone ID: LIB3595-057-B3_FLI
gggcttcacgcactacctcttcttcgtgctggacctctacgccagcgtcaccgtggtggagagcctgatgatggccatcgcgagcgtcatccccaacttcctcatgggcatcatcgtcggcgcggggatccaggggatattcatgctggtgtcgggctacttcaggctcccccacgacatccccaagcccttctggaggtaccccatgtcctacatcagcttccactactgggcgctgcggggccagtaccagaacgacctcaagggcctgctgttcgacggccagcaggacgacgtgctgcccagcaagatccccggcgagttcatcctggagaacgtgttccagatggacgcggggcggtccaagtggctcgacctggccgtgctgctctgcatggtcgtcgtctaccgcctgctcttcttcgccatgatcaaggccgccgaggacgtcaccccccgggtgcgccgccacgtcgcgcgccggcgggtgcggagccggcggcgccagcagccgctgcccgcccggacgccctcgctccgcggttacgtggtccacgccgccgccagcctgccggccgatcacccgtgaacaacgtaaccgtcagttgtactgcaatatatatgatatgcgtgtgttaagttgttagtagcaaccgctttatagctgtaacgaagatgcaatgcaccggtaagatgatgtgtgttatcaccagcttgatgc

SEQ ID NO: 23382 - DNA, 897 bp, Zea mays
  Clone ID: LIB3595-057-C6_FLI
gtccttccattgcattgcattattgagtctatatatatctaggggcgccgtgccagagttatatcttgctagctacttcatttattttcttgaccattcgatccatttggaagatgaagaaggcgaccaagtacctaaagcacctcttctccgccatcgtcgcggcggtgaaggccaggtccaccgccgtgggcaccaaggccagctccctgcagatgcgcctcatcgtcctcggcatcatgcggaacaagaagctcctgctcagcgccatccagaaaaagatccacgccatcatcggcgccggcaatggcagcggcaatgcggtggctagccacggcagcggcaacaggatggccgcggtgctgcagagcctgccgagctttgccgtggagcaggagacgagggccctcgtcctgctcagcagcctgccgagcttcgtgctggagcgggacgctgccggcgctggcgccaacgaggacaagcaggacgtggtggaagcaacagcaggcgacaagcatgttgccgtggtggacgacgacgccaccgctcaggcgaaggcggagggggacttcctgctggaggaccagatcgaccacgtggcagacgtgttcatccgccgattccacgagcagatgaggctgcagaagctggagtccttcaagaggttctgcgagatgctggagaggggcgcctaaatcattgacttgcactagcttccaatgtgcatgcttttggtctaataattaatcaagcaagagttcagggaacgtagttagttctcattataataagtgacaagaatcgagtttgtttcatcggttcgtactttcggtgtagggtttaggcatctcgcataccaatttccatgaagttatagctatctctatccttatactc

SEQ ID NO: 23383 - DNA, 1723 bp, Zea mays
  Clone ID: LIB3595-057-E3_FLI
ctagcccctagaacatctcaaatctatctcgctctccctaggaaggtcctgcaaccccgccgccctctgctcccgcggccatggcaccaagattagtggtcacatagttcgtcttcctgcgacggctcaattcgcggaggcgcggcatggcgactccgtcgctgccgacgcagattgtggagttcaattacaaggcgatagaggacaagctcaagagactggctctcgaagtgagccaccatgagaacaacattaggttcctcaaatcccaactcaatactgttgaagaggcgtgcgtcgacctgggaattaaacttgggaattaccattcatccgtggccgctgttgtaaataatgatacttctgctcaagaggctgaacagcgcactattcgaagtatacttgatcagggcaagacagcagctgggattatatgccaactgaaagtccgtcatcatgagctagcatctaagatgccactgatgaaagatatacttggttttgtggctacattgggaaaagtaaataatgataacctcagcaggcttctcacagagtacttgggaatggataatatgcttgctcttgtttgcaagacttatgatggtgttaagggtcttgagaaatacgacaaggatggcatcattgataacaccagtggcattcatggacttggtcgctctgttggaaaatttctggatggaagatttactgtcttttgtcttgaaaacttgaggccattttccggtgatgttatcattgacgatccacaaagaaagcttattttacatagaccaaggttgcctggaggggagtcgcctcctggttttctggattttgcagtaaatatgatccacctggaccgagcacacttgaggttcctcacagccagtggccatggtcttagggaaactttgttttatactttgttttcccatttacaagtttataagactagaactgacattcaaagtgcccttcctctgataaaagatggtgctgtttctctagatggtggtctactgagacccaatggctcattctgccttggccatagcaagaatcttgaagtgaaatttcctgtaaccactgatgtttcaagtttacctgaaaatgtcgctgaaatggaggaacaagttaaacgtaagaattgggagaaggaaatggttcttgaagatatgaaaagggaggaagatctgctgaaacaagttaaggaattatacaggaagcagaagcaagagctcatggattatgtcactcaaccagcagtgacacagatgtcacgtgattcgccagcaactcattcacccgcgactcctgggagcaatccgtttggagccaagctctccaacaagtggcgataacattttggtggcgtacatccctattttgttggggcttattgcctgctcgggcatcagcacaaagtaactagcttttgccacaagcttggtgttagtttgtgagggtgataggccagtgaaattgttctgctgcttagcatagttggatgccaattgatgtatagggttagaatgctttttagcttttcctatgctaatcaaattgccaactgctaatcttgattcttggctgttgatagcacaaacaaattggaagcagcagctggttgtcgttttagttgcttcttcaacatgcacattcttattgcgatgtgccaatatgtatatgcctgctcaacgtgcttgactgatttttcatg

SEQ ID NO: 23384 - DNA, 1343 bp, Zea mays
  Clone ID: LIB3595-058-A10_FLI
gccgagccggcgcaaggtggcgctctacctggccctcctcaccctgcagtacggcgctcagcccctcatctccaagcgctttgtccgcgaagatactatagtgacctcactagttcttgcaacggaagcagcaaaggttatttgcgcaatcattttattgattgcagagggtagtctgaaaaaacagttcagtaactggactctcactggatcactgactgcgtctggactgcctgctgccatttatgccctccagaatagtctgctgcaagtatcatacaagcatctggattccttgaccttttcaatccttaaccagactaagcttttgtggacagcatttttcacatttcttattttggggcaaaagcaatcttccaggcaagttctagcattggccctcttaattggtgctgccgttcttttaagtgttggggagagcagtagcaaaggttccaagggtggtggctctgactatatcttgctatatgggatcattccagttacagtcgcttctgtgctgtctgggctggcctcttcattgtgtcagtgggcatctcaggttaaaaaacatacctcttatatgatgaccatagagatgtcatttattggaagtatgtgcttgttagcaagtacctatcgctcaccagatggagaggccatcaggaaatatggatttttccatgaatggactttctggactgtgataccggtattaatgaatgccgtgggtggaattcttgttggtcttgtcacaacttacgcaggtggcgttagaaagggttttgttatagtttcagctctccttgtaactgcactgctacaatttatatttgatgggaagccaccgtcactctactgcctgatagcattaccacttgtcgcgtcaagcatattcatctaccaaaaacatccatatgttgataggaagaagaaagactgatccacataattgtcagagacgggaattatcaacaggatgtgatcctaacctcattttctccacaaggctggaatttgcaccgtcaaggggaccaaatttgactcttgaagagttgctgttcgtcaagctatgtttcaattatctactgatatatatatatagaattaattagtaggacactagcctggaatcagtttcagcaggcagttgacatgcttgcatataacttctcgaaggaggcttcgtatcaatgatgatgatgaagtgtttccatgtgcagctatctatacttgtacggttgctgaatctattgtattttttatggatttctatttagactccgactttcgaatatatatttctatgatggcagcaaattaaaaaccaattattgtgtgcc

SEQ ID NO: 23385 - DNA, 763 bp, Zea mays
  Clone ID: LIB3595-058-F8_FLI
gctccatatgttcttaggttgctggattgatggctctaatggagagtgatcacattggtcctttcaacttgggaaacccaggagagtttaccatgttggagctagcacaggtttgtagacaatttgttaaaaaaaacttaaagtgcacaattgacaatagcaccttccccaggttgtgaaggaaacaattgacccaatggcaaccattgaattcaaacccaacacagctgatgatccccatatgagaaagccggatatcaccaaggctaagcaactgctacattgggagccaaacgtctctctcagagaaggccttccgctaatggtcaaagacttccgtcaaaggatctcggatgagtaatcgaggcaatcctacgatactggtgaccggtttgattctgaactatgctgcaaatacagtcagaagctctttatcgattggagccatgcagtacagtgtactgtgtacacagagactgtagaatcacccaggccccatttggaatgtggggatccatacaatttccactggatagtactgtttctgtgaaataactgaaaagttcatgggaagttcgtgttaatcttttttttttatatcttggtggggcagaacagaagcagtcaaatatttttttgtgcatatgtgaaattccagagttgtgggtggtgagagataggatacaatgctgtatgtatttcaggaacttctgtaacacgagaacattcatcatgtgaaaaaatgtaactgaatgtgttggcc

SEQ ID NO: 23386 - DNA, 752 bp, Zea mays
  Clone ID: LIB3595-059-B11_FLI
tcacttcctccggctccggcgatctcctccaccgccgttgtcagcggtccggccgagatggggagcacttcctctatgctcacccaatacgatatcgaggaggtccaggaccattgtaaccacgcattctcgcagcaggagatcgtgtcgctgtaccaccgcttctgccagctcgaccgcaacggaggtggcttcgtctccgctgacgagttcatgtcggtacctgagttcgccgtaaatcccctctcccagaggctcctgaggatgctggatggtctcaacttcaaggagtttgtagcatttttgtcggcttttagcccccgcacaagcctacaggaaaagattgaatttattttcagggtttatgatactgactgcaacgggaaggttgcttttgatgacatcttaagcatcttgcgagatctgacaggttcatttatgacagagcaacagagacagaaagtcttgactcatgtgttagaagaagctgggtacacaaaaaattcacatttcacactcccagactttatgaagattattggcaattctgagctcaagatggaggttgaagttcctattgactaaaaaccaaataagtatcatctagttgtatcgtgatgtgttgccgagagccccagacctgtatgttcatttgtgttgaattaagtctatggtgtatttatatccttgtaaatcaaatcatgatcatagatgtaattaaggaaacaaatgtacctgttatttggaggatt

SEQ ID NO: 23387 - DNA, 500 bp, Zea mays
  Clone ID: LIB3595-060-H5_FLI
ctactccacccgccttccctccgcaggcggctccgtctcagtcgtcgtacgcgttcagcggcgagctggttgccgcgatgcaggagatgatccgcgccgaggtgcgcaagtacatgtccggcgcggggctccgcgccggatgcgggcccggggccgtgggcgaggtgtgcatgccgcagctggtggagggtgtgatgcgcgccgccgcggagcgcgtcggcgtcgtcacacggccgtagaaacccggaaacggaccaaatcagatctgatcaatgcgaagcattgtgttaattaagatcccgtccgtcctgtgtagcagcgctacgtagactactactactactagtcgttctctggccgttgtatttagcagaggagctcgcgtttgtttattcttcggcggctgtcgctctgaatccagaaaggaacagagcggcggtgtaaagccgggagcggaagcggaggttggcaataatcgagatcgagcctgccatttctat

SEQ ID NO: 23388 - DNA, 150 bp, Zea mays
  Clone ID: LIB3595-060-H9_FLI
gaagctgaggaccacgttcaaggcttcgaggccaacctgttcatgtgatttagctgtggtcagtgtatgcgatcataagagtcacaagtgtttctgtttttttttaagttttgacttcctaatagtaatacttaatcggtttgatgattc

SEQ ID NO: 23389 - DNA, 1347 bp, Zea mays
  Clone ID: LIB3595-061-A11_FLI
ctaccccccgcacagtgcacacgcagttcgcacccacgccccccgcaggccggaggagccagccgcgatggcgcagcagcccccgcaccggcacgccaagacggactcggaggcgacgtccagcatggcggcggcctactacgtgcagtcgccgagccacgacgacggcgagaacaagacggccgcgtcctccttccactcgtccccggcggcgtccccgccgcggtcgctgggccgggcgtcaagggactcctcctcgtcctcccgcttctcctccgccaaggccgcctcctcctccgtcgctgtccccgtccccggcgccggcgccggcgggcggcggcgcggcagcccgtggatgaaggaggcggccatcgaggaggagggtctcctcggcatgtccgacgacgacgacggcgacggcaccagccgcggcgcgctcagcgcgatccctaagagggcgcgctacgcgctgggcttcgcgggcgccttcctcgcgctcttcttcctcttcgcgctcgtcctgtggggcgccagccgcgcccagcgccccgtcgtcaccctgcgctccgtcaccttccaccgcttcgtcgtccaggccggcaccgacgcgtcgctcgtgcccaccgagatggcctcgctcaacgccaccgtcgccctcgccttccgcaacgccggcaccttcttcggcgtccacgtctccgccgaccccgtcacgctccactacacccagctccagctcgcgtcgggcgatatcaagtatttctaccagccgcggaagagccagcgcgggctggcggtggcggtggtgggcgacaaggtgccgctgtacggcggcgggtcgggcctgagcagcaccgcgacgacgctgccgccgcccaggaagcgcgcgccggcggtggtggtgccgccgccgcccgtgccgctgcagctggcggtgcggctgcggtcgcgcgcgttcgtgctgggcaggctcgtcgcccccaagttctacaccgaggcgcggtgccgcgtcaccatggaccagaccaggctcggcaggcccgtctccctcgccaaggcctgcacctacacccactagctagagcgaaagcgaaacacgcgcgcgcgcgcgcctgctgccctcgccgttttgttcttcacttgagttctctctccgtcgtcgttatactactactaccgcctgcgtgtgcttgcgtgcgtgcgttacatttggatgcatggggccattgttgctcggttgttgtcatgtatgtacagaggatttctttttttttctttttcttttttggtgttggagagttttcattgttgctcgcttcttgttctccttcgtgaccagcttcgtgt

SEQ ID NO: 23390 - DNA, 746 bp, Zea mays
  Clone ID: LIB3595-061-C4_FLI
ctcctcaccatttcccaaaccctacccatacccccgccgccgccgccgccatgccgcccaagctcgacccgtcgcaggtggtggaggtcttcgtccgggtgacgggcggcgaggtcggcgcggcgtcgtccctggcgcccaagatcggcccgctcggtctctccccgaagaagatcggcgaggacattgccaaggagacggccaaggactggaagggcctgcgcgtcaccgtcaagctcactgtccagaaccgccaggccaaggtctccgtcgtcccctccgccgccgcgctcgtcatcaaggcgctcaaggagcccgagagggacaggaagaaggtcaagaacatcaagcacagcggcaacatcggcctcgacgacgtcgtcgagatcgccaggaccatgaggaacaggtccatggccaaggagttggccggcaccgtcaaggagatcctcggcacctgcgtcagcgtcgggtgcaccgtcgacggcaaggaccccaaggacctgcagcaggagattgatgacggcgaggtcgagatcccgtccgcttgaagactagacatcgaaggggacttccattggtgctgctgaagtgttgttgttctgcatgctgtcgatgtacctttttcaagcaacgcgagccatctatttcttttgtctagctatgttagtgatatcttgtgagagacctcaatgttaccaccgtatctttgtctttgttggatggagagatttaagcaccttacc

SEQ ID NO: 23391 - DNA, 455 bp, Zea mays
  Clone ID: LIB3595-062-F8_FLI
tacgttgcgtcaggatgcattgacggcaaggtgcgcatctgggacagcctctctggagcctgcgccagggagttcagtgggcatgcagatgtagtacagtcgctggccatcactgctgacggcaacaccatggtctccgcctcatcagatggctccgcccgtgtgtttgacatctccatgttcaagtgaaggaaaccgggacggagtacatgtttatgctatggcttgattgtgatgcacgattgatcatggcatgccatggtaatatgcgattgtactactctgctcatggaaaaatcgtgcatttgtattgcatatgactccacttgtagtatctattacagcagaacaaaggatgtatttatatatattccgtttttcccctttggagagaaggaatcaattgtgatagcagtgatagaattcggacgggaattctgtctcaaaattatatt

SEQ ID NO: 23392 - DNA, 1631 bp, Zea mays
  Clone ID: LIB3595-063-E4_FLI
ctctccttttgctcggaacgcacacaccgcccgtccccgatctccgatcccctcgtcgatccaaagatgcagatcttcgtcaagaccctcactggaaagactatcaccctcgaggtggagtcttctgacaccattgacaacgtcaaggccaagatccaggacaaggagggcatccccccggaccagcagcggctcatctttgctggcaagcagctcgaggacgggcgcacacttgccgactacaacatccagaaggagagcaccctccaccttgttctccgcctcaggggaggcatgcagatcttcgtcaagaccctcactggaaagactatcaccctcgaggtggagtcttctgacaccatcgacaacgtcaaggccaagatccaggacaaggagggcatccctccagaccagcagcggctcatttttgccggcaagcagctcgaggacgggcgcacgctggccgactacaacattcagaaggagagcaccctccacttggtgctgcgtctcaggggcggcatgcagatcttcgtgaagactctgaccggcaagactatcacccttgaggtcgagtcttctgataccattgataatgtcaaggccaagatccaggacaaggagggcatccctccggaccagcagcggctcatttttgccggcaagcagctcgaggacgggcgcacgctggccgattacaacattcagaaggagagcaccctccacttggtgctgcgtctcaggggtggcatgcagatcttcgtgaagacacttactggcaagacgatcacccttgaggtggagtcctcagacaccattgacaacgtcaaggccaagatccaggacaaggagggcattccaccggaccagcagcggctgatcttcgccggcaagcagctggaggatggtcgcaccttggctgactacaacatccagaaggagagcaccctccacctggtgctccgcctcaggggtggtatgcagatttttgtgaagacattgactggcaagaccatcaccttggaggtggagtcgtctgacacaatcgataatgtcaaagccaagatccaggacaaggagggcattccaccggaccagcagcgcctgatctttgctggcaagcagctggaggatggccgtaccctcgccgactacaacatccagaaggagagcaccctccacctggtgctccgcttgcgaggtggtatgcagatctttgtgaagaccttgactggcaagaccataaccctggaggttgagagctccgacaccatcgacaacgtgaaggcaaagatccaggacaaagagggcatccccccagaccagcagcgtctgatcttcgctggcaagcagctggaggatggtcgcaccctagcagactacaacatccagaaggagagcactctccacctggtgctccgcctccgtggtggtcagtaagccatggttcatttaagctgctgctgtacctgggtatctgcgtcgtcgtcgtctaataaacatctgtggtttgtgtgtcatgaatcgtggttgtggcttcgttggtttaatggacctgttgtgtcctctgtgttgtacccaaaactcttctgcagcagtatggcttgaatccttgtgaagtttgatgtttg

SEQ ID NO: 23393 - DNA, 1406 bp, Zea mays
  Clone ID: LIB3595-064-D7_FLI
cgccttgttcaacttctcgaccaaggcagagagagctttcatccggcagccgctgagcctgagatccctgcaccgcctcccgcccgcccgccggaatggagttcgccttagtcgagagtgaatcgttctctccttcctgccccacgcttatcatgccagcgctgtcgattggcaacgtggggcagctcgccgtcgaccttctcatatcctcgtcgagggcgaggcgggtggcctacctcgacgagccctccgtgctgccctgcgccggtaacgacgccttcggccctgacgccgtcggcgacctcgcactcgctctcgaagcttatgaatctacatctcataagctgggtttcattcagcaaaggtctccagttactacaggaatgatggtttcatttgcaaaaaatgttgctgatttcataaatagcatcgggaagaaccatattgtcattatatcaagtttagattctggaaagaggagagtgattgatgcatccagtgacatgcaggtgtattacctttcaagttgcaatgaagatggttctgatccagaatatgagaaattggggtggaaaaagcttgaggattatgatccatctcagaaacggtggaattgtcttgctagcctagttgagggtggtggtctttcagaagatctggatgatgatactgatgagatgacaataaatgattactatgcaagcctgccatttgcagcactattctctgcctgcaaggctaaaggcttgaaagtttcttgtgtactgtgctactgctcggaaggcgacaacatgccagaatctttccagttagctgaagcaatatgcaaacttctaggtcatggccctgagaaattccatggaaatgggtcaaatggatggatcgttcccttgtcatggaaatcagtatatggaccaccacctgatatgtctatcttttagtgttgaattatgatcaggtgaagttgccatcacggaaaatgctgagtagaatcgaggatgttgaactcttaatttagacagtgtaccagaagtatccaggagggtgagttgcagacgtttgtagtcagttggtaaaggattactaaacactcaaggatggaacttctgcaggcaccatgatacttaacccttaaatgcatgaatcagaatatttttgtaactggtactgtggctactaagagtcagatctttgtcaactcaggtctgctaggtgcttacgcatgttgcttaccatcataccatgtgccgtttccattctaaccatggaattccaagcttctcgtctgccgttttggcagttttgcccatttggtttggttgattttgatgtggtggaagaatctttgctagtgcgtacccctttatgaaaagttgctactgaatggtggaactgttcggtgaggc

SEQ ID NO: 23394 - DNA, 1035 bp, Zea mays
  Clone ID: LIB3595-064-G3_FLI
aacttcttcatttatgtccaagattacaatgaagctgatccaaggacacatcaaggattagaccttactagggtgacaactagagaacttatagcaaaatatggtttaagtgatgcataaatttcattgcatttgcggtttgctattccaacaaggctctctttgctatcctgtacttcatcagctttgtccttgatggtgtggatggttggtttgcaaggaagttcaatcaagcatcaacctttggagctgtgttagacatggttacagatagggttagcactgcttgtttgttggcccttctctcccagttttacagacctggtttagtcttcttgatattgcttggattggatattacgagccactggtttcaaatgtacagttctttcttgtcaggtaagactagccacaaggatgtaaaacacacaggcaattggcttctgaaattatattatgggtacaggccattcatggccttctgctgtgtttcttgtgaggttttatatattttcctgtttctctttgctgatgaggagtcaacaagcttgcttagtgtatgcaaaggcatcctgaaccaaagtcccgtcgttatcttggtgtttgtttccactctagttggctgggcagtgaagcaagccaccaacgtcatccagatgaaaactgctgcggacgcatgcgtggtgtatgatctgaagcgcagcaaatgaagcatgaaggcagcttcacggtttagtatcgacatatccaagggaaaactctgcgagggggcgggctacgtcttgcgtgccttgacatctttctgatgatgcggtcatatgtgggaccaggggatgacatgccgtggccaatgcaaacaattgttttgtgaaagcagcggccgttaagttgttgtcagtgtgagagtggtgatgcgatcatgatcctttttacctagagtagctcccctttgtgttagcctgaacgatgttttgcaagccgcatgttccgaactctaggattatttggattacaaaacttacatattccatcctc

SEQ ID NO: 23395 - DNA, 1240 bp, Zea mays
  Clone ID: LIB3595-064-H6_FLI
gagaatgagggccgtggtgatcacgtgcgccggcgggccggaggtgctggaggcgcgggaggtggaggaccatcccgcgctaggcgaaggagaggtgctcctcgaggtcgccgccgcgggcgtcaatcgcgcggacaccgtgcagcggatgggccggtacccgccgcctgccggcgcgtccccttacccggggctcgagtgctccggcaccatcctcgcgctcggccccaacgtcccctcccgctgggccgtgggcgataaggtttgcgcgctcctcagcggcggcgggtacgcggataaggtggtggcgccggcggggcagctgctgccgatacccgagggggtgtcgctgacgcacgcagccggcttgcccgaggtggcctgcaccgtctggtcaaccgtattcatgaccagtcacctctcccccggtgaatcattccttatccatggaggatccagtggaattggtacattcgctatacagattgctaagcacctcggaattaaggtttttgtcactgcaggaagtgaagaaaaactagcagcctgcaaagctttgggtgccgatgtatgcattaactacagaactgaagacttcgttgaacgtatcaaacaggaaaccaacggaaagggtgttgatgtgattctggataacattggaggatcatatctccagcgcaacctgaatagcttaggtgttgatggtagacttttcatcattggcttccaagggggcatagcagctgaagtgaacctgcaagctgtgcttgcacgccgtttgaccatacaagctgctggactgcgcaacagaagccttgctaataaggcagagattgttagtgaggtggaaaagaacgtgtggcctgctgtcgctgctggcaaagtgaagccggtgatttacaagacgtttccgttatgtgaagctgctgaggctcataggttgatggaagctagcacccacatcggcaagatactgctgctcccatgactgcacctgtggcgtttgcgctcttgctctcggaggagtcagttcaaaaacatatgcaattcctgagactgtgacaacctgcacggatgttgtactggtgtcgcatgtcttttttatatatatcttgtagtactagattggatcttttaccccgagaaattatcttgtcaattggatccttaaagtgctgatgacatttttctgtgagctatgatataataaatctggcagatagagccactacagcacgtc

SEQ ID NO: 23396 - DNA, 1132 bp, Zea mays
  Clone ID: LIB3595-065-A2_FLI
ccaagctagccacttcactggtcactccattagcagatgcgctctgcatcttctcccctctggaacacactcccacacagaactagagctccaaggccatggagaaatggagaagacgcaggcacttgctgcttgctgttgcagccgtggccctggtggcagcaataacgctgccgtccgcggaggcgaagctgtccccggactactaccggtcgacgtgcccggacgtggaggcaatcgtgcaggcagtggtggccaagaaggtgaatgagaccttcgtcacagtcccggccacgctcaggctcttcttccacgactgcttcgtcgagggctgtgatgcgtcggtcatcatcgcgtcccgcgacaacgacgccgagaaggacgcgcccgacaacgtgtccctcgctggcgacggcttcgacaccgtggtgcgcgccaaggccgaggtcgagaagaagtgccccggcgtggtctcctgcgccgatatcctcgccatcgccgccagggacgtcgtcaccatgtcgtccggcccccactggaccgtccagcttggccggcttgacgggctcgtctccaaggccggcaacgtcgcgggcaagttgccgggacccaacatgcgcgtcaaggacctcgccgccctgttcgccaagcacaacctcaccacgctcgacatggtcgcgctctcgggagcgcacaccgtcgggttcgcgcactgcacccgcttcgcggaccgcctctaccaccacggcgtcggcgacagcgatggcgcgtcggtggacccgtcgtacaaccctgcgtacgcgcggcagctaatggacgcctgcccgcctggcgtcggcgcagacatcgccgtcaatatggacccaatcacaccgaccgccttcgataacgcctactacgccaacctcgccggcggcctgggattgttcacctcggaccaggcgctgtacagcgacggcgcgtcgcaaccggcggtgagggacttcgctaagaaccagacccgcttcttcgaggcgttcaaggacgccatggtcaagctgggcagtgttggggtgaagaccggccggcacggggagatcaggagtgactgcactgcattcaactagtagatcgaccacccattcttttgaag

SEQ ID NO: 23397 - DNA, 1198 bp, Zea mays
  Clone ID: LIB3595-066-C4_FLI
cgctcctcctccctccgtcaggctgtcactgtccccctcaccgccgccgtcctcgtcaccacacctcacccgttgctcccactccttccagaaccacctcctcgccaccgtggctgcctgccctgcccgctataagactcttcactcccgctgcgacgcagtcctcacaagcaccagaccaattaactagcttcttctagctctagctaggctcgtctgctgcaagaaggtaacagcgcaggcatggaggggaaggaggaggacgtccgcctgggcgccaacaagttctcggagcgccagcccatcggcacggcggcgcagggcacggacgacaaggactacaaggagcccccgccggcgccgctcttcgagcccggggagctcaagtcctggtccttctaccgcgccggcatcgccgagttcgtcgccaccttcctcttcctctacatctccatcctcaccgtcatgggcatctccggcggtgaccttcgggctgttcctggcgaggaagttgtccctcaccagggcggtgttttacatcatcatgcagtgcctgggcgccatctgcggcgcgggcgtcgtcaaggggttccagcaggggctgtacatgggcaacggcggcggcgccaacgtcgtggcgcccggctacaccaagggcgacggcctaggcgccgagatcgtcggcaccttcatcctcgtctacaccgtcttctccgccaccgacgccaagaggaacgccagggactcccatgtgccgatcctcgcccctcttccaatcgggtttgccgtgttcctcgtccacctggccaccatccctatcaccggcaccggcatcaaccccgcgcggagccttggcgccgccgtaatttacaaccagcaccatgcgtgggctgaccactggatcttctgggtcggccccttcatcggcgctgcgctggctgccatctaccaccaggtgatcatcagggcgatcccgttcaagagtaggtcttaaaggagccgatgctgctgcttcgagatgctgccggtcttgaaaggatggattcgtggctgtttcaaatgatcccctactatgttacgtggagttccattcctctttcaaagttcggagctgcttttatccgaacccagacttgtaattcatctgtaccaattgtgtaatatgccgcgcctctgttatgtgcaattcaaaattatg

SEQ ID NO: 23398 - DNA, 498 bp, Zea mays
  Clone ID: LIB3595-066-F1_FLI
caccacccaatcgcgctcgcacggaggcggcgccggcgcggacggacatattccattcacctcccatccatttctcaccagaagcgaaggcggaggcggaggagcggaggtaggagatctcgagcaagccggaggcagaggagatgaagacgttcgacccgtggccggtcttcttccgccgggagtggaagcgcaactggcccttcctcacgggtttcgccatcaccggattcatcatcacgaagatgacggccaacttcaccgaggaggatctcaagaactctaagttcgtccaggaacacaagaagaagcactgacgaaccaggtgaaggagttgtcagaaacgcatgtttggccagccagttctgttatgcttttgaatgaaaaatttagacccttctttctcgtttccttaatcgaaatgcttgcactctatgttccatttgtaatgtaataagaggcaaatggattgaaccaacaacaatcaacttctgattg

SEQ ID NO: 23399 - DNA, 1734 bp, Zea mays
  Clone ID: LIB3596-001-B5_FLI
gataggcgtcttcgtactcgcctacctccgcggctcaaacctttcccccttctcccaattccctccgtcggccgccgctccatcccgtacgacgacaccatgagggagtgcatttcgatccacatcggccaggccggtatccaggtcggaaacgcgtgctgggagctgtactgccttgagcatggcattcaggctgacggtcagatgcccggtgacaagaccattgggggaggtgatgatgctttcaacaccttcttcagtgagactggtgctgggaagcacgtgccccgtgctgtttttgttgaccttgaacccactgtcatcgatgaggtgaggactggcacctaccgccagctcttccaccctgagcagctcatcagtgggaaggaggatgccgccaacaactttgcccgtggtcactacaccattggcaaggagattgttgacctgtgccttgatcgcatcaggaagcttgccgacaactgcactggtctccagggcttcctcgtcttcaacgctgttggtggaggaacgggctctggccttggttccctcctcctagagcgcctgtctgttgactacggcaagaagtccaagcttgggttcactgtgtacccttccccccaagtttctacttcggtagttgagccatacaacagtgtactgtccacccactccctcctcgagcacactgatgtggctatactgctggacaatgaggccatctacgacatttgccgccgatcccttgacattgagcgcccaacctacaccaacctcaacaggcttgtgtcccaggttatctcatcccttactgcctccctgaggttcgatggtgctctgaacgtggatgttaacgagttccagaccaacctggtaccctacccgaggatccacttcatgctttcttcgtacgctccagtcatctctgctgagaaggcctaccacgagcagctctctgtggctgagatcaccaacagcgccttcgagccatcttccatgatggccaagtgcgacccacgccatggcaagtacatggcctgctgcctcatgtaccgtggtgatgtggtccccaaggatgtgaatgctgctgtggccaccatcaagaccaaacgcaccatccagttcgtggattggtgcccgactggcttcaagtgcggcatcaactaccagcctcctagcgttgtgcctggtggcgacctggccaaggtgcagcgtgccgtgtgcatgatctccaactccaccagtgtcgtggaggtgttctcccgcatcgaccacaagttcgacctcatgtacgccaagcgtgccttcgtgcactggtacgtcggtgagggtatggaggaaggtgagttctctgaggcccgtgaggacctggcggcgctcgagaaggactacgaggaggtcggcgctgagttcgatgagggcgaggatggcgacgagggtgacgagtactagagaagtttgctgatgacgcagcatcaggccagtgtgctgcccttatcccgtgatctgccgtgagttgctcctgctatcgtgttatgtgtgtctgttatgaagtattgtgtggtttacaacacctgatgttgtaagagtcgttaattcccctgcattgctaccgggttattgagaataattatggctgtttacgttgttgcttcatctcggggatgctttacatttaccaccttgttcatcttttgtcatcagtaaaatcgagtcggcggatgtttttct

SEQ ID NO: 23400 - DNA, 1381 bp, Zea mays
  Clone ID: LIB3596-001-H4_FLI
ctgccttctgcgcctccatttcggcctctgtcccttgcaagttcaatctcacctccaaccatgggtaaagagaagtcccacatcaacattgtggttattggccacgttgactctggcaagtcgaccaccacaggacacctgatctacaagcttggaggcattgacaagcgtgtgatcgagaggtttgagaaggaggctgctgaaatgaacaagcggtccttcaagtacgcatgggtgctcgacaagctcaaggctgagcgtgagagaggtatcaccattgatatcgctctgtggaagtttgagaccaccaagtactactgcacggtcattgatgcccctggacaccgtgacttcatcaagaacatgatcactggtacctcccaggctgactgtgctgtccttatcattgactccaccactggtggttttgaggctggtatctccaaggatggccagacccgtgaacatgctctccttgcgttcacccttggagtgaagcagatgatttgctgctgcaacaagatggatgcaaccactccaaaatactccaaggcacgttatgatgagattgtgaaggaagtctcatcctacctcaagaaagttgggtacaaccctgataagattgccttcgttcccatttctggttttgagggcgacaacatgattgagaggtccaccaaccttgactggtacaaaggcccaaccctgcttgaggctcttgaccagatcaccgagcccaagaggccttcggacaagcccctgcgtctgcccctccaggatgtgtacaagattggtggtattggaactgtaccggttggtcgtgtggagactggtgtcatcaagcctggtatggtagtcacctttggtccaactggcctgactactgaggtgaagtctgttgagatgcaccatgaggcgcttcaggaggctcttccgggcgacaatgttggcttcaacgtgaagaacgttgctgtcaaggatctcaagcgtgggttcgtggcctccaactccaaggatgaccctgccaaggaggctgccagcttcacctcccaggtcatcatcatgaaccaccctgggcagattggcaacggctatgccccagtgctggactgccacacctcccacatcgccgtcaagtttgctgagctcattaccaagatcgacaggcgatctggcaaggagctcgagaaggagcccaagttcctgaagaacggtgatgctggtatggtgaagatgattcccaccaagcctatggtggtggagacattctccgcgtatcctcccctgggtaggtttgccgtccgcgacatgaggcagacggttgctgttggagtcatcaagagtgtggagaagaaggacccaaccggcgccaaggtgacca

SEQ ID NO: 23401 - DNA, 782 bp, Zea mays
  Clone ID: LIB3596-002-F1_FLI
cgccgaggagcgcaaggcctggcgcaagaaccacccgcacggtttcgtcgcgaagccggagtcgctgcccgacgggacggtgaacctgatgatctggcagtgcaccatccccggcaagcaagggactgactgggaaggtggatatttccctctcacccttcattttagtgaggattaccctagcaagcctcccaagtgcaagttccctcagggtttcttccacccaaatgtgtatccttctggaacagtctgcctttcgattcttaatgaggacagtggttggagaccagctattactgttaagcagattctcgtcgggatccaggacttgctagatcagccaaatcctgctgaccctgctcaaacagacggatatcacctttttatccaggatcccacagaatacaagaggcgcgttagactgcaggcgaagcagtatcctgcattggtctgagagcttcgccctactagggggatccatgctgcacatccgcatagttgttgctagtgtcttgaatgaaagaccaaatgtaacatggtgcttggagaagtaactatcgccattgtggactgtgtgtcttttaacagccttattaactgtttggagtgtgtgttttgcgggatgatgtcaaaaccttgctgtgtcttgttatcaagaattgctgtgtgttgtctgacaaatctaaatatgggaagaaacgcccatgacgtttcagctgagggcactcctggttctgtactttgacagatatgaagggaaggtagcctgtggtttttgattc

SEQ ID NO: 23402 - DNA, 761 bp, Zea mays
  Clone ID: LIB3596-002-G3_FLI
ctcctcaccatttcccaaaccctacccatacccccgccgccgccgccgccatgccgcccaagctcgacccgtcgcaggtggtggaggtcttcgtccgggtgacgggcggcgaggtcggcgcggcgtcgtccctggcgcccaagatcggcccgctcggtctctccccgaagaagatcggcgaggacattgccaaggagacggccaaggactggaagggcctgcgcgtcaccgtcaagctcactgtccagaaccgccaggccaaggtctccgtcgtcccctccgccgccgcgctcgtcatcaaggcgctcaaggagcccgagagggacaggaagaaggtcaagaacatcaagcacagcggcaacatcggcctcgacgacgtcgtcgagatcgccaggaccatgaggaacaggtccatggccaaggagttggccggcaccgtcaaggagatcctcggcacctgcgtcagcgtcgggtgcaccgtcgacggcaaggaccccaaggacctgcagcaggagattgatgacggcgaggtcgagatcccgtccgcttgaagactagacatcgaaggggacttccattggtgctgctgaagtgttgttgttctgcatgctgtcgatgtacctttttcaagcaacgcgagccatctatttcttttgtctagctatgttagtgatatcttgtgagagacctcaatgttaccaccgtatctttgtctttgttggatggagagatttaagcaccttaccacacctttgttcttt

SEQ ID NO: 23403 - DNA, 461 bp, Zea mays
  Clone ID: LIB3596-002-G8_FLI
ggcaagctggtggtcatcgacttcactgccgcctggtgcggtccatgccgcgccatcgccccactgttcgtcgaacacgccaagaagttcactcaggtcgtcttcctgaaggtggacgtggacgaagtgaaggaagtcaccgcggcctacgaggtcgaggcgatgccgaccttccacttcgtcaagaacggcaagacggtcgcgaccatcgtgggtgccaagaaggacgagctcctggccctgatcgagaagcatgccgcgcctgcgcctgcgtctgcgtctgcctaaaggagatcagatcagtcgtcgccgtcaataagggccagcacgtatggctgtagatgttgtcgttatcagttctggctttgtcgtttgtgggcgattgtgaactagtagtatgtttgtttctatccgattcggaggcgatacttaaccatggatacttgttgtgcgttcgtttc

SEQ ID NO: 23404 - DNA, 711 bp, Zea mays
  Clone ID: LIB3596-004-A4_FLI
acacccgcagggtgctcgaccaaatgcgacgctaggttaggtgcttctactccacggcgatcacccagctcagctgctacccaactgtcgcaggccgccgcgccgagcgagggcgccgccgccgtctccggcgtcatggcggtgaagctcaaggacctggtcccggccgcgaccaacacggtgaacacgacgttcatcgtgctcgacaaggcggcgccgtcgacccgccgacagggcggcgccagggaggagacgtgcctggcgcttgtggcggacgagaccgcggcggcgcacttcctgctgtggggcgccgagtgcggcgcgttcgagccgggcgacatcgtgcggctcacggacggcatcttctcgtaccacagggggaacgccctggtgctgcgggcgggccgccgcgggcgcgccgagaaggtgggcgagttcgccatgctcttcgtggagacccccaacatgagcgagctccagtgggggcccgaccccagcgacggccggaggatggtgcaggaggccgtcgtctcgccttactcccagatcttcaagccgctgcggtgatcttcttactactgagaaacatgatactaggggtacgaacttacgatgaagaagaacgaaaaagaagggcttaaagctctgtctgtcttccaaagtgacaaggttacaccttacaacatgttcaaccatacaattatatcttcc

SEQ ID NO: 23405 - DNA, 660 bp, Zea mays
  Clone ID: LIB3596-004-A6_FLI
ggcaaggcagcgtgagcttagccataccgtcgagagtgagggggacagtaagatgaagaggcaggtgtccagtacgaaatccaaggagctcagtggtcacgacatctttgccgatcacgaagatcccaagcccaacaggtcaaggagatcagactatggcagctctgctgctcagtcaccagtgaaaaatgcaagaccatgcccaagaaggattcagcgtctgcagagaaacagcctccgaaccgtgcgaggccgaaaggaatgagtggcagcagcaattttgcagacgggaaggcctcaacctcaacaaccggagatcatgaaggccgtcgtacccggcagcctcctggcggcgacagcagcattttgctgggctagcgtgcatatgaatcttgccctatgccgccgccgcacgggtggttggtccgtcagtctgtggtcttgttttcgtggtcaggccatgtgtcccatctccggtccttcagatgatctggttcgcatctgtcttgtgtatggttttgatatgtgttggttgtgacatgccccatggaacaaccctatcgctatgctgttttgttgtgtacaatggatgacgtgtgctgccgttttgttgtgtgtacaatggatatgtctggttgttgaataagaagaaattggtat

SEQ ID NO: 23406 - DNA, 653 bp, Zea mays
  Clone ID: LIB3596-004-H2_FLI
ggagagcgccgctcccgttatcgccaggccgtcgctgcccaagaagccctcgccgtcgttccgcctccggaacggcagcctcaacgtcctgcgcctgcgccgcgtgttcgacctcttcgaccgcaatggcgacggcgagatcaccctcgacgagatggccgcggcgctcgacgcgctcggcctcggcgccgaccgccccggcctgcaggccgcgctaggcgcgtacatcccggccggcgccgcggggctccgcttcgacgacttccagtgcctccaccgcgcgctcggggacgcgctgttcggccccatcccggaggcggtgcctgaggaggacgtcgagggggacatggaggaggcgttccgcgtgttcgacgaggacggtgacggcttcatctcggccgccgagctgcaggccgtgctcaggaagctcggcctgtccgaggctcggaacctggccactgtgcaggagatgatctgcagcgtcgaccgcaactgcgacggccgcgttgacttccgcgaattcaagaacatgatgatgcagggggtcaccgtgtggggcgcttagctgcagcgcacctgccttatcgttgttccctcagctcagctgcctggtgtgtacttaagggtgttaatgaactcgaattttacactat

SEQ ID NO: 23407 - DNA, 530 bp, Zea mays
  Clone ID: LIB3596-005-F10_FLI
tcattctccctctctcggcagtctgcagcagcccagcgccgtcgcgcatgcaggaggcgtcatcggcggcggcggcgggggcgggggccgagcccggccgtcgggcggcgcagcatcagttcgccggcgtggacctccggcggcccaaggggtacgcgccgccggcgccggcggtgggcgagggggacccgtgcccgcggtgcgcgtcgcgggacaccaagttctgctctgctctgcgcctgatgatgagtgcaaggaaatggagcgctttgattcttctgctcttggttgcatctgctaattgatttagcagtggtggtaaggtacacgcacgacgagctgactgcgtggttcttggtttgggccttagtatatgatgatgatgatactagttgtatgtgtgacgtgagagacgatcgcgacgacgaccttgaattttagtttctgagatgagaaaggtcaactagtggcctctgtatgactttagttttactcatgaactcatcagatggctggctatggctgtggct

SEQ ID NO: 23408 - DNA, 661 bp, Zea mays
  Clone ID: LIB3596-005-H12_FLI
ttttctctcatctaattgcggatgggagcactggagtagccacttgtgtttggacgggagcgcaacctgctcgcccgcatggcctgctggcttacggcggctgcggctcgcctgtcatagcggcggcggtccttgcccgcgcgcttgtgcctgctcgcggtggcatcggcggtccggccgggatgctcgcctgcggggcagcggcggccggcacggtgcccgcactctccttcggtggcgagacggcggcggcgagcccgcgctcgcacgcttgcgcgaccgtgttgcgacggcggcgccctgcgcccgcgctccaacgacggcgaggcagcgcgctttgctgtggaccgtggagcggcagcgactgagcttgcgcacgcgcgtgaccacgagtatgcactgccttggagtgggttgggttcacgcgttggcgttttggcggtggtgccagcgcccgcacccgtgctgcggcggcagcgaggtggcagcctggcaggtgtgcgtctcgctcctgcactacgagttaaggtcgtagtttgcttgctagtgcggcaacgacgtcaaccttagcactgtgttgccattcttttttttttctttctttcgatgatgcagtaaaatcaatgagcgtattcaaagttccaacagcttcgtgccggtg

SEQ ID NO: 23409 - DNA, 377 bp, Zea mays
  Clone ID: LIB3596-010-E10_FLI
gcttccttggttccttccctccctctcctttgatcctttccggcctggcctccgcctttcccccagcccaaagcgcagcacgaagcaacccttcccttccattccttggccacgtaacccaattacccaacgcatcgaggagcgcacgaaggcaaccgccttcccatcccaccgggcatcggcccatctgatccgatcaggctagatcctgccggtgccggtcttcgcgccgcctatggccgaaggcgacgcgcccgcctccgcccccgccgccgcggcggcggcggcgtccccgcggtcgcccatgccgcaggagacgccggcgatgcagaagcggaggcagcgggggctcgtgtcgcgggtgtggaagggcatct

SEQ ID NO: 23410 - DNA, 1403 bp, Zea mays
  Clone ID: LIB3596-011-G12_FLI
ccattttctaccatcacactgacacgttcatagctagctagtcttcagctagtaacgtacgacggactaatctcgatctgggagcgaggaggaggacgacgataatgaagatgagctccgtgcccgcggcagcggcggtgatggtggtggtggtgctgctctctgcggcggcggcgactgtgacggggcaggcgcttgtgccgggcgtgatgatcttcggcgactcggtggttgacgcaggcaacaacaaccggctagcgacgctggtgcgcgccgacttcccgccctacggccgcgacttcccggcgacgcacgcgcccacggggcgcttctgcaacggcaagctcgccacggactacaccgtggagagcctggggctgagctcgtacccgccggcgtacctgagcgaggaggcgcagagcaacaacaagagcctcctccacggcgccaacttcgcgtccggcgccgccggctacctcgacgccaccgccgccctctacggcgccatgtcgctgagccggcaggcggggtacttccgggagtaccagtcgcgggtgggcgcgtcggccggccagcagcgcgcccgggagctgacgtccgggtccatctacgtggtgagcgccggcaccagcgactacgtgcagaactactacgtgaacccgatgctgagcgccgcctacacgcccgaccagttcgccgacgcgctcatgcagcccttcacctccttcgtcgagggcctgtacagcctgggcgcccgccggatcggcgtgacgtcgctgccgccgatggggtgtctcccggcgtccgtgaccctgttcggcggcgggaacgcgggctgcgtggagcgcctcaacaacgactccctcaccttcaaccggaagctcggcgtggccgcggacgccgtgaagcgcaggcaccccgacctcaagctcgtcgtcttcgacatctaccagccgctcctcgacctcgtccaaaaccccaccaacgccggattcttcgagtcccggcgggcgtgctgcggcacgggcacgatcgagacgtcggtgctgtgccaccagggggcgccggggacgtgcaccaacgccacgggctacgtcttctgggacggcttccaccccacggacgccgccaacaaggtgctcgccgacgcgctcctcctgcagggcctacagctcatcgcgtgagccacagccacgcaacggcctcccgccgcccttctacgtacctaccttgctgcttctgtcgttccgtcctgctactgtgtctcgtgtgcttgtctgtctgtctgtctgtccatgatctctcgtagctttgtgatgctttggaaagacttgggagtgctgtaagatttctggtctgtataattacattcagcgtcttcccagcctcttcgctgaattttg

SEQ ID NO: 23411 - DNA, 201 bp, Zea mays
  Clone ID: LIB3596-013-H10_FLI
cctgtcgctccgtgattctagtgtaataatgtcatatttactgttgcttcaagtatggcccgtacggctgcggttgaacggcggcggcggctgctgagccacagtaccttgctgttgctgagactgcacccagccacagtgcgccgccgccgccgcagcttgtagctggacttgatttatgaaggtgccggaagagttctt

SEQ ID NO: 23412 - DNA, 344 bp, Zea mays
  Clone ID: LIB3596-016-E5_FLI
ggaaagctagagtgtacaggaaacatgaaaaagaggagcataccattgtacaagccctcaggacacaacacagcagccagcgcggttcgttcataaactccatggatcagcaagtttcttcgaaatggatgagtagtaggttcataatgtaaatactaactagtgtgtgcgtgtttgttttagttttgcgaagggatgagttgtggatgttaataaagggtagagtaaatttcttagatctacatatatacttgcctagaactggaaaattaagaggacactaccactataacaaaaaaaagccatgtcattttggacaatgagaagcctccaaagctttattc

SEQ ID NO: 23413 - DNA, 671 bp, Zea mays
  Clone ID: LIB3596-017-D10_FLI
gttggcttctcctccccctccggttcgggttcgggttcgtgaggttctccggggttcggtttcgtgggtgagcggatcgagatggcggcgtcggatgttgagtaccgctgcttcgtcggcggcctcgcctgggccacggacgaccactccctccacaacgccttcagcacctacggcgaggtcctcgagtccaagatcatcctcgatcgggagacgcagaggtcccgcggcttcggcttcgtcaccttctccacggaggaggcgatgcggaacgccatcgagggcatgaacggcaaggagctggacggccgcaacatcaccgtcaacgaggcccagtcccgcggcggccgtggaggcggcggcggcggcgggtacggtggtggccgtggaggcggcggctacggcggtggcgggcgccgtgatggcggcggcggctacggcggtggcggcggctacggtggtggcggcggcggctacggtggtggtggcggcggctacggcggtggcaaccgtggcggcggctacggcaactccgacgggaactggaggaactgagcggtggggcccgcgcggccaagttatcctgttcgctaccgtgttgtttaccctagtccagagtgtttatcttcgttcgtctcgtgtttgttgttgcccatctgtgtttttgattg

SEQ ID NO: 23414 - DNA, 557 bp, Zea mays
  Clone ID: LIB3596-017-D2_FLI
cctactggagtagggagcacgccgcacgagccctttccgccgccgccaaaatggtgaacgttcctaagaccaagaagacctactgcaagaacaaggagtgcaagaagcacactctccacaaggttactcagtacaagaagggtaaggatagcctgtctgcccagggaaagcgccgttatgaccgcaagcagtcaggatatggtggccagaccaagcctgtcttccacaagaaggccaagaccaccaagaaaatcgtattgaagctgcagtgccagagctgcaagcactactcacagcacgcaattaagaggtgcaagcattttgagattggtggagacaagaagggcaagggaacatctctcttctaagtttctcatcgcccatctcgatgttggatcgaacctgtgggtctactactgttctaaaaactcgtcaaatttcaatgttactagtagttctgaaagcaggtcatgctgtgtatcaaattccaatgcctgacatttgcgctgagtgtgggttgtcttttggctaaatgaagttttgcaccctgaatcttc

SEQ ID NO: 23415 - DNA, 490 bp, Zea mays
  Clone ID: LIB3596-017-E2_FLI
ggctcctcctcgtttcctatctatcctgatccaaatccgccctactcgcttcatatatcctcctgcgaggaaaacaattcattccgcgccgcatctgggaaggtctcgtcttgctcgcctccgtccgtcgccgcaccctgcgtcgtcgccatggccaccgacgaagccaccaagccgtccccgatcccaccctatcccgagatgatcctggcggcgatcgagggtctagacgacaagagcgggtcgaacaagtccgccatctccaagtacatcgagggcaagtacggctcgctgccccccgcgcacgcgtcgctgctgaccgcgcacctggcgcgcatgaaggagtccggagagctcgtcttcctcaagaacaactacttccgcgcgggcgcccccgacgcgccgccgaagcgcgggcgcgggcgccctcccaaggcgcgggacccgaacgcgccggcgccggcgcccaagtcgccgtcgtccacggggc

SEQ ID NO: 23416 - DNA, 1997 bp, Zea mays
  Clone ID: LIB3596-017-F8_FLI
ccggagaggaggcagctccacagaaacagagagcgcataaccggcggcgttggcggcgatgaggatcgaggaggtgcagtcgacctcgaagaagcagcgcatcgccacccacacccacatcaagggacttggcctcgacgtagctgcccgctcctgcgctcctcctcgccctgtttttttttctagggttttagcttctgtgtgtttgcgtactagttcctcactgttttccctccttcgttttcttattatgggagcggagcaggccaatgggatggcgattgcgttggcggcggggttcgtgggccaggcggcggcgcgcgaggcggccgggctggcggtcgacatgattcgccagaagaagatggccggccgcgcggtgctccttgcgggtccgcccgccacgggcaagacggcgctagcgctcggcatagcccaggagctcggcagcaaggtccctttctgtcctatggtaggatcagaagtgtactcctcggaggtcaagaaaactgaggtgctgatggaaaatttccgtagagctataggtttgcgtataaaggaaaacaaagaggtttatgaaggagaggttactgaactttccccagaagaggctgagagtacaactggtggatatgcaaaaagcattagccatgtaatcatcagcttaaagactgttaaagggactaagcaactgaagttagattcttcaatttatgatgctctgatcaaggaaaaggtggcagtgggtgatgttatatacatcgaagcaaatagtggagcagtgaaaagagttggtagatgtgattcttttgctacagaatacgatcttgaagctgaagagtatgttcctatccccaaaggtgaagtccataagaaaaaagaaattgtgcaggatgtcacacttcatgaccttgatgcagcaaatgctcagccacaaggtggccaagatattttgtcccttatgggccagatgatgaaaccacgaaagactgaaatcaccgaaaaactacgccaagaaattaataaggtggtaaatagatatatcgatgaaggaattgcagagcttgtacctggtgttttgttcattgatgaggtccacatgttggatatcgaatgtttttcttatcttaaccgtgcattggagagcccattatcaccaatcgtgatacttgctacaaataggggaatatgtaatgtaagaggaactgatatgacaagtccacatggtataccggtggatcttctagataggctggtgattattcggacagagacatatggccctactgagatgatacaggttcttacttatttggggcgttatttctatctgttgtttttcctgtgcagaattttcattaatctttgtttgctgccctttacagatattggctatccgagcacaagtggaggagattgatatggatgaagaaagtcttgcttatttaggcgagatcggacagcagacatctttgagacatgctattcaattgatatcacctgccagcgtggtctcaaagactaatggaagagagaaaatctgcaaggctgatctcgaggaagttagtgggctctatttggatgccaaatcctcggctcggctgctccaggagcaacaagaaagatacatcacctagatttggatcacctgtcgtggaagtctcgaagagaatgtagttgccagctcgaaagtcatctagtgaattgatctgcttcacaggtcttggagcgagcacatttcgggggggacggcttgaattttgcagtgcctgcttgtgttagtctccagagaagacttggtaccggcatattgcctgttcacgcactgttcgctgattagattggtcaccggtgcaggaattgccgtgtgtgttttttatcttgctcatcggtgtccggaatctgtgcctccacgggttgtattggcccgaaccctatctttgtaaccatggataatggatagcattcttacagaatgcaacttgcatggctttatt

SEQ ID NO: 23417 - DNA, 788 bp, Zea mays
  Clone ID: LIB3596-018-F9_FLI
ggcgaacgcgagagccgaccgtctcagtgtgcgcgcgagaaagaggaggaggaagaagaagaatgtatccggccaagcccaccgtcgccaccgccagcgagccggtaaccgggatggcggcgccgccggtgaccggcatccccatcagcagccccggccccgccgtcgcggccagccagtggtcctcgggcctctgcgcctgcttcgacgactgcggcctctgctgcatgacgtgctggtgcccgtgcgtgacgttcgggcggatcgcggaggtcgtggaccgcggcgcgacgtcgtgcgcggctgcgggggccatctacacgctgctggcctgcttcacggggttccagtgccactggatctactcctgcacgtaccgctccaagatgcgcgcgcagctggggctccccgacgtcggctgctgcgactgctgcgtccacttctgctgcgagccgtgcgcgctctgccagcagtacagggagctcagggcccgcggcttggaccccgcgctcggctgggacgtcaacgcccagaaggcggccaataataacgccggcgccggcatgacgatgtacccgccgacggcgcaggggatgggccgctagttacgctaccagctccatctgtaaactcatatgttgttgtgttgtgtcagccagatcatcgcgtacgtacgggtatacttgtgatatgtaatgtcagggaccggtatgcccatgtgtttcaagatatttcatgttcaagtcctttctgtccgctcactatccgaatgaaaaccattttccttg

SEQ ID NO: 23418 - DNA, 697 bp, Zea mays; identical to SEQ ID NO: 18409
  Clone ID: LIB3596-018-H1_FLI

SEQ ID NO: 23419 - DNA, 738 bp, Zea mays
  Clone ID: LIB3596-019-C10_FLI
tcagcagtaggcccacagctcactcgcaaccactcaccaagctagcggaagcaaagcagagcagcggtcgccggccgggcacgataccagcgtcgcgagagagagagaggatggcgttcatgcggtaccgcgcgctgccgcggggggagctaacagcggaggagttccgggcgtggctggcgcagttcgacgcggacagcgacgggcggatcagcagggaggagctgcggcacgcgctgcggagcctcaacgtgcggttcgcgtggtggaaggcgaggggcggcgtgcgcgccgccgacgccgaccgcgacggcggcgtgcagctgggggaggacgaggtggcccgcctcttcgccttcgcgcagagccacctccgcgtcaagatcgcccagctcgggtactactagtactgctgatccgtcgtcggccgatcgatcggccaatatggaggcatggagcatatggcatcgatcgatgggtttgtcactactcgatcgtcacttgtttgtcacagctgggtgggttggatgtgttgttgctacttttttttctctcacgtccgggtggatgtgtgttgttacttattgttacgtactgctgtttggtcaaaacacattgaacgcaaacgcaaacgggaatagaaagcagcgagcgctaatggtaatccatcagttgcgtgtacaaaactaaaaacactttcttaataggcgctgtacgtacgagtgcagctgcttcttg

SEQ ID NO: 23420 - DNA, 576 bp, Zea mays
  Clone ID: LIB3596-021-A4_FLI
cgacgatggcggctgtgctgaacagcaggaagacgccgcaggtggttgccgtgctggtggcggcggcgctgctggcgtcgtccgcttcggcggcgatcacctgcgggcaggtggggtcgtcgctggctccgtgcatcccgtacgcgacggggagggccagcgcgctccccgcgtcgtgctgcagcggcgtcaagagcctcaacagcgcggcgcggaccagcgcggaccgccaggcggcgtgccgctgcctcaagagcctcgccaacagcgtcaagagcgtcaacatgggcaccgtcgccaccatccccggcaagtgcggcgtctccgtcggattccccatcagcatgtccaccgactgcaacaagatcagctaagttatacgacgaccaagctaataagcctaccgaacgtacacgtacgtcccgcgcgctgcacgagtgatgaagccagggaagaaataaaataaagctagctgtattgccaggagcagcatgcagtatcgatctatatatatactgtactgtagtactctattatatatgtatgtgtggcctgcagtgcgagttgcttcgatcc

SEQ ID NO: 23421 - DNA, 953 bp, Zea mays
  Clone ID: LIB3596-021-F12_FLI
agtgaacaccagccgtattgtcccgactcctgacccctaccgatcctcgcctgctgcagccatggcgacctccgcggcgctctccaccgccgccaatcccacccagctctaccggtcccgcgcttcgctgggcaagccggtgaaggggcttggcctgagcatgggccgcgagcgcgcccagcggagcattgtgtgccaggcggcgagcagcatctccgccgaccgcgtccccgacatggagaagcggaagctgatgaacctcctcctcctcggcgccatctcgttgcccaccgtcggcatggtcgtcccctacggcgccttcttcgtccctgccggctccgggaacgccggcggcgggacctacgcgaaggacaagctgggcaacgacatcacggtggaggcgtggctcaacacgcacggtcccaacgaccgcacgctcgcgcaggggctcaagggtgaccccacgtacctggtggtggagcaggacaagacgctggccacctacgggatcaacgccgtgtgcactcacctcggctgcgtcgtgccgtggaacggcgctgagaacaagttcatctgcccctgccacggatcccagtacaacaaccagggcaaggtggtccgtggaccggcgcctctgtcgctggccctggttcacgccgacgtcgacgacggcaaggtcctcttcgtcccgtgggtggagaccgacttcaggaccggcgaggacccatggtggaaggcatgaggatgatccggaaccagcggtgctcagtgctcacacatgagacctatgtatgcctccgttccttgtgatgaggaaataggcttgcgttcgttctccgtgggcgttgttcctacaaattcacttgctctttgtctctctctatatatacacactgtataaaacaagaacacctgtttatcatctcttcttatataaccttttgaacactgtg

SEQ ID NO: 23422 - DNA, 462 bp, Zea mays
  Clone ID: LIB3596-022-C6_FLI
cgactcgaccgccgccgtcccagttcgcttcgcgtcaccgagagctcgtcggcctccgtccccgcgagaagcgagagcatggacacccaagtgaagcttgctgttgtggtaaaggtgatgggcaggaccggctccaggggtcaggtgacccaggtcagagtgaagttcttggatgaccagaaccgtctcatcatgaggaacgtcaagggccctgttcgtgagggtgacatcctgaccctgctcgagtctgagagggaggccaggaggctgcgctgaagcccttgttgtcttggatgtaattctgttaattttgttcaatgtttgtcgaacttgccgtgtgacccatactatatctgctttgggatttagtaagcctggattgcagttttttttatgttcctggtggaaattgcaattgtttgtcggcatgttctcttgaatttaatgcgtacggtttctact

SEQ ID NO: 23423 - DNA, 799 bp, Zea mays
  Clone ID: LIB3596-022-E4_FLI
gtccaaagtcgcgtctcccagcctccctccactgtcccacaccccaacactgttccagtccagcggctagcactagcagacagagcccctcctccccctagctcttgctcttccacaggcacagcgcaacgcttccagctagtctcgagacgaccggcagagatgatgaggcgttgcagcatcgccgccctcgccatcttcctcctcctcctcgtgtgctcctcatcctcctccaactgcgcggcagccgctcgcctcctgcctggcgccggacatctccggcctctccgccatgccgccgtgggcgccagtggcgacgagctttccgcgggctccgaggtgacaacccaagacacgatggaggcgtgcgaggaggggaacggcaaggacgagtgcgtgcagaggcggctgctcctcgacgcgcacctcgactacatctacacgcagcacaagggcaagccgtgaccgcgagggaggatgccatgccgcagctgcagtggagcgaggagctcgcagatgcaggccaccgtctcggctcggctgctagtgctacggccccccctacggaaaaagttggtttgtggagtgaatattttataatcacttgctagaatgctacgtagatgaacgctgctagctgcggctaattaattaacatccggacggacgttgtcatccgtctactagtactagtagtctagtactagctagtatatatatggctgtgtacgtctccaagtcttatctaatatatgcatgcacatggtggtggacaaattaaataataacatgtataacc

SEQ ID NO: 23424 - DNA, 728 bp, Zea mays
  Clone ID: LIB3596-022-G11_FLI
cgaggccaccatgagcactctcaagttctgccgggaatggtaaaagcgacgaaattgttggcattcgtgcccactgccggctctttggtattggaatcgtggtcgtttgcttcatattttcatcgtctttgctttgtattcgccgcagcaacaacatgctgtacccgcgggaggacaaggagacgcgcaccctcctgtacgcgtgccaaacgtgcgagcatgaggagattgccactgatacttgtgtgtacaaaagggttatccgcaagcctggtggtgagcccaaggatgtcctgaaggatgcagcaactgatcctagcctgcctcgcaccagaagcgtcagatgttacaactgcaaccatccagaagctgccttttttcaggccccgactaagggagaacaagccatgacgctgtacttcatctgctgcaacccaagctgcgggcacaggtggagggactgagaaggatctggcttggtcttcgctgcaaacctgccgtattgttagcctatcacataaatattgtaggtacaagttgtgccgtcaactgacgtttgatgcaagcttataagctactataacctcgtaacaaaacgatggtttggctggagacgaaatctgttgttcctgatgataagccaaaaactttacggccgagctcaggtaagaaacagaagcggctatgaactactgtggtgtttggtttgaggaatgagctagtctatc

SEQ ID NO: 23425 - DNA, 428 bp, Zea mays
  Clone ID: LIB3596-023-F7_FLI
caagggacgggagaggaacccgaggaaggcgaaaatgatctaccgcaactggtcgctgctctcgtccacagtcgtcatttggggcggcgtcgccaccgccggcctcgccggtatcttcctcttgggcggcaaggagaaattcaatggttatctgtgccgcgaaggcgagaggcttaggcagcaggacagagccgcgatgggccgaagctaagcgttagcttctttggtatctcaagggagcaatagcccttcgaaatttcacaagattcctgcgtccctaccagaacaagtccctatctagggactaggatggaatccatccttctgcaggctttcactttcctgataataacagtaacaataaattgacaatggtttgtgttcttctgcaacctttttggctccctggtttcgcaagggttccgtgc

SEQ ID NO: 23426 - DNA, 658 bp, Zea mays
  Clone ID: LIB3596-025-E7_FLI
cgacgcgctagctagttctattgccgcaccccagatctccaggagggactcgttcgttcagctaactacactgcacgcaatggccaccacggcgaccgaggcggcgccggcgcaggagcagcaggccaacggcaacggcgagcagaagacgcggcactccgaggtcggccacaagagcctgctcaagagcgacgacctctaccagtacatcctggacacgagcgtgtacccgcgggagccggagagcatgaaggagctccgcgagatcaccgccaagcacccatggaacctgatgacgacctccgccgacgaggggcagttcctgaacatgctcatcaagctcatcggcgccaagaagaccatggagatcggcgtctacaccggctactccctcctcgccacggcgctcgccctcccggaggacggcacgatcttggccatggacatcaaccgcgagaactacgagctgggcctgccccgcatcctcattccaatcataatagacgacccgcagcattaattatccaccggctttttttttggctctttcttgcccctgtaatctttctcctcctcttccttcttgggaattgtcgccgccgtttcgatacgtaaatcacgagatcggtaatacagtaatgctcctcaattttacaat

SEQ ID NO: 23427 - DNA, 1387 bp, Zea mays
  Clone ID: LIB3596-026-A9_FLI
ctttcatccctagttgctcgggagctttccccttcctgttcctgaagcttccgacatccgaccgcctcctcctcctcgttctactcgccgccccttctagaatcatccagaggcgtgccggtgaagcgcgagagcggtgaggcatggcgatgcagacgggggtcgcgacctccaaggtcctcatcctcgtcggtgcagggatgacgggctcgatcctgctgcggaatggccgcttatctgatgtgttgggagaactccaggagattatgaagggtgtaaatcaaggaacttcttcgggtccctatgacattgcacttattcaagctcagattcggaatttagcccaagaagtcagagatttgacattgtcaaagcccattaccatactgaatggcaaatctgactcgggaggcagtttatcatcctacatactgccagcagcagcagttggagcaatgggttattgctacatgtggtggaaggggttgtctctctcagatgtcatgtttgtcacaaaacacaacatggcaaatgctgttcagagcatgtcaaagcagttggagcaagtttcatcagcactagctgcaacaaaaagacatctaactcaacggcttgagaatttggatggcaaaatggatgaacaagtagaggtctccaaagctattagaaatgaggtcaatgatgttaaagatgacctgtctcaaattggatttgatgtcgaatcaattcagaaaatggttgctggattggagggaaagatcgagttacttgagaacaaacaggacgtggctaatactggtatctggtatctctgccaagtagcaggcggtttaaaagatggaataaacaccaggtttttccaggaaaccagtgagaagctgaagctctcacattcagctcaacctgaaaacaagccagtgaaggggcttgaatttttttcggaaagcaccatggaacagaaagtagctgactccaaaccaattgcggtgacagtcgacgctgagaagcctgagaaaaccgctgctgtaatgggcaccacagtgcacaggtctatcaggttctcatatcggaatgcaggccttgctttgtgatcaaatcctctccgcttgagatgcacgtggccttcctggttgctttttcttttttggcaacaaccttcctggttgctttgtgtgatggtcagaaaacatagaagaataacctgcaactggagtgacagaatttcttttccccgcagtagacaggtgtgcgttatttggttggaattatctccagtccactatcaattttttttccttggattttgattcattttatgtttcgatttgttgccttatatactgtaaagtcattggaaagaataaataaaacacgaatgttttttgtc

SEQ ID NO: 23428 - DNA, 746 bp, Zea mays
  Clone ID: LIB3596-026-F10_FLI
caacccagcgccggcagtcgccgtcatcgatcgatcgccggaaaactaacccctaacgatgtctggagccggcgaggaggacaagaagcccgcggagggcggcgcccacatcaaccttaaggtcaagggacaggatggcaatgaggtgttctttcgcataaagaggtccacccagctgaagaagctgatgaacgcttattgtgaccgccagtctgtggacatgaatgccattgcgttcctgtttgatggccgcaggcttcgcggcgagcagacccctgatgagctggagatggaggacggcgacgagatcgacgccatgcttcaccagaccggaggcagcgttcctagcaccacctaaaagcctcgttttgctctccgtcctgcgtagtactaaacaaaagggaaaaagtctttttaaggaacttgtgatgctctggctccttgtgccattgctgagggacatccttagcctttgtttagtagtatggtttggtactttgttctgtcatcactcgtttatctatccctaatacatgccgccatgattgtactcccaatgacgcgcagatcatttgctttgttttgtctgctcgaacctcgaagtcgtctatgcttttcagattattttgggcatgtttggttgtctcctgaatcctgatccatacgttgtcagccgcaccatagtcacattgtgctgctcctgcaattgaggaacgatgataatggagggaaaatgttttagtaag

SEQ ID NO: 23429 - DNA, 1807 bp, Zea mays
  Clone ID: LIB3596-027-C6_FLI
ctttggttagccaaccgaaattctctagcctggcaacagccatgggagaagcacaagactactacaacacctccacggctctggccggcgccgccgccgcgggcctcgcgctgctcgcggtctgctcgtactacctgctcgtcgggcggcgccgcggcaaggcgccgaagcggtacgcgccggtggtggggacggtgttccaccagctgtaccacgtccggcggctgcacgactaccacacggacctgttccggcagcgcaagaccttccagctgctggtgccggccggccggcggcagatatacacgtgcgaccccgccgtggtcgagcacatcctcaggaccaacttcgccaactacggcaagggcagcttcaactacgagaacatgactgacctgctcggcgacggcatcttcgccgtggacggcgacaagtggaggcagcagcggaagatcgccagctacgacttctccacgagggcgctgcgcgatttcagcggcgcggtcttcaagaggaacgccgcgaggctcgccggcatcgtctccggcaacgcggcgtccgggcagcccatggagttccagggcctcgcgctcagggcgaccatggactccatcttcaccatcgccttcggcctggacctagacacgctgggcggctcggcggaagggagccgcttcgccgcggcgttcgacgacgccagcgagttcacgctgctccgctacgtgaacgcgttctggaaggcgcagaggttcctcggcgtcggctccgaggcggcgctcaagaagcgggtcaaggtcgtcgacgagttcgtgtacaagcgcatccgcgagagagcacaggagctctccgacagcaagatggcgaccgaggacactgtccctgattcgaggcaagacatgctgtccagattcatccacacggccacgaacgagtccgggacggtggactacaagtacctgagggacatcatactgaacatagtcatcgccggcaaggacacgacggcgggggcgctcgcctggttcctctacatggcgtgcaagcacccggagatccaggagaagatctgccaggaggccgcaaaggcgaccagcgccagcgagacggcgggcgtggacgagttcgcgcagagcctgaccgacgaggccctgaacaagatgcactacctgcacgccgcactgaccgagacgctcaggctgtacccgtcggttcctctggataacaagcagtgcttcggagacgacgtcctgcctgacggttccagcgtcagcaagggagacatcgtgttctacgtcccctacgccatgggccggatggagtacctctggggcaaggacgccgaggtgttccggccggagcggtggctggatcaggacggagagttccagcaggagagcccgttcaaattcacagcgttccaggctggtccgaggatatgcctggggaaggagttcgcgtaccggcagatgaagatcttcgcggcggtgctcctccgattcttcgtgttccgcctgcgcgacggcgacaaagcgagcgtgaattaccggaccatgatcacgctccacatcgacgagggtctgcatctgacagcgacggcgagatgaggtcgcctggcctggccaccggtggacacgtagccgccggtgcctgtagctacgcgagcgacaggtccttgacaccgtaccttgtgtacatatatatatgcaaagaaacgaaaacaagcagaggtagtaggcaaccactttgtgtactgcgtcttcttggggaataatgacatgccatggcagttgcaggctagcttgcatgc

SEQ ID NO: 23430 - DNA, 739 bp, Zea mays
  Clone ID: LIB3596-027-D2_FLI
ctggcttctcctccccctcttatcaagtcctcctcgggttagggttccttagggttttgtggaggggcgatggcggcggctgatgtggagtaccgttgcttcgtcggcggacttgcctgggccaccagcaacgagtcgctggagaatgccttcgcctcctacggcgagatcctcgactccaaggtcatcaccgaccgggagacggggaggtcccgcggcttcggcttcgttaccttctcctccgagaactccatgctcgacgctatcgagaacatgaacggcaaggagctcgacggccgtaacatcaccgttaaccaggcccagtcccgtggcggcggcggcggcggcggcggcggtggctacggcggcggtcgcggcggcggcggctatggtggcgggcgccgtgacggcggttatggcggcggtggcggctacggcggtcggcgcgagggtggtggcggcggctacggaggcggtggcggctacggcggtcggcgcgagggtggtggtggcggctacggcggcggcggcggcggctggagggactgatgtgtggccccatcctggcttcggccgagttatcttatctatctatagtatcgtgttaccgttcgcttctgtcaccgtgttagtgtccgttctacctttggattaggtgttggtaccccttttgttcgctttggttgctcccgctatgaaacgagacgagagaagaatgagcaaggtttttgttcgcatc

SEQ ID NO: 23431 - DNA, 638 bp, Zea mays
  Clone ID: LIB3596-028-A11_FLI
ctaactatcactagtcgccgtgtggtggtcgtcgtcatatccctcgcctctgcctcgaccgcccgatcgcccatagcctgctggcctgctctgctagccatggaccggtccaagtcgtacgcgggcgggcgcatgcagatcgagccgtactacggcggcggcggcggcggaggaggaggcgcgcgggcggacttccggtcctactcctacagcgccggcgggacggggccgtcgtcctactcgtacaaccagtacgagtacggaggcccgggggcgggtgaggaggaggtgaagcggagcaagtcgaagcggcggtggctggcggacccggacatggaccgcaagcgccgcgtggcggcgtacaaggcgtacggcgtggagggcagggtgaagggctccctccgcaagagcttcaggtgggtcaaggaccgctacctcgacctcgtctacggttggtcctgatcctcagagcacgcacaccaccgctctccatggttgttgtttggctctcgtagatgttgttcatccttcctggtgatgtgaaaccaaccagtacagtgtatgtattcatgagatgtgtgactcaagaggttgtttcagaccaaattggtacagataaattcatcgttcaggtgatc

SEQ ID NO: 23432 - DNA, 697 bp, Zea mays
  Clone ID: LIB3596-028-F10_FLI
cccgacgtaccgagcgtccgagccacgactcttccctcgctcgctcgttcgtctcctcccaccaaggcaccaaaccaatctagccaccaaggcaccaaccaagagccatggcatccccgttctgcgccgctgccgccgcttgccgccttgccgtccccgccccgtcccctcccgccgcacgggcgcctaggccccgacgcggcctggtggcggtgcgcgcggaggcgggcggtgggataaacccggccatccggaaggaggaggacaaggtggtcgacaccgtcctcaccggcgagctcgccaagccgctcaccgcgtactgtcggtgttggagatcaggaacattcccactgtgcgatggatcccatgtgaagcacaacaaagcaaccggtgataatgtgggccccctgctcgttaagaagtagatgcagtttcgttcgacttttgccctagcatcatgttgagcgctgagctgaacactatctgtctgtcatgatatatgtttttttagccaagataaactatcacgacgcaacgatccttcattcagaataaagtaagctgctcatgtcaacaagtctcagtttcatgattgtaggaagcgttagtgacaggtgatacatgtagtgggatgtatgaaaatcggaaaaaatatgttgttttctgtgatgaacaatcaagtcatgagcttatgatc

SEQ ID NO: 23433 - DNA, 940 bp, Zea mays
  Clone ID: LIB3596-029-A5_FLI
caatacacagcacaggagcatcaacacaacctcagaggagcactactgcgagtcaatcagcgaccagcacagcaaccgaactcaaaagcaagagcccaagatccgagcggtaggagaatccggacatggcggcggcagcgagggcgtcgtggatggtggcgatgagcgtcggcgcggtggaggcgctcaaggaccaggcaggcctctgccgctggaactacgccggcgtggtcggtggaggagtggacgtggaacacgaacagctcctgcgcgaagagcgctgccaggaggagcatggagagcgtcgtcggcgccggcgccgcgtggcgcggtcgtcgtcgtcgtccaggtatatgttggagctggtgtagacgaggagcgaggcgtagatgatggcgtgctcgtggttcggcagccgctcaggcgggatggagccgtcggcgcggaacggcatcggcgagtaggcgagcatctgggtggccagcccgtacgctcccgcggccagcatggcgatgggctcgaggcgacgcaccccgtggcgccgggaaccatgctgccggcgcgaggacgacgacgcgcgacgatgaggacgacggggtcggggcgagggagaccaagagcctcatgtggttgaagaggtgccataggccgaggcctgagagcatcgcgcctgccagggtgtggctgatgattttatccgcggcgccgcggggcagcatcgtcatgcggatcgatgtcagtcgtctaaactgttgatgctggcttgctgatttctttgtttgcaatgcatgctcgatcgggaaggatttattctctatattaaccgcgggagcaaaacggagcgggcaggatgtccacgtcgtccaattttctgtgagccgtccgatgacagatcgatggccgacctaccatgtgctacaaacgtcttcgtttctgttcc

SEQ ID NO: 23434 - DNA, 514 bp, Zea mays
  Clone ID: LIB3596-029-G10_FLI
gaaggatgggcttcgagaagcagatcctgagatccggcaccggccccaagccgataaagggccagaaggtcaccgttcactgcaccggctacgggaaggatcgtgatctgtccaagaaattttggagcaccaaggaccctgggcagcagccattcagtttcagcattggtcagggttcagtgatcaaaggatgggacgagggagttatgaccatgcaagtgggtgaagttgctcgtatccagtgcacgcctgattatgcttatggagccggcgggttcccagcctggggaattcaaccaaactcagtgcttgtgttcgagattgaagtcctcagtgcccagtaattcgcatctgtcagctatggaaacgttggccatgcttctcaagtaatgaaataattccgttgtcacctcatgctacatacagcagattggtgttacgagttaaatcctgtgaaactttagcattctgtaaccgtggatgtcgagtttatggagttccttgtgtggcgcct

SEQ ID NO: 23435 - DNA, 2159 bp, Zea mays
  Clone ID: LIB3596-030-A5_FLI
gaccaacccaactcgtctcgtaccgtccaagacggggcaaagaatgcccggggaagccggcgagctggagcctggcggcagcttggcaccgatcgtcctccattcccgtcgctcccgacctcctcctaatttatcccacccggcctccccggttcgccccgaccacatcccccccttaacctcccctcctcctcctcctgcggtcccaactcccatcctttggttcaggaggcaggcaggcaggaaggcaggttcgaggagggattggctccgctcctgctccattgcgcgtgatccggctcgttcttttgattgatctaggcgtttcttggatgtcctggaaggtcaaacggttgttggaagcctcgctgggtgcttcaacgaacgcgaaggtgttgctgtcatttagagcgtcttgattggatttgacctgttggcctggtggcgtgccgtcgttgattgagctcgaggatgatcaagtgggggctcagcagcggcacgcccgcggattcctactacgaggtccggtcagattgcacggacggtgtgcccaagagcaagttcaagattaaggctggcaaaacattaagtgctcggaaatggcaggctgcatttagtcctgatggctgtcttgatattgcctcagtcctaagcaggatacagagaggaggtgtccatccaacagtcagaggagaggtttgggaattcttacttggctgttttgatcccagaagtacctttgatgaaagggaagagatcaggcaaatacggaggatacagtatgccagatggaaagaagattgccgacagatggattctcatgttggtagtggtaaagttatcacagcaccacttatcactgaggatggcagacctattaaggatcctctggttttacttgaggctacttctgacacgaacacttcaggagatgctccaactaccagcataaatggaaatgaagttgatgaatctgcagaacgcattaccgataagcaaattatcgagtggaagctgacattacatcaaattgggcttgacgtcctacggactgatcgcaccatggtattctatgagaacaaagaaaacctttccaaattatgggatattctagccgtgtatgcatggattgacaaagatgttggttactgccaaggaatgagtgatttgtgctcaccaatgatagttctactaaacgatgaagcagatgcattttggtgctttgagaaattgatgcgtagattgcgaggaaatttcagatgcacagatcaatctgtgggagttgccaaccaacttcaacaccttgcgtctattattcaggttcttgacccgaagctacatgaccacctagaaactcttggtggaggtgactacctttttgcgttccgtatgttcatggtgctttttaggcgtgaagtatcatttggagactccttatacctctgggagatgatgtgggctctggaatacgaccctgacattttcttcgcagcgtgtgaagaacaaggtgcagtaaataaaaacaaagtttctaaatccaaactgaaaggactgcgccattttggcaagtgggataataaggataaggacaaggataaggaagatgctaaaaatggggctgaggatggtgaagacggtcctgttccaatttctgttttcatggttgcaagtgtccttaaggaaaagagagaaaagctgttacaagaagctagaggactggacgatcttatcaggatattgaacgatgtaaatgggaacttagatgccaagaaagcttgtgctggagcattgaaacttcacaagaaatacctgaaaaaggtacaagaaaagaaaccttaaacgtgccatggaacacacctacccaatgggttattcttaccatttgaacatacacgaccattttctacacaccacttttgagtgaagatttacaggacaaaggtggtagacgactgacatgttctcagatatggtaccaggctagtgggttgagtacaggatgagtgcaaccggtagtttgtattgtattgtatctcacgttctttgtactcaagaattttgttggctgtacaggcagaaggcggtgcgggtagcatgctctgcgtacataattatttgaatacaagttgaaatgaacaccatcttacgactggagtgtt

SEQ ID NO: 23436 - DNA, 494 bp, Zea mays
  Clone ID: LIB3596-031-A11_FLI
cgcacatctcctgatcctcgttcctctccgccccgcttgcgccgcgcctccgcccccgtctcctgtgagatcagctccggcggcacgcggatatgactacttcaaggcgtcttgctgacaggaagagtgcaaagttccagaagaacatcacaaagaggggttctgtgcctgagaccacggtgaaaaagagcaatgactaccctgttggacctatagttcttggattcttcatttttgtggtcattggatcatccttgttccagataatcaggacagcgacaagcggtgggctggcctgaattcactgagctaaaaccagaaatttatctgttcgtgagctgggaggcagtatctgtgttgtgtagcaaacttgttcatggatatgtagtgcgaatgtcactactgttctgtttgcagtatcaaaagagtttaaactgatgttgtaaccatgcaaaggctgaaaattttaaagagtatgggagaaaccttaatct

SEQ ID NO: 23437 - DNA, 992 bp, Zea mays
  Clone ID: LIB3596-031-H11_FLI
gcccaccgaattccctgcgattcctctcccctcgcctcctcgtctccccctaggggatcgtcggagaggaatcgcaaagagggccgtctcatccgagttaaggaagccatggagcacaaggaggctgggtgccaggcccccgagggacccatcctctgcatcaataactgtggcttcttcggcagcgcggcgaccatgaacatgtgctccaagtgccacaaggagatgataacgaagcaggatcaggccaagctggctgcctcctctatcgacagcatcgtgaacggcagcgacgccgtcatggagccggttgttgctggcagcaacacggtagtagctgttgcccaagttgagttgcaaacaatgaacgtgcagcagcccgctgatgttgccggacccagcgagggggtggcggcgatctccaaaggggggaaggtagggccgaaccggtgcagcgcctgcaggaagagggttggacttacgggattcaactgccggtgtgggaacttgtactgcgcactccaccgctactccgacaagcacgactgcaagttcgactaccggactgctgccagggacgccattgccaaggctaatccggtggtgaaggcagacaagctcgacaagatctagggggggttccctacggttgggtatcaggaagattgtaaaccgcggtaactcgtcatgcggaactgctgccttgccccccgcgcctttctcttccatgtttgctgctacaatcttgttgttgggcattgcagtgcacggtgcacacttgtgtagcccgcctcgagaattcctgcctctgcatctggtcagttctaaaatgatttgcatgttggctatgttgtgtaagctctatttatggtggtctcgctgagacgggtatttggcttcgcagttatctagctatgtgatgtactgttgtcttgtccctgggtattatatggtacactgcagccagtaatagtaatctgcaactgtgcgtt

SEQ ID NO: 23438 - DNA, 862 bp, Zea mays
  Clone ID: LIB3596-031-H6_FLI
gctagctctctgtctgctgctcctctcaaaagagtcgcagttcactttgttgtactagagcgctgagcagatctttccttgtttctccattccggtacgaaggggtggggtccaagtgaagggaagggaagggaagggaagagaaggcctgctgcgagcgatgggcatcgtcgacgtcgtctccgagttctgctccttgccgaggactcgccggcatctcaagaagaggaagcagttccagacggtggagatgaaggtgcgcatcgactgcgaagggtgcgagcgcaaggtgaagaaggcggtggagggcatgaagggcgtgagctccgtggaggtggcggccaagcagaacaaggtgacggtcacgggctacgtggacgccgccaaggtcatgcgccgcgtcgcctacaagacaggcaagcgggtggagccctggccctacgtgccctacgagatggtgcagcacccctacgcgccgggcgcctacgacaagaaggcccccgccggctacgtccgcaacgtcgtcgccgaccccaccgccgcgccgctcgccagggcctcctccaccgaggtccgctacaccgccgccttcagcgacgagaaccccaacgcctgctccgtcatgtagtagacccacccacacaccgaccgaccgacccacttgttttctagctattagttactagtagtatagtaggtgcttgcttgggagagttgctcttggaggaggttttgctcttcctgtttttctttttctttttttcgttttccggtttcatgtagatgtagtgtgcgttttgatatttgtgaaaaaaaataaaccagtttgtaacggtagaccacttgtgcaaactatgatcag

SEQ ID NO: 23439 - DNA, 722 bp, Zea mays
  Clone ID: LIB3596-032-B11_FLI
tgacggttgctctagatccgttcatcctggtggttttgtgaggtcgaaagcggcgagcgaattagaagatgctggacaagctgtgggacgacgtggtggccgggcctcgcccggagacgggcctcgagaagctccgcaaggccaccaccgcccgcccgctcgtcatcaacaaagacgcggacggcggcagctacaagcgggcgcagtcgacgccgtcgaccccgacgacgccggtgacgccgtcgtcgtcgacgacgccgcgcggcgccggcaacgtgtggcgcagcgtcttccacccggggagcaacctggccaccaagggcatgggcgccaacctcttcgaccggccgcagcccaactcccccaccgtctacgactggctctacagcgacgagaccaggagcaaccaccgctagatcgggcgagatggatggacagtgaagaggccatgtttgctggtccttgtggttatctaaaacgcacgcatgctctattatagctagtcatcactatatatatacttgtgtttgtgtattgttgttcttgttctgctggtgtctccgccgtttaatttgacctatgttatggagtgagtgatatatgtgccgtcactcctagtatatagtagtgagtgactagttggtatgtgtagtactgtactatcttttctccatatgcatgttttgccagcgcgtaatgaatgtaatgtcagtactgctact

SEQ ID NO: 23440 - DNA, 1174 bp, Zea mays
  Clone ID: LIB3596-032-E1_FLI
tgattcgcacacaacattgctggggaagcaagctactcaaactcaacaatggcatggtctcggtcgacgatgagggcgggactcacgaagggataaagaccattccggtgcagagagcctgcgagttcaccacgaactccgtgctctgcgtctgcatcgtcacttggaacatgaacagcaagatgtccgcggaagatgtggcgaagctggtgagctccgacaggaagttcgatctgctggttgtcgggctgcaggaggcgccgaagccagacgtttcgcgggtcctgcaggaggcgttggcggggacacacgtgctgttgggtcagaagagcatgcagtctctccggatgcttcttttcggttcaaggagctcggagaagtacatcagagagatgaaggtggacaaacacgcggttgggggctgcgggggtatcatcgggaggaagaaaggagcggtggccatgtacatcaacttcagcgggatccggatggtcttcgtgtcctgccatcttgcagctcacgagcacaaggtggagaagaggaacgcggagttccagcacatctcgcagtcgctcttcgccaggtacggcgcgccgacgccgtacgcgcagtctgccgacataacggtgtggctgggcgacctcaactatagactccaagggataagctcgacaccggcgaggaagatgatcgaggagaaccgccagagcaagctaagaggcagagaccagctgctgcaagaggccgagaagggccaggtgttcagcggctactgcgaggggacgctgtcgtttaagcccacgtacaagtacgacgtcgggggcagcgtctacgacaccagctacaaggtacgagtgccttcgtggacgggcaggatactgttcaaggttggccagtcttcaggcctggatgcagtgctcagctcgtacgaatcactcgactgtgtccggagctccgaccacaagcctgtgaaggcgcatctctgtctcaaagtacgcagtgatggtgatgctgactgatatccagctggcgcaggagggtttcaactggcggttacttctgcagattaacatgacatgctaattaagatgaaaatgttctagtttggaagggtgattatactctagtatattttataacatggcgctcttagcttgtgggccaattgtttcag

SEQ ID NO: 23441 - DNA, 829 bp, Zea mays
  Clone ID: LIB3596-033-H2_FLI
ctcgcctccggcgcgcctccaccatgtatcccaaggcggcagacgaaggtgcgcagccgctggccacgggcatccccttcagcggcggcggcggctactaccaggcgggcggcgcgatggcggcggcgttcgcggtgcaggcgcaggcgcccgtcgccgcctggtccaccgggctctgcaactgcttcgacgactgccacaactgctgcgtgacgtgcgtgtgcccgtgcatcacgttcgggcagaccgcggagatcatcgaccggggctccacgtcctgcggcaccagcggggcgctgtacgcgctcgtcatgctgctcaccggctgccagtgcgtctactcctgcttctaccgcgccaagatgcgcgcgcagtacggcctccaggtgagcccctgctccgactgctgcgtgcactgctgctgccagtgctgcgcgctctgccaggagtaccgcgagctcaagaagcgaggcttcgacatgagcataggatggcatgcgaacatggagaggcaggggcgcgccgccgccgccgtgccgccgcacatgcaccctgggatgacccgctgacgctctgccgctcgcctcacttctgctgaggaaatcaagtgatttggtattggtccgctcccagcaggcagtatcaactactgtaaccaatccatgatctgtatgcggtatcgggctgaactgatactttatggacttgttgcttcaacttggtccgtaaaacgctcaagaccacatgaaaatatggtccataaaacttgttcaaaaatagacattttgcactacattttaattctatgagataaaccatgattatgttt

SEQ ID NO: 23442 - DNA, 1032 bp, Zea mays
  Clone ID: LIB3596-033-H9_FLI
tccgaattcccaggcaggcaggtcggcgaggagggcaggaagaccgaagaccgagccgtgcgggggctcgggacgggaacgggacaggaccccaaaatctcagatccttcctgcccgcccgcccgtgcccgtcgacgcgtcgttcttgccggccgcgccccacctccgccctctcctcctccagggggatcggatacgccacaggctgcgcgatggtgctgtgggtcttcggctacggctccctcatctggaaccccggcttcgacttcgacgacaaaatcctcggcttcatcaagggctacaagcgcacctttaatctcgcttgcattgaccacagaggcacaccggagcatccggcgaggacctgcacgcttgaaaccgacgacgaggccatatgctggggaattgcatattgtgtcaagggtggtccagaaaaagagctaaaagcaatacagtacttggagagaagagagtgtgagtacgaccagaaaatatccattgatttctacaaggaaggagatcccttgaaaccagctgtgacgggcgtcttagtgttcgtttccactccagatccaattggcaacaagtactatcttggccctgctcctctgcaggatatggcaaggcaaattgctacagccaatggccctactggctataatagggattacctgttctcaatggagaaggcattagccagcattagccacgaagatgattcgatcatagagcttgcaaacgaggtgaggaaggtgctcaacagaacaaaggagaccaagatcactggtgccaatgcttccctgaaatcacatgcccctcttgtgcacctgtccgcgcttccagaaggcaccgttgtggactcgagatagcgagagccttggacgttggacctctactcggaatttacttccagctcttgcatgtttgtggccatcatgtactgattttcccttttcaacagttgtcgtgaggctgtatcttctggagttaaaaaaaatgctaaaagccggcactaataatgatattaacttg

SEQ ID NO: 23443 - DNA, 833 bp, Zea mays
  Clone ID: LIB3596-035-C11_FLI
aaaacctccaaggctccaaccctagccgcgatccgacaacgcctccatccctagccgactgctgcaagcttcagagctcaagagtcagggcgccatggcgacagagacggagaccttcgcctttcaggctgagatcaaccagctgctctcactcatcatcaacaccttctattccaacaaggagatcttcctccgggagctcatttccaactcttccgatgcgttggacaaaatcaggttcgagagcctcactgacaagagcaagctcgatgcgcagccggagctgttcatccacattgtaccagacaaggcttcgaacacgctctccatcatcgacagcggcatcggcatgaccaagtccgaccttgtcaacaacctcggtaccatcgccaggtccgggaccaaggagttcatggaagcccttgctgctggcgctgatgtgtctatgattgggcagttcggtgtcggtttctactctgcctacctcgtcgccgagagggtcgtcgtgaccaccaagcataacgatgacgagcagtacgtgtgggaatcccaggcgggcgggtcgttcactgttactcgtgacacgtctggggagcagcttggcaggggtactaagattacacttttcctcaaggaagatcagttagaataccttgaggagcgtcgcctcaaggatttggtcaagaagcactctgagttcatcagctaccccatctccctgtggaccgaaaagacaacggagaaggagatttctgatgatgaagatgaggaagagaagaaagacgctgaggagggaaaggttgaggatgttgacgaggagaaggaagagaaag

SEQ ID NO: 23444 - DNA, 783 bp, Zea mays; identical to SEQ ID NO: 22475
  Clone ID: LIB3596-036-D1_FLI

SEQ ID NO: 23445 - DNA, 654 bp, Zea mays
  Clone ID: LIB3596-036-F6_FLI
ccgcccttgagtcctgcccccaagatgacgatgatccccctcgccggcttcaccgccctatctgccgccggcctcctgctcatcttctcctccttcctgctgcaaactcaaggaggagccagaagcagcgaggaggagcggtacgtgccggtgcgcagggtggtgtaccggtccatgacaccggcggcggcgagtgcggcgacgacggcagaggcagcggcagcggcggcatcgtacgagccgttcgaggtgtgcgaggggtgccggtgctgcgcgccgtcgtcgtcgtcgtccaacggcagcagcagctgcgtggacacgagctgctgctacgccatcgactgcgacctccccggcaagcccttcggcacctgcgccttcaccccgcaaacctgcggctgcggcagcaactgcacccagccctcgtcctgatgatgactcatctttcctgcaacttggctacttcttctggatcatccatcgtcttacgttacgttacgacctgatgacagaggatgacatgattagctagcacgcagattagatgactcacgtgtactcgatcatgatggatagattatccagttaattcccagatagagagttctgcatgaagataataatacaatgaataataatgtgtgttcgtttcag

SEQ ID NO: 23446 - DNA, 660 bp, Zea mays
  Clone ID: LIB3596-036-G8_FLI
gagagcaaaccacaccagcctcattgcctcaatcccaaaccaatccgtcgcagacactcaaggtcgcaggatgcctccgccgcgtgagcacaaccagccccaggacgaagaggacgacgacaccgcaggcgtcgtcaagctcatcagcgccgagggcttcgaattcgttgttgacaggaaggccgccatggtctccaacaccctccgcaacatgctcacatccccaggcggcttctctgagacgcgccagggcgaggtccgcttcccagagatccccaccaacatcctcgagaagatctgccagtatttctattggtcgctccattactccagtgggaaggagacagcggagtttccaatcgaaccggagataaccctggagcttatgatggccgcaaactatctggacacttgatgaggagcctgaggggtataatcctagtttgttattaaatatgaaagaacgaagcaatgaatactagtgaatctttccttccattcgtttcctttttttttttgcattacatgatgtaaccagcatacgctggatgaaatgcttgttttttcacagatttgatctgatctgatccgatccagtgtggtctggcacaatgtaatgtaaaggtgggagggaagcagaaaccaaggaatacattttgc

SEQ ID NO: 23447 - DNA, 503 bp, Zea mays
  Clone ID: LIB3596-037-E4_FLI
ctcgtcttcctcccgagtccttctccggattcgatgtccgtctcctgatttattggtggaactgcaggtgactaggagcagtagcgagagggattctggatggccaagtcgaagaaccacacggcgcataaccaatcgttcaaggcgcacaagaacggcatcaagaagcccaagcgccaccgccagacctccaccaaggggatggacccgaagtttctgaggaacttgaggtactcaaggaagggcaacaagaagagtggcgaggctgagtccgaggagtaagatgatggtgattgagtttgtggcgacaaatgcatctcttgtatcgctaagagtcttagctgtgaacttagttctcacttctgtgtgactgtgatcaaaggagatccatcagttggtaccgaagtgtattttatgtcttgttggttacctggaatttaattaaaaccatcagttgtatccttttgagaattgggcaattgatgtgtcgttttctgttctgc

SEQ ID NO: 23448 - DNA, 759 bp, Zea mays
  Clone ID: LIB3596-037-F12_FLI
tcagatccaagaagagggaagagcaccaaggaccttcggcgcccgttcaggatccacatcttcccgagcgagttcttggttgacctcttcctcttcggaccacctccaaggctcttggtgtagcttgccactctcaccaatcaagttttcatgtctgatctcgacattcagatcccaactgccttcgatcccttcgctgaggccaatgctggggactctggtgcggcagcagggtcaaaggactacgtacacgtgcgcatccagcagcgtaatggtcgcaagagcctgaccaccgtccagggattgaagaaggagttcagctacagcaagatcctcaaagatctcaagaaagagttctgctgcaatggtacagtggtccaggacccagaacttggacaggtcattcagctccagggtgatcagaggaagaacgtctcgaatttcctcgtccaggccggcattgtgaagaaggagcacatcaagattcatggtttctgagcaaccgccgggtccatagcaaaccaaccctgcatgcagggccagcttattatatataatatctgaggtggagcatatctatctggctgtgtactgcaagcaggcctagtacgccgcctgcgcgttcctcctattacacatataggcccctccctgcgtgtatgcttgttaccgtcgtgtcgaaccttgtactacgaggctccatcgaacatcgatggcttgcttctttatcagaacatgtttgaataaacgctatttggt

SEQ ID NO: 23449 - DNA, 431 bp, Zea mays
  Clone ID: LIB3596-037-G5_FLI
tgaaagggaggagcttgagaaacaaaaagctcatgaacgttatatgaaacttcaggagcaaggaaaaacagaacaagcacggaaagatttggaacgtcttgctttaataagacagcaaagggctgatgctgcaaagaaacgcgatgaggagaaagctgccaaggagcagaggaagtcggaagcacggaagtaactgcaatatcatggacgatgagaccacgaaagcatgatctgcgttagttggatatttatttctaatgcatcagttatcttgttataaacctggtccctattctgtatccccataaaatatgcattgacaaaattagtaacagtcttgtgggcgtgtcttcctgtaaacttgagcttgacaaaattagaaagtagtattaaggtcagcttatgcgaaactggctcttttgtctgctgtc

SEQ ID NO: 23450 - DNA, 478 bp, Zea mays
  Clone ID: LIB3596-037-G9_FLI
ccagccaccgccgctagaagaagagctcggcgattcccaggtcccgcgagaatatgccgaagcagatccatgagattaaggacttcctcctcaccgcgaggaggaaggatgcccgctcagtgaagatcaagaggagtaaggatgttgtcaagttcaaggtgcgctgctccaagtacttgtacacgctctgcgtcttcgatgctgagaaggcaaacaagttgaagcaatctcttcccccaggtttgaccgtcgaggaggtctgattggatacatggcaacgccgagttgaactacccaagcttctttatcagtagcagagcatgctactctatgtacttttggaacctaagctattagacctgtcagtgttggatgtctggatcttgcatttttggagaaataccaatttacctcgttcaaggatgcaagtatatttcttgtttaactgcacattactttatatttatgcctgtttcat

SEQ ID NO: 23451 - DNA, 831 bp, Zea mays
  Clone ID: LIB3596-038-A11_FLI
gggtctgcagcccccaactacccccagcctcggaaggaaccttccagaagcgcaagactctaaggccgtcgccttcccattcttcctcgccgcgggggtcgcctgagatcacataaacaatggtgaaggctgttgctgtgcttggtagcagcgatggtgtcaagggcaccatctttttcacccaagagggagatggccctaccgctgtcaccggaagtgtctctggcctcaagcctggcctccatgggttccatgtacatgcacttggtgacaccaccaatggatgcatgtcaactggaccacactacaatcctgcgagcaaggagcatggggcaccagaagatgagaaccgccatgctggtgatcttggaaacgtgacagctggagcagatggtgttgctaatatcaatgtcactgacagccagatcccactgactgggccaaactcaatcattggcagagctgttgttgttcacgctgatcctgatgatcttggaaagggtgggcacgagctgagcaagagcactggaaacgccggtggccgtgttgcttgtgggatcattggactccagggctgaaaacgatcgccggacttgggggtgcctgagaggtccgtctcctgccgtcgccagcagacgagcctgaacattgggagacatcgtgaaataagagcgtcgctgatctgtgatcatcgtatttgtcattatgcacctgtagccaccgatggactaaactgtgctggattatgctgttggatgaccagagtatgtgttacatgtcggttttgatgacatcctatcgtttcgatgtgctttgtggaagtgttgttgc

SEQ ID NO: 23452 - DNA, 1117 bp, Zea mays
  Clone ID: LIB3596-038-C2_FLI
gatgaagcgccagaaaagagtccacatgaccacatcggtctctccggttctttaattgcgcgccaatctgttttatatatacggagagagcactcctgttttgttgcaaattctattactagctgcaaaagggcgtgtttgagactagcggaccgaccttgaagttgaagttgaaaaggtcggcctgcgcggcgatggatgtcaagtgccggcgtctggaggggaaggtggccatcgtgacggcgtccacgatggggatcggcctcgccatcgccgagcgcctcggtctggagggcgccgccgtcgtcatctcctcccgcaagcagaagaacgtgaacgaggcggtggaggggctcagggccaagggtatcaccgcggttggtgccgtctgccacgtctccgacgcacagcagcgcaagagcctcatcgagacggccgtcaagagctttgggcacatagatattcttgtctccaatgctgccgcaaatccttctgtagatagcatacttgaaatgaaagagtctgttctcgataagctgtgggatattaacgtcaaggcttctatccttcttattcaggatgctgctcctcacctacggaaggggtcatctgtgattattatttcttcaattgctggttacaatccagaacaaggattgacaatgtatggtgtcacaaagactgctctctttggtctcacgaaggctcttgctggtgagatgggacccgatactcgtgttaactgtatagcccctggttttgttcctacacggtttgctagtttcctcacagaaaatgagaccattaggaaagagcttaacgagaggaccaagcttaagagattgggtactgtggaagacatggctgcggctgcggcttttctggcgtctgacgacgcatcatacattacggctgaaaccattgttgttgctggaggggtgcagtctaggctgtaaatctggctgaagtttatatttacttggttaataatgtgtactagtgccctagagcatcaggcgtggctaataatgtgtactagtgccgctagagcatcaggctaccttctatatatgacaggcaactctaaaagattttctatatcttattcctcttcaat

SEQ ID NO: 23453 - DNA, 1391 bp, Zea mays
  Clone ID: LIB3596-038-G7_FLI
gctgcgctgccgatgcggtgcccagcgagccaggcacggaggaggcgcgtgctctgctccactccacctccccccccccccccccctgcgccactgacgccgctcgttcgcgcagttttggtcttctggccagcagggcagggggggaacccgcgggagcgaggcgcgcgagcgagcgagcggagggaggaggaggatgatgcacgccaagtcggagtcggacgtgacgagcctggcggcgtcgtcgccgccgcggtcgccgaagcggggcgttgccgcggccggcaccggcggcggcggcggcggctactacgtgcagagcccgtcgcgggagtcgcacgacggcggcggcggcgggtacaagtcgtcgtcgatgcaggccacgccggtgtacaacaacagccccagcgagtcgccgtcgcacccctcctacggccgccactcccgctcctcctccgtcagccgcttctccggcggcctccgcgggggcggcggcggcgggcgcaaggtgctcaacgacaagggctggcccgagtgcagcgtcatcgaggaggaagggccctacgagggcctcggcgccggggacagcggcctctcccgccgctgccagatcgtgctcggcttcctcaccttcgtcctcctcttcaccgtcttctgcctcgtcatctggggcgccgcccgcccgtacgagcccgaggtcgtcgtcaagagcctggtgatggacgacttctacgctggtgaaggcacagaccacagcggcgttccgaccaaattggtcacgacgaactgttcgctgcacgtatcggtgtacaaccctgccacaatgtttgggatccatgtcacctccggccccatccgtctgatctattcagagatctcaatagcagtcggccaggtccgcaggtactaccagccgaggaagagccaccggacggtgacggcggtgatccacggcgagaaggtgccgctgtacggcgccgggggcggcctgacgctgtccacgagcgcgggcgggggggcggtgcccctgacgctggacttcgacctcacctcccggggctacgtgatcggcaggctcgtgcgggtgacgcacagggcgcacgtgacgtgccccgtcgtcgtggacgccaggaggaccaagcctgtcaggttctccaagaaggcgtgcgccgtgtacaaggcctgagcttgagagctcgtgaaacctgtgatcgaccgagcgttagcaatgcgtgttcttgcaaagatgtagctattgtgttgatggtgaagaacaataagcgcacacgtatggtcttgtcgatatatcgcgctgtaaaggcctgttgttcttgtgtgtgtatccctttttcagggcatgatcgtagagatggaagatgacttaccatgac

SEQ ID NO: 23454 - DNA, 665 bp, Zea mays
  Clone ID: LIB3596-040-B11_FLI
gccggcgctgagatgttggtttatcaagacctcctatctggcgacgagctcctgtcggattcattcacctacaaggagctcgagaacggcgtcctgtgggaggtcgagggaaagtgggtcacccaaggtcctgttgatgtagacattggtgccaatccatccgccgagggtggtgaggatgaaagcgttgatgacacagccgtgaaggtggttgatattgttgacacattccgtctacaggagcaacctccttttgacaagaaatcatttgtctcttacataaaaaaatacatcaagaatctcactgctgtgttggagccagagaaagcggatgagttcaaaaagggtgtcgagggtgcaaccaagtttctccttagcaagctgaaggaccttcaattttttgttggtgagagcatgaaggacgaagcgtccgtggtattcgcctattacaaggatggtgccactaatccgacattcctctatttctctcatggtcttaaggagatcaagtgctagattagttacccatgttgggtactatatatgttctattgttatagccacaactatagctgccctgcctgaactgaactcaggttttttttaagaaaaaactgtccaagattggattgcttgttaaagctaaatattgttattgacgtgtt

SEQ ID NO: 23455 - DNA, 769 bp, Zea mays
  Clone ID: LIB3596-041-C5_FLI
ccgtccgccctcgcgctctccgccagcacgcgggtcagcagcttcccactgacgctgcggctggaggcgcgtgtggcgcgcgcgcccggcagcgcccagctccgcccggcgaccgcgtgctcttggccgcgccccttgctgcccgagctcgcgccggcgttccctcgcgccggcgcccgcagcgccggcagaccgcagccgctgttccgaccacgcgcaatgatgacgacgtctcagatcgccagctgcgccttcaccgtgggcacggtcgccgtcctccccttctacacgctcatggtcgtcgcccccaacgccgacatcaccaaacgcacggtggagagcagcgccccctacgtcgccctaggcctcctctacgcctacctgctctacctgtcttggacccccgacacccttcgcgccatgttcgcgagcaagtactggctccccgagctgccgggcatcgtcaggatgttcgcgagcgagatgaccgtcgcctccgcgtggatccacctcctagcagtcgacctcttcgcggcgaggcaggtgtaccacgacggtgtcaagaacaacatcgagaccaggcattcggtctcgctgtgcctgctcttctgcccagtcgggatcctggctcatgtggtaaccaaggtattggcaggggcagctggtcgctcacattgatgattggaattgggttgttgtatctaggatttccgtttgtttagctggtggagtttatgagatctggatatgaataaagcttgttcaaggc

SEQ ID NO: 23456 - DNA, 224 bp, Zea mays
  Clone ID: LIB3596-042-A6_FLI
ctagtagatagtaagtagatcacgcagcgcagtagctctggattaattaataataattgctcgtgcgtgtgtccagagccgccatggctgcccatgtggacccgctggttgtggggagggtgatcggcgacgtggtggacttgttcgtgccgacggtggccgtgtcggcgcgcttcggcgccaaggacctcaccaacggctgcgagatcaagccatccgtcgcc

SEQ ID NO: 23457 - DNA, 747 bp, Zea mays
  Clone ID: LIB3596-042-F8_FLI
acaatcgttcaccgatcgatccagtgcgtcctgcatggaaactgccgccgtcgccgccgccggtgccgggcgccgcatcatggtggccgtggacgagggcgaggagagcctgcacgcgctcaactggtgcctcgccaacgtcgtctccccggcaggaggcgacacgctggtgctcgtccacgcccgccgcccgcgcccggtctacgccgccatggacagcgcagggtacatgatgacctcggacgtgctggcgagcgtcgagaggcacgccaacgcggtctcggcggcggcggtcgacaaggccaagcgcgtctgcgcggaccacccgcacgtcaaggtggagacgatggtggagagcggggacccgcgggacgtcatctgcgacgccgccaacaagatggccgcggacctgctcgtcatgggcagccatggttacggcttcatccagagggcgttcttgggcagcgtcagcaaccactgcgcgcagaactgcaaatgcccggtcctcattgtcaagaggcccaaggagtagaaaggctcctcgcatgtacgctgcagcttagccaataatgtttcatgggcgaccatataggcatatatgtacacacttcacatcccattgcatggcagtgtcttcccttccctagttcaacaactagctttctgctggaataaggtgttcagacaaatcttcttgcatttggtactcttgtttagagagaagcgttccgtaaccttcggttgcct

SEQ ID NO: 23458 - DNA, 612 bp, Zea mays
  Clone ID: LIB3596-043-B2_FLI
gaagaatatatataaaaaaaaatcatctgatggcgttgttcgttctccgtgtttcaggtgcggagggacttgggctcgctggacaggtacgtgtgggcgttcgtgaacaacaggccgctgtcgccgagctacaagtacagccggaagatcccggcgaagacgtccaagtcggagtgcatcagcaaggacatggtccggcgcaggttccgcttcgtcggccccaccgtcgtccactccttcatgcaggcggtcggcctcaccaacgaccacctcgtctcgtgcccgcgccaccgcgcctgctccgccgccgccgttaactgattctgctgaccaccgtccaccgatcgagagccagacgtaaggaagaagagagacctttatatataaggacacgtacaatacaaccgagaaaaaagagaaaggtagtagcctctagtagcactagaagtagtacgtagtatacggaagggagagtgctggtttgcaattgtgtgtacgtacgagtacgatgatcgagtgtgcttgtgtagattgattacgcccccacccctaattagtcaatgaatgagcttgcttgctgcgacttccgcctgcacactgcagtgtgcagtc

SEQ ID NO: 23459 - DNA, 978 bp, Zea mays
  Clone ID: LIB3596-043-B4_FLI
gatcggcaaggccaatcccgagcagtggtgcgaaacctcgagcgctcgcgccggtgaccataacaaagaggaagccgcggtagcactggtagcggcagcagtaagggggagatgtcgtcggcgttcagcggcgatgagaccgcccctttcttcggcttccttggcgcctccgctgcgctcgtcttctcatgcatgggggcggcgtacgggacagccaagagtggcgtcggcgtggcgtccatgggtgtcatgcgcccagagctcgtcatgaagtccatcgtgcccgtggtcatggctggtgtgctcggtatctacggcctcatcatcgccgtcatcatcagcactgggatcaaccccaaggccaagccatactacctctttgacggctatgcccacctgtcgtctggccttgcctgtggtcttgctgggcttgctgcaggcatggccattggcatcgttggtgatgctggtgtcagggcgaacgctcagcagccgaagttgtttgttggcatgatcctcatccttatttttgctgaagcacttgccctctatggtctcatcgtcggcattatcctctcgtctcgtgccggccagtcccgcgcagattagaggcacgtttcagatgtcaacaccgtgccgccgacagttgcctggtcgtagctgggtcatgttctatatccatgagacaagaagctggagcactttgactctttgagaggcttacttttatgctgtctagttttccatcttctgttgagtcgagaaaacaagaaaggctgtgtagccaagggatgacttttacccttgtgccattcttttccctgtcgtggtggggggtgggttgcggttgatgcttatttatgcacagtttttgcttgggtcggggctggggctgggacgttggtgtaatgtggtgaataagcgagtgcatgcaacgcaattggaacttaagacatttttggtaaaatactctttcgt

SEQ ID NO: 23460 - DNA, 1080 bp, Zea mays
  Clone ID: LIB3596-043-C10_FLI
cgaaccttggcagaacgaagctgaagtagttcgttgtgaacccagtatggcaaacgcgccgaggatcctggccctcggcctgctgctagcgctcctgtgcgctgccgccggcccggccgccgcgcagaactgcggctgccagcctaacttctgctgcagcaagttcggctactgcggcacgaccgacgactactgcggcgacgggtgccagtcgggcccgtgccgctcgggcggcggcggcggcggcggcggaggcggaggcagtggcggtgcgaacgtggctaacgtggtcagcgacgcgttcttcaacggcatcaagaaccaggccgggagcgggtgcgagggcaagaacttctacacccggagcgcgttcctgagcgccgtcaacaagtacccgggcttcgcccatggcgggacggaggtggagggcaagcgcgagatcgccgccttcttcgcgcacgtcacgcacgagaccggacatttctgctacatcagcgagatcaacaagagcaacgcctactgcgacgcaagcaacaggcagtggccgtgcgcggcggggcagaagtactacgggcgcggcccgctgcagatctcgtggaactacaactacgggcccgccgggagggacatcggcttcaacgggctcgccgaccccaacagggtggcgcaggacgccgtgatcgcgttcaagacggcgctctggttctggatgaacaacgtgcaccgcctgatgccgcagggcttcggcgccaccatcagggccatcaacggcgccctcgagtgcaacgggaacaaccccgcccagatgaacgcgcgcgtcggctactacaagcagtactgccagcagctccgcgtcgacccagggcccaacctcacttgctaggccagcagctcctgctagctcgtccacaataaatgctcggcgtcgcaccctcgcgaaaccaagagtttactactgactagtacgagctagctagcatgcagtaataataatcatcgtaataataataataaaacgacggggctgagccactttgttcgacctgaatgaataatgaagcagctgtatgttccctcggt

SEQ ID NO: 23461 - DNA, 1105 bp, Zea mays
  Clone ID: LIB3596-043-D10_FLI
taaatccctaaccccgcgcgtctctcttcctatctcctttccggcttcccacctgtgctcgcacccgccgccggccgccagcccgagcacactacgcgcccgcccgccgccacccagcgcgctgcgccgcgccaccaccccgctcgctgcgccgcgccgcccgctcatggagagcttcccttcccatctcatggagacggaggacttcttctaaccggcgctctcctcggtttctcttctctcggtgatttttgctttcttgcttggggacccaataagccaagtaattctgcttcttctctcggtttcgcgggagtaaggcgtttcttggttttcctttcctgagatgggtctgagaaagagaaacgccatggttggtgaggcagccatgttcgccacatcttggtagccctcactcggcattggcatcctctcgttcttggacttgaagttaactcagccatgaggaagcatgggtggcagctgtcgtaccaccctctccaggtggttgcgatagccgtgttctcggcactggggttcaccttctacgtcttctttgtgccgttcgtggggacgaagccgttccaaattgtggccatggctatctacactccattgattacatgtgttgttgtgttatacatatggtgtgcggcaacaaatcctggagacccaggcattttcgattcaacgaagaatttgaagttagataagaatgaaaagcactcctatgtgaattcggatcaggggattaatcattgagaaggccattaagtgagacttttggtactgctgataacagtgagaagctgagcagcatgcttgagaggaacaattcgccttcttggcccagattttctggaattatttccctggtttgtctcccattctcttgcctttgcaaacggtgcctccattcagacagtctatcttcagaacacaaaatgtgtgaagaaggcatgtttttctgcagcttatgcgaagcagagatattgttaatgagtccttttcctattccttgtactgcactcatgtactccatatattgctcttggggctattcaatacaaacaagtgctattgatagcacggtatcatttttttc

SEQ ID NO: 23462 - DNA, 579 bp, Zea mays
  Clone ID: LIB3596-043-D5_FLI
cgcaccgctcctgagtcctgtccaccctgccaccgccgacgccgcgccgccgcagcaattgtcaccgtcgctatggcccgtatcaaggtgcacgagctccgggggaagagcaagacggacctgcaggcgcagctcaaggagctgaagtctgagctctccctcctccgcgtagccaaggtcaccggcggcgcacccaacaagctctccaagatcaaggtggtgcgcacctcgatcgcgcgcgtgctcacagtgatctcgcagaagcagaagtcggcgttgcgggaggcgtacaagaagaagaacctgctccccctcgacctccgccctaagaagacccgtgccatccgccgccgtctgaccaagcaccagctctctctgaagaccgagagggaaaagaagcgtgagaagtacttccccatgaggaagtatgctatcaaggcctaggtcagaactgtgagatgctgcgcttagcatatcatcggctgtgttttaatttttggtttgtatggacatttgctgtgggtcggaagtacgatgtattcctccatttccataaatggctaaattggtttgactggc

SEQ ID NO: 23463 - DNA, 862 bp, Zea mays
  Clone ID: LIB3596-043-E7_FLI
tcatcctcacttcaggtctgcagcccccaactacccccagcctcggaaggaaccttccagaagcgcaagactctaaaggccgtcgccttcccattcttcctcgccgcgggggtcgcctgagatcacataaacaatggtgaaggctgttgctgtgcttggtagcagcgatggtgtcaagggcaccatctttttcacccaagagggagatggccctaccgctgtcaccggaagtgtctctggcctcaagcctggcctccatgggttccatgtacatgcacttggtgacaccaccaatggatgcatgtcaactggaccacactacaatcctgcgagcaaggagcatggggcaccagaagatgagaaccgccatgctggtgatcttggaaacgtgacagctggagcagatggtgttgctaatatcaatgtcaccgacagccagatcccactgactgggccaaactcaatcattggcagagctgttgttgttcacgctgatcctgatgatcttggaaagggtgggcacgagctcagcaagagcactggaaacgccggtggccgtgttgcttgtgggatcattggactccagggctgaaaacgatcgccggacttgggggtgcctgagaggtccgtctcctgccgtccccagcagacgagcctgaacattcggagacatcgtgaaataagagcgtcgctgatctgtgatcatcgtatttgtcattatgcacctgtagcaaccgatggactgaactgtgctggattatgctgttggatcacctgagtatgtgttacatgtcggttttgatgtgacatcctatcgtttcgatgtgttttgtggaagtgttgttgcaagatttcaacagtc

SEQ ID NO: 23464 - DNA, 984 bp, Zea mays
  Clone ID: LIB3596-043-F5_FLI
cccacacggccacacagcacgcacggacgccatcgaggaaccctaacaagagcacgtcacacggggcgacggtttggcgccgcgccaccggcgactggcggctggtgcagcagatggtaaattatttctcagactcagagtgcaagaaagttggttcgtccagggaagaggaatagaggttatggttttgtgtgagattgattagcatctgccttcaaatcattcccttggtatttattgagcactgcaagcggttgaggacttgaggtaaacatgctgaagtgcatcttgagccagtcatggaagagaggagcacatatgctacatgcaggaaattcagcaccagctgtactaacttgctggagtcaatttcacagtgggcaggtctggagttcttccaggagcttcttcggcgtggaggacttcgtggacgaggacaacagtaggccatacacgtacaagaaggagaagaggtccaagaacccccacaagcacatctcgttcaagcagcgcaccatcgcccacatggagccgttcacgctggacgtgttcatctccaagcgcttcgtctcggcgtccctcacgcaccggtcgacctgcaggcaggtcgcggtcgccgggaccaactccaaggacatcaaggcggcgctcaggtcgaggtccgacgtgccggcctgcctggccgtcgggcggttcctggccgagagggcgaaggaggccgacgtgtacacctgcacgtacacgccgagggaacgggacaagttcgaggggaagatcagggcggttgttcagtcgctgatcgataacgggatcaatgtgaaactttaccttgactgagtttggtgctgtatgagtagtagttctgttggaacttgcgcgtgggtttatctgttgccagggttgcaggttcgaattattttgtgtccttatgttgataaaaaaattaatttgctcaaatgaaggaaaacacatcattggataccc

SEQ ID NO: 23465 - DNA, 501 bp, Zea mays
  Clone ID: LIB3596-043-G3_FLI
ccggaggactgagaccagaggaggagacgtcacgcctgcgcggctgcgcccaccatggacgaggatgagtttcggcgcatgctcgacctcttcccggtcgtccgctcccgagactactgctgctccgatcctggaacatccagcagaggaaccagacagcgatcacgagttcaggaggcaactacgggcgataataaggactcgtcctgtgcacaagatatgtttatgcagaaattgaagatggctgcggagaataagattggagcgacaaaggcagagttcttctgcaagacattcgaagaagttcatgagaaacttgttcacagagagctgaatttggatgctgctaagaagttcctgagcgcatatgagagctgatgatgaacaataggtagatgctgctaaagggtcggtagttgccaatgatctggaaatttgttgatgctgttgagattttgatcacaggcaaacttttaacaacaggtagatgctgttgagcgc

SEQ ID NO: 23466 - DNA, 1037 bp, Zea mays
  Clone ID: LIB3596-043-H2_FLI
tcggaggaatgcaatgccgtaaacgaaagtttcccatccttgtgttttggggggtgggccatcgcggtgttgataagaaaaaggcggactccttgtaccagtttggttttgttttgtacgcgcattggttcctggcttgctcaataaattgcaaccacttccttccgaattccgatctagcggactaccagttcctcccgatcttgggtttgaggaggccccgagccgagcgtcaggcatggagcactgctatttgaggcagccgatctcgagggccgaggcagtgcccgagaggaggtccaggttgtggcagatggacgcgctgccgctgccgccccgggcggaggtcctctgcccccagcctcgccgcgccgcccggatccccttcgccgtttcagtaaacaaggccatccccagtgcgcttccgccgtacagaccagcctccgcctgcgacatactcgatgatcttatcctcagcaagaatgacttctcagatggagcagattcgagcagcggccaggcgggttttttatgcggctcgcctccagtgcgcgctaacaaccctgtcgtccatgacccgcagttcggtaaaagagcgctgccatccatgtctcccctagggagcagctcccacgtcaagcttaaggttgaggcaggctcgctgttggggtcgtgcttcggtgcgccgaaggtctcacacgaagaagcagcttcggctgaagtcgtctccaagagatggccgaaggtcccttttcatggagcttcggcgttttaaaccgacatagagatagaatgacctttttatacatataggtctgagtcaatgctgtaaactttcgcaaggggcataattgtaatttgtcacaggctgcggcctgtgcctataaatagatgaacagtacctctgtaccgttcaggcgaacttgcttttggccttcgcatcacatttgtactttttgccttccgcaagaccgaaggtacatttgtacttcaaagtcatttatattcattaatacaagtagagataatcctatgat

SEQ ID NO: 23467 - DNA, 917 bp, Zea mays
  Clone ID: LIB3596-043-H8_FLI
ttggttgggtcgagctcccaaccaactcgctcccgcgccagccaagccagccacgacccacgagccaccaccattacccgcccgcccgccacaggccacatcgtttccggcgccggcgccgagtacaatacaaggaaagcagcatggtgttcgagcagcaacaggaggaggcggtgttgccgggcgcggtgcacgggcaccggctgtccacggtggtgccgagctccgtgacgggggaggtggactacgcgctggcggacgcggacctggccttcaagctgcactacctgcgcggggtgtactactaccggtccggggacggcctcgccaccaaggtgctcaaggaccccatgttcccgtggctggacgaccacttccccgtggccggccgcgtccgccgcgccgaggcggagggggacgccgcgccgcgccggccctacatcaagtgcaacgactgcggcgtgcgcatcgtggaggccaggtgcgaccgcgacatggccgagtggctccgcgacggcgcgcccggcaggatcaggcagctctgctacgacaaggtgctcggccccgagctcttcttctcgccgctgctctacgtccagatcacaaacttcaaatgcggtgggctggcgctggggttcagctgggcgcacctcatcggcgacatcccgtcggccgccacctgtttcaacaagtgggcgcagatcctgagcggcaagaagccggaagccaccgtcctcaccccgccgaaccagccgctgcagggccagtcccccgcggcgccgcgctccgtcaagcaggtcgggcccatcgaggacctctggctggtccccgcgggccgcgacatggcgtgctactccttccacgtcagcgacgcggtgctcaagaagctccaccagcagcagaatgggcgccaggac

SEQ ID NO: 23468 - DNA, 612 bp, Zea mays
  Clone ID: LIB3596-044-B4_FLI
ctctcctcctccagagctcgtcgccaccggccaccgccaccctcgatcacgccgtccgtcgaggtaaggtcagcatggtgagggtcagtgtgctcaacgatgcgctcaagtccatgtacaacgctgagaagattggcaagaggcaggtcatgatcaggccgtcatccaaggtcatcatcaagttcctgacggtcatgcagcgccatggctacattggagagttcgagtacgttgatgaccaccgatcgggcaagattgtggtcgaactcaacgggaggctgaacaagtgcggcgtcatcagccctcgctttgatattggcgtgaaagacatcgagggatggactgcaaggctgctcccgtccaggcagttcggatacatcgtcctcacgacttcggcaggcatcatggaccacgaggaggcccgccggaagagcgtcggaggcaaggttctaggtttcttctattgaagaagctgagaatctttgttatggcctgcctgcctgtcttactctctcagactagagtacctgttattttactttaatatgtctctctcagactagagagccttcttttacttgaatattggttactgcattggtctttcacttt

SEQ ID NO: 23469 - DNA, 776 bp, Zea mays
  Clone ID: LIB3596-044-E8_FLI
ccactcccaagccagtacccacagtcctacgagcagtcgcacgcaagtgtcaagagacaaaacggtcgacatggctcgcacgcaatctgccgtagcggtcgccgtggtggccgcggtgctgctgctggcagcggcggcgacgacctcggaggccgccatcacctgcgggcaggtgagctccgccatcgcgccctgcctctcctacgcccgcggcacggggtccggcccctccgcgtcctgctgtagcggcgtcaggaacctcaagagcgccgccagcaccgccgccgacaggcgcgccgcctgcaactgcctcaagaacgccgccaggggcgtcagcggcctcaacgccggcaacgccgccagcatcccctccaagtgcggcgtcagcatcccctacaccatcagcacctccaccgactgctccagggtgaactaaaacctagaccacgcgcgacgacggccgcctgatcgatcgaccaaccattccgccgtcgccgccggccggatcatcgatcgtcgtcatgatgatatctatcaatctacgcgtgatgatcgatggctacttgtctactgctatgtactactaaataaaatctctccgtgtgtgcacgtacgcttgcatgtgcatggtagcatgtatgtacgacgtcgtccatgtatgtgtgtgtgacgtgtgagacagagagagagagagagagagagagagacaggatcgatcgagagacggtcatgtccttttggctgtttggtttattcatatcacaacttttgagtgt

SEQ ID NO: 23470 - DNA, 635 bp, Zea mays
  Clone ID: LIB3596-044-F12_FLI
tccggagcagccgcagtcccaccgaccccgccgccggtcgccctccatctcctcgccgctgcctctcgtttctcttttcaataatcaagatgagccgtggtggtagtgccggtggtggtcaaagttctctgggttatctctttggaagcggtgagccccccaaaccagcagtggcaccagctgcaagtgctccacctgttgagaaaccatctgctgcaaagactgatgcggccaagcaggttgctgctggggttaccagccaaaccaataactaccacagggctgatggtcagaacactggcaacttccttacggaccgtccttcaaccaaggtccacgctgctcctggcggtggctcttccctgggctacctgttcggtggcaactgatgcccgtgctggtgcgctcaccaaagttatcctcccctgcctgctgcgtgctatgtctgaatcgtgaacaaccgttgtcatttcatgtgtgtaccccgtgcaatgctttgtgcgcatggttgatttctctgtggcaaacttcccgtcctgcatggggttgtaagctgtctctaaatttcacggcaagtcgtgtgcctgaaccttcatcttaagttgttgtcgtatcccttcgtcttgtttcggttg

SEQ ID NO: 23471 - DNA, 588 bp, Zea mays
  Clone ID: LIB3596-045-D5_FLI
cgaacaaaagctctcgatctcaccgacaccgaggaagaagagatcaatggcgtccgagcagggagtcgtgatcgcgtgccacagcaaggctgagttcgacgcccacatgaccaaggcccaggaagccggcaagctggtggtcatcgacttcactgccgcctggtgcggtccatgccgcgccatcgccccactgttcgtcgaacacgccaagaagttcactcaggtcgtcttcctgaaggtggacgtggacgaagtgaaggaagtcaccgcggcctacgaggtcgaggcgatgccgaccttccacttcgtcaagaacggcaagacggtcgcgaccatcgtgggtgccaagaaggacgagctcctggccctgatcgagaagcatgccgcgcctgcgcctgcgtctgcgtctgcctaaaggagatcagatcagtcgtcgccgtcaataagggccagcacgtatggctgtagatgttgtcgttatcagttctggctttgtcgtttgtgggcgattgtgaactagtagtatgtttgtttctatccgattcggaggcgatacttaaccatggatacttgttgtgcgttcgtttc

SEQ ID NO: 23472 - DNA, 840 bp, Zea mays
  Clone ID: LIB3596-046-C12_FLI
agaaaattccctcctccccctgaagtcccgaagctcgcggaagcgccgagatgtaccatcccacgagaggcggcgtccgcggcggcagagatcaattcaaatgggacgatgtgaaggttgacaagcatcgggagaattaccttggtcatagtgttaaggctccggttggtagatggcagaaaggaaaggatctttactggtatactcgggataagaaatccgacacggaagatgctcttaaggaagaaatcaggagagtgaaggaagaggaggaacaggctatgcgcgaggctcttggcttagctcctaagcgcagcaatcgaactcagggtaatcgcttggataagcatgaatatgctgagctgattaagagaggatcaactgcggaggacttgggagcagggcacgctgaagcagcacaagtgcagggtctaggattgtacaaggcccctcgcgatgagggtgggtcaagttctttgagccttgaccctcctcaaatggagcctgagcaggctgaacccctaccagcacccaaggggaaaaggccacgtgaacgtgacgagaggggaggggagaaggaacggaaacgggacaggcatggtgatggaaaggagaggaggcgggacaagcacgagaggaggcacgacttggaggacagatcaaagcggcaccgcaaagacaagcagaagaggaggcacgattccgattctggttgataacggccctgcgcctgctcctgtatgactactgtatactgcgatatttcaaacccatggagccgcttttgtttgatgtatgcctacgctttaaattatgtttgccctaatgatgtttaaggat

SEQ ID NO: 23473 - DNA, 733 bp, Zea mays
  Clone ID: LIB3596-046-F1_FLI
gggctggcttctcctccccctcttaccaagtcctcctcgggttagggttccttagggttttgtggaggggcgatggcggcggctgatgtggagtaccgttgcttcgtcggcgggcttgcctgggccaccagcaacgagtcgctggagaatgccttcgcctcctacggcgagatcctcgactccaaggtcatcaccgaccgggagacggggaggtctcgcggcttcggcttcgttaccttctcctccgagaactccatgctcgacgctatcgagaacatgaacggcaaggagctcgacggccgtaacatcaccgttaaccaggcccagtcccgtggcggtggcggtggcggcggtggctacggcggcggtcgcggcggcggcggctatggtggcgggcgccgtgacggcggttatggcggcggtggcggctacggcggtcggcgcgagggtggtggcggcggctacggaggcggtggcggctacggcggtcggcgcgagggtggtggtggcggctacggcggcggcggcggcggctggagggactgatgtgtgggcccatcctggcttcggccgagttatcttatctatctatagtatcgtgttaccgttcgcttctgtcaccgtgttagtgtccgttctacctttggattaggtgttggtacccctgttgttccctttgtttgctcccgctatgaaacgagacgagagaagaatgagcaaggtttttgttcgc

SEQ ID NO: 23474 - DNA, 380 bp, Zea mays
  Clone ID: LIB3596-046-H5_FLI
cccattccccactctactcattcagcagatcccgtcactcgctctccacaagcagagcaccgcagcagaacgaggaaggatgctggccatcttccagaagcaggtggcgcacgcgccgcaggagctcaacagcccccgcgccggcgcgtcgcccagcaagccccggaaccccgacgagatcctgcgcgacttccacgccgcgcacccggccgccgccttctccgcctccttcggcggcggcgccgcgctcgcctgcgtcggcccctcctcctccgccaccgccacctaccagcggatgttctgcggcctggaccacatctactgcgtcttcctgggccgcctcgacaacctcagcggcctcatccgccagtacggcctgt

SEQ ID NO: 23475 - DNA, 630 bp, Zea mays
  Clone ID: LIB3596-047-D10_FLI
ccgccacctcaacccaggaacagagcgaggcgacgccgcggcacctcttctccggcgaagggaaatggcaaccgttccaggggatctgatctggcaggttgtgaggaagaacaactccttccttgtgaagcagttcggcaacggcaatgccaaggtgcagttcaccaaggagccgaacaacctctacaacatccactccttcaaacactcgggtttggcgaacaagaagactgtgacgatccagccagctgcaaaggactcggctgtggtcctctctactaccaagaccaagaagcagaacgcacctgcgaagctcagccacaagtctgtgatgcgcaaggagttccgcaagatggccaaggctgtgaaaaaccaggttagtgacaactactacaggcctgatctgaccaagccagctcttgctaggctaagctcggtgtaccgcagcctccaggttgccaagtccggtgtcaagaagaagaacaggcagtcctaagcgctaagtttgtgttctgtcagggggcatgttggtgctcgtagtcccagcttatatttatctatgttccaacagttttgagacttgttagaactgagcaaaccatgttaagatgctgctgtgtgtcattcctt

SEQ ID NO: 23476 - DNA, 893 bp, Zea mays
  Clone ID: LIB3596-048-G5_FLI
gagactaaatcctccctcgaaaccctagcatagccactgccttcccgcacgctaggaaggggaagatatgggcgccgaggaggacgccgctgcacgccgcgagcgtctccgcgccctccgtgccgccaaggacctcctctccacccccgacggcgccccaaccccttccaccgacggagaacaccaaaatggcaaccatgagatggcagaagagccagaattaccaggtcatcaggatgcacctggtgaggctgctaaagaggatggtagccccactgaggaggccgaagaggttgaagatgatggtgagcttccagccatgaagttcagaaactaccttccccatgatgaacaacttcgaggaggcaagctggctccagtgtctcttcccaagtttgaagacccaattagtgccgaaactgcagagccaaaggaagtggagaacctttttggaaacatagcaccaaagaatccaaattgggatctgaaacgtgatgtgcagaagagaattgataaactggaaaggcgcacgcagaaagcgttggctgagattgcattggaacagcagagggagaaggaagccttggaggaatctcaagattgaccgacctgtataagtgaccagtgactcatgctggttggtccctcgagcagacgtcattatcttatttagataatgtaatgtactttgggatgctctgtgtatctaccatcttgggatgtactgaattgagtttgggacgtgtatctacctaccatcttgtattgtcagctcaaggatgtagcaaactagtagcaacttcaaaaaatgagatgtagcagtcctgttctgttagacggacctggtcaaactaccgtactaaatacaaacaaagcacaccttcatgctgtgt

SEQ ID NO: 23477 - DNA, 760 bp, Zea mays
  Clone ID: LIB3596-050-C11_FLI
ccagaaccccaaatccagttccgttccaatcgccgagaagggcagcaaaggggagaaaaaaaaaggaaatctatggcggcggccggcggcgagaacagcggcgctggcgagggcgagggcgagttctacctgcgctactacgtgggacacaagggcaagttcgggcacgagttcctcgagttcgagttccgccccgacggcaagctccgctacgccaacaactccaactacaagaacgacaccatgatccgcaaggaggtcttcgtctcgccctccgtcctccgcgaggccaggaggatcatccaggagtccgacatcatgaaggaggacgacagcaactggcccgagcccgaccgcatcggccgccaggagctcgagatcgtcatgggcaacgagcacatttcattcaccacttccaagatcggctccctcgtcgatgtccagtccagcaaggacccggagggcctccggatcttctactaccttgtccaggatctgaagtgtttcgtgttctcgctcatcaaccttcacttcaagatcaagccaatccagtcttgagctccatcccaagccttcatgtagctggtttgtgagactgcgagtgttttgagagagaaccttttaaccatgtaagatgatgttgatattgtggacgatgcgtgcgatcggccctgtgtggtgcacttagtggaagtggaacccccctttgcatttgttttgtgcaaactgctgagtagtagtgaacgtgatatttgtgcct

SEQ ID NO: 23478 - DNA, 575 bp, Zea mays
  Clone ID: LIB3596-050-F6_FLI
ggatctctcagatggtcaagaagtggcagagaatggcagtgttggggagaaagcggctctcctggagggtggaaagggaagtcgaggatcgatcctgcgcctctgtggcgagcaaggaccactgcatgatgtacagtttagacgggaggaggttcgaggtgccgctggcgtaccttggcacgctggtgttttgcggaactcctgtggatgtcctacgaggagtttggcttcgtgagccatgggcggatcacgctcccttgtgatgctgcagccgtagagtatgccatgtgtctcctcaggaaaggctcctcggcagatgtagagaaggcattcctgagcaccatggcagtctcatgccactatgcaagctgtattgctattgcaccatttgttggagttagccatcaagctgttatttgcagctcctggctgactgtaaagtagtttagtatatagtttgtaggaaaagaaaattctccatggagccttttgatgcttcaagcaatcaaggaaaatgcaaactagcatgttaattagagctattattctcgttctttcgtggattgaacacgatg

SEQ ID NO: 23479 - DNA, 422 bp, Zea mays
  Clone ID: LIB3596-050-G5_FLI
atccaatccatgtataatgagaataaccgaacaagacctaacagggatccagccccgctcggtcccagcttgtcgtgcagacaatccgaattcatggcatgaaagcaacctatgtacatgtcgttctagggcttcagtatcatgatgcgcatgttgtttctttccccgccgtttgcttgtttagcatcagtggtccttatttagtcatctggcaaacggtttggttttgtttgctgcaggtgatgcatagtaagcttgtaaatggagttgcttctctttattttctagtcatcttttatcatgaagtagatgtggcattctgatgaaagatggttgtacatattgagatgtgctgttgtggcatatatgaaatattggcatggtgtggatggtatatacgaaagttgtgcttgcttaatcag

SEQ ID NO: 23480 - DNA, 491 bp, Zea mays
  Clone ID: LIB3596-050-G9_FLI
cactggttcgcttctccctctcctgcgcttggctgctgcttgcccgttgagcacacagcacagcagggggggccgtgcctgcacagccgccgcgatgagggactgggcgccgtcgatcatcgccacggcgctgttcgcgctcctgtgcccgggcggcgtgctgcagatgcccggccggcaccgccccgtcgacctcatgaacatgaagaccagcttcccgtccatgctcgtccacgccgtcatctacttcctgctgctcatgctcttcctcgtcatcctgcagcctcacctctacatctgacgtgagcgtgttccccaccccttcacacaagcttctagcatgtttcagtttcttctttctcggggtgcagttttgggcccttttaatagctttgtaaccttatcaaccagaggattatatacgtaatatgcgttccgtagcttccgttgggcaataaagaactgaagggcgattttaggaattccttctg

SEQ ID NO: 23481 - DNA, 385 bp, Zea mays
  Clone ID: LIB3596-051-B10_FLI
tggacaagagtcaacagatgccaagaaaaagtctaccagaagtgaacggcggaagcgtcgcaattctgagctaaggccatccagtgatcgattagaggcatatggaaagataaattcaaagcgtcacaagagccattgaccttctgagattcatcaaagtacatctggggaattttgctgttctttttatgcattggacaggtgaaagtcttagatttagctgtccttgcttctattttgggagatgcaaaactagtgtcgccctagtagaaacatctgttgtcttagagttttgcagacattgtgttgtgcgcctccttttaattttaattgttttttttgtagaccatatatataatataatttccctgcaatttttcttgtc

SEQ ID NO: 23482 - DNA, 545 bp, Zea mays
  Clone ID: LIB3596-051-B5_FLI
gcgctcggccatcgggactgtacaaggacgagagggagaagagaacagcggattcatcaccgccaggcgtcaggtcagagtgtgttaagacaagatggtggcgaatggcgacgcacctgctagagggagtgcggcggcagctgcaagcctgcgcaggcgtaggaccacaagcggtgctgctgctggcggaggtggtgccagctcgatgctccagttttacaccgatgaggctgcgggccgcaaaatgtcaccaaacaccgttctgatcatgagcattgggttcatcgctgttgtcgctatgctccatgtttttgggaagctgtaccgcacctccaactaggttggtactaccataaccaagaaaacagaggccaccaagagaggagccttatagagccatttcaatggatagcaagtgactatcagagaggaaccttgtagagtgatttcaatggatagcaagtgactatcggattgtgaactgttatagaagtttatctacacaacttgcaatgctcagggctatgataaatccctgcgagtct

SEQ ID NO: 23483 - DNA, 466 bp, Zea mays
  Clone ID: LIB3596-051-C4_FLI
cacgcatccacaccggtcaccgtcgtcgtctcctctccacagctgacagctccggtccgtccggccggcgcgcgcgggtgatgcagatgcaaccagagaccagtaggctagctagctgcctagctcgctcgctagccgagcagtagtagagtatctgggcgatcgactgggacgacggtcgactgggacgccaccattaatcagtaatggccgccgggtgcaactgcaaggcggccatcgggtgcgtggacgcgcgcgcgccggtgcgggccagctatgtgagcctgtacaagtggcccgagtccgacgccgagttcgtcaggtcggtggccatggcgcggcgccagggaggaggaggaggagggcaggagagccccggcggcggcgccagcgcgccgtcgtactcgtaccaccactactactacaacggcagcggcagcatgcggagtaataacagcggcgagct

SEQ ID NO: 23484 - DNA, 802 bp, Zea mays
  Clone ID: LIB3596-052-C8_FLI
tcgcgagcggcctagggctcgccctcatggcctgacgcagcagaggaggcaggaaataaaggaagcctttgatctgtttgatacagataactctggaaccattgatgcaaaagagctcaatgttgccatgagagccttgggatttgagatgactgaagagcaaattaggcaaatgattgctgatgttgacaaagatggcagtggagcgatcgactacgaggagtttgagcacatgatgactgccaaaatcggagagagggatagtaaagaggagctttcaaaagcattccgcattattgatcaagatggaaatggaaagatttctaacattgatatccagaggattgccaaagagctgggtgtaaatctcaccctcgatgagatccaagacatggtgcaagaggctgatagaaatggtgacggtgaaatagactttgacgagttcatcaggatgatgaggaggaccagctttggctactagatgtttggctgtagtgccccaccatcgtcgtgtggttgcgaatatgagcagtgaagccaggtttatgcatccgggggctcaagttggatcatcgacagcgggtgcacaaaccacatgacaggggagaagaggatgttctcctcctacgagaaaaaccaagattcccaacgagctatcacattcggggatggaaatcaaggtttggtcaaaggtcttggtaaaatagctatatctcctgaccattctatttccaatgtttttcttgtagattctttagattacaatttgctttctgtatctcaattatgcaaaatgggttac

SEQ ID NO: 23485 - DNA, 1107 bp, Zea mays
  Clone ID: LIB3596-052-G11_FLI
ttggcatctccatccgtcctcgtcggcatcccagccacacacacacacacaccgcacctagccacctaccctgctgtcccccgtgccgtcgccgatggagtccttgggcgtgctgctgctccaccccttcaacgcgtacctggagcaggagctggaccgccgcttccgcctgtaccgcttctgggagacgccccgcgaggagttcctccgcgcgcacgcgggcgccgtgcgcgccgtcgtcggcaacgccagctacggcgccgacgccgcgctcatcgacgcgctcccggcgctcgagatcgttgcctccttctccgtcggcatcgaccgcgtcgacctcgccaagtgccgcgaccgcgggatccgggtcaccaacacccccgacgtcctcaccgacgacgtcgccgacctcgccgtagggctcgccatcgccgtgctccgcaggatcccgcaggccgaccgatacgtccgcgcggggctctggaagtccaggggagactacaccctaaccacgcggttcagcggcaagcgggtgggcatcatcgggctgggcaggatagggcaggcggtggcgaagcgagtggaggcgttcgactgcccggtgagctaccaccagcggacggagcagcgggcgacgtacccgagctacacctactacccgtcggtggtggagctggcggcgaacagcgacgtgctggtggtggcgtgcccgctgaacgcgcagacgcgccacatcgtgagccgcgaggtgatggaagcgctaggccccagcggcgtgctgatcaacgtcggccgtgggccacacgtggacgagcgcgagatggtggcggcgctggcggacgggcggctcggcggcgccgggctggacgtgttcgaggacgagcctaacgtgcccgaggcgcttctggggatggacaacgtcgtgctgctgccccacgtcggcagcggcaccaacgagacgcgcaaggccatggccgacctcgtgctcgggaacctggaggcgcacgtgctcagcaagccgctgctgactccggttgtctgacgtttccttgtttctattacgaaataacaagcgcctgcgcctgacagcgagtggggattaaattc

SEQ ID NO: 23486 - DNA, 1154 bp, Zea mays
  Clone ID: LIB3596-052-G8_FLI
agcactccaccatccagcttcgcatcccgcaagttcccagtcagccgagcagccagcggcggtgccaagaaggccgagctgcgagctccactccccacacctcagaagaaaaaggtgatggcgcaactgccgccgcgggcgccgagcgccgcgccgcaggaccactggccgccggcggcgggggagttcctgggcttcgccgcggccaggcgcggcgcgcaccgccgctccgcgagcgactcggccgcgttcctcgaggccgtgcccattgacgacgacgtcgtcattggcggcggcggcggcggcggcgacgacttcgaccgcctcgaccacgaccagctcctgtccatgttctccgacgtcgacgtctccgtctccgtctccgtctccggcagcgccggggagagggcgcagctcatggacgcggggggtgcgggtgcggacgacggggtggcggactcgtcgccggctgccgcggacggcgtcgctgagcccaaaagggtcaagaggatattggcaaacaggcagtcggctcagaggtcacgagtgaggaagctgcagtacatctcggagcttgaacggagcgtcaccagtctccagatggaggtgtcggcgctgtcccctcgcgtggccttcctcgaccaccaccgctcactgctcaccgtcggcaacagccatctcaagcaaagaatcgcggcgctcgcccaggacaagatcttcaaagacgctcaccaagaggcgctggagaaggagatccagcggctgcgccaagtgtaccagcagcagcaggtcaaggtggccaccaccggcggcgccgacatcgccaccgccgcctcgccgtcgatgcaggccaggcaagagctgctcgcgtgcgagggcgctgctattcgatagcggaggcggcggcggcggcggcggcgttcacgcccctgttactgttagtagcttaattaacttttgtgcagtctgatcaatacgtgttggcttgtttgtttgctgcttcttaatttaattcgtatgtgatgtattctgctcaccctagcaaaaaaaaaaaaaaaaatgcatcgatgccaagttgtgaatgaattgtactattcagttatttggaccggcttagtcggaatatagtgagacggagtttgttggtgtgagtt

SEQ ID NO: 23487 - DNA, 778 bp, Zea mays
  Clone ID: LIB3596-053-F3_FLI
ccactcccaagccagtacccacagtcctacgagcagtcgcacgcaagtgtcaagagacaaaacggtcgacatggctcgcacgcaatctgccgtagcggtcgccgtggtggccgcggtgctgctgctggcagcggcggcgacgacctcggaggccgccatcacctgcgggcaggtgagctccgccatcgcgccctgcctctcctacgcccgcggcacggggtccggcccctccgcgtcctgctgtagcggcgtcaggaacctcaagagcgccgccagcaccgccgccgacaggcgcgccgcctgcaactgcctcaagaacgccgccaggggcgtcagcggcctcaacgccggcaacgccgccagcatcccctccaagtgcggcgtcagcatcccctacaccatcagcacctccaccgactgctccagggtgaactaaaacctagaccacgcgcgacgacggccgcctgatcgatcgaccaaccattccgccgtcgccgccggccggatcatcgatcgtcgtcatgatgatatctatcaatctacgcgtgatgatcgatggctacttgtctactgctatgtactactaaataaaatctctccgtgtgtgcacgtacgcttgcatgtgcatggtagcatgtatgtacgacgtcgtccatgtatgtgtgtgtgacgtgtgagacagagagagagagagagagagagagagacaggatcgatcgagagacggtcatgtccttttggctgtttggtttattcatatcacaacttttgagtgtat

SEQ ID NO: 23488 - DNA, 953 bp, Zea mays
  Clone ID: LIB3596-053-G3_FLI
gaaagaagaggaagcgaacgagaggcaacggtggccggtcgcgggacgggtggggccacgcctggcctgacgcgggaagccggccggaaccatccaactccgccgcgtcgtcgtcgccttcgtctcgcgtgctcaccaagagaacaaaacgcgagcagccaagaattcaacgtccacgatccctacccgtggcgttggtcgtgaattggcgccgtctccccctgccagccggattccctgctttgttctcaggcaacattttgttcactagtgtggtagctttgttgattggagtgcgcaatgggaggctgtgcgggaaaggtacgtcgtgatgacgaagaaaagcttgattttaaaggtggaaatgttcatattataacaagcaatgagggctgggaccagaagattgcagaagcaaacagagatgggaaaactgttgttgcaaatttcagcgcttcctggtgtgggccatgccgtgtcattgctcctgtctatgctgaaatgtcaaagacttatcctcaactcatgttcttgacaatagacgttgatgacctgatggacttcagctcttcatgggacatccgtgcaaccccgacattcttcttcctcaagaacgggcagcagatcgacaagctcgtgggcgcgaacaaacctgagctcgagaagaaagtgctagcagccgctgatgccagtacgtcctagtgacacaagtggaagtgggcaaacgatctgtgatggcttcccggtgtatagtttccatggttcatttgtgtgcttgtcccatgtttgcctggggacgatgacgttttacaattttggcccccatcgcgcgcactcgtctgtttctctcatggaagccgtgtgaacctgtgcgtgtgtgtgacgaatgaacggaactttatatggaccagtgcttaagagtcttcgcaacataattatgaaggtttgtttgc

SEQ ID NO: 23489 - DNA, 936 bp, Zea mays
  Clone ID: LIB3596-054-A6_FLI
ggtggctgtttggacatctgttgacacaccccaccccgttgccaagcggcgccaaaccaacgagagcacccggaccagacgcccaagtcgatcgccatggcgatgaagccggcggcggcggctccccctaccccggccgcggcgcacagcgtgttcgtctacggcagcctgatggcggacgaggtggtccgcaccatcctcaagcgcgtcccgcccgccgccccggccctcctcccaaactaccaccggttcaacatcaagggccgcatttacccggcgatcctgcccgttgagagcaagagagttgctgggagggttatcatgggtgttactgatgaagagctccagcttcttgacgcgtttgaagacgtggagtacacgaggacaagagttgagatatcattggctgactcttccgagaacatgctggctgacacttacgtgtggagtgatgcagaggatctcaatctttatggagaatgggactttgaggagtggaagaaactgcacatgaaggatttccttgcgatgacgaacggtttcatgcacgagctcgagcagcctgaatcgaagacccgggtggagacctaccaggaattcatgcaacaacaggaacagcctgcgccggggacccaggtggagggttgagagctgcaatccgctggctgctgatctacatctagtcaattcccatggaggaattgcattggcattggactgtaccgtatctaataggtcacctatatcatttgtgaagatcaggattatccggtctataataactaaacatacaaataaaatgtccaccgaggtttctgttgattctttatgtcattgttgaccccatggctgctgctcaactgctgatgcgcggtctctataatttgtgaaagaagatagtgattaacttacataatgcaatagttaagtacatgt

SEQ ID NO: 23490 - DNA, 1043 bp, Zea mays
  Clone ID: LIB3596-054-D4_FLI
gtggaaaccccttttgtcttgagggaaaaaaaataaagggagaagctctcctgagaagcatatagcaccagcggaacacgggaacggcggaagcaaacaactagaaattccccagcccggttctttgcgtgcggttgatctcgtcggaggcccggccgcggttccccaatccgccatcgaattcgatggcggccaacgccgggaataagatccgcaacgccaagctggttcttcttggagatgtgggcgctggcaaatctagcttggttcttcggtttgttaagggacagtttgttgaattccaggaatcaacaattggagcagccttcttttcccagaccttagcggtcaatgatgagactgttaagttcgaaatctgggatactgccgggcaggagaggtatcatagcttggctcccatgtactataggggtgcagctgctgccattgttgtctatgacatcacaaatccggcctccttcacccgtgccaagaaatgggttcaagaacttcaagctcaaggaaatcagaataccatagtggctcttgctggaaacaaggctgatatgctagatgcgaggcaggtgccagcagaggaagcaaaggcgtatgctcaggagaatgggctcttcttcatggagacatctgctaaaactgcaatcaatgtgaatgacatattttatgagattgcaaagaaattgcttcaagggcaacaagctccaagcccacaggctggaatggttctgaatcagagaccaaatgagaggacggtcagcagttcttcatgctgctcttgagctgtgtttcaacctcgtagtgccgttatcaaatgtatcagaggaggtttatggaaaatatcccatgtcgcttgtgtggctgcctttcaggctgacgtgctcccattctgctcctcatttcctttcacatgttcgtcatgtaaatgccaatactaaagtgtcactgcatgggcagaagtgttaccaaagtgttgattgtgctcttatcatttgattaagcccctgcttaagttctcaattttgcat

SEQ ID NO: 23491 - DNA, 596 bp, Zea mays
  Clone ID: LIB3596-054-E10_FLI
cgaaagaaaacctcaatcaacaccagaagctctcgatcccaccgaggaagaagaagagagaggaatggcgtccgaggagggagtcgtgatcgcctgccacaccaaggccgacttcgacgcccacatggccaaggccaaggaggccggcaagctggtgatcattgacttcacggcctcctggtgcggcccctgccgcttcatcgcgccactgttcgtcgagcacgccaagaagttcacccaggctgtgttcctgaaggtggacgtggacgagctgaaggaagttgccgcggcctacgatgtcgaggcgatgccgaccttccacttcgtcaagaacggggtgacggtggagaccgtcgtcggtgccaggaaggagaacctcctggcccagatcgagaagcactgcgccgcggccgtgtctgctgcgtagtagagaggatggtagtcgtcgccaataagggccagcacgtggcggtggtggttgtcttgttgttttcagtttgggcttgtcagctgtggcggggtggtcgattgtgaactggagcatgcagttctactctggacaccttttaagaaatgaagtggttcattttcttctt

SEQ ID NO: 23492 - DNA, 800 bp, Zea mays
  Clone ID: LIB3596-054-E4_FLI
agcacaacacagtctcttgttattaaatagtccatctcatccataatgaccatgataggaatcggggcggattccctgatcgatctcaggttgtagtggtgggtgattggtggtcggggttggaggcgcgatgcacaacggcggggcgtcgtgttcaccgcgcgcgagatgagagacgcgaggaaaggggtggctaggtcacagtaatctccgagctccctctaggaagccggaacaatcttgtttctgcttaatccctatagagtggtgcttacaattatttatactcccttctagtccttatctaatgagataaatcccctcttttctctctaacaaatcttatctccttaatcttctaatccttatcatcttctaatccttatctgcatgcctatgctgttgcccggcgcctatagtggcggccgatcataacagaccaacatcgttcttcttggagttgtatccttgttggaaaacatgctatgaagttgctgaagtggcaaaaattgttgtgtcctttctttcagtcttgaatttttcctagcagctacattataaaatcgattagtatatacaagcattataaatcgattagtacatatagtttttttattgtgtttgttaatcatagagagatcgacccagtctgtagaatcatagtaggcacgctcgtggtccttggatatcaagggcttgttgggtgcaattcctctgtacttctccgtgcatgactgcaaacaaaatggtttaagatgtcgtagacttgagccaaagccattgaacctcttccgttctgg

SEQ ID NO: 23493 - DNA, 730 bp, Zea mays
  Clone ID: LIB3596-055-C9_FLI
gcgcgagcgagagaggtacggcggccgatctggcggcgcaggcggagggctcggccggggccggcaagtcggcgccgaacatggggaggggccgggtcgagctcaagcggatcgagaacaagatcaaccgccaggtcaccttcgccaagcgccgcaacggcctgctcaagaaggcgtacgagctctcggtgctctgcgacgccgaggtcgcgctcatcatcttctccaaccgcggcaagctctacgagttctccagcacgcagagcatgccaaaaacacttgaaaagtaccaaaaaaaagaacaaatgttttgtgaagcaaataagtgtcttcgaagaagactggaggagagcaaccaggttatatggcagcatgcgtgggagcaaagcgagcggcattctgaagtgcagccgcagcagctcaatggcaataacttcttccatcccctcgatggtgctggtgaacccacccttcagatagggtatccttcagaggcactgactagctcatgcatgaccaccttcctgcccccgtggttgccatgagatcgaactactgcgcaattccgaattaataagcatggccgcatgcagctgcctgtgctatacgttgtgcttggagtgtactttaaggttcttgcatggcaagtatgtgtgtaacatttgtgatgaacatggaaactatccacttaattctcgaataatcaatgaactgggtaagattgtaacat

SEQ ID NO: 23494 - DNA, 849 bp, Zea mays
  Clone ID: LIB3596-056-B12_FLI
cgggacgaatattatctcaaaaaaaaaaagtcttgagtcccccctctccttccccttcccaacgctctcgctgcagaggaaaggcgaagatggcgatgaccgtcgaagtgcttgctgcactcgcgttcatgttctccacgagtattctactgcagatactgaaggcagcatgaagttgccatgctattattgtttgtcgcttcttcaatgttggatttcattttatggtacaggcatgcgctttgtacagcaactggtggcccatgttagcagctctcatgtacgtccttgtaccaatgccatgcctgttttttggtggtggatccacacacttcttgaccagcagagaaggtggagggtggattaatgctgcaaaattcttgactggtgcatcggccatgggaagccttgctattccagcaattctgaggcatgctggcttaatcgagaccggggccatgttcatcgagttcacgtccttcttcatccttgtatgcacagtgctgtgcttccatagggcgactctggatgaagactggtaaatgcgcatttcaccgacaccctgaaccctagcggttcttggctgcttctgtccatgctaagaaatattcctgttggaagctaacatggatctgtacaaagaagcgtatttcgagcgtagccgtagctgatgtcttatgtagacacttgtgaagattatgtggtcatgtggcaatgcagatgttattaccttcactttgactttgtcgtcacatgttctatggtgaaggaaggaatcatccgtgtaaaccatggccagggcacgccctacttggctcctaattctatcgcaggctttggggttaacct

SEQ ID NO: 23495 - DNA, 512 bp, Zea mays
  Clone ID: LIB3596-056-D5_FLI
cacaacagcagctcaaaaacctaacacacctcaacaagcagagcaaagacccgggattcgccggcgcggtagcgagagcgagagatggacgggaggatgttcggtctcgagacccccctgatggtggcgctgcagcaccttctggacgtgcccgacggcgacgccggcgcgggcggcgacaaggcgagtggtgccgcggcgggcggcgggcccacgcgcacctacgtccgcgacgcgcgcgccatggcggccaccccggccgacgtcaaggagctcccgggcgcgtacgcgttcgtggtggacatgccggggctgggcacgggcgacatcaaggtgcaggtggaggacctctacctgtgtggaatgtggcgaggaataatcgtagtctgtagtgggggtgcttctggtgtgcgtgtttgcgttccttcggtctcggtgtctgtctaccaattcctatctgatgtatcggcttcggtttcgtatgaaccatgccggatgctttcagtatgttc

SEQ ID NO: 23496 - DNA, 1472 bp, Zea mays
  Clone ID: LIB3596-056-D8_FLI
catttggctcccgcaagcaccgatttgtttactgctctctccgacgcgcggcggcggagctccctacgacaactgaaccatgtgcggcggcgcgatccttgccaaccttcgcgagccggcgccgcgccggctcacagagcgggacatctggcagcagaagaagaagctcaagaggggcggcggcggcgggaggcgctcgttcgcggcggaggacgatgaggacttcgaggccgactttgaggtcttcgaggcagactccagtgattcagatttggagctcagggaggggactgacgacgacgtcgtcgagatcaagcccttcactgccaagaggactttctccagcgatggcttaagcaccatgactagtgctgtagcaaggtcagccaagaggaagagaaagaatctatacaggggtatccgccagaggccttggggcaagtgggctgctgagatcagagatcctcagaagggtgtccgtgtttggcttggtactttcaatagtcctgaggaagctgcaagagcttatgatgctgaagcgcgcaggattcgtggcaagaaggccaaggttaactttcctgatgcaccagaagttggtcagaagcgccgttctggctcagcttccgctaaagcatccaagtcaagttttggacagaagcctattgtcaaagtaactatgaacagccttgccaacacaaatgcatccttcttccaatctgttagctacccctccaattcatttgttcagcatggcaatataccatttgttccagcaatgaactctactggttctgttgaggatcctatcatgaatctgcactctgaccagggaagtaactcctttggctgctcagacttgggctgggagaatgataccaagacaccagacatcacttccattgctcccatttccactatcgcggaaggagacgagtctgcatttgttgacagcaattcaaacaactcatttgtgcttcctgccctggagaacagtgctgttgatctcactgatgggctgacagatttagaatcctatatgaggtttgttctggatggtggtccaagtgattcagttgatagccttctgaaccttgatggatcgcaggatgttggtagcaacatggacctctggagcttcgacgacatgcccatcgccggtgatttcttttgaggattttgaagcttggccataggagtatgtacatagggactaggggaataaagaccgggggagattgggaagcacctgcttggcaccttgggggtagcatttgctcgtgtctagctcagagatgcagaagttgcattctgaaactacttggttatcgacctgttccctattttagctatctctttatgagagccatttatgagactgaaccattttgttttgctttcttttcgttgttacaatatatggtttaacattatgatttatggatatgtgccaaatatggtgctcaacagtggtc

SEQ ID NO: 23497 - DNA, 442 bp, Zea mays
  Clone ID: LIB3596-057-A1_FLI
gtttccatcttcccgtgggatcccagtcgccgccgcaagaagaagagctcggggacttccaggtctcgcgagaagatgccgaagcagatccacgagatcaaggatttccttctcaccgcgaggaggaaggatgcccggtcagtgaagatcaagaggagcaaggatgttgtcaagttcaaggtccgctgctccaagtacttgtacaccctctgcgtattcgatgctgagaaggcaaacaagttgaagcaatctctccccccaggcttgagcgtccaggaggtttgattggatacatgacaacgtcgggtcgaacctctagagcatctttatcattagcagagcatgctgtttatgtagttttggactttaagctattagacatgtctggatttgtggatcttgaatttttggagaaataccaatttgcctcgttcaattgcgc

SEQ ID NO: 23498 - DNA, 591 bp, Zea mays
  Clone ID: LIB3596-057-A2_FLI
caatcacaacgaacaaaagctctcgatctcaccgacaccgaggaagaagagatcaatggcgtccgagcagggagtcgtgatcgcgtgccacagcaaggctgagttcgacgcccacatgaccaaggcccaggaagccggcaagctggtggtcatcgacttcactgccgcctggtgcggtccatgccgcgccatcgccccactgttcgtcgaacacgccaagaagttcactcaggtcgtcttcctgaaggtggacgtggacgaagtgaaggaagtcaccgcggcctacgaggtcgaggcgatgccgaccttccacttcgtcaagaacggcaagacggtcgcgaccatcgtgggtgccaagaaggacgagctcctggccctgatcgagaagcatgccgcgcctgcgcctgcgtctgcgtctgcctaaaggagatcagatcagtcgtcgccgtcaataagggccagcacgtatggctgtagatgttgtcgttatcagttctggctttgtcgtttgtgggcgattgtgaactagtagtatgtttgtttctatccgattcggaggcgatacttaaccatggatacttgttgtgcgtt

SEQ ID NO: 23499 - DNA, 1219 bp, Zea mays
  Clone ID: LIB3596-057-G3_FLI
gcacctctaagccaaagcaagttgctaggtcctttgaaccagcaactgaagcttcctcgtctcatcatcgagaccagtaagcaacatggcggctaatctcaagtgggctcctgttctagccctcgtcgtcgtcgttgctgccatggttggcaccacgagcgccggcaacatcgcagtgtactggggccagaacggcaacgaaggcagcctggcggacgcctgcaactccgggctctacgcctacgtcaacatcgcgttcctcacaaccttcggcaacggacagaccccagtcctcaacctcgccggacactgcgaccccggctctggcagctgcaccggccagagcagcgacatccagacctgccagtcgctgggcatcaaggtgctcctctccatcggcggcgccagcggcagctacggcctctcctccaccgacgacgccaacagcgtggccgactacctgtgggacaacttcctgggcggcagcggctcgtcccgcccgctcggcgccgccgtgctcgacggcatcgacttcgacatcgagaacggccagtcggcgcactacgatgacctggcgaacgcgctcaagggcaaggggagcgtgctgctgacggcggcgccgcagtgcccctacccggacgcgtcgctggggccggcgctgcagacgggccagttcgacaacgtgtggatacagttctacaacaaccccgggtgcgcgtacgccaacggggacgacaccaacctggtgaacgcatggaacacgtggaccagcagcatcaccgcggggagcttctacctcggcgtcccagcgtctccccaggccgcgggcagcgggtacatcgaccccggcaccctgacgggcacggtgatccccgccatccgaggcattggcaactacggcggcatcatggtgtgggaccgctttaacgacgtgcagaacaactacagcagccaggtgaagggcagcgtctgatgggcataccgcatacgaagcttcaagctacagcacctagccatgcatatatatatagtggctattcgtcaagttatcggactgctagatacaaatataataagagcggatcatcgggagacaaagacgcatgtcagctattgtctcgttttctaagcaacgagcgagagctgcatgcgctggttagatttaatatggatattgcccatacgttatgtaattaaatcaaataaatgttaagttcat

SEQ ID NO: 23500 - DNA, 548 bp, Zea mays
  Clone ID: LIB3596-057-G4_FLI
cttgcaatcacaacgaacaaaagctctcgatctcaccgacaccgaggaagaagagatcaatggcgtccgagcagggagtcgtgatcgcgtgccacagcaaggctgagttcgacgcccacatgaccaaggcccaggaagccggcaagctggtggtcatcgacttcactgccgcctggtgcggtccatgccgcgccatcgccccactgttcgtcgaacacgccaagaagttcactcaggtcgtcttcctgaaggtggacgtggacgaagtgaaggaagtcaccgcggcctacgaggtcgaggcgatgccgaccttccacttcgtcaagaacggcaagacggtcgcgaccatcgtgggtgccaagaaggacgagctcctggccctgatcgagaagcatgccgcgcctgcgcctgcgtctgcgtctgcctaaaggagatcagatcagtcgtcgccgtcaataagggccagcacgtatggctgtagatgttgtcgttatcagttctggctttgtcgtttgtgggcgattgtgaactagtagtatgtttgtttc

SEQ ID NO: 23501 - DNA, 1107 bp, Zea mays
  Clone ID: LIB3596-057-H12_FLI
gggatgatgtgattatacgcaaaatactaaaacctagggtggtagtacaagcagtagttatgagcaggcctcttctctttctttcctgttccgttctttttctttttccctgcggaattccccttcttccctagtgcctcgattcgatatttcgattggattggattaccaagggacagagggagggaatcccacacacacctctggccctcgcgaggccaagggaagggaagcactcagcacccagcagcagaaggaccgccgtaaatggcgctgccggtggcgaagctggggaccctggcgctgcggacgctgtccaagcccatcgccagccgcctcaagagccaggccgctgtccaccccaagttccgcaacttcatcatcgccatcgcccaggcaaaccaccagatcaccacaaagatacagaggcgcatttatgggcatgccacagatgtggcgatcaggcctttggatgagcagaaagctgttcaagctgctacagatctcatcggggaagcctttatcttctcggtcgctgttgctgctctaatttttgaggttcagagaaacgcaaggtccgaggctaggaaggaggaagctcgtagacaggaacttgaggaattgaaacgaagggaagagagtatagctaaagaattggaagatcttaaattgaagcttagtgaaattgagcagcttgctaaagggcgaggcctgacaggaatcttgaacttgaaacgggtccatggcacagaggtcggcaaggcagcagcacctctgcgtgagtaagcaatccggctttggcgcaggaaagtatgattccttgtcgcccccattatttggtaagacttgtgttgtcgtgctcaacctattctttggtgctcatattggatccacatttgtagtggttgatccatggacaccctgagacagtggtaataatacagcgtaacaaagaaatcaaattaaagcgcaatatgtatgtgctacttggtggcggtgaccacaaaatcagatgttaagatggattagggcttgtttggttgtatacttaaggtgtaaaaaatgccacgtttcagattaaagctggttgtttggactgttgcaact

SEQ ID NO: 23502 - DNA, 584 bp, Zea mays
  Clone ID: LIB3596-059-F11_FLI
aagtttcgctctcgccggcgtcgacggcctagggttcgaggaacgtccgtccgtccgtccggggaaggagcggtagggaggcggagatgatcgaggtggtgctcaacgaccgcctggggaagaaggtgcgggtcaagtgcaacgaggacgacaccatcggcgacctcaagaagctggtggcggcgcagacggggacgcgccccgagaagatccgcatccagaagtggtacaacatctacaaggaccacatcaccctcaaggactacgaggtccacgacggcatgggcctcgagctctactacaactgagccgccgcccctctctccctctcgtcaggttggtctgaattctgaagtcatgggtgcaattcgcttcgcggtgatctcttaagctcatcacatatataaaagcaacctcagtgggctatgtaagacatggcgtgccaaactatcagtgaccactgacagctttgcaatacgttgttgtatggtcaacctgcaaacttggtgtactgctactcgtactataaataacatagggttttaaccttggttgtggtaatggtcatcttttctcattcaatt

SEQ ID NO: 23503 - DNA, 217 bp, Zea mays
  Clone ID: LIB3596-059-F6_FLI
cctaccatggtggtgacgggtggccggtgtcttcttctgacgtacggcatgggacgccaagtcgagtttgcttctctccagtttcgtcagagaaaagaaataaataaataaataaatgtcgccggccgctctgttcggtgcttgctcttgttcgtcgtccgtgtattagtactctctttttttctttttctttcttgaataaagagccatatgctgc

SEQ ID NO: 23504 - DNA, 709 bp, Zea mays
  Clone ID: LIB3596-060-A8_FLI
gtcccaatcttttccttctccgccctcgccgccggccaacatgatgcacatgaccttctactggggcaagtccgccacgatcctattcgacggctggcgcacctccacgtggctcggctaccttctctccctcgtggccctgctcctcgccgccgccttttaccagtacctcgaggccttgcgggtccgcgtgaagctcatcgcggaaggatccgccaagccagcctcctccatccctccacccgccagctccgacccgcggacgccgctcctcgcgcccgccttcgccgggcgctggccgccgcgtgtggccgtggccgcgatgttcggggtcaactccggcctcggctacctcctcatgctctccatcatgtcgttcaacggcggcgtgttcatcgccgtcgtcgtgggcctcgcgctcgggtacctcgcgttccgcagcagcgacggcgaggatctcgtcgtcgtcgacaacccctgcgcctgcgcgtaagggtgtcgggctcgccggattgccttgtccccaggtttgccttgcttgttgatgttgtagtataacacaggtatcataataaaaaatcatgtacagatccaattgtgcgtttggaggacttgcagtgttcaggtgtgtttggggtgcattgtagggtaaagaatcagattaatgtatctgagcctctgaggagatggtttaactgtttttgagatc

SEQ ID NO: 23505 - DNA, 653 bp, Zea mays
  Clone ID: LIB3596-060-G11_FLI
gtcatccacactaacgaacgaactgaggtcgacgacgactgatcgagcagcgacgatggcggctgtgctgaacagcaggaagacgccgcaggtggttgccgtgctggtggcggcggcgctgctggcgtcgtccgcttcggcggcgatcacctgcgggcaggtggggtcgtcgctggctccgtgcatcccgtacgcgacggggagggccagcgcgctccccgcgtcgtgctgcagcggcgtcaagagcctcaacagcgcggcgcggaccagcgcggaccgccaggcggcgtgccgctgcctcaagagcctcgccaacagcgtcaagagcgtcaacatgggcaccgtcgccaccatccccggcaagtgcggcgtctccgtcggattccccatcagcatgtccaccgactgcaacaagatcagctaagttatacgacgaccaagctaataagcctaccgaacgtacacgtacgtcccgcgcgctgcacgagtgatgaagccagggaagaaataaaataaagctagctgtattgccaggagcagcatgcagtatcgatctatatatatactgtactgtagtactctattatatatgtatgtgtggcctgcagtgcgagttgcttcgatccacctacttgttcagacagtttaatggt

SEQ ID NO: 23506 - DNA, 421 bp, Zea mays
  Clone ID: LIB3596-063-B11_FLI
atccccttcacggagctcgccaagcgctatgggggacgccaacggcggcagtatgcacgttgtgatgctgccatggctggcgttcggccacatcctccccttcacggagctcgccaagcgcatagctaggcagggccaccgggtcaccctcttctccacgccaagaaacacccggcggttaatccgcatccctccagaactcgcggggcatatccgcgtcgtggacatcgcgctgccgcgcgtggagcgcctgccggaggactgcgaggcgagcatagacctgccatccgacgacctccgcccgtacctccgcgtagcctacgacgccgccttcgccgacaaactctcggccatcctgcaggagccggggccgcagaggccggactgggtgctcatcgactacgccgcgtactgggcgccc

SEQ ID NO: 23507 - DNA, 770 bp, Zea mays
  Clone ID: LIB3596-063-D8_FLI
gccagtacccacagtcctacgagcagtcgcacgcaagtgtcaagagacaaaacggtcgacatggctcgcacgcaatctgccgtagcggtcgccgtggtggccgcggtgctgctgctggcagcggcggcgacgacctcggaggccgccatcacctgcgggcaggtgagctccgccatcgcgccctgcctctcctacgcccgcggcacggggtccggcccctccgcgtcctgctgtagcggcgtcaggaacctcaagagcgccgccagcaccgccgccgacaggcgcgccgcctgcaactgcctcaagaacgccgccaggggcgtcagcggcctcaacgccggcaacgccgccagcatcccctccaagtgcggcgtcagcatcccctacaccatcagcacctccaccgactgctccagggtgaactaaaacctagaccacgcgcgacgacggccgcctgatcgatcgaccaaccattccgccgtcgccgccggccggatcatcgatcgtcgtcatgatgatatctatcaatctacgcgtgatgatcgatggctacttgtctactgctatgtactactaaataaaatctctccgtgtgtgcacgtacgcttgcatgtgcatggtagcatgtatgtacgacgtcgtccatgtatgtgtgtgtgacgtgtgagacagagagagagagagagagagagagagacaggatcgatcgagagacggtcatgtccttttggctgtttggtttattcatatcacaacttttgagtgtatac

SEQ ID NO: 23508 - DNA, 841 bp, Zea mays
  Clone ID: LIB3596-064-B5_FLI
caaccggcccaaccccgtctcggattgcacggcaccggtacccctcgcctaggtttaggcttccgaccgccgcagcgtccccgccacgaccacgagctaaagaaggtcgccggaagagggggcgcggagatgagcgggagcgcgttcaacgcgttcaagtcgcgggttccggtggcgtggagtccccggctgtacatcacgctggtgcggggcctccccgggacgcggcgcctccaccgccgcacgctcgaggccatgcgcctccgccgctgccaccgcaccgtcgagcaccgcaccacgccgtcgctcctcgggatgctcacccaggtgaagcgcctcgtcaccgtcgagaccgaggagatgtacaacgcgcggaagcaggccgaggcggagatgcgcgcgcccagacccccgctcgtcgtctcccaccagccacagccgccggctccgaagccggcagccgccgccgcggtgggtgccgctaccactgcgcagtagcctctgggcatcagaagcctttcatcacagttcagcggcataataattgatttgcctgtgtttgggtctgctggttttcagacgatcgctttgggtcttcttggtcaactagatgtagcaacggatttgatcgatcttctcaagatcgttgtgtggtgcaacttgcattgaccctgtattttagattgttttatatgaactaggcgcacggttttccaatgcttttgtctagaatcaagtccaatgatttggtttaaattactaaattctctgtaaatgctcttcaagatgtgtaggcggttaaggcttcttgcgtaattgaaccagaggattgctagcgtct

SEQ ID NO: 23509 - DNA, 721 bp, Zea mays
  Clone ID: LIB3596-064-D6_FLI
tagctagccctagccacgtacccacacatcgtagacaacgcaattagctaggaatagcatccatggcgtccggggctgctgcttcctcggccctcttgctcctcgtcgcggccttggtggccaccagtgcgagggcggccacattcaccatcaccaacaactgcggctcgacggtgtggccggcggccaccccggtgggcggcggcacgcagcttgaccccgggcagacgtggaccgtggacgtgccggcggggacccagtccggcagggtgtgggggcgcacggggtgctccttcaacggcggcagcgggagctgccagacgggcgactgcggcggcgcactctcctgcacgctctcggggcagcctcccatgacgctggccgagttcaccatcggcggcggcgggcccagctgcccagacgcctacctgtttcccagcgacaacaccaagacccatgcctgcagcggcaacagcaactaccaggtcaccttctgcccgtgagatcgcgcgtgcgaggcaggcggcagtgtggccggacgacgatgcaatatgcaatgcatgctccagccaacttctttctttgcaaataataagtatgttgtttgtcctagtttgttattagtggagaaattaaaaaagtagacaatcgaataagacgatgatgttcaccccatagattatgtaacttcgatgagtttgatctatatatatgtgcttgc

SEQ ID NO: 23510 - DNA, 294 bp, Zea mays
  Clone ID: LIB3597-001-A6_FLI
cagcaacaacggtgttgcatccaacgttcgtttggcaaatgctctggggttccagaaggacgttgcccttcctagatgcgcgcagatcctcaagatgtaccaggatgaggatgaccgtgtctaattacgcctgagtttagatgtacttggcgagttacaatatatttatgtggtgtctgaaatgttctagaacctctaaatctattactaagagcaacgatattgtcgcttcttaaaccttagtactacggatgttatgagctaataaatatatttcgctaatgtgatgcagtt

SEQ ID NO: 23511 - DNA, 1524 bp, Zea mays
  Clone ID: LIB3597-001-E6_FLI
ctcggaggagaggagacgagacgacccaagactttctcacccccctttgcttcctgcgcaattcctgcggcagcgcctttctctctttcaatggacagcgactacgttgccagcctgctcatgggcatgggctcatccgcccctgcgctcgacttcgccgcgctggacgccgggttcctcgaaacgctctgcggcggcggcggcggcctcttcggggtgtccggggtcgccgcgggggccgggtgtggcggcgtgtccccggaggggtcgtcggtgtccgacccggcgtgggcgcgcgccaggggcgatgacaatgtcaggaagcgcaaggcgccgcccacggggtccgccggcggcaaggaagcctgcccgggcaaggctgcggaggccaagggtccggacgggaagaggtgcagagtgggcggcagcgacagcccggtgaagccgaaggtagaggaggtggcggcgagcgacgcctcggttgaactcaaagcgcagaagaagggcaaggggaagaccgccaagccggcagtcgaaccgcccaaggactacgtccatgtccgggcgcggcgagggcaggcgactgacagccacagcctcgcagagagggttagaagagagaagatcagccagaggatgaagtttctgcaggacctagtgccaggatgcaacaaggtagttggcaaggcactcatgctcgatgagatcataaactacgtccagtctctgcagcagcaagtcgagttcctgtccatgaagctcgccactgtgaacccacagcttgacttcagcaacctgtcgacactcctacacaaagacatgtaccaaccatgtggcccttcggcaaattcggtctttccactggaaagtgacggtgcagctttcccattctgtgaccaagcggatcttttccacagctttggttcgggttcggctgctatggaggatcagtgctctctaagcctgctagacacggctctgccccacgcggccaacccacagtttgcttttcaaaagcagcagagggacttctgggaggatgccctacagaacgccttgcctaccggtagtgagcaaagacaggaggaggatgggcttttagtacccaactttgatggccagttacatgctgaccagacaaaggttgagttctagtccctggcgatcctcccaaggttgatatttttgtatataggtgggtaccaagacctgtggcaaacaaagctctctctctctctgtgtgtccgaagctgaccatcattagagtctaggcctgcgaactgatttcgttccgtgataatgctgcatgtatggcatctcgattcttcccacagagatcatgtgatgtgatcgacctcgagaaattaaaagtagattgtgtactagatatggcgcaaatattacatgcgccatcttctaaagttgtactgattggtatgtaagggcgctgggtggtgttggaacggataccgtgtactgtttgttgcttttttttttcttctagtattaatgattatgatgacg

SEQ ID NO: 23512 - DNA, 382 bp, Zea mays
  Clone ID: LIB3597-001-G11_FLI
cccataggtccagtccaaatccaatccctgttgccatcagaatttcaggggcagccatggccgaaaaggagagcaacggagtgcgggtgtgcgtcaccggaggagccgggttcatcggctcctggctcgtcaggaagctcctcgagaaaggctacaccgtccacgccaccctgcggaacaccggggacgaggcgaaggcggggctgctgcgtcggctggtccccggcgcagcggagcggctgcggttgttccaggccgacctcttcgacgccgccaccttcgcgccggcgatcgctgggtgccagttcgtcttcctcgtcgccacgccattcgggctcgatagcgccggctcccagtataagagcacggcggaagctgtggt

SEQ ID NO: 23513 - DNA, 763 bp, Zea mays
  Clone ID: LIB3597-001-G7_FLI
caagccagtacccacagtcctacgagcagtcgcacgcaagtgtcaagagacgaaacggtcgacatggctcgcacgcaatctgccgtagcggtcgccgtggtggccgcggtgctgctgctggcagcggcggcgacgacctcggaggccgccatcacctgcgggcaggtgagctccgccatcgcgccctgcctctcctacgcccgcggcacggggtccggcccctccgcgtcctgctgtagcggcgtcaggaacctcaagagcgccgccagcaccgccgccgacaggcgcgccgcctgcaactgcctcaagaacgccgccaggggcgtcagcggcctcaacgccggcaacgccgccagcatcccctccaagtgcggcgtcagcatcccctacaccatcagcacctccaccgactgctccagggtgaactaaaacctagaccacgcgcgacgacggccgcctgatcgatcgaccaaccattccgccgtcgccgccggccggatcatcgatcgtcgtcatgatgatatctatcaatctacgcgtgatgatcgatggctacttgtctactgctatgtactactaaataaaatctctccgtgtgtgcacgtacgcttgcatgtgcatggtagcatgtatgtacgacgtcgtccatgtatgtgtgtgtgacgtgtgagacagagagagagagagagagagacaggatcgatcgagagacggtcatgtccttttggctgtttggtttattcatatcacaacttttgagtgt

SEQ ID NO: 23514 - DNA, 761 bp, Zea mays
  Clone ID: LIB3597-002-A8_FLI
ctcaggttcagcggaaactgagccgtgagcaccgccgccgccaccacctttgcgtttgcggtgacgacacgacaccaataatggcggcggcaaggacaaggagcctgctcgcggcggcgttcctggcgctggcggcggtgccggcggtgctctgccaggcgccaggccccgcggcggcggcgccgcccaacaagggcccgccgaacgttacggcgatcctggagaagggcgggcagtacacgacgttcatgcggctgatgaagtcgacgcagcaggacacgcagctgaacggccagctgaacaactcgttcggcagcgggtacacggtgttcgcgcccaccgacagcgccttctccagcctcaagcccggcacgctgaacaagctgtcgcagcaggagcaggtgtcgctggtgcagtaccacgtcctgccgcagttctactcgctcgactccttcgagaccgccagcaaccccgtgcgtacgcaggcgtcgggctccgacgggccctacacgctcaacatcaccgccgacagcagcggccaggccaacgtgtccacgggcctcgtcgccacccgcgtcggccaggccctgcgcgcgcagcagcccctcgccgtctactccgtcgaccaggtgctgctggccaacgacctgttcggcgtcaagcccccggcgtccgcgccgcccgccgccaggaagccggccaagggcgggtccgtcgccgaggcgcccgccgccggctcggctgacgcgccgccctccggc

SEQ ID NO: 23515 - DNA, 981 bp, Zea mays
  Clone ID: LIB3597-002-C5_FLI
attacgagcaactccgccgccgccgtaaagccatctcccccatccgccgccgccgccaccgctgctggtgggacgggccgtgcgtccgttccagcgaagaggagcagcgggtcggaggagccgccggcgaggtcgggccgcgggggatcgagatggtgctgtgggagctcacggccatcaccgcctacttcctcgggctgaggcgcacctaccgcctcgcgctccgcatccagcgccgcctcatcccgcccaaccaccccaggatccgggacttcgtctacaggcgcacacgggatgtcttcaacgtcgcagtgtcggtccacaagaacattcagcagagagacatagaggtcggccggaacctcggaaacgcgatccttcgctggcttgatcgcatgaagccatcagcggagatccgcccccgtcttccaggcccaccaaacggcagcacggccgagcagttcagacatgtatcgagcgcgagcaggggcgcgggggcacagaagacctcctcttcctccaaagcttcgccccacgactccagcgggaagatgctgttctcgcgcctcaacattgggcccaagcacttcccggttctgcccacgctagcacagcccaacaggatcagcgcgagcagccagtgcaggcgcatctcctactcctacgccccgttcccgtcggtcactgccaggaggaagggtgtcttccgcgaggacattgcgcagctgatggtgtaaggatctaaaatacttgtcagcgatcccgtgtactgtttttttgtttttggaacactggacttagtgatttgcccagatcagatgtctgatgtgtcttggtttaataataaagaagcgagcgagcgcaggggaaattgtcactgctgctgcggtttaggccattagatttgtaaccaaatgctcagatgaacagcatttcgtgtttggtaatgaacaccagaacatgtgcactcgtttatgtgct

SEQ ID NO: 23516 - DNA, 697 bp, Zea mays
  Clone ID: LIB3597-002-H10_FLI
ctttgtcagggcttcggggacagccaaagaagacggacggacccagtgaggcgagcacgggcgctcaccggcgatggcgacgagggcatgggtggccgcggcggtggccttgaaccctcaactgctgcctctccgctcctgctcgcccacgaagtcggtctccccagcgcagcgctcggcgtcgatggggctccggctgcgcagcggccggccgtgcctggggaagttcgtgtgccgccgcgccaagaacgcgggatacgaggactacaagttcccggaccccatcccggagttcgccgagcaggagacgagcaagttcagggagcacatggcgtggcggctggagcagaagaaagaggactacttcggggaccatgtcgaggagatcgttgacgtctgcaccgagcagatcatggggacattcctggagaacgattaccgtggaccagggacgctcctggttcacccgttcctggacatgaagggcgagatcaaggagagggggctccccggcgcacctcaggcggcacgggcggcgatagcatgggccgaaaagaacgtggacaaggactggaaggcctggactggggaatactagcactagaagaggtatcaataaagattttgccatttgaattggcatgagaagagagtaaaaactaaagaggatgtttctatgttttaccactgagcttgt

SEQ ID NO: 23517 - DNA, 701 bp, Zea mays
  Clone ID: LIB3597-003-C2_FLI
agcagtggcgctggtggcggtgatgggcatgctggcgccccgagcggcggcgcagacgccgaactgcgcggcgaagctggtcccgtgctcgtcgtacatgaacacgacggggacgccgccggacacctgctgcggcccgctcaaggacgccgtcaagaacgacctcaagtgcctctgcgatctctacgccacgccggagatcttcaaggccttcaacatcagcctcgacgaggccctcggcctctccaagcgttgcggcctcagcgacaccaccgccgcctgcaagggttcaccatcaggtggtggcagtggcagcaactccggtcatcacactctgtcggtcggtttctcaggattcatgagcttcttgtcgctagccttgtggtctgtattagcataaagtttaggatgctgcagtggacattgcctgtcttatcccacaagatgatttgcacctacgacacaatcaacatttgtcttgctgtgtattgatatggccagccagtagactgatgtctctgaaccatgtgcttgcattagactgcacaattggtccttcgcccaattgttccaaagagtgcttccatgaacttagaccgaagagtgtctccaaggtcagctgtgggaaggttcttaagtccttcgcccaattgttccaaacctctgcaagattattggtaatgtgatcacattttatctcc

SEQ ID NO: 23518 - DNA, 2211 bp, Zea mays
  Clone ID: LIB3597-003-E3_FLI
cacagctactccgcctcctcgcccttttctcctcatccctcgctttcgcttcgccgttccaacgcggagcccccacggaaaataaaggccaagaagtgatggtagtggagtaaaaccacgcgttggagggcagagggacaggttggtggaggacgcgcacccagcgtggagagcagcaggagctacgcgaattcgggccgcgagtgcgccggttcaggttgccgccgccggtggaattgtggcagacgaggtggcctgttggtagccgcgggagtttgcgagtaggtcggttccggttggtgtgcgagcgaaggtgctgttggaggcgtggatctggccggcggcgggcgatgggaaggagggactagggctcgattggagggaaaggcgcgatcttggaggttcccatgggcggatgcctctcgcaggaggagcaccggctccagagcaggccagctgaagctgctggagcagatggattgcggaagtctaaatctgattctaaagctgtagcaagtgttcttgctcctccaaaagatgtggtggacctgcaagtagaaggatatggaaatgtgaatattttcacatatgacgaattaagagcagccacaaaaaacttccggccagatcaaattcttggagagggtggatttggagttgtttacaaaggtgtaattgatgaaaatgttagagcaggtttcccatcgagacaggttgctgtgaaagaactaaacccagagggctttcaaggggacaaggagtggcttgcagaagtcaactatcttgggcaacttagtcatccaaatcttgttgaattgattggctattgctgtgagggttcacatagactgcttgtctatgagtacatggcttgtggaagcctcgaaaagcacctttttcgccgggtttgccttaatatgccatggtcaacacgcatgaagattgcattgggtgctgcaagggggctcgagtaccttcacggagctgagagatccatcatttatcgagatttcaagacatcaaacatcttgctagatgcggattacaatgctaagctttcagactttggtctcgcaagaacaggtcctagtggagaccaaacccatgtgtcaactcgggtcatgggaacttatggatacgcagctccagaatatgtcatgactggccatctgacggcacgaagtgatgtttatggcttcggagtggtgcttctagagatgattatcggaagaagggctgtggacaagagccggccaagccgtgagcataacctagttgactgggcacggcccctcctcgtccataacaggaagctgttccgaataatcgatccgagaatggaagggcaatactccaccaaggctgccactgaggtggcaagccttgcataccgctgcctgagccagaaccccaagggacgaccaaccatgagccaagtcgtcgagacctttgaggccgtgcagaacatgcctgaatgccaagacatactcctccagaacagcatcacaggtgccgtgacgctctatgaggtccccaaggagcctgcagacagagttgagctggagaaggccaagcaggaaccggcagtaaagagcgccgcgatgccgcccatgaacggaaagccagtcccccagagcaggcggacgcggcctgggaatggccggagcaagagcgagccatcgttggagtgcaagatgtacatcccgtcaccggactctgatggacaccagctcggcctggaggcagtcgcatccccagatggaagcataagggaccctcctgatgaggatttgtacaagatataacaccagggcagtttttcttcaacaacgaggggcagatctggcgcagtgttgagttgtgggttttcaaaccagcctcttcgcatttagggaggaagatttgcatctgtttatctctttctcatacctcatttacgtgggagcctcgatctgcctttttaacgtgagcccgcgttgctcacctttggcgccgccactcccgttcttaaagatcaatcagctgtaattttttctctgatggccactggccacggtagcgttcatattcttccgattagcaattgtatgtagaggagagttgtgatggaaagcatgtgtgtgtttgccatgacgacgctgtaaaaacctgaaacacttatttctaggggggtttccactccaaaatggaagtggagagatgtgtcctgat

SEQ ID NO: 23519 - DNA, 853 bp, Zea mays
  Clone ID: LIB3597-004-C11_FLI
gagcgagtgattagctcgtgcgtgctgtgcaaggaaagtaacccagcagatcgatcggtcgaggcgggtaggacaggatctagaggtagctagccatggcggaggaagcgtctgcgcctgcggcggggacggaagcgccgccggggaagatgacgatggtggtaggggtcgacgagagcgagcacagcttctacgcgctgcagtgggcactgcagcacttcttcccgccgggccagccgcagcagtaccgcctcgtcgtcgtcaccgccaagcccaccgccgcctccgccgtcggcctcgccggcccaggcgccgcggatgtgctgccgtacgtggaggcggatctcaagcgctccgccctgcgcgtcgtcgaaaaagccaaaggcctctgcacacaggcgagcgacgctgtgtttgaggcgctggagggggacgctaggaacgtcctctgcgaggctgtcgagaggcacggggccgagatgctcgtcgtcggcagccatggctacggagccattaaaagggctgttcttggaagtgtgagcgactactgtgcccatcacgcgcactgcaccgtgatgatagtaaagaagcccaagcagcacaagcactgatcaatgccgactgatcactacgtgtactgcaaataatatgtactactgcaaagttatgtgtgcgtccgtccgtttgtgaataattgggtcatcaaccatcacatcttcggttgcttctacaagtatccgatccaatccttctacgtgtggattgggatttacaaataattgattgttctctgaacctgaaaacaatgtatttgtattaatgtgttggaacaattatatgtagttgcaacttc

SEQ ID NO: 23520 - DNA, 698 bp, Zea mays
  Clone ID: LIB3597-004-G3_FLI
acgctcttcgtgcccgccgcctcccctcttcccctccacctcactcctcccgtctgacgcacatggcatccatcgccggatcttccgctctctccttcgccatgcctgtcaaggcaatcaactcaaattctctagccttctccccggtgaggaagggtaacacattcctccgcctgcaaccagtgcctatgagatctgtttcctgcgctgccaagaaggatacggtggacaaggtttgtgaaattgtgaagaagcagcttgctcttcctgaccacactgaagtttgtggtgaatcgaaattctctgaacttggtgcggattcgctggacacggttgagattgtgatgggccttgaggagcacttcgacattagcgtggaggagtccagcgcgcagacaattgccaccgttgaagacgccgctgacctcattgacaagcttgttgctgtgaaggcataggccgcatctcttctatcattgtcttaccactctaggtttctatggtctgaagacttgtgattttctccgcactgctgttgctattcccgtgtcgtaataatacgagatgttttaagcggctgaacacacggtggtgtaatctgttactggtaaggtgcattgttgtatgaattgtttctcacccagaagaaccagaccatcggggattctagcatcatatatagtgttgaaaagatgagc

SEQ ID NO: 23521 - DNA, 276 bp, Zea mays
  Clone ID: LIB3597-005-D12_FLI
ccaaggaggccgcggcggcagaggagaagaagaaggacgacaagcccaaggaagtaggcggcggcggcggcggcgagaagcccaaggacggggaggaggaggagaagaagaaggaggacgcgcccccgcctccgccaccggaggaggtcgagatgcgggtctacatgcactgcgaggggtgcgcccgcaaggtcaagaagatcctcaggcgcttcgacggagtggaggatgtgatcgccgactccaaggcgcacaaggtgctggtgaaggggaaga

SEQ ID NO: 23522 - DNA, 1108 bp, Zea mays
  Clone ID: LIB3597-005-G4_FLI
cccgaactgaggaaccctaccacgcgggcgacggcggtgcgcgaccggtgacgggacagcggcagcgccccctcctccatctgctggtcccaccgcctcctgacgttatccgatactgccaatccccctcttcgccgttgacggagcttaccgaggaaagaagggcagggccatggcgggagccttcgctttccgcctcgtgcctcgcctcgccgcagagccggcggcgagggggaagggtggcggaggaggagccaaccgcgacgccggcagcagggcgctggtgtcaaagaaaccaaacaagcagcagcatttgtggatcaggaaggagacagctgggtcagggaagaaggctctccgtcttattgatgcttctgtggaaccatatcttttaggtttcgaagttaccaaatgaaagagaagctatttatggtgcattggacaagtggagtgctttcgaacctgaatttcctattatagcagcagcaaaagctttggggatgttgaaaaggcgacgacaatggttaagaataatccaggtaaccaagtggttgatgagcaaaggacaggtgctgacatggacaacatatgatacacttctgctcgcacttcttatggataaacgggtagacgaagctgagtcagtttggaacactgtaatacagactcatacccgctcagtgcccaagaggttgttctctcggatgatcttgatctacgacattcaccagcgcccagataaagttttggagatattcgcggatatggaggagttaggtgtgcgtccggacgaggatacagcgagacggatcggaaaggcattcgtggcttctggccaagaagaaaaggagaagcatgtcctcgagaaatacttgaagaagtggaagtacatccatttcaacggcgagcgcgttcgcgtgcggagggacggaccattggcgtagtgcccgttttctgaaaaatgctcgaacctatcagagtatcgtgccggtaggcggtagggcaggggagatgctgttactgccgctgtgacagtcaggcacatggatatcggcactagtccctatcctatgtatgtggaatggaacggaaactggagattggttcc

SEQ ID NO: 23523 - DNA, 876 bp, Zea mays
  Clone ID: LIB3597-006-A8_FLI
gttcccttccctttataaaccagagaacctgcagtgcagtgcaggcagagtactccgtctgatctcggtgatctgtctccacgacaaggagtgcactgtcagctctagcttgctgcagaacaagggcaagatggcaagaggtggtcggctactgatcctctccctggggcttgtgctcctctacttcgtctcaggtatacctttttcctatgctcttctccttgttccatttcattcttaagattgccgtgctgtgtgtcaactgttgttgattggaacaagaagaagaaggaatgaaagctgttttgtaggaagtgttgctgctgctgctgcacagaaaacgtggtgcgttgccaagccgtcggcgtccaacgatatcctgtctctgaacctcaactacgcgtgctcccaggtgagctgcggcgtgatccagaagggcgggccgtgctactacccggacaacctggtgtcgcgcgccgccgtcgccatgaacctctactatgccgccaatggcaggcacccctggaactgctacttcaacaactcggcgctcgtggtgcagtccgatcccagctatggatcctgcacctactactgatgtctgtctgatgctcttttgtagcagagatcggtcgatgaaaggaaatataatccctgtgtatgctgtgctgtgttgtgtctagagatgacaatagggacctgattcccccgtggggaatttcctattgctatccctagttgcgtcctagtagaagtgtctcttgttccatccagttgatatgcatgataacatttggagatgcatgcatgtgattttgtattcgaggatatggtgtgatcgcaaatgaacaaagtgatgcaaggcagcaatcattc

SEQ ID NO: 23524 - DNA, 1654 bp, Zea mays
  Clone ID: LIB3597-006-F10_FLI
ctgcttcgcggctgtctctttcatcggccacccacggcggcggagcatagcagtaagcaagcagcggagacgccggagagcggtgaagaagcatggagatggagcagctctgctcgctgctccgcgacctcgacgcgctcaagcagcatcccgacgatctcacttccaccatcgatcggatgcgggagcggctagtggcgatgatgaatccggcagccggtgccgcttctcgatccaagattaaggacatgagtgcagaagtggtggacaacaatccctacagcagacttatggcgttgcaacggatgggcgtagtggagaattatgagcgcatcagggactactccgttgccatcgttggcataggtggcgttggtagtgttgccgcggagatgctcactagatgtggaattggacggctgttgttgtatgactacgacacggtcgagttggctaacatgaataggttgttctttcgcccagaacaggttggaatgaccaaaacagatgccgctgtacagacactttctggaataaatcctgatgttgtgttggagagctactcattgaatattactacagtcaaaggtttcgaaacatttttggcaagtttaaaagcacaaagttctcatgagcgtagcactggagttgatcttgtcttgagttgtgtcgataactatgaagctcgtatggttgtaaatcaggcatgcaatgagcttggtcaaacgtggatggagtctggtgtctcagaagatgctgtttctggtcatatacaactgctggttcctggtgaaactgcatgttttgcatgtgctcctccattggttgtagcatctggagtggatgagcgtacacttaagagagaaggtgtttgtgctgcctctttgccaactacaatgggtgttgttgcgggtctcctggtccagaatgctctgaaatatttgttgaactttggacaagtttccccttacttgggatataactcacttaaggattatttccctgctatggaaatgaggccaaatccacaatgcttgaatccagcatgtgttcacagacagaaagaatatatggaatccaaacctgctagagatgcagcagcgaagactaagatggaagctgaagcatccacagaaaatgaatgtcctgtccacctagacaatgagtggaatattagtgttcttgatgatgaagaaactgagacatcaagcattcgaaacactccagatatcctaccggaaggtcttgtccgtgagcttccagacgctgattcatacgcaggaccagctgctccagtgagttccagcgctattgatgatgatgatgatctcgaggagctccagcgtcaacttgatgccctaaacgcatcttagccttaataagtaggctagttcatctgcgccttaattggcttctccccaatcccaacttggatggggaagatgatttacatactgtttttcggagttggtaaattcatagcaccgtggtaaaagaaaaaggagaaaatgatagctatactggttttgggagttttgacttacagttttggttgagatctgagaacatgtgcatgtctgagccagacagctcgtcggtaatggtactaatgtctgaatttttgttgctgttgatattcaaaggttttatctgg

SEQ ID NO: 23525 - DNA, 1375 bp, Zea mays
  Clone ID: LIB3597-006-H5_FLI
cctgagcgaccccttcgcttccactccactgaagcgggccaaaagaaggaaagaaggcgggcaagcgacaggaaggaggaggaggaggaggaggagaagccatggcgagcgacggcgacgggaagggccgggtcgcgacggcgccgggggcaggagggtacggctacggctacggctacgccggcttcgagggggaggaggaccggaagtggtggccgtggctggtgcccaccgtgatcgtcgcatgcatcgccgtcttcgtcgtcgagatgtacgagaacaactgccccaagaaccggagccagctcggcggcgactgcgtcgccggcttcctccgccggttctccttccagccgctccgcgagaacccgctgctcgggccgtcctcctccactctgcgaggcaggggagttttcgggtgtgacggtgacattcagatctccgtcgcggctacctgcggctaccttcaactgttctactaaaactctaaagtttggagaaaatgggagctcttgactggaataaaattgttcatcaaaaccaagggtggcgccttattagctgcatctggctccatgctggcctaattcatttggttgtgaacatgctaagtttgctgtttattggaatccgtcttgagcagcaatttggatttgttcgcattggtgccatatacctactgtctggttttggtggcagcgttctgtctgcactcttcctacggaataactacatctctgttggtgcttctggagctttatttggcctgcttggatccatgctttctgagctactcatgaactggactatatactccaacaaggcagcagctataataacactcctgtttataattgcactcaacttggctattgggatactacctcatgctgacaactttgctcacattggtggattcgcaacgggtttcctcttgggttttgttctgttggcaaggcctcaatttggctggatggaacaccacgagctgccgcagactaaccaacctcccaagtacaaagcgtaccagtatattttgtgggttgtggcactagtcttgctgttagttgggtttgtgatttcacttgtgatgcttttcaaagggaagaacgggaacgacggctgccactggtgccactatctaaactgcgtgccaacatcaaagtggaagtgcaacacctagacacctcaggtttctgttactctggcgaaacatgtagtattcagattcagaagaccattttttttatgcgtgtttgtctgtagatataaacaagttctttgttctttactgggttgaagttatgtaaactgctttgttgagctttgtatgtttataactcgaggttgatgcctattcaaaatcgttgtttag

SEQ ID NO: 23526 - DNA, 756 bp, Zea mays
  Clone ID: LIB3597-008-H12_FLI
gcgccgattcctcctcctcctcctccaccctcgtccgtccccttccggcgcgcgagctcgcccgagatggcgaacgcgagatcgggtgtcgctgtgaacgatgagtgcatgctgaagtttggcgagctgcagtcgaagaggctgcaccgcttcataactttcaagatggacgacaagttcaaggagatagttgtggaccaggtcggggatcgcgctaccagctacgatgacttcacaaacagcctccctgagaatgactgccgatacgcgatctatgatttcgactttgttactgcagaggatgtccagaagagcaggatcttctatatcctatggtccccatcctccgccaaggtgaagagcaagatgctttatgcaagctcaaaccagaaattcaagagtggcctcaatggcattcaggttgaactccaggccacagatgcgagtgaaatcagcctcgatgagatcaaggatcgggcacgctaggcgcaccgccatcgcgagtttcatggtcacgcatcatggactcgcctactactgtggatttgtacgccattatagacttggtgctgcgaaagactgctttggtgatttgtgggtttgttgctgtgtaaaaagatcctcatggcttccagaagaccatgaaggtttggatctatcatgtaattccttgttatctgccaattatgtatggactatggacatgtgttgcgctgttcaactcactacaaataagtaatcgatatattccctacc

SEQ ID NO: 23527 - DNA, 1173 bp, Zea mays
  Clone ID: LIB3597-010-D12_FLI
cttgagttgagagaggagagaggagacagcaagcgacacaacacagaggtaaccggctcacgcctgtctcggtggccgtgggcaatcatggccactgtgggacagtctggggccctgaggagggtcaccgtgcactacgccaactcgcccacaggcagcacggtggcagaggtgagctttgacgaccttgacgacgagctgctcctgtttgtgctcgccgatcttcttcctggccaggaaggtttacaccagtcgatcttggaaggaacatacaacaaccaggagaaccacatgagaggtgcagcacccagtgcaccatatggttattcacggccagaggagtaccgtgcagagagcagcactgctgcagcagcagcaactggttctaggaattcaggcatggatgaacagatcgcctcggacttcgagtacgccaagcagctgcagcaggagatggaggacctcagcgtcaaagacgaagacgacaacgatatcagctgcgtgccgtctccatctgactctgacgatgagcacgagcatcatgacgaagaggaagaggctgacaggcaggaggacggtgatggtgatgatgatccagacaacatgacttatgagcaaggacaggcacttgtagaatctgtggggactgagtacagaggtctatccgatgagctcatctcctacctgcagccatggaagtacaaggcagtcaaggcttcagggctcttctcccggaaaacaaaccatgaagactgcccgatctgcctgtccactttcagaaaccgggaaaccatgataacgttgccgtgcaggcatcactaccacgcagcttgtgtcaccagatggctcaaggtcaacaagacatgccctgtatgcaaatacgaactgtttggaccttcctaggatccgaccacgtcgacgatggagctgagaggataatgatgatgacgacgacaacgacagatggttgtgtcatctgctctctttttttagcgccaagaaaactggaaatgaaaaagggaaatcaatccgaaaggagaatagaaattaggaagtataggtagaatatctctcttgccagtgactgtgcgatgaattaagcatacctcgtgctatttatgatgaaaaagggaaatgaaaaagggaaatcaatccgaaaggatttttttatat

SEQ ID NO: 23528 - DNA, 818 bp, Zea mays
  Clone ID: LIB3597-010-G11_FLI
ccaccccatctgtcccatccgcgagccgcgcacgggtcatctgcatgccgcatccgccccatcctctcgccgtctatcccctccgcatgaccgctgccccagtccatcccctcctcgtccagcatccgctccctctgcagtcccccctccctcccacacgaccatggcgtcctggttggtgcccttccggtcctgctgcgtgtggaggctcgccaccgcgctagcgcctttgccgcacaacctctcgaggacccacgcgagctcatcctccgtcatctcccccgctcctccgggcagcttcttcccacctccgccggccgcgccctcctggctcccgtggtgcctctttcgccacgccgctgggccatcgccggtggcgggggcctcggaggagaggcaggagcccatgatggccaacgagagggaagcgacacggtggggcacatggtggaggtggcggtggtagctgcctgcctgcctgtctgcaaactgttctgatgatgctcgagatttgtaggtcttgtggagtcatttgtatcgtatggtcttgttgcttggaggtccgtgcttaaaaaatggcattttggtttttaattagggtttcaactcatgtctcttgcttcatgtgatgggaaatgcttgttgtgccatatgatgcaacctttcaggataagataatgttgcttagacataattgagagcctgttgttaacgtcgcactgaaatatcaaacatctcttctgtttgctaacagattgtgtgtccttaccggtctgttcagttgaataagagaatttatatggtcttcatttatggat

SEQ ID NO: 23529 - DNA, 632 bp, Zea mays
  Clone ID: LIB3597-011-F8_FLI
gcggaagttgcggttggcctcgtcctcctcttctccgtcgcggctcagatctctgcttgcggcgatggcgtcgttctcggaggctccccccgggaacccgaaagccggcgagaagatctttaagaccaagtgcgcgcagtgccacacggtcgacaagggcgccggccacaagcaaggtccaaacttgaacggtctttttgggaggcagtctggtaccactgcaggctactcctactctgcgggaaacaaaaacaaggctgtagtctgggaagaagacactttgtatgagtacctgcttaaccctaaaaagtacattcctggaaccaagatggtcttccctgggctgaagaagccgcaggagcgtgctgatctcatcgcgtacctgaaggaagcaactgcatagttcattgacatgccttttgccatgaagagaaaaattgttttgcagtttaataaaaaacattttagacaatttgggtcaccctgtttgaacagggtgcaaccacgtctcattattttcgttcttatggtgtccgtatggaatgcctaggtgtttagctgtgcacaaataacagttaaactttgacggctcctatttcaactgctggagaaatgccagtgccctatttttg

SEQ ID NO: 23530 - DNA, 899 bp, Zea mays
  Clone ID: LIB3597-012-A4_FLI
cgcgcgcaggccaaggccggatcggcggcctctcagatctcgccggccgccgtgagacagagaccgaagggggggttgaccggtgctcgggaggaagatgtttagcgggacgcagcagaagtgcaaggtgtgcaccaagacggtgtacccgatggaccagctctccaccgacggcgtcgtcttccaccgctcctgcttcaagtgccagcactgcaagtctaccctctcactgagcaactattcctcgttcgaaggagtgccgtactgcaagacccatttcgagcagctgttcaaggagaccgggagttacaacaagagcttccaatcacagtcacctgcaaagattactccggaaaagttggcccctgagctgaccagatcaccaagcaaagctgcaaggatgttttcaggaacacaagacaagtgtgcgacttgtggtaaaactgcgtatcctcttgagaaggtaacagtcgaagagaagtcctaccataagtcatgcttcaaatgctcccacgggggctgcgcgattacaccttccaactatgcagccttggagggcatcctctactgcaaacaccatttctcccaacttttcaaggagaagggaagctacaaccacttgatcaagtgcgcgtccgtcaagcgcgctgctgaagcacagccagaacaaccggcctctgattcctcctcctgaccacgccatttaaacagtgggggtttggaggcgagagagttgggaagcctcctgtttctacttaaaaccgcgtgatgtatgttattccatctatgccccgaggatactagactactactctattttggtatcctctgctgtgctagctggatcatatcagcgaaccatggaattgctgtcattttcaatgaaactgttgtgcatc

SEQ ID NO: 23531 - DNA, 366 bp, Zea mays
  Clone ID: LIB3597-012-E12_FLI
cggcaggaatgtcatccatggaagcgactccgtggagaacgggaagaaggagatcgctctctggttccctgaaggtgtggcacagtggaagagcaaccttcatccctggatctacgaggcttgagcagttgagcttggatgccttgcctgcttccatggaaaccagagttttgtttgagtattatctgttggctctggctgaagagtcataatttagcgctctgtgtgttacaccagagttaagtctgcctgaacttatgtggcatttgtttgagtttctaccttcgtgccctgttttctaatgtaccgtggttgtgaaccggtcaatgtgatctgaaataaaacattgcgtgccaagtttgtgtt

SEQ ID NO: 23532 - DNA, 532 bp, Zea mays
  Clone ID: LIB3597-012-G2_FLI
ctgctcctcccatggcagctccccagctcgatttccctccccagccatggccgcgcccagatcctctccctccctgttcggattccgccagacctgcgtagctccctggtgtgtcttcctccctgcgcgctccgcggtgctcagctctccagcgccggtgcccagctcgccagggccgcgtgtgctccagcgtcgcgctctgctcgcggagttccttcgcggcgttcatctccctgctcagctcgccgcgccgaactgtccagcacctctctgctcctttcgttcctagcgcgtcgagttgagcttgccgatgatgctttggctggtcagcctctgctctagctcgcagttgctgcgttgccgagtccctggccgccgtgccctgtgcgctttcctccgctcgccgggctgtacgttgctaggatcggaagcaccgccttcgtttggacagcaacggcgtgcacaaaagctttgttgctgctgttggaggcttctcgacgaaatatctaataaagggttgaagctccagtgc

SEQ ID NO: 23533 - DNA, 540 bp, Zea mays
  Clone ID: LIB3597-014-A9_FLI
cttcgatcgaaacgagatggctccggggaagcgaggcaaggccaaaggggcggcggcgccgctgcccaccgcggcggcgagtaccggagctgtagggttccctggctgcctccgcctgatgccgccgtcgaccgtggccatatctatacacgccaagcccggctccaaggtcgccaccatcacagagattggggacgaggcggtgggcgtgcagatcgacgcgccggcgagggatggcgaagccaacgccgcgcttgtcgactttatcagctcggtacttggggtgaagaaaagagaagtgtctataggctcgggttctaaatcgagggaaaaggttgtgctggtacaagatgcgactcttgaaggtgtctacgatgctctgaagaagtcttgtaattgtgcatgaggtatgtacggtaatcctggagttaacttgaatgggcagggcatatgaatgcttttctgatacgtaacctatttgcgatgtgatcctgttccagcttgcaaacacaagtttgaaaatgaagtgagacgaggctg

SEQ ID NO: 23534 - DNA, 468 bp, Zea mays
  Clone ID: LIB3597-016-E6_FLI
caaagccatggatgctccgctgagaggcaagagcacggcaagggcagcatggcggcgaccagccgtctcctgcctcctgttcgtttttgttttggtgctattgatctctacgacggcgacagcgacggctacgacagttcagtcgcggcaggcggggctcacctctcgccaaagaggctctggattccgggcgtggcggagggatgtgctgaggccggacaggacggccggcgaagcttgggcgccgccggcgcccaaggccaacagcaacgtcccaggagggcccttcggtcgtcgttgactcatccagatccagtcgcacccgcccaatcgccatcgtttcatgacacatcgaccagaagatagctagcaattcccatctcactggtgtgtgttattttagcttcttttaacgatgaagaactagtggcgatgattgaaataatacaacttattgcatcgaaaatt

SEQ ID NO: 23535 - DNA, 893 bp, Zea mays
  Clone ID: LIB3597-017-C10_FLI
ccttcgtattgcccttcctatagccgcacgcatggcgaaccgaagcgaagccaaaacgcccattccccttcgccctcttcgaccctagcaagaagacggcggcggagatggtgtactacgcgcttttggtgggcgcagagctggacggcctcaccaacctgcagcccagcggcggctgcgacgaccccagcttcccctactacctcaagctcaagtgcgagaactgcggggaggtcaccgccaagtccacctacgtcactctcagcgagcaagtcgacctgcccaagggacatggcaccgctcacctcgtccagaagtgcaagctttgtgggagagatggaacaattgtgatgattcctggtcaggggacgccacttactattgagcagagccagaaagaagagaagacttgtttgatggtgtttgactgcagaggctatgaacctgttgagttttcttttggagctggctggaaggctgagtctgtgcatgggactccttttgaaattgactgctctgaagatgaattttctgagtatgatgagaagggagaatgcccggttgagctaagcaagctgcagtcaacattcaaagtggtgaagaagcatgagaagggtggtaagacaagatttgtctagatccagtgacttggagtctgtcgggtattggaatcggaggtgtataaatggtacatttgggctaaaaggttgtgcgtaagacgtaccttctctgtctattgattttgtggatgccgtgaaccatgtgaagctttcagtgacagtgtccacagaggcattgccctggaccgattactattgttctgtggtctgaggtcatcggaaccgatctttttatcttctgctaatgcttgaacatgctgctgattttttttt

SEQ ID NO: 23536 - DNA, 1447 bp, Zea mays
  Clone ID: LIB3597-021-D1_FLI
ggtgctacctctgacgatgaggatgccgcggaccgacccttctccatgccggttgccaccaggtccgcctccttctctccacctcccatgaagccgccgcggtgggaatctcacccatacctccctccaacccactgcttcccgcaaccacctctgcccgacgcagcgctgccactggcatctccatccagcggcagatacatttccaagagggagcgcgctctcctggcctcatcaggggcacatattgaatccggatcatccctgcctctgacgagagtggattttgaatctgcagttggctctatcacctatccaaatctacgagctgacattttgcattctttgcgatgccaaccgaaacctggaccaagcacaagtttccctttgaggctctcagtttgtttgaagggtcacactaaagcaatcaattgtgtagattggtcaccgactcatgggcatcttcttgcttctgctggaatggatcacacggttcatgtatggaatgtatgggacaaagggaataccactgctcgtgttttgaaacatcacactgctgctgtaaaggatgtaaggtggtcacttcataggccctttttactttctggagggcttgattgttccttacagctagttgatgttgttgagggaaaagtaatggaagtattcaaggaggatcaagctgtggaggttatcaagttcaatccaagcaaccccgatctcttcctatctggtgggtccaagggttcccttaaactctgggatattcgatgtggtctggtaacaaaagaatttcagagaagccttggaaccatccttgacattgacttcagtgctgatggaagacaatttatctcttcaactgacacaaccagaagcaatattagtgagaacactataattgtttgggatgtcctgcgacaagttcctttatctaaccaggtttataccgaagcattcacatgcccgtgtgtaaggtaccacccacgtgaagcatcatttgttgcacagtccaatgggaactacattgctattttttcagcaaggccacccttcaagctgaacaagtacacgcggtttgaaggacatggagtgtggggtttccctgtgaagtgcagcttttcccttggcgggagagaactcgcatctggttcatccgatgggtccatttacttctatgattacaggtcggcaaggcttttgaggaaaatagaagccttcaaagaggcgtgcactgatgtcgcgtaccacccagtaatgcctaatgtgatcgctgcttgtagctgggctggtgaaatatctgtctttgagtgacatgattataatgctgtgtggagaagcatcagcagttcagaaccgctagcatatatatgtgtgtgtgtgtgttctgtgactcaaacaccagttaatggtcatagcagattccaaaataaaaataatttgctgt

SEQ ID NO: 23537 - DNA, 567 bp, Zea mays
  Clone ID: LIB3597-021-D9_FLI
atctacttcctcatcccgtccgcgaccctgcccgccgaccggaggagcaagaagcagagcagcaagcggccgagccagagccagagccagagccagagccgcctccgccaccacgccaagaagcagagcgccggtggcacggcggagcaggacaactacctgagggagctgctctccgaaaaggccgcgtcgggcggcggtcaccggaggcggcgcagcggcgcccgcgtcggcgtgtggaggccgcggctcgagagcatcgtcgaggaggcctccgactagatcgacggcggctccaagagctctcggtcttatattcttttggttttccttctgatctgccgatgcgaacaccacgacgatcggtcgaggaccgagtctccggcaggctctcgcctcacgatcccccctcgacactgtgttgcgttgtgtccagggatgagcggtcttagctcgggagatgagggggaaaactgtgacaaaaataactgcttatagcagcaccaacctgtacaggaagattttgttcagttcatccaaaatttcaaacacatttctcggttgtcc

SEQ ID NO: 23538 - DNA, 1219 bp, Zea mays
  Clone ID: LIB3597-021-F10_FLI
ccctttttttccccttgcccaggaccaggagcaagatccatccatccatccccgattccccaaccctaagcagccatggccgcgccgccgcccacgggctgcttcaagtgtggccgccccggccactggtcccgcgactgcccctcctccgcctccaccaaccctcctgccgccgccgacgcgcccaccaaccctagccacctctccggcgccgcctcccgcttcaacgccaagcccaggccccccgcggcggcggtggatggcgaggacggcaaggggaagaagaagaaggagagggccacgcgccccaagctcacgccggacctgctcctctccgacggcggcatcggcttcgtgctccgctacttccccaaggcgttcaagccccgcgcccgcccaggccacgaggtggacgacctcgctaacctcatcaagctctacgcggactggcactcccgcctgatcccctactactccttcgaacagttcgtgcgcaaactcgagaaattgggtgccggcaaccgcgtcaggagatgtgtttccgaactcagggatagggtcgccagaggcggtgatcctacgcttctgcacgaaccgccagtccacgaagacatgccattgccaggcggaggtgaacatggtactgaagacccagttctcggcaccgatgctccgctgtcggacaaccatggcactggccccgtggtgcaggaagacgcagatccaccgatggagagcaacgacgtggtggatcccatggaagaggatctgcttaacgaaatctacgaaaacacagctgatatcccggctggtgagggagccagcaaggagtctccggagcagtcggctccaaaagaagccaactcgctggcgcaggaaccccaggacggcgacgtccccaagccggcgaaggttgagctcactgaggcgcagaaggcacgcatggaggccaacaggctcaaggccttggagagagcggcggcacgggctcgtgcctcgcagcagcccacctagatacgcaagatgctgctgtcttcacttcacttcaatagttggttggttggttgagatgatgcatcattctgtggtgtgtcattgacaaggacacgtagttcgctggtgtctgattgaatctgggtctgctctagtcgatttggtccctagtagtatgtaacaggagaagataagagtttgttggatgtgcttgaaagcttcgtcc

SEQ ID NO: 23539 - DNA, 1151 bp, Zea mays
  Clone ID: LIB3597-022-B10_FLI
cttcccgatccgccggccgatccacccaccgccgccatgccggcgttcaaggccccggcgccgggcttcgccgtgcgcttcagccccttccacgagaaccgcctcctcgccgccacgtcccagcacttcggtctcgtgggtaacggtcacctcatcgtcctcgacctagccggcggcgggcctggggccgccccggcgccggtcttctccttcccgacctccgatgcgctcttcgactgcgcgtggtccgagtcccacgactccctctgcgccgccgcctccggggacggctccgtgcgccttttcgacgccgctctcccgccggcgcagaaccccgtgcggctcctccgggagcacgcacgggaggtgcacggcctcgactggaaccccgtccgccgggacgccttcatctccgcctcctgggacgacacgctcaagctctggtcccccgaccgcccagcctccgtccgcaccttccggggccacgagtactgcgtgtacgccgccgcctggtccgcgcgccacccggacgtcttcgcgtcggcctccggggaccgaaccgcgcgcgtctgggacgtccgggatcccgcgcccacgctcatcctgcccgcgcacgaccacgaggtgctctcgctcgactgggacaagtacgacccctccatcctcgccaccgcctccgtcgacaagtccatccgcgtctgggacgtgcgcgcgccgcgggcgcccatcgcgcagctcgccggacacagctacgccgttaagcgggtccgtttctcgccgcaccgccagggcatgctcatgtcatgctcctacgacatgactgtctgcatgtgggactaccgcgccgaggatgctctgctcgccaggtacaatcaccacacggagttcgttgccggcatcgacatgagcgtcctcgtcgacggcttgctcgctagcaccggatgggacgagatggtctacatctggccatttgggacggatccaagagccatgtagcacgcagatgcaatagaccaggtgatttgtactattggttttcagctttgcattgggcggtggtaatactaattacatgctcctacatgttcagttactatctcttcaaatgagttgaagaagttggaataatgtcaaaaaattgttcagttact

SEQ ID NO: 23540 - DNA, 894 bp, Zea mays
  Clone ID: LIB3597-022-D2_FLI
ccgaattccctgcgattcctctcccctcgcctcctcgtctccccctaggggatcgtcggagaggaatcgcaaagagggccgtctcatccgagttaaggaagccatggagcacaaggaggctgggtgccaggcccccgagggacccatcctctgcatcaataactgtggcttcttcggcagcgcggcgaccatgaacatgtgctccaagtgccacaaggagatgataacgaagcaggatcaggccaagctggctgcctcctctatcgacagcatcgtgaacggcagcgacgccgtcatggagccggttgttgctggcagcaacacggtagtagctgttgcccaagttgagttgcaaacaatgaacgtgcagcagcccgctgatgttgccggacccagcgagggggtggcggcgatctccaaaggggggaaggtagggccgaaccggtgcagcgcctgcaggaagagggttggacttacgggattcaactgccggtgtgggaacttgtactgcgcactccaccgctactccgacaagcacgactgcaagttcgactaccggactgctgccagggacgccattgccaaggctaatccggtggtgaaggcagacaagctcgacaagatctagggggggttccctacggttgggtatcaggaagattgtaaaccgcggtaactcgtcatgcggaactgctgccttgccccccgcgcctttctcttccatgtttgctgctacaatcttgttgttgggcattgcagtgcacggtgcacacttgtgtagcccgcctcgagaattcctgcctctgcatctggtcagttctaaaatgatttgcatgttggctatgttgtgtaagctctatttatggtggtctcgctgagacgggtatttggctt

SEQ ID NO: 23541 - DNA, 1327 bp, Zea mays
  Clone ID: LIB3597-023-C6_FLI
aaattttaatattagcaatccaccgtgttcagctgatgatgaataattacatctctagttggcctgatatgggattgtagccggacgccgccttcatatagcggccgtcaggaaccccagcaagcaacccagccgcccattgccggcattgctcgcagcgctagcttcttgcgctcatcagtcgtctccgaccaagatcagcaaggacggcatggctctcgaagcagcgtacgactacctgcacgtcgccgtcgtccagtgcacgcccacacaagcagcagcagtcctcggcgtcctcctcctcctcgccatccggctagccgcggcggcgaggagctcgtccgcgacgtcccccaaatggaagcagcacaggctgccgccgacgcctccggggaagctccccatcatcgggcacctccacctcatcggctcccacccgcacgtctccttccgcgacctccacgccaagtacggccacaacgggctgatgctggtgcaggtcggcgccgtgcccaccatcgtggtgtccacgccgcaggccgccgaggccgtgctccgcacgcacgaccacgtgctggcgtcccgcccgcggaaccccgtcgccgacatcatccgctacaactcgacggacgtggccttcgcgccgtacggcgagtactggcgcacggcgcggaaggtggtcaacacgcacctgctcagcgccaagatggtcttctccaagcggcgggagcgggaggaggaggtgcgcctggtggtggcccggatccgcgacgccgccgaggcgtccccggggacggcgctcgacatgacggagctgctgggcggctacgccagcgacttcgtgtgccgcgccgtgctcggcgagtcccaccggaagcagggccggaacaagctgttccgggagctgacggagaccagcgccgccctcctgggcgggttcaacgtggaggactacttcccgaagctggcggacgtggacctgttcctccggatcatctgcgccaaggccaagggcgtcagcaagcggtgggacagcctcttcaacgagctgctgtccgagtacgcgctctccggcggcaagcagggcgaccacaactctgaagacttcgtgcacctcttgctgtcgctgcagaaagactacggtctcaccacggataacatcaagggcatacttgtggtaatatatgctactacgtactagctgtcatgtctgtctgtctgtctctcttctcagtgtctttggttttacagaacatgttcgaagcagccatcgagacatcattcctggtgctggagtactccatgagcgagctgatgaacaaccgcc

SEQ ID NO: 23542 - DNA, 731 bp, Zea mays
  Clone ID: LIB3597-025-D3_FLI
cgcccgaatccagaccctcgtctgttatggcggcggcggaggcggcgccaccgccgatactcgagctggacccgtcgcacgatcgagccgtcagcgttgtcgaggacatcgtgcgtctagagcggaggatctttccgaagcacgaatcgctggcgcggtccctgcacgacgagctaaagcggcggaactccgggctgatctacaagacgtccagcgccgacgagggggaggtcatcgggtatgccatgtacacctgcaacacatccctctgcgccaccatcaccaagctcgccgtgaaggagaactgcaggcggcagggccacggcgaggcgctgctggcgggcgcagtggagcggtgccggcggcggaaggtccagcggctctccctccacgtcgaccccacgaggacggctgccgtggcgctgtaccgcaaggccgggttccaggtcgacaccaccgtcgagggctactacgcgcctcacagggacgcctaccggatgttcttggatctgtagtagaaccgtcgaggacgagaaaaccagcccatgtgttccggcagctgctgccggcttgtagctggtctggtctggtgatacaatacctcgtgagtaggatacagccaacagccgagcagggtggatgattcgaagctgtaagaacgatctgctagaaagttttcataccaccaaggtaattcccgctggattctgaaaataatgtttccgtattat

SEQ ID NO: 23543 - DNA, 1498 bp, Zea mays
  Clone ID: LIB3597-026-A5_FLI
cgtttcttctccggcgaccgaagccaccgccccagcctcgccatggactctctcctcgccacctacgcctcttctgacgacgacgctgactccgacgaggccccgtccaccgcccccgccgcctcctccggtggccgcgccggcggactcttctcgctcccgcagcccaagtcagcccccgccctgctcttctcctccctcccggcgcccaaatccacccccgagccgctcttctcctctctctcggcgcccaaatccgccaacgcccccaccttctcctccatcccggcgcccaagacttccggaggaaaccctaagcgcgtcgtccagtaccgcccgcagccgatcctgcagtccgcaggcgacagctccgacgacgacgaggacgacgccaagaagcgccgcgccagcaacaacgaggcgagcttgccgcacgtgtctgctggcttggggcccgtgtcctcgttcctcccgccgccgaagcactcgctcgggctcggctccggctctggcgctggagccaggaggtcggcaatcgatacggctgcgccggagaagccaaatctcagcaacgccgtgccttcaagctcggttaccaatacaggagccccggaaaggcccagcactggcgcgtccgatgacgacgattcggaggatagcggcagtgagggcgacatgcctgcgccagagctggaggaggaacatcaggagcagccgagttttaatgctgcagctgcagagcagcagcaaggccatgatgctggagctgggagcactagtggatatggaacctatgcatgggatccaaactactatgcccaatacggtgcgaattatggctgggatcctagtgccagtgcaagttatgaggatggaacacagtatgccgcatatgaagaaggccaaagtggagggtatgctcattcgcacggaggagagcatggcagtggatacgagcatgttgcggcagtgccatatggggtagattatactggagggtatggtcatgaggtagcagcaacggcgttgccaccggtgcaagaaccagtactgccaccagagatgggtaggattggagggaagagaggtaggaatgatatgccggcccagattttagaggtaaatcaagcagagctgatgaagaacagaccgaagcaggataagtccaagctcactgggctggcctttggtcctagttatcagcctgccccttcagcaaaaggaaagccatcgaagttgcataaaaggaaacaccagattggttctctgtacttcgacatgaagtcgaaggagatggagcttgcagagaggcgctccaaaggcatccttacgaaagcagaaactcaagcaaaatatggctggtgagcatgtaagaaaaactcaggatacctatatgggatctgttgaattgaattggccgaggttttgttgcaactgttatggactttgtaaacccaatgcagaacagatagttcgatgatcagtcgattaatgagcc

SEQ ID NO: 23544 - DNA, 1097 bp, Zea mays
  Clone ID: LIB3597-026-D9_FLI
cacttgatccgctcccttcgccgcgacgacgttcctacgcagctgcggtcgacgcgcgcacggcagctcgctcgctagctgatcacgacagctcgctcggctcgaccgaatggcgccgcggctgctggcgtgcttcgggcgcggcgtcgcggcggcgccggacgacgcgactggcgagggccagctggaggcgccccccgctggcccggtgctggtggagctgttcgggtcgcaggggtgcggggcgtcgcccgaggcggacgccgtggcggcgcggctggcgcaggactccgggtccggggacggcgccgtcgtggtgctggcgttccacgtcgactactgggactaccgcgggtggaaggaccccttcgcgtccagcgcctggaccgtgcgccagaaggcctacgtggaggcgctccgcctcgacacgctcttcacgccgcaggtcgtcctgcagggccgcgcgcactgcgtcggcaccgaccaggacgcgctcgcgctggccgtccgcgacgccccgcgctaccccgcgcccgccatcaaggtcacgttccagcggccgagccccgcaacactgcaggcgtcgttcacgggcaccctgcgcagccgcgtggagggcccaggcggcgcgagcgtgctggtggcgctgtacgagagcgggctggtgaccgactgcgggcgcggcgagaacaagggcaagtcgctgctcaacgaccacgtggtgcgccgtctcgagaaggtggccgccgtgcgggagggcgcctcgccgaagaagaccgtgtcgggcaccgtccagttcccgctctgggacggctttcgcgccaccaagtgcggcctcgtgctcttcgtccagaacgccgcgctgcaggtgctcggcgtccagcacttcgacctgcctgacaacgtctgagctcgtgacgcggtggggcgcgcgcgcgttccgcgttggctgcctccctgcggcgggcgtcacattctttgtatcactgtatgtagtacatcactggatggtatttagatggaaaacctgagtattctttatctccacgtatgttcttgttctgcattatggcaatggatcttctgttttgcacact

SEQ ID NO: 23545 - DNA, 255 bp, Zea mays
  Clone ID: LIB3597-027-B3_FLI
cacaaacccttcttatcctatcgtcgcgcgcgcctgcctctcccacacactccacagcgcccgcgcaggctcgctgcaagcgcaaagcagccacagcaccccctgcacctgcagactgcaaccgcaatgtcggctctcgggacgctctccggcggcgctgccggtgtctccggcctcctccgcctccgccgccgggccgccccagcccccgcgatcgcggcgccgtcgcacctccccgctgggaccgtcaagtgc

SEQ ID NO: 23546 - DNA, 1208 bp, Zea mays
  Clone ID: LIB3597-027-H6_FLI
ctcaaggtacagatctgccttataaaaccacatagtaacattaacatctagtggtgatgaactgctgatgcaattacttttttccgggtctagtacacacgtattaaccaaaaaaaaaaactgatgcattctgatgttctttcacaggctatttggccacacagcgggcactaccgcccaacggaagagaacttccaggaattccagagcttcctcaaagacaacaatgtcgacctcactgatgtcaaggtgaggactcttcggtgataccccgcgcttcaaaaaaaaaacttgttgcatgcagcattttaaactgttccgtcctcaatgctgcagatgagcccagatgaagacgacgaggagttttggagcaggctcagaagcatctcttccgactgctgcgccgtcgctgacaaacccgaagaagatcaacaggccgcagctcaagaaaccagcaacagttgccaggcacctcaagtcactgaatcgaccacacctgacgaagtctctccctccccgtcccagcaggaagaaaccagcaagagtctcagtcccactgcaactgtcacgaggcaagattcatcagaggacgccgagacctcaacgacaagccaccgtgccctgttcgaagatggtcaggaggaggaccacgctgccgcggccaccgccgccgacgacaatacagccgtgccgagggagaagatcctgcagaggatcagctccaagaaggagaccaagtcgtaccagctggggaagcaggtgtcgttcaagtggaccacgggcgcggggccccggatcgtgtgcgtccgtgactacccgtcggagctccagctccgggcactggagcaggtgcacctgtctccgcggagcggcggcgccgccgcagccgcaggggccggtagggcggcctcgtcccggttcgcctcgccgcagcggtgcggcagcccggttgcggcgagagggcgccgcgagcctctggcgtcggcggggtgcggcagggcggcctcgtcacggttcgcgtcgccgcagcggtccagcagcccgatggcgagagcgcgctgcgagcagctgacgccgagggaggcgttccggacgcacctgatggccagaggttaaccggatcggatcagccattcagcaaagcagccgatggatggagtcatggagagacactttctcttcttcctttatcccctcttgtgcatagg

SEQ ID NO: 23547 - DNA, 1214 bp, Zea mays
  Clone ID: LIB3597-028-A7_FLI
caccatttcgctcccgcaagcaccgatttgtttactgctctctccgacgcgcggcggcggagctccctacgacgactgaaccatgtgcggcggcgcgatccttgccaaccttcgcgagccggcgccgcgccggctcacagagcgggacatctggcagcagaaaaagaagctcaagaggggcggcggcggcgggaggcgctcgttcgcggcggaggacgatgaggacttcgaggccgactttgaggtcttcgaggccgactccagtgattcagatttggagctcagggagcggactgacgacgacgtcgtcgagatcaagcccttcactgccaagaggactttctccagcgatggcttaagcaccatgactagtgctgtagcaaggtcagccaagaggaagagaaagaatctatacaggggtatccgccagcggccttggggcaagtgggctgctgagatcagagatcctcagaagggtgttcgtgtttggcttggtactttcaatagtcctgaggaagctgcaagagcttatgatgccgaagcgcgcaggattcgtggcaagaaggccaagggaagtaactcctttggctgctcagacttgggctgggagaatgataccaagacaccagacatcacttccattgctcccatttccactattgcggaaggcgacgagtctgcatttgtcgacagcaattcaaacagctcatttgtgcttcctgccctggagaacagtgctgttgatctcactgatgggctgacagatttagaatcctatatgaggtttcttctggatggtggtccaagtgattcagttgatagccttctgaaccttgatggatcgcaggatgttggtagcgacatggacctctggagcttcgacgacatgcccatcgtcggcgatttcttttgaggattttgaagcttggtcataggagtatgtacatagggactaggggaataaagaccgggggagattgggaagcacctgcttggcaccttgggggtagcatttgctcgtgtctagctcagagatgcagaagttgcattctgaaactacttggttatcgacctgttccctattttagctatctctttatgagagccatttatgagactgaaccattttgttttgctttcttttcgttgttacaatatatggtttaacattatgatttatggatatgtgccaaatatggtgctcaacagtggtc

SEQ ID NO: 23548 - DNA, 837 bp, Zea mays
  Clone ID: LIB3597-031-B12_FLI
ctagcgccggcgcctccacttcgttttcctcactctctcctccagctcagggtccggcggcgaagggaaggcaagatgtacaccgcgaggaagaagatccagaaggagaagggccttgagccctccgagttcgaggactccgttgcccaggctttctttgatctggagaacgggaaccaggagctcaagagcgacctcaaggacctgtacatcaacaatgctatccagatggatgttaccgggagcaggaaggctgttgtcatccacgtcccataccgcctgcgcaaggccttcaggaagatccatgtcagactcgtcagggagctggagaagaaattcagcggcaaggatgtggtaattgttgctacaaggaggattgtgaggccacccaagaagggttcagctgttctgcgccctcgcaccaggactctgactgctgttcacgatggcatcttggaggatgttgtctacccagctgagattgtggggaagcgtgtcagataccgtctggatggttccaagattatcaagattttcttggacccaaaggagaggaacaacactgaatacaagctggagacctgcactgcggtctaccgcaggctgtgtgggaaagatgtggtctttgagtaccctatgaccgaaaatgcataaatatgatgccctctggatatctccactctatttcgttgattctgaatgttatgttgggtctccctatgtacttcaaaaacatagttttgatgctaaagttgcctagcaatttggtacggggaagtggcagtggacgtgaacaatgttaagttttgagcatttaaattaaacctttgccctgat

SEQ ID NO: 23549 - DNA, 961 bp, Zea mays
  Clone ID: LIB3597-032-A9_FLI
acagcacaccacctctacgaagcatctcgaactctcggtgccgctcaatttgtacccccaatccccttccacacaccgcctcgccacatcgcagagccagatcaagggaagacgacgcagatctcgccacgcgaacacagttagatcgagggagtaagtgagagtgagagccatgacggagctgttcgacacggccgtgaccagcctcctccacctgccggaggtgctggaccgcctctccgccgcagacggcgaccggcggtcggccggcaaccacgcggcgcacgggcacggccacggacgcgtccacgggctcggcggcggcggcggagcgccggtggacatcgtggagagcccccgcgagtacgccttcgtgctcgacgtgcccggcctctccaagtcagacatccaggtaccgcacctgccacctgtggcgcgcggtcccttaactccgttggatccagagcgccagcaactgaccccaaccgcatccgcttgtgtttcaggtgacgctggaggaggaccgggtgctggtgatgaagggcggcagcgggaagcggaagcgcgatgaggaggaggacatgaacggcgaagggtgccgatacatccggttggagcgcggcgcggcgccgcggtcgttcgtgcgcaagttccggctgccggaggatgcggacacgggcggcgttgcggcgcgctgcgagaacggtgtgctcaccgtcaccgtcaagaagctgccgccgccggagaagaaggccaagaccgtgcaggtcaccatcgcctagaagtcggcagtcggcactcggcagagtagcagcagtagaattgtagcgcgtacgtagtggcctgtcgtgttgggaggagtgctcttttgtttacgtttgtgctgctgatgagccggtgtgtgtgtgtaacagaccgtgcttcttttctgaacaagaattattcaatcgtgtctctggtg

SEQ ID NO: 23550 - DNA, 1493 bp, Zea mays
  Clone ID: LIB3597-032-G9_FLI
cgcggtctgctcgttcgatctgtgcagcagatctgaggtcccgggcgaccgtgaagcagcttcaatcgtcggcatggcgctcgtattgcatagtggggctggaaacaagaatgccttcaaagcacttattgctgcagaatacagtgggatcaaggttgagttgaccaaggattttgagatgggtgtctccaacaagacccctgagtttcttaagatgaacccccttgggaaggttcctgttctggagactcctgatggccctgtttttgagagtaatgctatcgcacgctatgttgctcgcttgaaggatgacaaccctctttttgggtcttcccgtattgaacaagcccacgttgagcaatggatggattttgccgcaacagaagttgatcctggtgttgcatggtacttgtatccaaggcttgggtacctcccttatgttagcacaactgaggaaacagctatttcttcattgaagaggtcgcttggtgctctgaacacacaccttgcttcaaacacataccttgttgggcatgctgttactctagctgacattgtaatgacatgcaacctctaccatggaattgcacggatcttgaccaagaccttcacgtctgatttccctcatgtcgagaggtatttctggaccatggttaaccagcctaacttcaagaaggtcattggtgaggtcaagcaggcagagtctgcacctcctattccgaaaaaggctgctccttctaaggagccaaaggcaaaggatgtcaagaaggaggctccaaaggaggcccccaagccaaaggtggttgaggcaccagcagaagaggaagcaccaaagccaaagccaaagaatcctcttgacttgctgccaccaagcaagatggtccttgatgactggaagaggctatactcaaacacaaagactaacttccgggaggttgccatcaaaggtttctgggacatgtacgacccagagggctactctttgtggttctgtgactacaagtacaatgatgagaacaccgtctcctttgtgaccctgaacaaggttggtggattcctgcagcggatggacctgtgccgcaagtacgcctttgggaagatgctcgtgataggctctgagccacccttcaagctgaagggcctttggctcttccgtggccaggatgttcccaagtttgtaatggacgaggtctatgacatggagctctacgagtggaccaaggtggacatctctgatgaggcccagaaggagcgtgtcaatgcgatgattgaggaccaggagccctttgagggcgaggccttgcttgacgcgaaatgcttcaagtgagtgtgcttgcctggagacagaactgtttagcccttgaatttgcctatggaagagtttgcccttttactagtgtcgatgttgatctggtataccttgctatgaactggttaaagtttgtgctggtttgggattttttgtgcatcttgtgatacctcaagtcttcatc

SEQ ID NO: 23551 - DNA, 1574 bp, Zea mays
  Clone ID: LIB3597-033-F3_FLI
aagccacgtgctgaggctttcgttggtctcttcgccggcgacgagcacccagcagttctgtagaaatggctgatggtgaggacatccagcctcttgtctgcgacaatggcactggaatggtcaaggctggttttgctggcgatgatgcaccaagggcggttttccctagcattgttggccgtcctcgccacactggtgtcatggtagggatgggacagaaggacgcatatgttggcgatgaggcacagtccaagagaggtattcttacgctcaagtacccgattgagcacggtattgtgagcaactgggatgacatggagaaaatctggcatcatactttctacaacgagcttcgtgttgccccagaggagcaccctgtgttgctcaccgaggctcctttgaacccaaaggccaacagggagaagatgacccaaattatgtttgagactttcaatgttcctgccatgtatgttgcaatccaagcggtgctctcactctatgctagtgggcgtactactggtattgtactcgactctggtgatggtgtgagccacactgtgcccatttacgaaggatatgcccttcctcatgccattcttcgtttggatcttgctggtcgggacctcacagactccctcatgaaaattctcactgagaggggttactccttcacaacctcagccgagcgagaaattgtaagggacatcaaggagaagctagcatatatagcccttgactatgagcaagagttggaaactgccaagaacagctcttcagttgaaaagagctatgagctacctgatggacaagtaatcaccattggtgcagagagattcaggtgccctgaggtcctcttccagccgtcgatgattggtatggaggctgctggaatccatgagacaacatacaattcaatcatgaagtgtgacgtggatatcaggaaggacctctatggtaacattgtgctcagtggtggttcgactatgttcccgggtatcgctgatcgtatgagcaaggagatcacttcccttgcaccaagcagcatgaagatcaaggtcgttgcaccgcctgagaggaagtacagtgtctggataggagggtcgatcctagcctcgctcagcactttccaacagatgtggatatcgaaggaggagtacgacgagtctggcccggcaattgttcaccggaagtgcttctagggtttcacaagttcctcgtcgttacctagtctcaaattatgtcccctccatttctcgagatatgtgtggcagatttgcatgatacgtttgtttgtttccatcggacctgaagtcttcttggggataggctcccccctttgtatgttgtggctccaatccatgtgcgagcacgctgtgtctgtcgtgacacctggttcgtgagatgggttgtcaaacttgattggtttgttgtgcgtggctggaagagctgatagttatatatttggcttggactgtgccgcttgtatgtatctgaattctgaaagcgttgtaatctgagcatccgtgcaaagtatgaatggcccttttatatgggctggattttccggtttctat

SEQ ID NO: 23552 - DNA, 1145 bp, Zea mays
  Clone ID: LIB3597-036-A2_FLI
ggcccacgcgtctccgggaggcggcagcggcggcggcggtggcggtggcggggggtcgtaccaccaccaccggtcgcggttcggcgacacgacgctgaccaaggtgttcgttggcgggctggcgtgggagacgccgtccgaggggctgcgccagcacttcgacgtctacggagagatactcgaggcggtcgtcatcaccgatcgcgagaccggccgctccaagggctacggtttcgtgattttccgggacccagacgcggcggcgcgggcggtgcagaacccgaacccggtgatcgccggccggcgcgccaactgcaacattgcggcgttcggcccgccgcgggccgcgcagccgagagggagaggaggaggaggaggaggccgcgggccgcacgtgcccgatcagccgccccaggggtcgccgtcgccctacagggtgccatcgcagatgaccccgcctcatcaggccgccacgttgttctacaacccccagttcgggtactggtacccacctgattatccataccaacaggcattgtacaattctcaagtgctacaacattactaccctcagatgtatggtccagcctctccttcaggaccagcctaccaatacatgggctatatgcctggtggcccaagtccaaggactggattctcgccgatgcagcaaccaatgcgacaacccttctttcagcagccaacgacacagatggatggttctttcccatcagtcccttcgcttccacctaatttcagactccagctgccccctcgtgcagtctcaagggaatctgatgatgcatctggctcccagtcagcccagccagtttcttcaactccagctacagtcacaaacaacgaggaagattcgaggcctgtagtgtctgattcagatccaaacacaccaaattgacttagtgagaatcctggcaacacgatgtgacttcaatctggtgcaggctattggtagtctgtaacagagtcttcatgatactctcacatcttgactgaaaaagttcccaaagatttgttctttcattatttctgattctttttttttcgaattcttgcattgcatttcttcaccgaatccattgtacggacgactgaatttcaagttcaaacttcaggaattcgctagc

SEQ ID NO: 23553 - DNA, 1660 bp, Zea mays
  Clone ID: LIB3597-037-C10_FLI
cctcttctcctccctcctgccgggtccttaataaagagcagcagcgcaaggtgagccgccagcttgccccaggttggtagagcgagcgagaagaaggcaatggcggcggagagcttcctgttcacctcggagtccgtgaacgaggggcacccagacaagctgtgcgaccaggtgtcggacgcggtgctggacgcctgcctggcgcaggaccccgacagcaaggtggcctgcgagacctgcaccaagacgaacatggtgatggtgttcggcgagatcaccaccaaggcgagcgtggactacgagaagatcgtgcgcgacacctgccgcgagatcgggttcacctccgacgacgtggggctcgacgccgaccgctgcaaggtgctggtgaacatcgagcagcagtcccccgacatcgcgcagggcgtgcacgggcacttcacgaagcggcccgaggagatcggcgccggcgaccagggccacatgttcgggtacgccaccgacgagacccccgagctgatgccgctgagccacgtgctggccaccaagctcggcgcgcgcctgacggaggtccgcaaggacggcacctgcgcctggctcaggcccgacggcaagacccaggtgacggtggagtacgtgaacgagggcggcgccatggtgcccgtccgcgtgcacaccgtgctcatctccacccagcacgacgagaccgtcaccaacgacgagatcgccgccgacctcaaggagcacgtcatcaagcccgtcatcccggagaggtacctggacgagaagaccatcttccacctcaacccgtcggggcgcttcgtcatcggcgggccccacggggacgccggcctcaccggccgcaagatcatcatcgacacctacggcggctggggagcccacggcgggggcgccttctccggcaaggaccccaccaaggtggaccgcagcggggcctacgtcgccaggcaggccgccaagagcatcgtggccagcggcctcgcccgccgctgcctcgtgcaggtgtcctacgccatcggcgtgccggagcccctgtccgtgttcgtcgactcctacggcaccgggaccatccccgacaaggagatcctaaagatcgtcaaggagaacttcgacttcaggccagggatgatcaccatcaacctcgacctcaagaagggcggcaacaggttcatcaagaccgccgcatacggccactttggccgtgacgacgccgacttcacctgggaggtggtcaagcccctaaagaaggcatccgcttaagaatgtattgggaagttcactggacatgaggttcatcttcgtctggctctgctgatacctgcaaggattgctgctgctgctgccgcccctggatgtgtgtttgatcagtgactggctgctctgctccatagaagatgaatgaagagagagatggtgaagaaggctttggcaaatggcaattgccgcagcaagccatgtcggcgccactgaccggcttagtgattggtataatttggtgtggcagcagccaggattaatgcgctggtcttttatctttactactagtttggtctcgtccggtatcttatttttctttccccttttcgagtctgtactgaaactgctgagagatttgcagttttgatctatcatatcctttggt

SEQ ID NO: 23554 - DNA, 1372 bp, Zea mays
  Clone ID: LIB3597-037-G12_FLI
caaaaaaggaaacgaaaacgagcgggggagctcgcggaccccaaaaccctaaccccgcggacccacctggcggcggcggcggcggcgatggcggacggcggaggagaaggaggacctcctgcggcgtcggcggcgctcaaggaccaggggaatgagcagttcaaggcggggagctacctcaaggctgccgcgctctacacgcaggccatcaagctcgaccccgacaacgccaccctctacagcaaccgagctgcagcattcctgcagttggttaagcttagcaaagcgcttgctgatgcagagacaacagtcaggctgaagccacaatgggagaagggtcatttcaggaaaggttgtgttttggaggcaatggagcgctatgaagaggcgatagctgcatttcagatagctttgcagcacaattcacaaaatacagaagtctcgagaaaaatcaagaggctatctcagttggccagggaaaagaagcgagcccttgatgtagagaacatgcgttcaaatgttgacattgcaaagaacttagaatcactgaagactgagttggctacaaagtatggagatgcagaaacagggcagagtgtcttttctttcattgttaatgtggtagaatcagcagtaaaggtttggcatgatacaggaaaagtagatccaagggtccattttcttctcgatgatcagaagaccgatactgaaaaatatgccccagtagttaacattgacaaggcatttgagtcccccaacactcatgctgagtgcttcacatatctgcggcaatacgcggagaattgttctgcgaaggctgcttgtatggtggcacctaagagcatcatctcctacccacaggtctggaaagggcaagggtcgaggaagtggaagcttgaccagagcgacgggttcttcgtgcaattcgaggcaccggcgctgaggaagatatggtttgtgccaagcacaaaagagaagggacggacattgtgcaggagccctgaggccttggacatcggcatccatgaagtgctcccccgtatattcaaggaggcagcttaagcccaataatggaggactgtccatggattcctgatcctgcacagcgcttgctggatgttctccctgggacctgggaggaggaaagagctcgcccgacatacatttgtgtaaccagtggaatcggcttacgctggcagacgcagactcggaagatttgatgctgtcactgtgctatgcaatgagcgtgttgtgtttcgagtggcaccgtctcgtggttagtgcgggtgttttgtttccattttcttttgattatctacctatttaccgaatgatccctgtcaagagctatgctcctttttttttcttcttc

SEQ ID NO: 23555 - DNA, 800 bp, Zea mays
  Clone ID: LIB3597-039-B11_FLI
gagcagcagtgaacgtacttacgtcttcccccagctagctagctatctaccttggtggtggcgattgatatatagattaaacatggcgcctcaaagcctggatctcgggctgagtctcggcctgggcgtggcggcattccagcccagcttctgccacccggccggcaatgacgcggcggagcgggaggccagcccgaccgcggacgagagggagcggaggtgctcgcccgccggcagcccgacgtcgagcggcagcgggaagcgcgtcgcggcggagaggtcggccggcagcggcagcggcgacgaggacgacgacgggggcgctcgcaagaagctgcggctgtccaaggaccaggccgccgtgctcgaggagtgcttcaaaacgcaccacaccctcactccgaagcagaaggcagcgctggccagccgcctgggcctccgggcgcggcaggtggaggtgtggttccagaaccggcgcgcccggaccaagctgaagcagacggaggtcgactgcgagtacctcaggcgctggtgcgagcagctcgccgaggagaaccggcgcctgggcaaggaggtcgccgagctcagggcgctgagcgccgcgcccgcgccagcggcccctctcaccgccctcacaatgtgcctctcctgcaggcgcgtctcctcttcatcctgctcatcctcgccgcctaacacgcacgcgcatgccgctgcagctggcactggcaggagcgtggcggcggcggcggcgacgacgttgcccgcccaccggcagttcttgtgcgggttcagagacggcg

SEQ ID NO: 23556 - DNA, 1400 bp, Zea mays
  Clone ID: LIB3597-041-D6_FLI
caaagccgccacttatgtcctcgcgagcttggttaataacgccgcgtgagctgggtgggtggggagtttgtcagctgggtggcgcgagcgtcaggcgatggcggaggcgggggagaaggcgagggtcgtggtggttggcggcggcgtcgccggctccctcctcgccaagactatgcagggccacgccgacgtcgtcctcctcgacccgaaagagtacctggagatcccctgggctgagctgcgctccatggtcgaaccgtcctttgctgagagatcgttgatctaccacaaagattacctcagtgatgcgaccatcgtgacatcttctgcggtcaatatcactgaacacgctgtcctgactgctgacggccactctcttccatatgattatctcatcatagcgactggccatgctttggcttctcctgccagcagagctgagaggataaaagaattccagagagataatgggaagatagagtcgtcagaatctgtgctgataattgggggtggtccaactggtgttgaactggctggagagattgtggtagactacccggggaagagggtgacccttatccatagaggaccgcgtttactcgaattcattggagataaggcttcaaagaagtgccttgattggctgacttcaaagaaagtagacgtgctccttcagcaatcggttgagttgggctcattatcagacacagagaatgtgtacaagacatcaggcggagaaacagtaacagctgattgccactttgtatgcattggaaagccactgagttcgtcgtggctacgtgataccatcctaaaggaatccttggacagcaaggggagagtaatggtggaaaaggatttaagagtgaaaggttttaataacatttttgcaattggtgacatcacagatattcctgaaatcaaacaagggtacctcgcccagaagcacgcgctgctagtggcgaagaacctgaagctactgaccaagggtctgcctaacagcaaactggcgacttacagcaccggctacccgctggcgctcgtctctcttggaaggaaggaagggctggctcagtttccattgctgacgctcagcgggtgcttgccaggcatgatcaaatccggggatctattcgtcagcaagacgaggaagcagatgggcctgaatggttgactccagtccgaggaagcttgaaaaaatagctcgggtcctgggttatatacagacgatggattcctttacacagagcttgtgttttgctcgtatggccatatgtgttcgttctgtatctgtgtgatggtgtcgtcgtgtggatgcttggaatggtgactagcagagtgtatgctacgtacatgtatacttggacctttttggtccaacaaaatgttgcttctgtagt

SEQ ID NO: 23557 - DNA, 690 bp, Zea mays
  Clone ID: LIB3597-043-D7_FLI
gttcccttccctttataaaccagagaacctgcagtgcagtgcaggcagagtactccgtctgatctcggtgatctgtctccacgacaaggagtgcactgtcagctctagcttgctgcagaacaagggcaagatggcaagaggtggtcggctactgatcctctccctggggcttgtgctcctctacttcgtctcaggaagtgttgctgctgctgctgcacagaaaacgtggtgcgttgccaagccgtcggcgtccaacgatatcctgtctctgaacctcaactacgcgtgctcccaggtgagctgcggcgtgatccagaagggcgggccgtgctactacccggacaacctggtgtcgcgcgccgccgtcgccatgaacctctactatgccgccaatggcaggcacccctggaactgctacttcaacaactcggcgctcgtggtgcagtccgatcccagctatggatcctgcacctactactgatgtctgtctgatgctcttttgtagcagagatcggtcgatgaaaggaaatataatccctgtgtatgctgtgctgtgttgtgtctagagatgacaatagggacctgattcccccgtggggaatttcctattgctatccctagttgcgtcctagtagaagtgtctcttgttccatccagttgatatgcatgataacatttggagatgcatgc

SEQ ID NO: 23558 - DNA, 625 bp, Zea mays
  Clone ID: LIB3597-043-E8_FLI
aatctggtgcgctccccccggcccccgcgaacaacttcctgcttgcacgcaagccactccgaggccaagtctagggtttgggaatctgtaggaggggagaggggagcgcgctcagggtcagggaggcgaagatgatcgaggtggtgctgaacgaccgcctggggaagaaggtgcgggtgaagtgcaacgaggacgacaccatcggcgacctcaagaagctggtggcggcgcagacggggacgcgccccgagaagatccgcatccagaagtggtacaacatctacaaggaccacatcacgctcaaggactacgagatccacgacgggatggggctcgagctctactacaactaggcgccctgaccccaaccgtgccctgatgtaaggttaatccgaattctgaagtcatgggtgcgcttccagtcacagcgtctttagctaacaagctcgcatacatataggcaacttgagtgagctatgtagtacggatatggttgtgtggcaaactgccaatgactattgacatccttgcatatattgacatgtgacaaggatcaacctgcaaaactggtgccctgctactcgcagaccttattatcttaaataacacaggtggtgtgtttttc

SEQ ID NO: 23559 - DNA, 314 bp, Zea mays
  Clone ID: LIB3597-043-F3_FLI
gaggtgatctgctgctgcttgattgtggatgctacgtaattttctcaacagctcatcgagagtaccgtagtccgtagtacggcaaatgttaacacgcacgaactggaatcatgaccaagggatattaccttctgttcatgctgaaacgatcagcagtttctttctttgcatcatatgccacgtcaaatcaaggcacttgcctctgaaatctttgtggtcaagtcaaaccagcacttcgacagaacgattgatggatgcctcatgcctgtattactgttacataaatgtccatttgctcaacttcatttcttatc

SEQ ID NO: 23560 - DNA, 810 bp, Zea mays
  Clone ID: LIB3597-043-F7_FLI
ccagtcccagtctcccaccgtcccacgaaacacactcaactctgccccgaagcggagaaccgccagccagacatgaagagaaccagagcgcagcagcccaaggtcgaggagccgcaggacctcgccgccaacctaaagccgcagcgccgggacaaacagccgaggcagcccaagtcaggcgccaaagcgaagcccgcggcgggcccgcgcgtcgcggcggccacgaccctcgccgccgccgccgccgcagcagcagcagcagcaaatgccgcctcggccgcgtcgtcgcccgggccggaaacggctccgaccgtgccggacgtgtgcgtcggcggggacaaggacggggacgcggacgcggacgcgagcgccgtggactgggacctcgacgccgggctgagcgcggcggcgtggtggacgtggggcgtggacgaggagaagctgctcggctggttccccttcgtggaggaggacttccggtgcgccggcggcggcgccgccgaggtggccgccttcgaccacgacatttggagcatctggtgaacgaacctttgagagacagacaaccgagccggtggcgatgcttctttcgctggtcttgctctgccctgccccaggggttggaggtagtgtcttggtacagtgacgggggaatgcgggcggaggatgtgtaggcgaggtttgctagtcgactagataatgccgcgtgtctgcaatggcgcaattccaagcgcgctcttcgttgctccatcgatcgcgcagtgtctgcccggaagacgttctcgattcatacataagaacaacggcagc

SEQ ID NO: 23561 - DNA, 1037 bp, Zea mays
  Clone ID: LIB3597-043-G3_FLI
ctcaccgcacccccagacggcccgacacgtccgtccgtgctggcttgtacttgcacaccacaccacaccaccacccagcctccccaacgatgacggcggcggcggcaccggcggtcgctagcagggtgtgggagtgggaggggaaggtggcgtcggcggtggccgaggcgacggcggacgaggcgtgggcgctgctgtcggacttcctggcgttccaccggtggcacccgcgcgtggccgcgtgccgcctcgcgtccggcaccccgcgcgcgccgggctgcgtgcgctactgcgagggcaccaccgccggcggcgagccggcgcccgactgggcgcacgagacgctgctggagcacgacgccgagcgccgcttcttccgctacgagatgaacgacaacaacatgggcttcggcctcttcttcgccacgttccgcgtcgtcccggccgccgccgccgccggcgggtgcgagctgcgctgggagttcgagtgcgagcccgtgcgcggcacgcccagggacgcgctcgtggcgcgcctgcaggccgggctcgacggcatggcggcgcgcgtgcgtgaccacgtcctcgccgctcgcgccgcccctgccgtggtgcccgccggtgcagctggtgagctcgtcgtcgtcaagctcgacagctccatcgccgccgtctgatcactggccggcgcggcgtcgacggcgatccaacacgtatcaacgaagagaccgccgttcgctggtgctctctcctctgtctgctcacgcgcgccacgctgtcgctgcccatcgtgtttccgtttcctatctcctcgtcgtcgtggtttttagccctttgtctgtggcttgtgtgctgctgtctcgtctccataatttatccgtccctgcatagatattgtatgcatgtagtataaccgtgtactccactgcttttatcctcttaccctcttgtgcattttattaattaccctggtacgtgtgttgtactagtattgctgtaccttggccggaataaaccagcctgatcggctgacttttttt

SEQ ID NO: 23562 - DNA, 1145 bp, Zea mays
  Clone ID: LIB3597-043-H4_FLI
aaggtcgtacgccatcgcgtatcagctccccttcactgtcactcatccatctttctagtactactgcacctgtaaaagttcatggagatgcacagaccactgcgcatcctgttgcccatcgtcgtcctcgtcgccgcggcgtggccatcggtgccggcgggggcggacgacagcgcctggtccaagggcacggcgacgttctacggcgggggcgacgcctcgggcacgatgggcggcgcgtgcgggtacggggacctgtactggtcggggtacgggacggagacggcggcgctgagctcggcgctgttcaacgacggcgcggcgtgcggggagtgctacagggtgacgtgcgacgacggcgcgtcccagtggtgcctgccggggacggggaggaggtcggtgaccgtcacggccaccaacctgtgcccgcccaaccacgagctctccggcgacgacggcggctggtgcaacccgccccgccgccacttcgacatggcgcagcccgcctggctccggatcgcccagtacaagggcggcatcgtgccggtgctctaccagaggacggcgtgcgtgaagcagggaggggtgcggttcacggtgtccggatccaactacttcgtgctggtgctcatcagcaacgtcgccggcagcgggtcggtgaaggcggtgtgggtgaaggggagcgccacggacaggatgcccatggccaggaactggggcgccaactggcagtcgctcgcgggtcttgccggccaggcgctcaccttcggggtcacctccaccgacggccgcaccgtcgtcgtccccgacgtcgtgccggcctggtggaagttcgggcagtctttcacctccggcgtccagttctccaactgaggctcggctcactttgggagaatggggcagctcagcccagggaacagtcacacaccctcctccattatttgattcagtttcacgattcactgatgatctgatgtaccagtggctattactagtagagtgtattctctaggtcttaataaaaagaggaatatcttctgttatttagtgctgccattctggacagaagctacagtttcaagacaatttacaagctgctatcttatctggatgcaggatgttaccttgtgtactgcttttttgtt

SEQ ID NO: 23563 - DNA, 707 bp, Zea mays
  Clone ID: LIB3597-044-B11_FLI
cttcgccacagacaagagtacctaactacctacgtgcctgcctgccatcaccagctagcatgcacggctgcttcttccgttccgggagccctcggcgtccgcaagcgctccacagcggcggcggcgtcgtcatcaccgtcgtgtcacgaggcggcgaaggtggtgtccgcgccaagatcgtggtgagcaggggcgagctggagcgcatcgccgcgggcgtggcgtggcggcagtgcagcggaggcggaggcggaggcggagccgcgaacgcgccgagccgtcggcacatagtcacggccgccgtgtcgctgggagggcaggtggcgcgcgcgccgccgcgctccgagccggaggagggcgcgggcgttgcgcggctcggcgatggctggaggcccgccctggatggcataccagaggaagcgtagagcgccgtcgtcgctgcgactgcgagcgagtaatgcttaccaacaggtaactgagagctcgtccgcggctctgggatttcggaatggctgagatgcgtgctttctcttcgtgcggcttgcgtgtcgttaccagcaggaagtgctgctgctctgcactcctgattctctgttgtattgtgactcgtgatttaatcatgttcaactgagagtttttaccacggtttgttttagacaattgtgataatccttggcaatattgaaacattaagggcccgttcgttt

SEQ ID NO: 23564 - DNA, 1295 bp, Zea mays
  Clone ID: LIB3597-044-D9_FLI
ctcctcccaacatcgccgtcgtcgcccactcgcccccgtccctgcagtcgcccgtgctccgcccgctccaccagggcgcctcgccctaggggatggtctccgaccacctcccttcaccgccgccacgtgctcagtgacgcctaggtcatcggcgctgaagtttggaggccctgtacgtgcttcacagagatcgccgaccatgggctacgcagagatcgccatccgcccctctgggagcggcaagaaaatacagaggcagggtggcctatctcgaagattttcaaatgtgtcctattacggtctcacaaccccgccatataaactggatgctctggaaccttatatgagcaagaggacagttgaacttcactggggtaagcaccatcaagattacatggatggcttgaataatcagctggctaccagccctctgtatggatacactctggaggatctgataaaagaagcttataacaatgacaatccattaccagaatataacaacacagcacaggatgataagctaacatatgtcacaaacttcatggaccatcttgtctcttggcatactgtcactctacgcatgatgcgtgcagagtcttttgtgaaccttggtgagccaaatatcctagaggcttgagctacagatacaccctagttatcataatgaggcattcttcggatacatcggatcaaatcctgctggaggagccagagagttggaaaatctcatgtctcacaagaaatgcttatcaccccaatgtcatatacgccaagataagctgctgggatttcaccattgcccttggatattgctacaaggaaatcactagtcagcatccagtttgaagacatgcaacaaaacaactctagaagctatggagctggtagattctggagttggcagtaaggcagtgatccaacttgggctttgaagccatggtgctttctctagacggctattatgtctgtagtgttgttagaataatcctggttctgtgttttcataacttcatcatgctagtgttctgttgtagcggaacacagaatggaacggaacgatattcttgttttactggttgagcactacacgacgattgtttttctagggtgttctggacaaagaaagcttgtaccttaaaacaggaggatacaagaagctggagtggttgtctgaaggcttttgaactgcttgaagcattaggttagctctggagattttgtgaatgatctagctagctatctgtaaatgatctagttgtgaatgatattataattctgatgcttttgtgaat

SEQ ID NO: 23565 - DNA, 981 bp, Zea mays
  Clone ID: LIB3597-045-D3_FLI
ccaggtgcagagtctttcgtcatctcttctccggcgaagaacccccagtcgcccaccagatcacttgttaaactttgttgaggggtgatggcggtttctttcgcaaacctcaactccgaggcagggcttaaaaagcttgatgagtaccttctcactcgcagctacatcactggctaccaagcttccaaggatgacttggctgtctacacttcgttttcggctgctccctcgtccaagtatatcaacgtagcaaggtggtttaaccacattgatgcgctcgtgaggctgagcggaattactgcagagggccaaggtgtgaaggttgaatcctcagcagttccttcagccccaactccagatgttgctgaagcacaggccccagttgctgaggaggacgacgacgatgatgttgacctttttggtgaggagaccgaagatgagaagaaggctgctgaagagcgtgctgcagctgccaaggcttctggcaagaagaaagaatctgggaagtcatcagttttacttgatgtgaagccatgggacgatgagactgacatggccaagctcgaggaagctgttaggagtgtccagatggaagggctgctctggggcgcatccaagcttgtcccagttggatatggtatcaagaagctgcaaatcatgatgaccatcgtcgacgaccttgtctctgtcgacactctcattgaggactatctgtgcgctgagccagtgaacgagtacgtgcagagctgcgacatagttgccttcaacaagatctaggcgtgacttccgatcagtccttcccctggggtgctggcgatggtggtggctgggcaatgcaccagcctaatttatccatagctatatgtctgctttgtgtggccagtgatattgccgtgagtatttttggatcctattcgagtcgaatgtaccagtaccagagttaatttgctttaattcgaaacaccgttccagttggaattc

SEQ ID NO: 23566 - DNA, 1922 bp, Zea mays
  Clone ID: LIB3597-045-F12_FLI
cgcttgacctacccccctccgccccccgccgggcctgcagggtgttcgacgcttcgcccgcccgcccgagcgccgccacggcatggcttcctccatctccgccgccgctaaggcctccgcggcctttgcccaaaagaaggagctggccgcgccggcgccgcaccgcgcgggctcgagccgtcggaccaagccgtgccgcgtgcgcgccgtcgcgtcgcccgcgcgcaccccccgcgccccgtcgtccaccggctcggtgaagaccgcgatgacgatgacggagaagatcctggcgagggcgtcggagcgcgcggcgctggagcccggggagaacgtgtgggtggacatcgacgtgctcatgacgcacgacgtctgcgggcccggcaccatcggcatcttcaagaaggagttcggggaggatgccaaggtctgggaccgcgagaaggtcgtcatcatccccgaccactacatcttcaccagcgacgagcgcgccaaccgcaacgtcgatatcctcagggacttctgtctggagcagaacatcaagtacttctatgatatcaaggacctcagcgatttcagggctaatccagactacaagggtgtctgccacattgcacttgctcaggaaggccactgccgaccaggcgaggttctcctgggtactgattctcatacgtgcaatgctggagcctttggtcaatttgcaaccggaattggaaacactgatgcaggttttgtgatgggcactggaaaggctcttctcaaggtgccacctactatcaggtttgtattagatggagaaatgccgccttatttacttgcgaaggatctgattttgcaaattattggtgagatttcagtatctggtgcaacctacaaatcgatggagtttgttggatcaactgtagaaagtctaaccatggaagaacgtatgacactatgcaacatggttgttgaagctggtggaaagaacggtgtcgtgcctgctgatgaaactacatttaaataccttgagggtaggacatcagttgattatcaacctgtctacagtgatgctgaggccagattttttagtgactaccggtttgatgtatcgaaactggagccagtagttgccaagccacattcgcctgacaaccgtgccctagcaagagaatgcaaagatgtcaagatcgaccgagtctatattggttcctgcactggtggcaagactgaggacttccttgctgccgcaaaggtgttcttagcctcgggaaagaaggttaaagttcccacattccttgtccctgccacacaaaaggtgtggatggacgtatatagccttcctgtaccaggatctggcggcaaaacttgcgcccagatattcgaggaggctggttgtgatacaccagcaagtcctaattgcggcgcttgtctgggtggccctcgcgatacgtatgcacggatgaatgaacctacggtctgcgtgtccaccacgaacaggaacttcccgggcaggatggggcacaaggaagggcagatctacctggcgtccccctacaccgctgcagcctcggccctgacggggtacgtcacggaccccagggacttcctcatgtgaacgatcttgaaacagccacagagtgcctgcaccgctgttttttgtgttgaaccttagtttaggcgtgtgcccttcgttgagaaataaactcccatgtcgggaggctgccattgccatttatgttttttgcgttatatttattacagtgactgccgataacgtagttgagcgttacaagggaaatacattcattcttcccagtatcgatggcagtcactagactccgttcttacaaaaaaaaaggcatgtcgagagatcttgtagttcatacacttgttaaaacacttttttgtacaatgtatgggaaagaagctcagtcgat

SEQ ID NO: 23567 - DNA, 842 bp, Zea mays
  Clone ID: LIB3597-045-H3_FLI
aagcgggggcggcaagcaaccacgggcggagctcggagcgtcctcctcctcccgtctataaattcccctccttttcttcctccatatataggggccatcagatccaagaagagggaagagcaccaaggaccttcggcgcccgttcaggatccacatcttcccgagcgagttcttggttgacctcttcctcttcggaccacctccaaggctcttggtgtagcttgccactctcaccaatcaagttttcatgtctgatctcgacattcagatcccaactgccttcgatcccttcgctgaggccaatgctggggactctggtgcggcagcagggtcaaaggactacgtacacgtgcgcatccagcagcgtaatggtcgcaagagcctgaccaccgtccagggattgaagaaggagttcagctacagcaagatcctcaaagatctcaagaaagagttctgctgcaatggtacagtggtccaggacccagaacttggacaggtcattcagctccagggtgatcagaggaagaacgtctcgaatttcctcgtccaggccggcattgtgaagaaggagcacatcaagattcatggtttctgagcaaccgccgggtccatagcaaaccaaccctgcatgcagggccagcttattatatataatatctgaggtggagcatatctatctggctgtgtactgcaagcaggcctagtacgccgcctgcgcgttcctcctattacacatataggcccctccctgcgtgtatgcttgttaccgtcgtgtcgaaccttgtactacgaggctccatcgaacatcgatggcttgcttctttatcagaacatgtttgaat

SEQ ID NO: 23568 - DNA, 895 bp, Zea mays
  Clone ID: LIB3597-046-D9_FLI
aggtgccggcggggctgggtctgacggcggcggagtacgagcagctgcggtcgacggtggacgcgcaccaccgctacgccgtgggggagggtcaatgctcctcgctgctggcgcagcgcatccacgcgccgccggaggccgtctgggccgtcgtccgccgcttcgactgcccgcaggtgtacaagcacttcatccggagctgcgcgctccgcccagaccccgaagccggcgacgccctctgccccggccgcctccgcgaggtcagcgtcatctcgggcctgcccgctagcaccagcaccgagcgcctcgacctactcgacgacgccgctagggtcttcggcttctccatcaccggaggcgagcaccgccttcggaactaccgctccgtcaccaccgtctccgagctcgcagaccccgcgatctgcaccgtcgtgctcgagtcctacgtcgttgacgtccccgacggcaacaccgaggacgacacccgcctcttcgccgacaccgtcatcaggctcaacctccagaagctcaagtccgtcgccgaggccaacgccgccgaggccgccgcaaccaccaattccgtccttctgccgcggccggcggagtagcggcggctgccatcggcaagggaagaaagcaacagcaagttttgtgcgtttctgttatttcaattctctgggaaagggtttctctgaattaaatctgatcatggatggatttggactggacaaggaggggccgggtcagcctaaattaggtgtgattgcaagggcgcgacctgtaataatctctctttcatctcctagattccttcttttcatctttacttcttccagaatttggttaattcctgctttatgtgattggaatcattccttaggaattgctgcttctc

SEQ ID NO: 23569 - DNA, 702 bp, Zea mays
  Clone ID: LIB3597-046-E11_FLI
ctggtggttttgtgaggtcgaaagcggcgagcgaattagaagatgctggacaagctgtgggacgacgtggtggccgggcctcgcccggagacgggcctcgagaagctccgcaaggccaccaccgcccgcccgctcgtcatcaacaaagacgcggacggcggcagctacaagcgggcgcagtcgatgccgtcgaccccgacgacgccggtgacgccgtcgtcgtcgtcgtcgtcgacgacgccgcgcggcgccggcaacgtgtggcgcagcgtcttccacccggggagcaacctggccaccaagggcatgggcgccaacctcttcgaccggccgcagcccaactcccccaccgtctacgactggctctacagcgacgagaccaggagcaaccaccgctagatcgggcgagatggatggacagtgaagaggccatgtttgctggtccttgtggttatctaaaacgcacgcatgctctattatagctagtcatcactatatatatacttgtgtttgtgtattgttgttcttgttctgctggtgtctccgccgtttaatttgacctatgttatggagtgagtgatatatgtgccgtcactcctagtatatagtagtgagtgactagttggtatgtgtagtactgtactatcttttctccatatgcatgttttgccagcgcgtaatgaatgtaatgtcagtactgct

SEQ ID NO: 23570 - DNA, 1533 bp, Zea mays
  Clone ID: LIB3597-047-D1_FLI
gccacgtgctgaggctttcgttggtctcttcgccggcgacgagcacccagcagttctgtagaaatggctgatggtgaggacatccagcctcttgtctgcgacaatggcactggaatggtcaaggctggttttgctggcgatgatgcaccaagggcggttttccctagcattgttggccgtcctcgccacactggtgtcatggtagggatgggacagaaggacgcatatgttggcgatgaggcacagtccaagagaggtattcttacgctcaagtacccgattgagcacggtattgtgagcaactgggatgacatggagaaaatctggcatcatactttctacaacgagcttcgtgttgccccagaggagcaccctgtgttgctcaccgaggctcctttgaacccaaaggccaacagggagaagatgacccaaattatgtttgagactttcaatgttcctgccatgtatgttgcaatccaagcggtgctctcactctatgctagtgggcgtactactggtattgtactcgactctggtgatggtgtgagccacactgtgcccatttacgaaggatatgcccttcctcatgccattcttcgtttggatcttgctggtcgggacctcacagactccctcatgaaaattctcactgagaggggttactccttcacaacctcagccgagcgagaaattgtaagggacatcaaggagaagctagcatatatagcccttgactatgagcaagagttggaaactgccaagaacagctcttcagttgaaaagagctatgagctacctgatggacaagtaatcaccattggtgcagagagattcaggtgccctgaggtcctcttccagccgtcgatgattggtatggaggctgctggaatccatgagacaacatacaattcaatcatgaagtgtgacgtggatatcaggaaggacctctatggtaacattgtgctcagtggtggttcgactatgttcccgggtatcgctgatcgtatgagcaaggagatcacttcccttgcaccaagcagcatgaagatcaaggtcgttgcaccgcctgagaggaagtacagtgtctggataggagggtcgatcctagcctcgctcagcactttccaacagatgtggatatcgaaggaggagtacgacgagtctggcccggcaattgttcaccggaagtgcttctagggtttcacaagttcctcgtcgttacctagtctcaaattatgtcccctccatttctcgagatatgtgtggcagatttgcatgatacgtttgtttgtttccatcggacctgaagtcttcttggggataggctcccccctttgtatgttgtggctccaatccatgtgcgagcacgctgtgtctgtcgtgacacctggttcgtgagatgggttgtcaaacttgattggtttgttgtgcgtggctggaagagctgatagttatatatttggcttggactgtgccgcttgtatgtatctgaattctgaaagcgttgtaatctgagcatccgtgcaaagtatg

SEQ ID NO: 23571 - DNA, 1119 bp, Zea mays
  Clone ID: LIB3597-047-F1_FLI
gccggttgaatcgacggagggaggcgttgatggattgctcgattcctggtgggaattgattgatttcagctgcatgtgcttgtgcttgtgctgctcaatcgaattcgagtccgaattggattaggcaggtgggttgggtaggtgcgggatccagcgagcggaggatgggcgaggaggcggtggacgactacgagctccacatggtgtgctacggcagcgacgaggacgagcgcgtgatggagtgggagtcggggctccctggcgccgacgagctgaccccgctctcgcagccgctggtgccgccggggctggccgcggcgttccgcatcccgccggagcccgggcgcaccctgctggacctgcaccgagcgtccgaagccacggtggcgcggctgcggcgcgcgccgccgtcgtcgccgggcacctcctcctccccccacggccaccaggaggcgagggggggcgaaggggcggactcggcggcggcgactaccacgaacagcaacagacggccccggctggtttggacgccgcagctgcacaagcggttcgtggacgtggtggcgcacctggggatcaagaaggcggtgcccaagaccatcatggagctgatgaacgtggaaggtctgacgcgggagaacgtggccagccacctgcagaagtaccggttgtacgtgaagcggatgcgggggcagggtccgtccccgtccgaccacatcttcgcacccacaccggtgcacggcgtcgccgtcggcatggtgcccatggtcagcggccaggcgtaccactacctgtacaacggaggagggggaggagacagatgacacccgcttcggcgacgactccagaatctagtttcctcttggggaagaccggaagacaaatccaaaacggaacaagcgattgcctgcctcactctatactctactccctccaaattatccaaagcttctactgtactccgtccgtcccgttccaaggtattcggtatttttaaagccaaagcttttgttcaagtttattagagaataaatttcgaagcttttggtgaaggggaaagtaatgagtttttagtcccatacagaaaattgaagagaaataaaattaacttaaatagct

SEQ ID NO: 23572 - DNA, 1121 bp, Zea mays
  Clone ID: LIB3597-047-G6_FLI
ccaagggagatgaagctcgcggggctcaagtctgtggacggcgcccacgaggagtccatctgggcggcggcgtgggcgcccgccgctgaccaccgccccacggcggtgctcctcactggcgcgctcgacgagaccgtccgcgcttggctccccgacgacctcgctgccttggggtcccccacacggggccacgcgctcggagtcgtctccctcgccgcccaccccgccggctcgctcgccgccgccgtgtcgctcgacagcttcatccgcgtctttgacgtcgacacgggggcatccgtcgccacgctggaggcgccgccgtccgagatttggggcgtccagttccatcccaagggtaatgctctggccgcagccggtggtggcagtggatcagtgaagctgtgggacacggagaagtggaaggcgatcaccagcctcgccgtcccacgcccggagggagctcgccccgacaagacaggcagcggcaagttcgtcctgtcagtcgcctggagccccgacggaaggctcctagcatgcgggtccatggacggcacgatcgccgtctacgacgcggtccgcatgaagttcctgcaccacctggagggccaccacatgccggtgcggtccatggtgttctccccggtggacccgcacgtgcttttcacggcctgcgacgactgccacgtccacatctacgacgccagggagaagggcctcgtcggggccatgtcgggccacgcgagctgggtgctgagcatcgacgcgagccccgacggcctggcggtggccacggggtcgagcgaccgcaccgtccggctctgggacctcaacatgaggacctcggtgcagaccatgagcaaccactccgatcaggtgtgggccgtggccttcaggccaccaggcggtgccggagtccgagcagggcgtctggctagcgcgtcggatgacaagagcgtctccctgtacgattactcgtaggtttttgtttccttataaaccgttgcaaatgcctctgttgtaccgaccagagatttgaattcgggcatggtggttggaagaattgttgtacgcagcacagtagtcgaggtgttaaattgcaaggaaagagtttatttcgtgtt

SEQ ID NO: 23573 - DNA, 1003 bp, Zea mays
  Clone ID: LIB3597-048-B6_FLI
ctttcttcctcagtcgcttctccgcggcggccgggccgccatcgccacagaggctggctggaaaggtagcgctgatcatcggcagggcaactggggcgccacgtcgccgcggagctgagcctgccgggggggcccggcccggcggcggccgtccactacacccgctgcgacgtgaccgacgaggcgcaggtcgcggcggcggtggacctggccgtggagctgcacggccgcctcgacgtgatgctcagcaacgccggcatcagcggcagcctggcgccggcccccgtggcggcgctggacctggccgacttcgaccgcgtcatggccgtgaacgcccgcgccgcggtggcgggcgtcaagcacgcggcgcgcgtcatggtgccccgccgcgccggcagcatcgtgtgcacggccagcgtggccggcgtgctgggcggcgtcgcgctgccgccctacagcgtgtccaaggccgccgtgctgggcctggtgcgcgccgtggccgggcagctcgcgcggtcgggcgtccgcgtcaacgccatctcgcccacctacatccccacgccgctcgtcatgggcgccatggccgagtggttccccggcgccaccgccgaggagcgcaggcggatcgtggagaaggacatgaacgagatggacggccccgtgctccaggtggaggacgtggccagcgccgccctgtacctggcgtccgatgagtccaagtgtgtcaatggccacaacctcgtcgtcgacggcggcttcacggtggggaaggcgcccaatatgccgccgcctggaaactactgagcagctaccacttgccaatctaaaggcacggtggatgactttctattgagcatttctttttcttttgcgattggaaaacttaggtaatatagttaaaagaactcgatcacgcgttttctttccatgtgcaagaacatggctagcttaatggtacacagtctgtgttgttggctctatagatctatgaaaagcttccagc

SEQ ID NO: 23574 - DNA, 888 bp, Zea mays
  Clone ID: LIB3597-050-B7_FLI
cagagacatcagagagcggtcctccttgtgagtctgagctgaagaggaggaggaggaggaggagaagcagcagcgcagccggaggagggagagcgaagatgcgccgcgtcgcgctgttgctcgtcgccgccgtgtgcgcgctggcggcgccggctgccgcggtcgtctcgtccaaggccgtcaagtacgtggacgccgcgcacttcgccgtgccccagggcgcgcgcgccgtcgagctggtgggcggccgggagagcgcgctcgtgcaggaggtccgcaccgtgcctgggtggacctaccgcctcgccttcgccgtgggagactcgggcgacggctgcgcgggctccatggccgccgaggcctacgcggcgcgcgccacggtcaaggtgccctaccagtccaggggcaccggaggatacaagcgcgccgtgctggacttcacggccatcgccaaccgcacccgcgtcgtcttccagagcaccttctaccacatgaagcccgacggcacgctctgcggcccgctcgtcgacgacgcctcgctcgtcggcctgcgcaagaagaagcccgcgcgccgcctcatgcagctcctgtaagcgctgcttccacgtgcactacgcccggacggaccgcgcaagcgatggtgtaatacggctggtatgtgttttttggtttggtgtgtgcgtgcgtggtatacgcgtgccgtgcgcgccctgtggctgtggctgcagtggcgtcgcgttgggtgttttcttgttgtgacgaagaaaaaagggtatgggttggggtggtccgctggccggcgcaccggggttttaatcaacttatattaacctgatgaaggtgaaggtgaaggtgacacgggattaatggcaaaaatgctcctagtac

SEQ ID NO: 23575 - DNA, 841 bp, Zea mays
  Clone ID: LIB3597-050-C1_FLI
gcgattcgctcgctcgatcctagcttcccttccaagaagcgcagcgcccatggccatggccacgcaagcctccgccgccacgcgccacctgctggccgccgcctgggcgccggcggcgaagccgcggcagctgagctcgcagctcgcgctgccgtcgtcgtcctcccgcgggccggccccgctccgcgcgtccaccgaggaggcggtggaggcgcccaaggggttcgtggccccgcagctggaccccagcacgccgtccccgatcttcggcggcagcacgggcgggctgctccgcaaggcgcaggtggaggagttctacgtcatcacgtggacgtcccccaaggagcaggtgttcgagatgcccaccggcggcgccgccatcatgcgggagggccccaacctcttgaagctggcgcgcaaggagcagtgcctggcgctcggcaccaggttgcgctccaagtacaagatcacctaccagttctaccgcgtcttccccaacggcgaggtgcagtacctccaccccaaggacggcgtctacccggagaaggtcaaccccggcagggagggcgtcggccagaacttccgcagcatcggcaagaacgtcaaccccatcgacgtcaagttcaccggcaaggccaccttcgactaatcacacttcacgtacgccgcacgccccagccgggatccaaattaaagaacttcttcttctattaattacagtatattgtaatttggctgctggtacggtggtggcatgatttgagatgtgcatgatgatccttgtgtaattttattaccaagtctcttcttatatttacatgttcatttgcttgcttcttgc

SEQ ID NO: 23576 - DNA, 858 bp, Zea mays
  Clone ID: LIB3597-050-E11_FLI
cgctggtcggctatgtgcatcgcggcatgggcgtggcactgccacccgacgcaccgcctgcttctgctgttcaatcgcgacgagtatcactccaggccgacgcagccggcgcagtggtgggcggcgggggaggaagccaaggaaatccttggaggcagggacgagctcggcgggggaacgtggatggggtgcacgagggatgcctttgtccattggagtatgccacagaaattgcaaaggaagcagatcagtacaacggctttaaccttatattggctgatgtgaactcaggaaccatggtttacatctctaatagacccggaggcgatcctgtgattcaaacagttgctcctgggcttcatgtgctttcgaatgctgcaattaattccccttggccaaaggcaatgcgcttaggacagagtttcaaaaggtatttgacaatacacgatgatgcagaagcctctttaaaacaaatggtagaagagttgatgatggatactgccagacctgatagatctatggtgcctgacaccggcgacgaccctgagtgggagtacaagctaagctcaatattcattgacactgcaaaggaacaggcacgatatggaacacgaagcatggtggcactagcagcgaaattggaaggtgaggtaacattctatgaaaggtacttggagaacagtttgtggaaggagaatctcatacagttccagatggagaaggcacaataggacttgagagaaacttaagaacactcgcaaagactggtcgattgcttattattttgctatcactttatctttaaagtgtatagcaaggcatatacaagagcagtgtataatatggctactattaatt

SEQ ID NO: 23577 - DNA, 953 bp, Zea mays
  Clone ID: LIB3597-051-E7_FLI
ctgcgatcaaaccgcacgcaagcgaaccacagcgtgctcgccatctcactgactgtgacgacggcaacaagccagtgagcagctcgccatggcagcagtgtccaccgcgccggcgctcgaaggccgcatcgcgctcgtcaccggcggctcccggggcatcggccgcgaggtgtcgtcccacctcgccgcgctcggcgcgcgtgtcgtggtcaactacgccaccaacccggccaaggccgaggagctcgtcgcggagctcgcctcgcgcggcctccgcgccgtggccgtgcgcgcggacgtctccgatccggacgccgtgcgcgcgctcttcgaccgcgccgaggaggccttcgggtccccgccccacgtagtggtcgcctgcgcgggcatcatggacgccaagtaccccgcgctggtcgacactgccgtcgaggacttcgacgccacgttcgcggtgaacacgcgcggcaagttcctggtgtgccgggaggccgcccggcgcatcccccccaacagcggtgggcgcatcgtgacgttctcgtccacgacggttgccgtgctgccgccgggctacgcggcgtacgctgcgtccaacgccgctgtggaggcgatgacgaaggtcctggccaaggaggtggcgccgaaggggatcacggccaacgtggtggcgccgggccctgtgcgcacggagctcttccttgccgggaaggatgaggcgttcctagagagggtaaagaactccatgcgtatagccgagacgacagacatagcgcccgtggtggcgttcctggcgagcgaggcctcgggctgggtgaacgggcaggttatcagggtcaatgggggcgtcgcatgagtgcggcgttgttattattacctcattatctgccatggctttccaaggatgttgttttcctgacgtgtctatctacgtgactgaatgaaaaaggttgtac

SEQ ID NO: 23578 - DNA, 607 bp, Zea mays
  Clone ID: LIB3597-051-F3_FLI
ttgaagtcccgccttcaaatccaacaacgtggaccccttcatggtcatgcatgccttgttggatttgaagtcccgccttcaccggattccagctacgacaaccctgttcctgggaatgaagacgaaggccgggagcccccactgatgccacctcatctgcagcacacgctgctgagcttcccaccaagccaagacgagtcgagcccgctgccccagccccagaccgtggttctgaaccacctttacatcgagaaagagaacacgaggtccatggttgctctggggatcacgcaccggttcaaggctaagttcgtgaccgtcgtgctttacaagccagtgctgaggcggtagggtgtggtcgtgtgcctgcgctcctgctccctcttctcgcgcaggatcggtaatggtaatgccgtaatggtaatggtaattgaacaccccttgggttgcagcccaccccttccagttgttgttattgttgttgtagtggtgcagaaacgggcgagaacgtcattttcgaatgattattagccttgttgtacctaatttggctgctggtggtggcagtgatggtttggttggagtagtttgcttgtgatttggcacc

SEQ ID NO: 23579 - DNA, 945 bp, Zea mays
  Clone ID: LIB3597-052-C3_FLI
ctcacatccctcgagaagacgcctgctcctcgccgatcgatacgatggccgtcttctccgacctccacaccgccgacggcctcaagtccctcgaggctcacctcgccggcaaaacctatgtgtctggtgactccattactaaggatgacattaaggtcttcgccgcggtgccgtcgaagcctggcgctgagtttcctaatgccgcccgctggtacgagaccgtctctgcggctgtagcctcaagattccctggtaaggctgttggtgtaaatctgcctgcgggatcagctcctgcggcagctgctcctgcggatgaggctgaggatgatgatgaccttgatctttttggtgatgaaactgaggaggacaagaaggcagctgatgagcgtgctgccgctgccaaggcctcttctaaaaagaaagaaagtggtaaatcctccgtccttatggatgtaaaaccatgggacgatgagactgatatgaagaagctggaggaggctgtccgcagtgtccagatggagggtctgacttggggagcatcaaagcttgtgcctgttggatacggcatcaagaagatgactatcatgttgacaattgtcgacgatcttgtgtccatcgacactctaattgaggaccaccttacgcaagagcccatcaatgagtacgtccagagttgcgacattgtggctttcaacaagatctagagttcagtttctgagtttgggcaacggcagcggctcagctcgtcaagtttgtgctgggatgccagtttatcccttctagtctattacagaaacgttgttcggagctgagtctattataaacatcttggtctgagtttattgttgagtggtgccagtttttttcaatatacatttatcttaaaaacagcggtactgatgtttttttgtctaaagttaatgagtttgcaatggttctgagtct

SEQ ID NO: 23580 - DNA, 881 bp, Zea mays
  Clone ID: LIB3597-052-E1_FLI
cccagcgacgcggcctcccgtagaccgagcaaggcaacccaccactgagaggcacgcagaggagcaggaagccggagaccaagatgtcgtcggtgttcagcggcgatgagacggcccccttcttcggtttcctcgtcttctcatgcatgggcgcagcgtacgggaccgcgaagagcggcgtcggcgtggcgtcgatgggtgtgatgcggccggagctcgtcatgaagtccatcgtgcccgtggtcatggctggtgtgctcggtatctacgggctcatcatcgccgtcatcatcagcactgggatcaaccccaaggccaagccctactacctttttgatggctacgctcacctttcgtccgggcttgcctgtggccttgctgggcttgcagctggcatggccatcggcattgttggtgatgctggagtcagggcgaatgcacaacagccgaagctttttgtgggcatgatcctcatcctcattttcgcagaagcgcttgctctgtacggtctcattgttggaattatcctttcatcccgtgctggtcaatcccgagcagattaagtgcactaccattctgcgattaccgtactgtttattatgctattctaagagaattgaaactctatgcccttgtctagtttattcttgttaccatgtattaatgaaacaatttgtagctgaaggaaggtgacacttccagccatgttggttttggcggtgttaagcagaggttatttattgggttaaggttggagggatgtgggttaagattggatggatgctcctgggctaagtggatttaatttttatccttggtgaataatgaacacggaggtgtagccaaataataacgtgatatatatatttctttgccccttt

SEQ ID NO: 23581 - DNA, 874 bp, Zea mays
  Clone ID: LIB3597-053-F12_FLI
cgcctcgggtcaaaccctaagcagggagttgatttatccgctgcagccatgagtaagttgcagtctgagtctgtcaaggatgccatctcccagattgttggggatgccaaggagaagaataggaagttcactgagactgtggaacttcagattggtctgaagaattatgatccacagaaggacaagcgtttcagtggctctgttaagttgccccatatccctcgtcccaagatgaaggtgtgcatgcttggtgatgcccagcatgttgaggaggccgagaagatgggacttgactacatggatgttgaggctctcaagaaaatgaacaagaacaagaagcttgttaagaggcttgccaagaagtaccatgctttcttggcatcagaggccatcatcaagcagattccccgtctccttggtcctggtctcaacaaggcaggcaagttcccgaccctggttactcaccaggaatccctcgagtccaaggtgaacgagactaaggcaaccgtcaagttccagctcaagaaggttctttgcatgggtgttgccgttggcaacttggcgatggaggagaagcagatccagcagaacatccagatgagcgtcaacttccttgtttcccttctgaagaagaactggcagaatgtgagatgcctctacgtcaagagcaccatggggaagccatacagggtgttctaagtatgctcttttgtgaagtctgctaggttctggcaccgaggttttattgaattaaacttttgttaagagtatgtttttggacgatcctatatttcgtcctggcgctactatgtttcagaatggtggtactactataagtatcctggcgctttaagtattgcttgaaaggatcaat

SEQ ID NO: 23582 - DNA, 938 bp, Zea mays
  Clone ID: LIB3597-053-G7_FLI
cgccgctatgacagtcgcacgacgatcttctcgccggaggggcgtctctaccaggtggagtacgcgatggaggcgatcggcaacgccgggtcagccctcgggatcctggcggccgacggcgtagtcctggtcggcgagaagaaggtgacctccaagctcctccagacctcccgctccgccgagaagatgtacaagatcgactcccacctggcgtgcgctgtggcagggatcatgtccgacgccaacatcctcatcaacaccgcccgcctccacgcccagcgctacgcgctctcctaccaggagcccatccccgtcgagcagctcgtccagtccctctgcgacaccaagcagggttacacccagtttggtggcctccgcccctttggggtctccttcctattcgccggttgggacaagcaccacggtttccagctctacatgagcgacccatctggcaactacggcgggtggaaggccgccgctgttggggccaacagccaggccgcgcagtccatgctcaagcaggactacaaggacgccttgacccgcgaggaggccgtcggtctcgcgctcaaggtcctcagcaagaccatggactccaccagcttgactgccgagaagctggagctggccgaggtatttctgcagcccgacaccggggaggtacagtaccaggtgtgctctcctgaggcgctggggaagctgcttgcaaactccggcctgacacagccaacacccgaggcataatgtactggtttgcagtggcatgtgatgccttctactgctcttagacatggtttaagcagttatgcttctgttgtgtgaacttaaatattcgacaattatgtgttctatttttgtgttgagcatccttgatccgttaatgtttcatctgtaatagtgcattgcattgaattggttgcaaattgttgatctct

SEQ ID NO: 23583 - DNA, 719 bp, Zea mays
  Clone ID: LIB3597-054-C5_FLI
gggcttcgatgatgtctctgagtgcgaaattccttgggaagatcttgtgattggtgaaaggattggcttaggttcatatggagagatttactgtgctgactggaatggaaccgaagtagctgtaaaaaaattcttggatcaagatttttatggcgatgctctggatgagtttaggagtgaagcggcgaccagaatatgcatcaggcgggaggaatggggcggtcgctggagctgctgctgatccagtttttgatgccggataacgacacacgtcggcaggcggaggagcagatccgacggctggcccgtgacccgcaggtggtccctgcgctcgtccaccatctccgtacggccaagacccccaacgtccgccagctcgccgcggtgctactccgcaagaagatcacctcccactggcccaagcttccccctgactccaaggcatcacttaaacaagcccttatcgattcaatcacactcgaccacaggttctttgctaaatacctatcaccaatccttctacgcatgtctgccttagaatctgcacgctttcaattcactcaaattgtgcatttggccatttgcctaaggaacactttgagtgtattctcaacttattagtttgtgctgatcagaattgaactgagaggtccagctttagtgaaccttcctgtttgcgccccaaacaacatagaattttgatgctctattgtgaccgc

SEQ ID NO: 23584 - DNA, 800 bp, Zea mays; identical to SEQ ID NO: 23555
  Clone ID: LIB3597-055-A11_FLI

SEQ ID NO: 23585 - DNA, 956 bp, Zea mays
  Clone ID: LIB3597-055-F5_FLI
ttgacaagggggccaggtcgaggctttccgagctccgatccctctccaacgcctgagggatggccgtgccggcgcccgcgaaggcggcgcgcttgcttgcggcctccgcggcggtgctcgtgctgctgtggtgtgtccatttccgcggtgggctctccttcggctcccccaccaacaagggcctcatcttcaacgtgcatcctgtgcttatgctaataggattcatcatcctagggagcgaagccataatgagctacaaaatatggccatggagtcatgatacaaacaagatggttcacatgcttcttcatgctgttgcactcttcctgggttctgttgggatatatgctgccttcaagttccacaatgaaagtggaattgataatctgtacagcttgcattcgtgggttggacttggaactatctgcctgtacggtatacagtggctatttggcgttgctaccttcttcttccctggtgcttcgccaacagtccggcgcagaatgctcccatggcacactcgcgctggacttgttgtctacatactggcactgcttgcttcagagctggggttcctggagaagctcaccttccttcaggctgccggcctcggcaggtacagctcggaagctctgctggtgaacttcacagctcttgtgatcctactgcttggcgcttctgttgttctgtatgtcaccgctccaatgcacaatgagcacgcgcatgggtattcagcagtgcacaagccctgaaccacagatgcagcttcatcggttccagttggcgtatccttgtacgagtaggaatcaaatccaatcaaattttgtccgccggaattatgagactttagagtgtctccggcagtcagtgtaaaatagaggacacaaaactgtagatgacactttttgacactgtttgtagagtgtaattttaaataagggatgagatagaggatc

SEQ ID NO: 23586 - DNA, 699 bp, Zea mays
  Clone ID: LIB3597-056-A12_FLI
gagattgtgtatttgtccagggttcagaaatcaagtgctctgctcattcctaacatctccagtgacgaacggtcttcttgttttttttcttcttcttccgtcgcagcaaatcaagtcgcgcatgtgaactgcgggaactgccgcatgctgctcatgtaccagtacggggctcggtccgtgaagtgcgcggtctgcagttttgtgacatcggttggagtaagtactcaaagcatccttttcagaaaaggatgcaattaacaaataatgttttttgttgtagaagactaccattgtttcgctgctattcttactgtaaaacaacttgcgtttctcatgagaaacagaaaactaaccgccgagtttcactctactcagacctcacctggtgcagagcagaagcccagcagctgagctgatagtgtccctgaaattgctgtgagaccacctatgaaaaggatgctttgagtgcacatgtatagagttcttccctgaagcgattctttcactttcttttcttttgttttcttttttggttcctcctcaccatctccaccccacccgtccacttctgcgttccttcgatggatctggcgagcccgcggaataaatgagagttttggatatatagctagggcttaacctcgtcgacttgtctgtaaaatcgaatgagacatatatataaacctatgttgttttcct

SEQ ID NO: 23587 - DNA, 1484 bp, Zea mays
  Clone ID: LIB3597-056-C7_FLI
ctaaccctagatgggcgccgtcacctctacggtcgcggcgcgctttgcctttttcccgccgagcccgccgtcgtacgggttcgagcagccggcgccgcttccggcccctgccacacccgagcctccggccccggccacatccaagccgccgcctccggccccggccacacccaagccgccgccagcgggggaggagaagggcggtggcgcggtggtggagctcacgggcgtcccgcggagggttaacgtggaggcgcggcggctgcggacgaagcggggcacggaggtggtcgcgatgcacgtgcgccaggcgggggccaagctcacgctgctctactcccacggcaacgccgccgacctcggccagatgtacgagctcttcgtcgagctcagcgcccacctcaacgtcaacctcatggggtatgactattctggttatgggcaatctactgggaagcctagtgaacaaaacacttattctgacatagaagctgtatacagatgcctcatagaaacctatggagcttctgaggataatatcattctttatggacaatcagtgggcagtggtcctactttggatttagcatcccgattaactcgtttaagagcagttgttctacatagcccaattttgtctggcttaagagtgatgtatcctgtaaaacatacatactggtttgacatatacaagaacatcgacaaaattccattagtcaggtgtcctgtgttagtgatacatggtacagcagatgaggttgttgactgttcccatgggcggtcactgtgggaacttgctgaagtgaagtacgagccgctgtggatcaaaggcggaaaccactgcaacctagaactgtacccggaatacatcaaacatctgaagaagttcgttggagccatagagaaatcgccacccccacctccgatcgacgagtgcatggagagctcaggcccgtcggattgtaccccagcagaacccgagtgtacagcggactcaaggaagagcacggactgcagggacaaagcaaggccaagcatagatcagagacaaagcacggaccggcgggacaagccgaggggcagtacggataggagggacaagacgaggaagagcgtggaccatcccgagaagccgcgggctagcgtcgatcaaccggatcggccgaggaaaagcatcgaccggtttggaggcatgatgaagtcggtgaggctgtgcaatatcgactgcttcaaagtgacagcaacctctgggagctgaagagaaggaacggatggatagtagcaggaaaggttagtgttgggtgccgtctgtatgtattcttcccttcgtgtaacttattcaattgggtgattggtttggccgcagtagaaggcgtgtttttgttttctttttcttcgctccttcctcatacaattacaatggtgttgtttccgttgggctgttctttttaacatgagatgaaataataatcttgttgataaac

SEQ ID NO: 23588 - DNA, 1175 bp, Zea mays
  Clone ID: LIB3597-056-E3_FLI
cttgccgcacacatcaggaaggcgggcaggcgacgacaatgacgatgatggcgccgcatccgcagccactgccgctgccacagccgccggcgccgttcggggacaccacgctcaccaaggtgttcgtgggcgggctggcgtgggagacccacaaggacgccctccgcgagcacttcgagcgctacggcgacatcctcgaggccgtcatcatctccgacaagctcaccggccgctccaagggctacggcttcgtgacgttcaaggaggcggacgcggccaagaaggcgtgcgaggacgccacccccgtcatcaacggccgccgcgccaactgcaacctcgccgccctcggcgccaagccgcgccccccgccacacatcctccgcccttcgccgccggccaccccggcgccgcacgcgcccgcgctcccctcgcaacaccagcccacgccagccatcgccgtggggtccaggggcgtgtcgccggtgccgtggtactaccacccctccacgacgccgccgccaccggccgcgcaccactacgcccacggcgcgcaccagcagtaccacggcgtgctcccgttctaccccgccgccgccgccacctacgggtacgccccgaattacgtcgcggacctgagctacaatgcgaaggtaggccaggcggcagctggcggcacgggcgggtcctacctgcaggggcacttcgcgtacccggcggcggcggcagcgcagggcggcatggtggcggcggcgcccaacggcatggtgccggtgtacccgttctaccactaccaccagtaccacgcctcgcaggggggagtcgccgccgcgcacttcttccccccggtctccgccgccgccgtccccgccgtcgtctccaagcacaccgtcatggccgctcccaaagtggagcaggtgacaggctgcagctgaaggcacgaggcgatcgatgatggcgacgacgagcggcggaacgaaaggagcaggccaaacaggctgagctgcacatgaagggtgtcgtccgtctgtcgggagggcccgaagcgacgcaaggcccgggcccccattaggccattgctacatcccccctctgacttcgtgcgtggctgcacggccaccgtgccgggcaagaacagtctgtaacaaatgattcgattcgtctctctctcgtttacc

SEQ ID NO: 23589 - DNA, 832 bp, Zea mays
  Clone ID: LIB3597-056-G10_FLI
cgactcaaccgctagtacagtccacacatgacacaacgacaccaactgtcctcaatccagcagccctcgagtctcgtccccgcacatcagcagagagacgccactaccaccaccgcaagcgacgacggggagatgtttctgcgacggatcctgaccggcggaggtggcctggcggcgctgagggcggcgcgcgccgtgaaggagacgacggggatcgtcggccttgaggtggcgcccaacgcgcgggaggttctcatcgggctctacacgcgtacgctcaaggagatcgaggccgtccccaaagacgagggctaccgcaaggccgttgagtccttcaccaatcaccgcctccagatctgccaggaggaggacgactggaagcgcatcgaggaccgaatcggatgcgggcaagtcgaggagctcatcgaggaggccgaggacgagctcaagctcatcgccaaaatgattgaatgggatccgtggggtgtccctgatgactacgaatgtgaggtgattgaagacgacaccccaattcctaagcatgttcctcagcaccggcccgttgctcttcctgaggagttcttcaagacactagatgccgtcaaatcagatcccgccctccaaggcgatgctcctcctcaagtgaaggcgtaaagatgagtcttcccggttatgtcttatgtcatttcacactttgctgcgctgggtagggactagtttcttgtgccatttgccagcaatgtgcttgttccgagcagaataaatttctggcgagtaccatcgaagagtgactttgaacgaagtgattcgacacagtaaatttgttgttgtc

SEQ ID NO: 23590 - DNA, 1370 bp, Zea mays
  Clone ID: LIB3597-057-G4_FLI
aaccacaacggaatcgaaggcaaaccaatagacatccttattaacttggcctgatgcactcctccattcctcagacaatcaaatatccccagatagctaggtggttggcacgcatggagaagcagctgcctgctcttaccggtggctcaaaggcggccaccacgacgcccttctacctcgccttagatcacagagccgccgccacgtcgtcttcaccgccggcggaggcgccaacactgccgccgtctgctgcggctgtctcagatccttctagacagtccaacagcgataggggatccgagataatcaaagccaagatcatgtctcaccctctctatccggctctcttgagagccttcatagattgccggaaggttggagcgccgctcgagattgtcggtcggctttctgccctcgctgatgacgtcgaaacgaattcagacggcagacaagaagaacaaccagcagacccagagctcgatcagttcatggagatctactgtcacatgttggtaaggtacagacaggagctcacaaggccaatccaggaagcggacgaattcttcaaaagcatggaggcccagatcgactcattttcattagatgacaatggctatgaagaaggaggcggttcctccgacgaagatgagcaagaaaccgtcgacttgggcggccttccggtccctgagaccggcagcccgtccggagagggcaaggagctgaagaaccacctcctgaacaagtacagcggctacctgagcagcctctggagggagctctcgaggaagaagaagaaaggcaagctgccgagggacgcccgccagaagctcctccactggtggcagctgcactacagatggccctatccctcggagctggagaaggcggcgctggcggagtcgacggggctcgacgcgaagcagatcaacaactggttcatcaaccagcggaagcgccactggaagccggcgccgccgacgatggcgctaggcacaccagattacaggatgggccagcacggcggcggtgcttctagcagctcggcctccgctggtctccgcgtgcaggggcagtacttcaccggcggaagctcgtatccccgtggcccgtgacgatgcatgcgtcgcctgcaggctgagcgcgtgaggtgtcgacatggattgttgccgtgcatgcatgcatatcagcatacgtatacatacatacgtgatcattatttgggtatagatggtgtggacgtgtcgtgtttcctatacagaaatttgattgtctccttacttgcattgctcatacgcatacatatctacatatatgcagctgatgacagagttataaagttgtaactatatattattattatttgtcttact

SEQ ID NO: 23591 - DNA, 401 bp, Zea mays
  Clone ID: LIB3597-058-B8_FLI
gcccatgggcgttttcgaatttgacaagttcgccgtaggaaccgaggctgtggcaaagaagctggcagaactcagcggcaagggcgtcacaactatcatcggaggcggagactccgtcgccgccgtcgagaaggtgggagttgctgacgttatgagccacatttccacgggaggtggcgctagcctggaattgttggaaggaaaggagcttccgggagttgttgcgttgaatgaagccgccactgtgactgtatgaagcatgctttcattttgtttcgtcttcgtcttcacgtgccgttgtatacttgctacattctcgcttgcacctcctcagccgctcgctcgaaatgtaagagaccattgttttatagagctaatggaaatcgtttgaacaacgacac

SEQ ID NO: 23592 - DNA, 1460 bp, Zea mays
  Clone ID: LIB3597-058-E10_FLI
cgacaacagggcgccgctcctcctgcccgtcaagatcatggacgccgccgccgacgacaagccggaaatctccgacgatacggcccaccagattagcgttgatccttggtatcaagttggcttcgtcctcacaaccggggtcaacagcgcatacgttctaggatactctggatcaatcatggtccctctaggctggatcggcggcacatgcggcctcctcctagctgccgccatatccatgtacgctaatgctcttcttgcacggcttcatgaagtcggtggcaaacgccatatcagatacagagaccttgctggacacatatatggaccgaaaatttacgggcttacatgggctctgcagtacattaaccttttcatgatcaacactggctttatcatcttagctggacaagctctcaaggccacgtatggactgttcagtgatgatggagttctgaaactcccttactgcattgcgatatcaggattcgtctgtgctcttttcgccattggaatcccttatttatctgccctcaggatttggttggggttctccacgcttttcagcctcatgtatattgtgatagcagttgtgctgtcgtcgagagatgggataaccgcacctgcaagggattacagcatccccaaatcatcgcagtcaactcgagtcttcactacgataggttccatagcagaccttgtgtttgcttacaacaccggcatgctgccagaaattcaggcaaccatcaggcctcctgtggtgaagaacatggagaaagctctatggttccagttcaccattggctccttgcctctctatgctgtagtttttgtgggttactgggcttatgggtcctcaacatcaggctacctcctcaacagtgtcacaggcccagtctgggtgaaagcggttgcaaatctgtcggcattttttcagacagtcatagcgctgcacatctttgctagccccatgtatgaattcctggacacaaaatatggaagtgggcgtggtggcccttttgagatccacaacgtggcgttcagagtagcagtcagaggaggctacctgacggtgaacacgctggtggccgcggtgctcccattcctcggcgacttcatgagcctgacgggcgccctcagcaccttcccgctgacgtttgtgctcgcaaatcacatgtacctgatggtgaaggggcctaagctgggtgccatccagaaatcatggcactggctcaatgttcttgggttcactgcgctggctgttgcagcggcggtctccgcaataaggctcatcatgcgtgattccagcacctaccacttcttcgctgatctttgagatcgatcgttttcttttctttttgttggaatgctgagccagagctagtattttttcattttcagagaattattatccatgtatgtaaggatgacgcatatatatattgaatagatgatttaat

SEQ ID NO: 23593 - DNA, 967 bp, Zea mays
  Clone ID: LIB3597-059-D4_FLI
gattattagctcagcattctcccggggtcaaactgtgttccagacttccagtgtgtgtgtgccagccactactgtacaatagctctcttctttctctcgccgtagcttcgctcgtgctgtgcgtgtgtgtatatataagcatcctgcccccactccttttatctctctactcgtctccacggaatcgatcgatcggtgctttgatctctgagcctgagcaagcggtcgagctcaccaaccgccacgctcaagacaggtcgagtagctagctagctgccggagtggaaaaggaggcggtgcagtggcatggggaggccgccgtgctgcgacaagatgggggtgaagaaaggcccgtggacccccgaggaggacctcatgctcgtctcctatgtccaggagcacggccccgggaactggcgcgccgtgccgaccaacaccgggctgatgcggtgcagcaagagctgccgattgcggtggacaaactacctccggccgggaatcaagcgcggcaactttaccgagcaggaggagaagctcatcgtccacctccaggctctccttggcaacaggtgggcggccatagcatcctacttgccgaagaggacggacaacgatatcaagaactactggaacacgcatcttaagaagaagctgaagaacatgcagggcggcgaagggggcgcgggagggaagcgcccggccgttcccaaggggcagtgggagcggcggctgcagactgacatccacacggcgcggcaggctctgcgcgacgcgctctcgctggagccttcggcgacgccgctggccaaggtggagcctctgccgacggctccggggtgcgcgacgtacgcgtctagcgccgacaacatcgcgcggctgctggaggggtggctgcgcccgggcagcggcaaggggccggaggcgtcgggttcgacgtcgacgacggccacgacgcgccagcggccgc

SEQ ID NO: 23594 - DNA, 785 bp, Zea mays
  Clone ID: LIB3597-060-G4_FLI
accgcagaaaaagaaaaagaaaaggcaaaggcaaaggaatcccaatcaggcaagcaaaaggaagaaccagctgctgcggagtgcggagatgtcgtcgcagctgatcgaggagcaccggtcgggcgcggaggtgcacgtcgggcacgagctgtgcgagcgcaagtcgcgcgagttcatggtggagctgggcctccccgacgggctcctcccgctgcccagcctggacgaggtgggctacaaccggtcgacggggttcgtgtggctccggcaggccgccggcctgacccacaccttcggctccatcggcaagcaggtgtggtacgacagggaggtgacggcgttcgtggagccggggcggatgcacggcctcgccggggtgaagagcaaggagctcctcatctgggtcaccatctccgagatcgtcgtcagcccctccggcaccaagatcgtgttccgcacccccgcggggctcggccgcgccttccctgtcaccgccttccagctcgagcccgagggggaccacaaggccgaggacaccgccgccgccgccaactgatctgctctagctagcttccggcgccggcggccgtgcgtgggctgctcgatccggtagtggcagtggctttgtgagacagtcgagtcgattgtggtttccccacctccgccccgcagtgtgcgtgtgcgtgtagtggatgatgatgcaggaataaacggtgtccctggatccagaactcacggtttgattttggggtgatttggtaactctggtctctctgatctgatcc

SEQ ID NO: 23595 - DNA, 630 bp, Zea mays
  Clone ID: LIB3597-061-D7_FLI
gggctcaagccctttgggaagcagctcagggacaaatacgtggagacacagcagcttctcctccagatcgctgggcacaaggatattcttgaaggcgatccattcctgaagcaggggctggtgctgcgcaacccctacatcaccaccctgaacgtgttccaggcctacacgctgaagcggataagggaccccaacttcaaggtgacgccccagccgccgctgtccaaggagttcgccgacgagaacaagcccgccggactggtcaagctgaacccggcgagcgagtacccgcccggcctggaagacacgctcatcctcaccatgaagggcatcgccgccggcatgcagaacactggctaggcggcttctcttcactcacctgcagagtgcaccgcaataatcagcttccggatggtggcgttttgtcagttttggatggaaatgccgaactggcagcgtctgttttccctatgcatatgtaatttcctgcctctttatattcactcttgttgtcaagtccaagtggaaaatcttggcatattatacatattgtaataataagcatcgtacaatctgcatgctgttttgtaataattaattaatatcccagcccattggatggacttgttt

SEQ ID NO: 23596 - DNA, 1370 bp, Zea mays; identical to SEQ ID NO: 23590
  Clone ID: LIB3597-062-G4_FLI

SEQ ID NO: 23597 - DNA, 587 bp, Zea mays
  Clone ID: LIB3597-063-C11_FLI
gcgagagagcccggagccgagagaccagccagccatggcgctgcgtgccctgtacaacgagatccggagcatgaaggtccgcgacgtgccggcttacctgaagccgcgcttgacctgggacaacgtcaagaagagcgccgaccaggccgtcgaccgctacatcgagaagtacatcgacacgagctcgccggaccctctctaccacgtctgcatcggagggatgatcttctcctacttcgtcaatctgccctgggagcgcgcccacctcgcccacctcgaggagatggagaggaccggtgggaagcactagatccgctgccccgtccctcgccggcagcgcgggaggacgggtgactttcatggggtccattcaggctgatggcttctgttttcttctgctgttgagctactggagtcatgttactttggtcgttggttttgtacccagacagcaagaaactgtccagcttattgtcttgttcctcgcgtcttgtcataagtaacttcaaacaaaggagtgcatgcattgtgattaaaaacgttttcagcaattgagtacgaatattctctttttttttgtaattttt

SEQ ID NO: 23598 - DNA, 913 bp, Zea mays
  Clone ID: LIB3597-065-D11_FLI
tgtccggcgctgctgctggcggtgctcgtcgtcctcctcctgctcaccccgccgtgttcatcggccgaggcgccgcctgagctgaaggctgcagcggtggtgcgacggcggatgctgctgccgctgctggcggtgtcgcggccgtccacgagccggcaggaggccgagcagcagcagcagatgcgggtcggcggcgggaccactcccttcaagcaggccgccgcgagcttcggccggaagatacccagatccggccggaatcccatccagaaccgatgacagagagagagggaaccggcctcgacatctatctgaagggctggtctggatcggaagagcgttccgtctcggtcgatgagctcagaaaccacacagcgcgatcgatccatccatccatctttggatccttggcgttgcgtcagcggctttttgtgtgtgtacaagcagctggcctggtgctagctagcttccagcaggagcaaaaccgcccagtcgatcagctccaaaacagataccagggcatatggcagctactactgacgaccgtgcgcgaggaagagggcgttccggtggccggcaggcagagagaggagggatcggatcgagagagtcacgacgaactcggcttggaacacacgagctgggcccagccgtctcggaagaaaggcggccttggatcggattctgatggggggtggcgctctttaactttctcggcagtaatgtttttgtccgtgcaaccctggctcacagagttgcagaacacttgtaccgttcgttgtacgacagcagtttcgactgcctttccttttttttctaaaaaaaagagcaggaataatgtaacagattgttcacccccgcaagctgtaatttggaaaacgacgacatgtatgaacgaagggtttaccttgtt

SEQ ID NO: 23599 - DNA, 722 bp, Zea mays
  Clone ID: LIB3597-065-F8_FLI
ctcttcttcctcccaatcccgaactccatctcaaccgcaaccgcccgtcgcttcgtggccgcccactcaccacgcccgcctcgcccgccgcgggagggaacaagcgctcaggctgctttgtgggggcgccccgccgggagggcgaatcccggtggaggtgaaccctgtttgccagcagatctcgccgttgggaggccagagctgggcggcagaaagaaacgttgtgctcgagttcgaggtcctcgcggagatagccaaggcgagagggaagaccgtggcgcagagccgccaggagggaggaagacgtcgccgggacctactgctccgtgcctccagttggtacgcgtcccacgctccgtgcctctagccataggctacttcgtgggggcgccccgccgggagggaggaagccgccactgggagggactcgttgctccgtgcctccggttggtccgtgcctcgtgctctcgatgccttcagcgggtctgcgcccctactcgcactccagatccagaggcactgcaagctttcggcctgctgctcctatgtgagatccagtcgtcgacgtgatcttcttaacagtagtgtgtgagatccagacaccgacgcgatcttcttgacagcagcagcagtctcctccaggcaaggagcacaaccctctactatctataaatgttgccaccctttgcctatatgggttcttaacgtcgttatttcctatg

SEQ ID NO: 23600 - DNA, 1502 bp, Zea mays
  Clone ID: LIB3597-066-A5_FLI
cgaaattggttgagtggttacaaaaaaaccaaacactttccagcatatgcatgcaagggacgaaattagttaccagttaccaacactttcagcatatgcacgcaagggacgagattgattacccattaccaaaccaacagtttccagttcagcggtaggaacaggccgtcacggcgtcatccgccaaaggacaatccatttgctcacacaggcacaaacgctgagcgcctgagcctgctctcgcggtctaggagatggcgttgatcacgaatgtctctgactatgaggagcttgcaaagcagaagctgcctaagatggtttatgacttctatgccgggggtgcagaagaccagtggacactcaaggagaataaggaggcattctccaagattctgtttcgaccacgggtgctgattgatgtgtctcatattgacatgtctacaagtatattgggttacaaaatttccatgcctattatggtggctcccactgctttgcacaaactagcccaccaagaaggagaggttgcttctgcccaggcagcagctgctgcaggaactataatgacgttgtcttcatggtcatcttgcagcattgaggaagttagctcaattgcaccaggactccgtttcttccaactttcagtattcaaggatagggatatcgtgcaacagcttgtcagaagggctgaaaatgctggctataaggcaatcgccgtcactgtcgacgctccacgccttggtcgcagggaagccgatgtcaggaacagattcaggctgcctgaaaatgtggtgttgaagtgctttgaaggactggatctcagcaagatggacaagactaagggttcaggccttgctgcttacgccactagccagattgacagctctctttcttggaaggatatcaagtggctacagacgattaccgggctgcctatcttagtgaaaggagtcataacagcagaagatgctcgaattgctatcgaatgcggtgtcgccggcattatcgtgtccaaccacgggggccgccagctagactatcttcctgcaaccatcagctgcctggaagaggttgtgagagaagcgaagggccgccgtgtgcctgtgttcctcgacggcggcatccgccgtggcactgacgtgttcaaggccttggcgctgggagcctcaggagtgtttattggaaggcccgtactgttcgccctcgccgtggacggcagggcaggggtgaggaatgcgctgcggatgctgagggatgagctcgagatcaccatggcgctgagcggctgcgcgtcgctgaaagatatcacccgcgatcgcgttatcactgagcgcgacatgatccgtcgctctcggatataggcttcgattcgtttgctgttgtgttgtgcggggctgaaagtctgttgttgccctggcatgactgtcatattcgaaactgaccggaccatcagattggttttgacttttgacctattggctaacgatgtgctaggttttctc

SEQ ID NO: 23601 - DNA, 637 bp, Zea mays
  Clone ID: LIB3597-066-C11_FLI
gccatctctacacaccaccttgacttacttattgaattaggtcacacactagtgggcctaatttcaacatacactacacctacatcctttactcctttgtttgtggctatgacccataccaagaccggctacatatacacgatacagctcgagccggagtcgttgaggccggtggcagcgagagcatgcaggtccaggtccaggtccagcagagaggatcccctgcccccacggcggaactagaggtctccctccgcgagttcgccctgtcggacgcggacacgagggcgttcatgtcgtgggcgtccgaccctcgcgtggtccgcttccagcgctgcgatgcctacgagcacgtggactaggcccgccgctacatcaccgaccacgtcctgccgcacccgtggtaccacgccatctgcgccggcgcgggcgcgcccctccccgtggtgggttccatctccgtgaaggctgggcccgccgaggacggggggccgttcagggcgtccgtggggtaccgcctggcgcgcgcgcactgggggcggggcatggcaacgcgcgcggtgcgagcggaggccgcggccatgttcgcggcgcggccctggctgctgcggctggaggctgtggcggacgtggacaa

SEQ ID NO: 23602 - DNA, 1183 bp, Zea mays
  Clone ID: LIB3597-066-D3_FLI
ctcttcctcttccccttctctctcggcgacgactgggtggccgtagctgcctccatacgcctggtgccctggtcttcttcgggccattcgccggccgcgagcaccaccaaaagggagagcttcccaggtagagctgtttctccgtactctagcagatggcaaggataaagcctaagcaattgctaatccaaagcaaaacaaagaaggctccatctcgaatcagctactctactatcatcacatggaacttgattgtcatattggttgtgctatctctctatgctacctacagccattggcatcaaaggtctgcccaagacttcgaaatggagcttcatgaagctgagcttgctgtgagaccggaggatccaaaaatgataagtagaccaagatatgcggtaatgaacaccgcaaaaggcccaattactatagaaatatacaaagatgcttctgctgacgttgtggatagatttatcaacttgtgcaagagtaatcatttcaaaggaatgccatttcggcatatcataaaaaattttgtaattcaaggaggtgattttgattttgatggagcttcccaagaatggataacgaaagctaaagctagtggaaaaaatgatctcagtccaaaacatgaggcatttatgattgggactgcaaagaatcctaataccaaaggatttgatttgtttatcacgacggctccaattcctgacttgaatgacaagcttgttgtatttgggcgagttatcaagggagaggacatcgttcaggagattgaagaagtcgacactgatgagcattaccagccaaaggccgccataggcatcatcgatatcgtgctaaaacaggagccttgagcctggatgcacatgatgacgttaaccacatgccgacggacttttctgtagttggaaaatctatctcatcgagttggtttttgttttggtgccttattatgtgttgttgcgtggaaagcagttgtgacgcttgttccaggagtcgttgcagcagcgtttgtgtataaaatatattcacagggtttttggctgtcagcatgcgcgagcatatgctgctacaccttgtatcgtggttgtggtaacagtaagcaggctattctctgctattgctaccagtaatcggtttgggccttacgatttgcgaatgaatccaataaaatcagcgc

SEQ ID NO: 23603 - DNA, 876 bp, Zea mays
  Clone ID: LIB3597-066-E12_FLI
ctagctagctaggcgacgttcagtgaagctccgagccgagctctcatggaactccagctctaccactccaccacaaccctcctcctgccgctgctgctgcttcttcttctcctgctaccctcttcttcttcctcctcctctcacggcctgcgctctgccgacggtagtagagcgccgcattaccggctcaaggatccgcgtccaccaaagcagatcggcgacggcgagggggcggcgacggcggagtcgctgatcgggtcgaggccgccgcggtgcgacggcaagtgcgcgccgtgcgggcggtgcgaggcggtgcaggtgccggtggcgccgcgggccgacagccgcgggggcgagccccggcgccgcggagggctgttcggcagcgccgaggagagctacaccgactacaagcctctcaactggaggtgccgctgcgcggaccggcgagcactggacccgtgatcgatccggatgctgcgattgcgatcccctcgtcaggtctccagctgctgctgctgatgagcccattggtgtactgtacttacgtgttttttcttttctttggaggaactgttgctggtgaatggtcgatcgatccatggccaggaggattgtttggcaaacgttctcgtctctattctgtagctaggcttttggatttttggtagtggtaggcagctaggcataggcttcggcaatttgtctggtgatcgataatcacttgaaaaacctgctgcttagactgcttgctttgacattaatctgggtgtggctataggttctacagtatttcaggtcaaccgaatatgttactctctgtctcactcactattttaaaatacactttataaataatatacggtgcaaaacagt

SEQ ID NO: 23604 - DNA, 733 bp, Zea mays
  Clone ID: LIB3597-067-B6_FLI
gctactgacggttgctctagatccgttcatcctggtggttttgtgaggtcgaaagcggcgagcgaattagaagatgctggacaagctgtgggacgacgtggtggccgggcctcgcccggagacgggcctcgagaagctccgcaaggccaccaccgcccgcccgctcgtcatcaacaaagacgcggacggcggcagctacaagcgggcgcagtcgatgccgtcgaccccgacgacgccggtgacgccgtcgtcgtcgtcgtcgtcgacgacgccgcgcggcgccggcaacgtgtggcgcagcgtcttccacccggggagcaacctggccaccaagggcatgggcgccaacctcttcgaccggccgcagcccaactcccccaccgtctacgactggctctacagcgacgagaccaggagcaaccaccgctagatcgggcgagatggatggacagtgaagaggccatgtttgctggtccttgtggttatctaaaacgcacgcatgctctattatagctagtcatcactatatatatacttgtgtttgtgtattgttgttcttgttctgctggtgtctccgccgtttaatttgacctatgttatggagtgagtgatatatgtgccgtcactcctagtatatagtagtgagtgactagttggtatgtgtagtactgtactatcttttctccatatgcatgttttgccagcgcgtaatgaatgtaatgtcagtactgct

SEQ ID NO: 23605 - DNA, 290 bp, Zea mays
  Clone ID: LIB3597-067-C6_FLI
catgattcatgatccagaggattattaatggaattctttcatttgtttctagtacgtcacgttgtcccttgtcatattactagtatactacacacgattgcacgaagcagatgtgttcgctttggactactacattcattcttctccgtagtatcttcagtgtgcgctgtactgtatgctcttgctctctgcaaccaggagctgagaccgcgacatcttccatttttttcactgacgctgcggcttgttcttgggaaatctacatcatctataaaacagcatctgaaatc

SEQ ID NO: 23606 - DNA, 674 bp, Zea mays
  Clone ID: LIB3597-067-C9_FLI
ctcttcttcttcctgtactatatagcctcccctcgcaaatcgtcactgacgagtgatgtcattccgcttgcttgattgttccagatattcgcagttgaccgggtcctcggagcacgatgaagtttgttgctgcctacttgcttgctgtcctcgctgggaacgccagcccctccgctgaggatttgactgccattctggagtcagttggctgtgaagttgacaatgaaaggatggaactcctgctgtcccaactgagcggtaaggacatcaccgagctcattgccgcgggcagggagaagtttgcttcagtcccatgtggtggcggtggtgtcgctgttgcggcagcttcacctgctgctggcggagctgctcctacagctgaggcaaagaaagaagagaaggtggaagagaaggaagaaagcgatgatgatatgggcttcagcctcttcgactaggctgcacagtcatcacagtattgtttcgggcagtgaaaccagaggaaaaccagagtcatgtttagattttaaccttgttttatgttggaaagtactgctacttgtctttatatttggtaattcagccgtaggttgctatgctggttgggatttactcgtgaaccagagtttttctatcttatatcctgaatttgttatcccaaagtttcctggcttttt

SEQ ID NO: 23607 - DNA, 1415 bp, Zea mays
  Clone ID: LIB3597-067-D5_FLI
caccagaggaagaggaagaggaggatgtcggggtcgaaggtgtacacccttgaggaggtggccaagcacaacaccaaggatgactgctggctcgtcatcggcggcaaggtgtacaatgtgaccaagtttctggaggaccaccctggaggtgatgatgtcctgctgtcttccactgccaaggatgctaccgatgatttcgaagatgtggggcacagcaccaccgcccgtgcaatgatggacgagtacctcgtcggtgagattgatgcggccacgatacccagtaaggtgaagtacacgccccccaggcccagtattgccagggggaccaaaaactggaggatcttgatgacgaactccggggtcttatcctggttgtagtgcggctgcttggggggcgtgtagatggcgcagatcatcgatggcaaggccatcgccgccgacgtccgccgcgaggtcgccgccgatgtggccgcgctctcgtcggcccacggactcgtgccggggctggccgtggtcatcgtggggagcaggaaggactcgcagacgtacgtgaacatgaagcgcaaggcgtgcgccgaggtcggcatctgctccatcgacgtcgacctcccggaggacatctccgagaccgcgctcgtcgccgaggttcatcgcctcaacgctgaccccgccgtgcacgggatccttgtccagcttccacttcctaagcatatcaacgaagagaagatactgagcgagatttccatcgagaaagatgtggatggcttccatcctctcaacattggcaagcttgcaatgaaaggcagagagccactgttcgtaccatgtacgccaaaggggtgcatggagctcttgtcaaggagcggagtcactgttaaaggtaagcgggcagttgtggttggtcgcagcaacatcgtcgggctacctgtatccctgctccttctgaaggcagatgcgaccgtatctgttgtgcactcgcggacccctgatcctgaaagcattgtacgcgaagccgacatagtcatcgcggcagctgggcaggctatgatgatcaaaggtgactggatcaagccaggtgctgcggtcatcgatgtcgggacgaactccgtcgacgaccctacccggaagtccgggtaccggctcgtcggcgatgtggatttcgcagcggcgagcaaggttgctgggtacctgactccggttcccggaggcgttggcccaatgacggtggcaatgctgctgaagaacacggtggatggggcaaagcgggggatagtcgagtagctacgttcatctcacttctcgttgctgtacgactgtgttgcaaggatgtgagctgactcgaaaagcgtgtgttggttggtgtaacaatctgtttcccaagaataagaatgatagtcacagctgctttcctgttt

SEQ ID NO: 23608 - DNA, 1301 bp, Zea mays
  Clone ID: LIB3597-067-G10_FLI
ctccgacgagaaccgccactcctcgaaatctcgaaggattttctgcggcgaaccccttcgtgacgtgacccaatgggagaggcctcgccgtcgatcgccaaggacgtcaccgagttgatcgggaacacgccgctggtgtacctcaacaaggtgaccgatgggtgcgtcggccacgtcgccgccaagctcgagtccatggagccctgctccagcgtcaaggataggattggctacagcatgatcacggacgcagaggagaaagggctgattactccaggcgtgagtgttctgattgaaccaactagcggcaacacaggcattggactggcctttatggctgctgccaagggctacaaacttacactcacaatgcctgcctccatgagcatggagaggaggatcatattgaaggcttttggtgctgaacttgtccttactgacccactcttgggaatgaaaggagctgtcaagaaagcggaagagatacaagcaaagacacccaactcgtacattcttcaacaatttgaaaatccagctaacccaaagattcactgtgagactactgggcctgaaatctggaaagctacagcaggaaaaattgatggccttgtatctggtatcgggacaggaggtaccatcaccggtactgggcgatacctcagagagcaaaatcctaatgtcaagctctatggtgtggagccagtggagagtgctgttttgaatggtggaaaacctggaccacacaagattcaaggaattggagctggttttatccctggagtcttggatgttgatctccttgatgaaactctacaggtttcaagtgatgaagctatcgagactgccaaggctcttgctctgaaagaagggttgttggttggaatctcttctggtgcagctgcagctgcggcagttaggcttgctaagaggccagaaaacgccggaaagctatttgttgtcgtgttcccgagcttcggcgagcgctacctctcatcggtgctgttccagtccatcaagaaggaagcggagagcatggtggtcgagccctagagcacaaaattctgggcttctggcaaactatttcctgagacgttcaccatttccatcacagaaaaataaagctcgggtgccttctgttgatttcgacgtacatttccctgccgatggtgtccagcccactgttgtcgctggagaacacgtcgtttttagacttgtgatattttactactgttttgacactcgttgtatttctgtatatcgcgtcagactgtgaaataaaagcagtacagtgtgtttcttgc

SEQ ID NO: 23609 - DNA, 787 bp, Zea mays
  Clone ID: LIB3597-068-A11_FLI
gttttttttctgcttcgtaagttcgtggtcgatccagcgagcgagcgagcagaccggcggctaaccgcggagggagagatggcgcaggggacgctggaggtgcttctcgtcggagccaggggcctcgagaacaccgattacctgagcaacatggacccctacgcgcttctgcaatgtcgctcccacgagcagaagagcagcgtcgcatctggcaaaggctgtgaacctgagtggaacgagaccttcgtgttcaccgtctccgatggcgcagcagagctgttcatcaagctcctggacagtgacggtggcactgatgacgattttgttggtgaggcaacgattcctctggaagcagtttacacggaaggaaacatccctccgactgtttacaatgttgtgaaagacgaagaataccgcggagaaatcaaagttggcctcacgttcactccagaggaccagggcttctgaggaataacttggcgtgtggccgctggaactggaggcagcaggcagtcgtcttatgattcagaagcaaacgacggatcgattcccttgatgtactgcagtccagtgagcgtgcatctacaacttgtagaagaagcctgcaacatgatcacgggatcctgtactgcatcactctaaagcctagctaaaaccaccagctcctgtacttgatgccgggcgggcttgtcatgtactgaaacctacaataacggtcgccgaaccccactctttgatgttcagttaacttgtcgcggtttacaagaggccgtgtgactgctgcaag

SEQ ID NO: 23610 - DNA, 927 bp, Zea mays
  Clone ID: LIB3597-068-A5_FLI
ctctagggtttttgattttagccgccgccgctgctcatctcacatccctcgagaagacgcctgctcctcgccgatcgatacgatggccgtcttctccgacctccacaccgccgacggcctcaagtccctcgaggctcacctcgccggcaaaacctatgtgtctggtgactccattactaaggatgacattaaggtcttcgccgcggtgccgtcgaagcctggcgctgagtttcctaatgccgcccgctggtacgagaccgtctctgcggctgtagcctcaagattccctggtaaggctgttggtgtaaatctgcctgcgggatcagctcctgcggcagctgctcctgcggatgaggctgaggatgatgatgaccttgatctttttggtgatgaaactgaggaggacaagaaggcagctgatgagcgtgctgccgctgccaaggcctcttctaaaaagaaagaaagtggtaaatcctccgtccttatggatgtaaaaccatgggacgatgagactgatatgaagaagctggaggaggctgtccgcagtgtccagatggagggtctgacttggggagcatcaaagcttgtgcctgttggatacggcatcaagaagatgactatcatgttgacaattgtcgacgatcttgtgtccatcgacactctaattgaggaccaccttacgcaagagcccatcaatgagtacgtccagagttgcgacattgtggctttcaacaagatctagagttcagtttctgagtttgggcaacggcagcggctcagctcgtcaagtttgtgctgggatgccagtttatcccttctagtctattacagaaacgttgttcggagctgagtctattataaacatcttggtctgagtttattgttgagtggtgccagtttttttcaatatacatttatcttaaaaac

SEQ ID NO: 23611 - DNA, 548 bp, Zea mays
  Clone ID: LIB3597-068-C7_FLI
caatttcaaaactcagattaataaaattttcgcgttgttcctttctctcaattcatcgacgatgccgagcagatacccaggagcagtaacacaagactgggaaccagtagttctccacaaatcaaaacaaaagagccaagacctacgcgatccgaaagcggttaacgcagctctgagaaacggtgtcgcggttcaaacggttaagaaattcgatgccggttcgaacaaaaaggggaaatctacggcggttccggtgattaacacgaagaagctggaagaagaaacagagcctgcggcgatggatcgtgtgaaagcagaggtgaggttgatgatacagaaagcgagattggagaagaagatgtcacaagcggatttggcgaaacagatcaatgagaggactcaggtagttcaggaatatgagaatggtaaagctgttcctaatcaggctgtgcttgcgaagatggagaaggttctaggtgttaaacttaggggtaaaattgggaaatgattaaacgatgtcgtttatcttgtattttgttgaccaatgt

SEQ ID NO: 23612 - DNA, 1544 bp, Zea mays
  Clone ID: LIB3597-069-A4_FLI
tcagattcgcctaacagaccccgacgacttccaaactccaatccagcgttgagctcgacagctcgtgccaaactaggccgcagctggaaataccctccgctccacttacctgctgctggtgagcaccgcaagcaccaactcgcgcccaccgctccgctacaccagccgacgccatcatgtctaccgtcgccgccgcccccaccgtcgtgaaatcggctccggagctcgtcgcgccagtggggccaacacccggcggcaccctcccactgtcctccatcgacaagaccgcggcggtgcgcgtgtcggtggatttcatccaggttttccccccggccgtaggagcaggcggggaccaagacaccgccgtggccgcgatgcgcgacggcttcgcgaaggcgctggtgccgtactacccggtggccggccgcatcgcggacgcgagccccggggagcctgtggtggagtgcaccgggcagggcgtctggttcgtggaggccgctgcgagctgcgcgctcgccgacgtcaactacctcgagcgccctctgctcatccccaaggaggagctcctcccgcgccctccccccgaggagaagctcgaggacctcgtcctcatggcacaggtgaccaagttcgcctgcggcgggttcgcggtcgggatctgcttcagccacctggtgttcgacgggcagggtgcggcgcagttcctcaaggcggccggcgagatggcgcgggggctgccggcgccgtcggtcgcgccggtctgggaccgcgacgcgatcccggacccgcctaagctgccgcgcggccccccgccgtcgttcacggcgttcagcttcgtgacccaggtggtcgagatctcgccggagagcatcgcgcgcatcaaggacgacttcaaggacgcgacggggcagacctgctccaccttcgacgctgtcacggcggtggtgttcaagtgccgcgcgctggcgatggcgctccccgacgacgccgaggtccggctcggcttcgccgccagcacgcggcacctcctgcacggcgtgctaccgtcggtggacggctactacggcaactgcgtgtaccccgtgggcatcacccggaccagcaaggcgatccgtgaggcgtcgcttccggaggtggtcggcgtgatgcgggaggccaaggaggcgcttaccacgcggttcacggactggatgcgcggcggcgccaaggacgaccactacaacgtgccgctggactacggcacggtgacggtgtcggactggagccgcgtcgggttcaacgaggtggactacggcttcggcgaaccggggtacgtcttcacgctcaacgacgacgtcaacatcgtcgcgtcggtgatctacctcaaaccgcccgcgcccaagcgcggcatccggctcatgcttcgctgcgtcgaggaacctcacgctgcggcgttcgccgaggagctcgccaaattcgcgtagatggttgtttagtcttggtttatctatacttcattggtgtcggacaatcggacctcatcttatacaatattatctatactt

SEQ ID NO: 23613 - DNA, 751 bp, Zea mays
  Clone ID: LIB3597-069-C2_FLI
taggaaggcggcggccagcggcgagagcgcgagaggaggaggggtcggccatgacggggaaggcgaagccgaagaagcacacagcgaaggagatcgccgcgaagatcgacgcggcgacgacgaaccggggcggcggcaaggccgggcaggcggaccggctggggcaggacaagggcgggcacgcgaagctggcgtgccccctctgccgcaccccggcgcccgacatcaagtccatgcagatccaccacgaggcgcgccaccccaagctccccttcgagccggagaagctcctcaacctgcactcctccgcccccgctgctgctgccgccgccgccgccactgccgaggccaccacctccaagcccaagcccggcgtccgcggcagcctcaagaagtaagcttgctggcttggttggctcgcccgcctgcatggggcacaattcccttcggtttcaatcccatccgccgacccgatctataatcaatcaaatcgccgctctccggcctggcggctgccgcagtcggcctgcggtgtactgttagtctgctgctgatttccgttgttatactgctggtacatgtgtcgtgtgatagatgtgtcaactatatatcaatctcgtcgccggcagctctggcatgtttgagtatgtgttgctgctctgtggtgccggcgacgatggctgctagtactgttaatgtgatcgggtctccttgaacaatggcataaatatgttgcttgtttactttttcc

SEQ ID NO: 23614 - DNA, 1538 bp, Zea mays
  Clone ID: LIB3597-069-C7_FLI
ccattaccttgctgtctcggtctgtcggccatcgccggttgcgcagcgggcagcggctcacgtcgacggggaagactccggaggccacgggcgttacattctcctgccgtatttttgcgatccctggctaaccaaacaaatggtggagacatggattagtgcttatgggaaaatcatccccaacagggattgaagtgacagccagggatccactcatcccctgggtggaaaaattcaggttgtggattggattgctagctaccgaacaagccctcagcgtgctaatttcaatggaatcttggtagacaccactgaacttcttggtttccaattaagttcgagcatagagatcgtcttctctcacactgagttgccagtttattccgaaggtccttcaagctaagttctgatgatggctaaggccaatggagcagtccatgcatccacgaaggaacccttgttttcttttggtgtcatagctgatgttcagtatgctgatatcccagatggtcgctcattcctcggtgtcccaagatactaccgccatagcatcactgtcctccaaagggccgtcaacaggtggaacgaacaaggcaacatcaagttctcaatcaattttggtgacattattgatggctactgcccaaaggacaaatcattgtgggcggtgcagaaggtccttgatgaatttgacaagtttgatggcccgacatatcacatgattggcaaccactgcctgtataaccttccgcgcagccagctggtgtctctgcttaagattgcaacagattctgatcgtgcctattatgacttctcgccatgccctgggttcagaatcgttgttctggatgcttatgacttcagttgccttggctggccccatgatcaccctgtgactatagcagcaatgaagctcctggatgagaagaatccaaacactgataagaacagccctgatggtctggttggtgttgataggcggttcgtgaagttcaatggtgcagttggcaaggagcaggtgtcctggctcaatgatgtcctccaggacgcatcgacgcaacatcaaaatgtcatcatatgcagccatctcccaatggatcccggggcgtcttccccagcagctctgatgtggaactacgatgaggtgatggctattgttcaccagtacaactgtgtcaaggcctgctttgccggtcatgaccacaagggtggccactctgtggactcacacggtgtgcaccaccgcacccttgaggctgccttggagtgtcctcctggtaccagcgcttttggtcacgtcgaagtgtatcctaacaggctgctgcttgtaggttttgacagaatggctgatacagaggtccgtttttgagccattaagcggctttaattcgtaccgacttctactacttctataatgtttttgtctatatagattacagctgcagcagtccaaacgctggctttaatccgatgcttacacaaattcatgtgacttcattgcctgccgcataattccattgaaactggattattgcaat

SEQ ID NO: 23615 - DNA, 596 bp, Zea mays
  Clone ID: LIB3597-069-D4_FLI
ccaagtcctcctcgggttagggttccttagggttttgtggaggggcgatggcggcggctgatgtggagtaccgttgcttcgtcggcgggcttgcctgggccaccagcaacgagtcgctggagaatgccttcgcctcctacggcgagatcctcgactccaaggtcatcaccgaccgggagacggggaggtcccgcggcttcggcttcgttaccttctcctccgagaactccatgctcgacgctatcgagaacatgaacggcaaggagctcgacggccgtaacatcaccgttaaccaggcccagtcccgtggcggtggcggtggcggcggtggctacggcggcggtcgcggcggcggcggcggttatggtggcgggcgccgtgacggcggttatggcggcggtggcggctacggcggtcggcgcgaaggtggcggcggcggctacggaggcggtggcggctacggcggtcggcgcgagggtggcggtggcggctacggcggcggtggcggcggcggctggagggactgatgtgtgggcccatcctggcttcggccgagttatcttatctatctatagtatcgtgttaccgttcgcttc

SEQ ID NO: 23616 - DNA, 531 bp, Zea mays
  Clone ID: LIB3597-069-E10_FLI
gagaaccagccgaatccgagctgcggagcctcctcccgatccggctgtatccaactccgaggcttcgaggcatggccacgccacttgctcgtgcgccgctcccgggggccctacttcgccccgctcccgccgtccttcggttggccacgcgctgccgtttccgggccacggcggccagcggtgaaggcgcggctgggccgatgctgcgcacttgcaagaactgcaagcagcagtacgacccgtccgtgaaccacccctacgcttgccgtcaccacaccgcccacttcggaggagaaacaaagagaaaatttgagagcgtttatgctggagggaccatggatactccaaattcaggcaaagtgtttcagtattggcattgctgtgggtcggaagacccatttgatgtgggttgtactgcttctcctcactgttcttatgatgattgaatatctcaggcttgcattatgttcttgtgattgtacttattaattaatattttacatgaaatttctttccaatttgttattattt

SEQ ID NO: 23617 - DNA, 2143 bp, Zea mays
  Clone ID: LIB3597-069-E2_FLI
caaacgttcctctcctcttccatcgtcgtcctcgctcccggccccgcctgtctagtcccctcttctcgcgtgcaccccctgtactgtacgtgctaggcacacagctagctgcagccacagcagggcacagcaaatggtttccggtgcgggtcatggtgggtacggcggcggcgacgacgggcaggccgtggacttccggggcaacccggcggacaagtcgaggaccggaggctggctgggcgccgggctgatcctgggcacggagctggcggagcgtgtgtgcgtgatgggcatctcgatgaacctggtgacgtacctcgtcggcgagctgcacctctccaactccaagtccgccaccgtggtgaccaacttcatgggcacgctcaacctgctcgccctcgtcggcggcttcctcgccgacgccaagctcggccgctacctcaccatcgccatctccgccacaatcgccgccacgggcgtgagcttgctgacggtggacacgacggtgccgagcatgcgtccaccggcgtgcctggacgcccgcgggccgcgcgcgcacgagtgcgtgccggcgcgcggcgggcagctggcgcttctgtacgcggcgctgtacacggtggcggcgggggccggcgggctcaaggcgaacgtgtccgggttcgggtcggaccagttcgacgggcgcgacccgcgggaggagcgcgccatggtgttcttcttcaaccgcttctacttctgcgtcagcctggggtcgctgttcgcggtcaccgtgctggtgtacgtgcaggacaacgtggggcggggctggggctacggcgtctccgcagtcgccatggcgctcgccgtcgccgtgctcgtggccggcacgccccggtacaggtaccgccgcccgcagggcagcccgctgacggcggtcggccgggtgctcgccgcggcgtggaggaagcgccggctgccgctgcccgccgacgccgccgagctccacgggttcgccgcggccaaggtcgcccacactgacaggctcaggtggcttgacaaggccgcgatcgtggaggccgagctggcggggaagcagcgggcgagcgcggcggcagcgtcgacggtgacggaggtcgaggaggtgaagatggtggcgaagctgctgcccatctggttcacgtgcatcctcttctggacggtctactcccagatgaccaccttctcggtggagcaggccacgcgcatggaccgccacctccgcccgggctccggcgccggcgccggcggcttcgccgtcccggccggctccttctccgtcttcctattcctctccatcctgctcttcacctcgctcaacgagcgcctcctcgtgccgctggccgcccgcctcacgggccgcccgcaggggctcacctcgctgcagcgcgtcggggccgggctcgcgctctccgtcgccgccatggccgtctccgcgctcgtagagaggaagcggcgcgacgcggccaacgggccggaccacgtcgccgtcagcgccttctggctcgtcccgcagtacttcctcgtcggcgccggcgaggccttcgcctacgtgggccagctggagttcttcatccgcgaggcgcccgagcggatgaagtccatgagcaccggcctcttcctcgtcacgctctccatgggcttcttcctcagcagcttcctcgtcttcgccgtcgacgccgccaccgcgggcgcgtggatccggaacaacctcgaccgcggcaggctcgacctcttctactggatgctggccctgctcggcgtcgccaacttcgccgtcttcgtcgtcttcgccaggcggcaccagtacaaggccaccagcttgccggcgtcggtggcgcccgacggcaccgggcacaaggagatggacgacttcgtcgcagtcacggaggccgtggaaggagtggacgtgtagggcgcgcatgtcaggctcacacttcatcggtgggtggcctctgctgtttaattttgcctttgggtagtgtgtatgtgtatggcgaagttttctttctcttgccagtttccagtttgctgctacttcggcctgctctcctgtaaataacataggagacatgctaattgaggccaagtctttatccagttagatcaacaagatattgaattgggc

SEQ ID NO: 23618 - DNA, 424 bp, Zea mays
  Clone ID: LIB3597-069-F1_FLI
gccgcgcgggctgggcggctgggcggggatgtacgccgccaacttcttcgtggtggcgtgggtgctcgtcgtcggcttcggcttcggtggctgggccagcaccgtcaacttcgtccgccaggtcaacacctttggtctcttcaccaggtgctaccagtgcccaccgaggcactgactcgatgatcgaccaccaagattaatatatcaacaaattcatatgcatgcttgaatttcttgaggaaacatatgcatatgcctagtcatagagagagagagagacatcacaagatcatgacgaagagggtgttcaatttccatgtcgacgtatgtatgacgacgatccacatggtgtgtccttgtcggtatgtatgcgctacgaacggatgtgtgtatctctcgttaagatatatattgatattgatcg

SEQ ID NO: 23619 - DNA, 747 bp, Zea mays
  Clone ID: LIB3597-070-A6_FLI
ctccgacatcgtcccttcgtccccacgagcaaccgataatccgccggcgttgagatgttggtttatcaggatctcctatctggcgacgagctcctgtcggattcattcacctacaaggagctcgagaacggcgtcctgtgggaggtcgagggaaagtgggtcacccaaggtcctgttgatgtggacattggtgccaatccatccgccgagggtggtgaggacgaaagcgttgatgacacagctgtgaaggtggttgatattgttgacacattccgtctacaggagcaacctccttttgacaagaaatcatttgtgtcttacatcaaaaaatacatcaagaatctcactgctgtgttggagccagagaaagcggatgagttcaaaaagggtgtcgagggtgcaaccaagtttctccttagcaagctgaaggacctccaattttttgttggtgagtccatgaaggatgatgcgtctgtggtattcgcctattacaaggatggtgccactaatccgacattcctctatttctctcatggtcttaaggagatcaagtgctaggcgtgcggcgaaattagttacccatgttgggtactatctatgtactattattatatccaaaactatagttgtcctggctgaattgaactcaaaagggtttgtttgagaaaaaattgtcccaagattggattgcttgttaaagctcaatattgttattgaagtgttattgcttagttgtgattgcctttc

SEQ ID NO: 23620 - DNA, 929 bp, Zea mays
  Clone ID: LIB3597-070-D2_FLI
gtcaacgtgtcttccttcccgcggtctctccgccgcctcccagatccggcggccatggcaaggaacccgggctgcaccgtcttcataggtaacttggatgacaaggttcctgagagggttctgtatgaaattcttattcagatctctgggcaagacaaaccctcattaaatggcaatatccctgtaactcctaggttaaactctgtaccacagccaaagcctcatcaacctatgaggtctagtgatactcctttgccacagcatgcagcagtgaatggcaggaatgccgggtatggtatcccaccaaatcattcatacgacacgcacactcaagcactgtcgagtgggttaccgaatagaggactaagcaacggtacatatgaatatagtaggcgtgtatttggttctgttctgaatgatgttagccgtcgagctaccagggaaccaatcccgtacccgtcctactagcatgttgagccccggtgactgtgactctgtgctgacagaaaatatttctgaagatgttgtctgttgtgtcagccacctgtaatatctctgtactcaccatttcatgcctgtaaatatgggttatggtggtaggacatatgcttgtttttttggttctgcttcgcattgtagtgagacttgtccctgcttgttaggtccttctcatcccctagtgtgaaggccatgcctccactagtatggctgcactaggaaataccattcctagttacatgaatgggtggcaatatgctggcaattgtgttttaacattagtgccattagctatttcaatgttacagcagggcgtgtttgtgtttgcgatattagtatttggtggattttgtgcttctcatcatgtatctgggacatctgaaggagaaacattgttttaaaagaaaattgtgaaataagtcccacaattt

SEQ ID NO: 23621 - DNA, 732 bp, Zea mays
  Clone ID: LIB3597-070-H2_FLI
ctggcttctcctccccctcttaccaagtcctcctcgggttagggttccttagggttttgtggaggggcgatggcggcggctgatgtggagtaccgttgcttcgtcggcgggcttgcctgggccaccagcaacgagtcgctggagaatgccttcgcctcctacggcgagatcctcgactccaaggtcatcaccgaccgggagacggggaggtcccgcggcttcggcttcgttaccttctcctccgagaactccatgctcgacgctatcgagaacatgaacggcaaggagctcgacggccgtaacatcaccgttaaccaggcccagtcccgtggcggtggcggtggcggcggtggctacggcggcggtcgcggcggcggcggcggttatggtggcgggcgccgtgacggcggttatggcggcggtggcggctacggcggtcggcgcgaaggtggcggcggcggctacggaggcggtggcggctacggcggtcggcgcgagggtggcggtggcggctacggcggcggtggcggcggcggctggagggactgatgtgtgggcccatcctggcttcggccgagttatcttatctatctatagtatcgtgttaccgttcgcttctgtcaccgtgttagtgtccgttctacctttggattaggtgttggtaccctgttgttcgctttggttgctcccgctatgaaacgagacgagagaagaatgagcaaggtttttgtt

SEQ ID NO: 23622 - DNA, 1121 bp, Zea mays
  Clone ID: LIB3597-071-E10_FLI
aacagccgggttccacgaccaacccaaccgcgggggaaaggggaaaaccccacggcccggagcaacccttgggaaagtcgtcgacgccgttgagttcgaggcgaccggcggctcgccgccccgccacagcgccgctgcgatttcttctgatccctgtggctcagcgcggagggttaaatggcaaatagagcaagatggatgatgaagtacgaaaagggtcttgttgatatacttcatgagaacaatacttcacattatcgtacccaaaacggttggagaacggaggggtggaggaaaatcgttagggatttcaatgtaaggtaccccgaagcaaagtttagtaaaatgcaaatccaggaacatgagactcaattgaagaaagattataagttgataaaatctatcctccaacgtgatggtgtctcatgggaccagagtgcatccatggttagaacaacagatgaaatctgggatgatataatcgaggatatgcccaaggcacggaagtaccaaagtaagagctttccattgctcgactcactagaactgttatttgatggtccaattcctgaagggggacagaaatcgccttccagcgtacctcagaatgttggtgaaaatgttgacgatggaggcaacaataccagcacagtcccagcaaacagcattaggacctcaaggcatagatgatctcgacacgctgcaaaaacgcggcgaagaggtgctggaacggctacagcatggcgcggaccgaaggctaccgagagctgatgaccaggcgcagtcgagttcttgtgtagaactgcagagggacaggcgcaagaagcggaaggccccggacgtccagcagatgatggagacctatttgaatttcaggatgaagcaagctcacgtcaaagaacaaagagcgaaggacgctggccagttcacgatttcaggctgtatcaaggctctgcacaccatggccgatgtgtcagacgaggtcaaggtgttagcctctgatgttttcaaggacgctgagaacagggagatctttctctcctatgaacccaggctgcgcagcttgtggctgaagagggaagttggcaagctactctcctgatagtggtgttttgtttgtt

SEQ ID NO: 23623 - DNA, 1541 bp, Zea mays
  Clone ID: LIB3597-071-E7_FLI
cttgtagcatttccttccgctgcgaacacccaaacggcagctttctactaggggaagagaaacgttttcttgtctcaacgatcgatgcgtcgaccgcacgagcagctgcctagattggcgtcaggtctcgctctactggcctgcctcgccgtgctcgctcgttctcgcgttgccggcgctggtggcatgccggcgaccttcatcttcggcgactcgctcgtggacgccggcaacaacaactacatcgtctccctgtcgaaggccaacttccccccgaacggcatcgacttcttgggccaccagcccaccggccggtacacgaacggccggaccatcgtcgacattctagggcaagagatgggactgggagggttcgtgccgccgtacatggccccggagaccacgggcgacgccgtgatgagaggcgtcaactacgcgtccggcggcggagggatcctcaacgaaaccggcagtatcttcggtgggcgcctgaatctggacgcccagatcgacaactacgcgaacagccgccacgacctgatggcgcggcacggggaggtggaagcggtgagcctgctgcggggcgcgctcttctcggtcaccataggctccaacgacttcatcaacaactacctcacgcccatcttctccgtgccggagcgcgccacgacgccgccggtcgccttcatcagcgccatgatcgccaagtaccgccaacagctcaccaggctgtacctcctggatgcccgcaagatcgtggtggcgaacgtggggccgatcggctgcatcccgtaccagcgcgagacgaacccgtcggccggcacggcctgcgccgagttcccgaaccggctggcgcgggcattcaaccggcggctcagggccctggtggacgagctgagcgccgccctccccggctcgcgcttcgtctacgccgacgtctaccgcatcttctccgacatcatcgccaactacggatcccacgggttcgaggtggcggactcggcgtgctgctacgtcggcgggcggttcggcgggctgctgccgtgcgggccgacgtcgctgtactgcgcggacaggtcaaagtatgtgttctgggacccctaccaccccagcgaggcggccaacgcgctcatcgcccgccggatcctcgacggcggacccatggacatctcgccggtcaacgtacgccagctcatcgtcacttgagttcaaccgttggatcaccagccggtgctacggctcagcgctacatattgatttgcattcactttttccgaaaagagattagtttgccttttttcaacaaaaaaaagagatcagtttggggtgattcaaactccggtgtaacatcatttttcgtgtttagatagctagtagtaggcagtagcacagtatcttatctcgtgcgcgttgttctatttttatctctgtgccgtgcgttctagttcaccatttgaactcttgagacgtgaacttatgaaatgttttaggggttgtttggatacatcaactaattttaggggtgtttgttttctagggac

SEQ ID NO: 23624 - DNA, 1120 bp, Zea mays
  Clone ID: LIB3597-071-E9_FLI
cacacactatttatgtctcatcagcgtgcgcacgcgcctcgctatagaggaacaaccccgccccgccatggcaaataacatgccgtcgtctcaaatccacagccgcctgcgctgcagctgcagctggctgctgcttctcgtcctccatttctctagctcagccagcagggccgccggcggcaaggtgccggcgctgatcgtgttcggggactcgacggtcgacccgggcaacaacaacttcatccccaccgtcgccagggccaacttcccgccgtacgggcgcgacttcgaccggggcgtcgccaccggcaggttctccaatggccgcctcgtcacggacttcctttccgaggcgttcggcttgccgtcgtctgtgccggcctacctcgaccccagctataccatcgaccagctcgccaccggggtcagctttgcctccggtggcaccgggctggatgatctaacggcgaacatcccatcagtcatccccatgagccagcagctggagtacttcagcgagtacaaggcgagactgaaggtcgcgaagggggagtccgcggccaacgagatcatcgccgaggcgttgtacatcttcagcatcggcaccaacgacttcatcgtcaactacctcaccttccctctccggcgagcccagttcaccccgccggagtacgtcgcctacctcgtcggcctcgccgaggcggccgttcgcgacgcctacggcctcggcgcgcgcaagatggagttcaccggcctcgccccgttcgggtgcatccccgcggccaggacgctcaactacgacgaccccgacgagtgcaacgaggagtacaaccggctggcggtgaggttcaacgccgcgctgcaggaggccctgaggaggctcaacgctgagctcgtcggcgcgcgggtggtctacgcggagacgtacagcgtcttgtctgacatcgtcgccaatccgtcggactacggttagtggtggtgatcccacatctatcttcacaacaaatcaacaatatactagttcttgcgttggattggatgaactctagaatagcactgacaccgagtcatgcatgaacattgtccaaaacgttgaaatgactcgagcaaattgttttgc

SEQ ID NO: 23625 - DNA, 762 bp, Zea mays
  Clone ID: LIB3597-072-B11_FLI
cagaggcccattccgccgaggagtggcacgaggagagacgacaggtgcggggatggggtcagttttgctgccaacgctgcggctgaagagtgaggtcgacgccgccatccgcgacaccctcgataaggtcctcgttctccgatttggtcgcgccaccgacgccacttgcctccacctagatgacatcctggctaaatcttcttgggacatatccaagtttgctatggtagcattagttgacatggactctgaggagattcaagtttacattgactactttgacatcactttggttccagcaaccattttcttcttcaatgcccatcacatgaagatggattcagggacacctgaccacacaaaatggataggttcttttagcagcaaacaggactttatcgatgtagttgaggcaatattcagaggtgcgatgaaaggcaaactgatagtgtcttgcccccttcctcctgagaggataccaagattccagcttcttttcaaggatgtctgagaaaactgcaactcatcacgtgcacacaatcagctacctagcccaaggtaactaggtaagtagaaaagctgaagcttctataagagaagcacaacagaggggacagtgcaaggcgtgttcgtgcttcgaagaaacctaattgtgctggaaacagccattttcattctcaagattgtttgcgcaaatctctgcactaatctaatgtttttcttgtccatattgcatgtttaagcttgtatttaatcacgttc

SEQ ID NO: 23626 - DNA, 849 bp, Zea mays
  Clone ID: LIB3597-072-H12_FLI
gtttgaatgtcttaatctaattttagcaatcagctctagtacatttaaacaactcttaattacttctttttgcgccatagagttgtcttttacgccgcggatgcctctccctgctctgttctagtgttcttccttttgtccgaatagtcaaagctcaaaccaagcaatagcagtccttgctcctccaacttccctcctggcttctgcccctttgtctgcgctcctcacgccgccccccgccccagcctcacacccgcattccccagatctccatggactcgacccctcccacggacccggcggcctcctgcttggcctccgcctctgcggcggtggcatcgggggacgtcgccgcgatgctgccggactcgccgccgcggcgtggggcgggccaccgccgcgcacagtcggagatcctcctcggcggcgccgcgctccccgacgacctcaccttcgacgcggacctcggcgttgtcggggaggcctgcgtggccggcgacgaggatgaggaggatgacgacgacgacgaggaaggggtcggcggcgctggcggcagccggatgttcgagatgttcctcgagaacggtggcaagctcccaggaccgccggagccgtcggcgcatccgcattcgacgccgccgcggccacggcaccatcacagcatgtctatggatgggtccacgtctttgtttggttccgccgccgccgggacgcctgggaggtcgggcgctgatgccaagaaggctatttccgacgctaagctcgccgagctcgcgcttgttgaccccaaacgtgccaagaggtgagaatttaacaacctgtggaggagagcttcccttgttgtatttg

SEQ ID NO: 23627 - DNA, 1015 bp, Zea mays
  Clone ID: LIB3597-073-B4_FLI
caacgagaagagcggcggcgcgggcggacaaggagcaggcggaggaggagctgtgccaagccacaatgggtatctcacgcgactcgatgcacaagcgccgtgccaccggtggaaagcagaaggcctggaggaagaagcgaaagtatgagcttggtcgccagccggccaacaccaagttgtcaagcaataagacagtgaggagggtccgtgttcgtggaggtaacgtgaagtggagggctcttcgccttgatactggtaactactcatggggaagtgaagctgttacccgcaagacccgtatcctcgacgtggtctacaatgcatcaaacaatgagcttgtgaggacacaaacccttgtgaagagtgccattgtgcaagttgatgctgccccattcaagcagtggtacctcactcactatggagttgacattggtaggaagaagaaaacccctgctgcaaagaaggataatgctgagggacaagaggttgaggcagcagctgaggaaacgaaaaagagcaaccatgtcacgaggaagcttgagaagcgcaaggagggacgtacccttgacccacacattgaggagcaatttggcagtggacggttgctggcatgcatttcttcccgccctggacagtgtggccgagctgatgggtacatccttgagggtaaagagcttgagttctacatgaagaagctacagaggaagaagggcaagagcgctgtagcttagagcattctcatggattgtcttgcaccgaaatgtgtgtcctgatgagtacacttttttttggttagtcgtctcaagttcagagcgttatgccatgttttcagacctgattagtacactgttttctaaaagcgattgagctctagtccaatgtattgataatatctgctgttgtcctattgcggtgatgatgatttgccctgttcgctagctgcaatagttcctatttgttgatgaatttgtttgaagcataaacgcagaacatgtcgtaaagaaaacctttctgt

SEQ ID NO: 23628 - DNA, 617 bp, Zea mays
  Clone ID: LIB3597-073-C1_FLI
agaccaggccgaaggaaaacaatcctgaaaccaagccatgggtctgcaggaggaatttgaggagcatgctgagaaggcaaagaccttgcctgagagcacgagcaatgagaacaagctgatcctctacgggctctacaagcaagccacggttggagatgtgaataccgatcgtccgggcatattctaccaaaaggacagggccaagtgggatgcctggaaggctgttgaaggcaaatcgaaggatgaggcgatgaatgactacatcaccaaggtgaagcagctccaggaggaggctgccgcctcttaaaagtctcttaatagtgttgccaaacagctatttgtcagatgagctttgtgccatttcctcattagaagtatatcattcgatccattggggatctgtgaaccatgtacctgtttatgtaacttttttttttttcgaaagagcgcaggaggactgcgcacccatatattaaagtagagggaaaataaagggccataatgatgatatccatctatctatctatgtaactggtttatgtaccatgtacctgtttatgtaactggttaccagtgttatccatctatctatctatctgtgaagacttgagtcttct

SEQ ID NO: 23629 - DNA, 758 bp, Zea mays
  Clone ID: LIB3597-073-C4_FLI
cagatccaagaagagggaagagcaccaaggaccttcggcgcccgttcaggatccacatcttcccgagcgagttcttggttgacctcttcctcttcggaccacctccaaggctcttggtgtagcttgccactctcaccaatcaagttttcatgtctgatctcgacattcagatcccaactgccttcgatcccttcgctgaggccaatgctggggactctggtgcggcagcagggtcaaaggactacgtacacgtgcgcatccagcagcgtaatggtcgcaagagcctgaccaccgtccagggattgaagaaggagttcagctacagcaagatcctcaaagatctcaagaaagagttctgctgcaatggtacagtggtccaggacccagaacttggacaggtcattcagctccagggtgatcagaggaagaacgtctcgaatttcctcgtccaggccggcattgtgaagaaggagcacatcaagattcatggtttctgagcaaccgccgggtccatagcaaaccaaccctgcatgcagggccagcttattatatataatatctgaggtggagcatatctatctggctgtgtactgcaagcaggcctagtacgccgcctgcgcgttcctcctattacacatataggcccctccctgcgtgtatgcttgttaccgtcgtgtcgaaccttgtactacgaggctccatcgaacatcgatggcttgcttctttatcagaacatgtttgaataaacgctatttggt

SEQ ID NO: 23630 - DNA, 493 bp, Zea mays
  Clone ID: LIB3597-073-E10_FLI
cttcgccgcgcacgcctcctgaagcttctagacgttcgaggaggaggaggggaggctcccgccgccgccgccgcagccatggcgtccaccaaggtgcagcgtatcatgacccagcccatcaacctcatcttccgtttcctccagagcaaagcgcgcatccagatctggctcttcgagcagaaggacctccggattgagggtcgcatcatcggattcgatgagtacatgaacttggtcctcgaagatgctgaggaaatcaacgtcaagaaaaacactaggaagacactgggccggatactcctcaaaggtgacaacataactttgatgatgaacagtggcaagtgaaagttcttatggcaggaacgatgtttggtgctcgcgttgagtatttctggcacgttgtactccatccattcagacttacatgtacctgctgttaatgacctgagtaaaattatgctagatgctggccacttgtgtgtgccatattggc

SEQ ID NO: 23631 - DNA, 849 bp, Zea mays; identical to SEQ ID NO: 23626
  Clone ID: LIB3597-073-E12_FLI

SEQ ID NO: 23632 - DNA, 1494 bp, Zea mays
  Clone ID: LIB3597-290-F6_FLI
cgcacattcttggcagctactctactcaatggcgctgtcctcctccggccacccggcgacgacccgcctgctcttctcgcttctgctcgtgggctcggcggcgggcttgccggagcgggcggccatcgacagggtcaaccggcgaggcccttccctcggcctcgtcatgtcctacgtcgacgaggccaccgcgctgcaggcctccggctacttccagccttggcgtgccctccctttcgttgacctctacggacggcggtatcacatcggcagcattcggggcgtgaacgtgatatacgcactgacagggcaacgcagggtacttattaacaaggaacccatctgcttttgcatctgcattttaccttgtgtcgtgtctgtgtatgctctgatctaaccttcctctggtcttccagctgaacgccgccgtcacagtacagacgctcatcgacgtcttcagcgtgtccggcattgttcactacggcacggcagggagctgcaacgactccatctccttcggcgacgtcagtgtccccaggctcgtcgcctacacgggtgcctggacatggaagaagttcagatcaccgagagagtcatcggcggaattgagcttcggcgaatacaacgtcccagacggaggaggaggggagaatctgctcggatccctcaagtacagaaacgaggagctttactcggccggcaagcccatggaagaggtcttctggctgcctgtgcattcggcatggttcagaactgcagaacagctcacggtggtgactagatagactaccggcatcatcagtaacataatactaagtaactgcgtaacagagatactacatgtatgtctgtgcagtaacagtgacattattttctgcaggtggaacttgaaagatgcaacgacactttctgcttacccacagctccacggattgtctacgggctgaaggggtcgtcggctgacatgttcctcgacaacgcggaatacaggaagttccttttccaagagtttggggtgtctacaatggacgaggagagcgcagcggtggtgatggtcagctcagctcccttactcatacagtcatacttgcactacgtacatcccgaccatgtatgttacttactacttactagtaagataaatttagcgctcaactctgatgatcagacagcaacgtcgcctggcatacctgtgatcgtgttccgaggagtgtctgacttggctggaggggagccgacatggtcgtccacaagcctgatgaacctggcgtccattaatgcattaaaagtggcggtagagttcatcgctgcagttggcaagcatagttcaaccgcatcagtaaaaagatgatcgccatcctcgtccgttgctgctccaaaataggcctgcggcagtaactggaagttacttatgttcagaatgatgtcaaaccttgtggcttcaagtcataatataatacgtcctctctaataaagcggtaggaagattgacgt

SEQ ID NO: 23633 - DNA, 711 bp, Oryza sativa nipponbare
  Clone ID: LIB3598-014-G11_FLI
gcggaggacatttggcaggttcttgcgaaggcaaaataccaagattgggaaatacactccactaagagagtttggaagatgcaaagtttaaaggaagcatgtgaaaatgctttgcaggagcaccactttcttagtggcacacttgtgggagatggctcaaccaatgagtatacagaccaactgaaattgttatcagaagtcttcaccaaagctacaatcgacgatacaccaacagatgtgcctgactacctttgctgccaaataacctttgagatttttagagatccagtgatcacacccagtggtataacgtatgagaggtccataatccttgaacatctttgcaaggtgggcaatttcgacccggtgacacgagagcttctgaaagagcatcaattggttcctaacctggctataaaggaagcagtccaagcctacctcaagaatcacagttgggcctacaagttgaactgatgatgttgctctgtagttgcttagtgctaacaacaggtgttgataaaatgttgggttgtcaagggggaattctttgcttttctgatgtaatgtataagcaagttcattcgtgccctcatggaattgattgattcttgggcaacttctgacgaaccttggacaattgtacataaaacatcatagcagaaccttggacggtttcagacataccgtgccaaaatgacaattctcagtgac

SEQ ID NO: 23634 - DNA, 978 bp, Oryza sativa nipponbare
  Clone ID: LIB3598-021-G1_FLI
acagaaagatcacattattgtacaaaatgcaacagcatacagaaaacggcatcgtgtggagagctacagcaaacacactgaaaaacatcactgaaaagtgctatgttgacatgggctaatcggtgtccgtacgccggcggctagctcagagctcgtcgaccgtgcggggcttttgcttgccgtcgacgtggcggtggtgatgcttcttctccttgccgtgatcggcggcgtcgtcggcgccggtgacgcgctccttcacctcctccaccttctccttcgccttctccttcaccttctcgtacccctcgttcgccttctccctcgccgcctccgccgtctcccacgcggcgtccttcgccgcctccgccttctcccacgccgcgtccttcgccgcgccggccttccccttcgccgcctccttggactgcctcgccttctcgccggccgcctccgccttctcccgcgccgcgtccttcgccgccccggccttctccgccgcggcgtccttcgccgagcttgtcttctcccacgccgcgtccttcgccgacccggccttctccgccgcggcgtccttcgccgagctggtcctctcccacgcgctgtccttcgccgccccggccttctccgcggcggcgtcggtggattgccggagcgtctcctgcgccttgccggccttgtccctggcggcgtcggtggattgccggagagtctcctgcgccttgccggccttgtccttggcggcgtcggtggattgccggagagtctcctgcgccttgccggccttgtccttggcggcgtcgtacccctcgccggccttctccttggccgtctcttcgaccttggccttgccctgcttcgactgctcgtgcacctcggcgcccctctcgccggccgcctcggcggcctccttggtcttgtgcttggcctgctccgctctcctggtcgcctcgccggcggcgcccttcgccgcctccttcg

SEQ ID NO: 23635 - DNA, 728 bp, Oryza sativa nipponbare
  Clone ID: LIB3598-031-D8_FLI
gataaagaatcttgggatttgaacaataccgagaagattgagactgctggggcaaagaaagaagaggggaatgcattgttcaagctgggcaaatatgtcagggcttcaaagcgttatgagaaggctgcaaaattcattgagtatgacagctcatttagcgaagatgagaagaaacaatccaagcaactgaaggttacctgcaacttgaacaatgctgcctgcaagctgaagctgaaagattacaagcaagctgagaagctttgcaccaaggttctggaacttgacagccaaaatgtcaaggctttatacaggagggcccaagcttacatgcaacttgctgacctagagttagcagaggtggatattaagaaggcacttgaaattgatcctgataacagggatgtgaagttgacatacaagaacctcaaggaaaaggtcaaggagtacaacaagaaggatgccaaattctacagcaatatgttcgccaagatgaccaagcagccagccgaagacggcaaagctggatctggagctgaatcgaagcaaggatcggaacctgttactgctgcctaaggacaggacactcacgacatatcttagattttgtgtgctggctaatctttgttctagtggtgcactgatgagaaacgttacttcccaagttgtcgggcgatgatgattcttgttgagattttcaaattgcaatccatatttgaaccaatctcgtc

SEQ ID NO: 23636 - DNA, 1040 bp, Oryza sativa nipponbare
  Clone ID: LIB3598-036-A8_FLI
cttgtgagttggtaattgatagtagcaagacaatgtgtgggggagcgatcatcgccgacttcgtcccgcccgccggcgcccgccgcgccgctgcctccgacatctccgacaacgccgtcctctccgctgccggtgccggtgacgagtcgttcgcggcggccaaggcgccggcgccggggaggaagacggcgtaccgcggcatccggcgccggccgtggggacgctgggcggcggagatccgcgacccgaggaagggcgcccgcgtctggctcggcacctacgccaccgccgaggaggccgcccgcgcctacgacgtcgtggcgcgcgacatccgcggcgccaaggccaagctcaacttccccccgaccatcggcgccgccgccgcgccaccgccgcccaagaagcgacgcaaagccgccgccgcggcgaaccaccaccaccaccaccaccagcaggagagctcaggctcctcgtcggcgtcgtcgctgcctcccaccccgccgccggccgccgagcaccagctccgcgagtgcatgtccgggctggaggcgttcttgggcctcgaggaggaggaggacgacggcggcgccggtgagccatgggacgccgtcgacatgatgctcgagtaggctcgccgggaatggcagcgttgccatgctcatgcatccaagcttattcatgcatgcagcagcaagatatacaactttagtactactactatgttaattactacttactgcgtaggtaaatgaaataaaatggggttggttaattagggtgttcttctgggaatccttggctttgctaattgctagtactactatgtactttggcgttaagcattgcattgccaggtgatgcatgtcatgtaatcgtggtaattatatggccgtcctcctagagctagctagcagattagatttactatataaagtggtagtagaaatatatgtcctcctagagctaactagtgtcttgtaatgatttcagacttcttgggcaacatgagcaatgcatttcgacttccactttacatctat

SEQ ID NO: 23637 - DNA, 828 bp, Oryza sativa nipponbare
  Clone ID: LIB3598-036-C6_FLI
gggaaaaacacagtaacttgtttcaaacaagttctctacagaatacaaacaagttctctacagaaagatcacattattgtacaaaatgcaacagcatacagaaaacggcatcgtgtggagagctacagcaaacacactgaaaaacatcactgaaaagtgctatgttgacatgggctaatcggtgtccgtacgccggcggctagctcagagctcgtcgaccgtgcggggcttttgcttgccgtcgacgtggcggtggtgatgcttcttctccttgccgtgatcggcggcgtcgtcggcgccggtgacgcgctccttcacctcctccaccttctccttcgccttctccttcaccttctcgtacccctcgttcgccttctccctcgccgcctccgccgtctcccacgcggcgtccttcgccgcctccgccttctcccacgccgcgtccttcgccgcgccggccttccccttcgccgcctccttggactgcctcgccttctcgccggccgcctccgccttctcccgcgccgcgtccttcgccgccccggccttctccgccgcggcgtccttcgccgagcttgtcttctcccacgccgcgtccttcgccgacccggccttctccgccgcggcgtccttcgccgagctggtcctctcccacgcgctgtccttcgccgccccggccttctccgcggcggcgtcggtggattgccggagcgtctcctgcgccttgccggccttgtccctggcggcgtcggtggattgccggagagtctcctgcgccttgccggccttgtccttggcggcgtcggtggattgccggagagtctcctg

SEQ ID NO: 23638 - DNA, 1489 bp, Oryza sativa nipponbare
  Clone ID: LIB3598-041-F2_FLI
gcagcagcagcacagaagcagcttcccttccttccgtatagtgtaacgtacgcatcaccacctcgcgggctggagatggagaaggagtaggagtaggagtgacgcctccggatttcccacgcctcgacgaacccccacaaccccgagatcgatcgggaggaggacgaccacgcccttcacctgcccccaaatcttgccccgatctcccccgaccgcggcaatgggggccgcctccgacgacgccgtcaagcagctcgccctcctcatggaccaagaatgtgcaccagggctatcctaaagaaacattattgcgtttccttaaggccagagagtggaacgtatctaaggctcataaaatgcttgtagactctttgaattggaggattcaaaacgaaatcgatactgttctggagagacctatagtcccagtagatttgtacagatcaatccgtgattcacaacttgttggactctcaggatacacaaaggagggtctcccagtttttgccgttggtgttgggcagagcacatatgacaaagcttcggtccattactatgtgcaatctcatattcagattaatgagtaccgtgatcgtgtaattttgcccatgttgacggaaaaatttgggcggcctgttaccacctgtgtaaaagttttggacatgactggcttgaagttgtcagcactgagccaaatgaagatgttgacttcaatctcaacggttgatgatttgaactaccctgaaaaaacggagacgtactatgtagttaatgttccctatatattttctgcatgttggaaggttgtgaaacccctgttgcaggagaggacaaaaaagaaggttaaagttttgcatggttgtggaagagatgaacttctgaagattatggactattcatctcttccacatttctgccgccgggagggctctggctcatccaaacattcatctactgacgctgatgactgctactcacttgaccatcctttccacaaagagctttatggtcacattgaggagctagcatcgtgcaaggaactcatcaagatgggatcattacatgtcagcattcccgagcctgaccccgatgacgcaaagattgttgaggtcatccaagctgaattccagaagatcggtgagcagaatggatccgccaatggtcacaaggtttagccaaaacattggccatctgcagaacaccttaaccagtgctggtgacttctgaatctgatgaagttgattactactgtccatgtcagtaattttgttgacaaccccccattttctggggggaatatagcagcagcagcagcagcaaggtcttgcatcattatattcccatgatgatgcaaataaacagtggtgcagccttgagttgatagaggaagagatgaaccagtcaccagtgtatatgaaattagatggaattgaaagccataaacatgtttttgttagtgtaacttacatatgttaaagctgttacaagg

SEQ ID NO: 23639 - DNA, 737 bp, Oryza sativa nipponbare
  Clone ID: LIB3598-050-D10_FLI
ggcgtcggaggcggcggggcacgccgccggcaaggggcaggataccaaggaggcgacgaaggagaaggcgcaggcggcgaaggagagggcgtcggagacggcgcaggcggcgaaggacaagacctccagcacgtcgcaggcggcgagggacaaagccgccgagagcaaggaccagaccggcggcttcctcggcgagaagaccgagcaggccaagcagaaggccgccgagaccgctggcgccgccaagcagaagaccgccgagacggcgcagtacaccaaggactctgccatcgccggcaaggacaagaccggcagcgtcctccaacaggcgagtgagcaggtgaagagcacggtggtcggcgccaaggacgcggtgatgagcacgctggggatgaccgaagacgaggccggcaccgacgacggcgccaacaaggacacctctgccaccgccgccgccacggagacgacggcgagggatcactagacgccgtgaatgatttccctttgggtctatttatgtatgttttcacttcaaattcggtgcaagtttgaatttgtttttgtgtcgttttgagtctgtatcgatgctgtatgaagtggtggtcgtcgcaggggaggatttctgacgggtgtgggtgatgtgtactgatgatgttcagttgttttcgtcagagtttctcgtctgtgttctgtttattatggcgtaacaataataaaagtttgggcctaaagcccgc

SEQ ID NO: 23640 - DNA, 786 bp, Oryza sativa nipponbare
  Clone ID: LIB3598-054-G3_FLI
acagaaagatcacattattgtacaaaatgcaacagcatacagaaaacggcatcgtgtggagagctacagcaaacacactgaaaaacatcactgaaaagtgctatgttgacatgggctaatcggtgtccgtacgccggcggctagctcagagctcgtcgaccgtgcggggcttttgcttgccgtcgacgtggcggtggtgatgcttcttctccttgccgtgatcggcggcgtcgtcggcgccggtgacgcgctccttcacctcctccaccttctccttcgccttctccttcaccttctcgtacccctcgttcgccttctccctcgccgcctccgccgtctcccacgcggcgtccttcgccgcctccgccttctcccacgccgcgtccttcgccgcgccggccttccccttcgccgcctccttggactgcctcgccttctcgccggccgcctccgccttctcccgcgccgcgtccttcgccgccccggccttctccgccgcggcgtccttcgccgagcttgtcttctcccacgccgcgtccttcgccgacccggccttctccgccgcggcgtccttcgccgagctggtcctctcccacgcgctgtccttcgccgccccggccttctccgcggcggcgtcggtggattgccggagcgtctcctgcgccttgccggccttgtccctggcggcgtcggtggattgccggagagtctcctgcgccttgccggccttgtccttggcggcgtcggtggattgccggagagtctcctgcgccttgccggccttgt

SEQ ID NO: 23641 - DNA, 524 bp, Oryza sativa nipponbare
  Clone ID: LIB3599-006-H1_FLI
gctggaacgtcaatgctcatagtttggtctatatgattcaagggcgatctcgagttcaagtcgttagtaactttggaaagactgtgtttgatggtgtccttcgcccaggacaattattgatcattccgcaacattatgctgtcttgaagaaagcagagcgtgaaggatgccaatatatcgcaatcaagacaaacgctaacgccttcgtcagccaccttgcagggaaaaactcagtattccgtgccttgccagttgatgtagtcgctaatgcgtatcgcatctcaagggagcaagcccgaagcctcaagaacaacaggggagaagagcacggtgccttcactcctagatttcaacaacaatactacccaggattatcgaatgagtccgaaagcgagacctcagagtaatgtaattgagaactagtatcggcgtagagtaaaataaaacaccacaagtatgacacttggtggtgattctgttcgatatcagtactaaataaaggttacaaacttcttaattttcct

SEQ ID NO: 23642 - DNA, 1328 bp, Oryza sativa nipponbare
  Clone ID: LIB3599-009-D7_FLI
ccgggatctcaagccagaaaatttcctcttactggacgcagacgatgaattctcggttaaagcaattgactttggtctatctgtgttcttcagaccaggtcaggttttcagagaggtagtgggaagtccatattatattgctccagaggtattggagaagcgttatggaccagaggctgatatatggactgctggagtgattctctatgtattgctgactggtgttcctccattttgggcagatacacaaagcgggatatatgaaaaagtactggatggacgtattgattttaaatcaaaccggtggcccaggatatctgacagtgcaaaggatcttataaaaaagatgctctgcccttatccatcagagcgtttgaaagcccatgaagtgctaaagcatccatggatatgtgataatggagtggctactaatcgagctctggatccaagtgtacttcctcgtctcaagcaattttctgcaatgaataggttaaagaaattgtctctccagattattgctgagcgtctttcagaagaggagattgttgggttaagagaaatgttcaaggctatggacaccaaaaacagaagtgtggttacatttggtgagcttaagggactgaaaagatacagctcagtgttcaaggatactgaaattaacgacttaatggaagcagctgatgacaccacctccaccatcaactgggaagagtttattgctgcagcagtgtctcttaataaaatagaacgtgagaaacacttgatggcagcctttacatactttgacaaagatggaagtggttttatcacagttgacaagcttcaaaaggcttgcatggaacgtaacatggaagatactttccttgaagagatgattctggaggttgatcaaaacaatgatggtcaaatcgattatgctgaatttgtcacaatgatgcaaagcaacaactttggacttgggtggcaaacggtggaaagcagcctgaatgtagccctgagggaggcaccccaagtatactgaactcctgtcgcctggcacccccaagaattcagtttgttctcctgagcctttcatctgtttatcacaacacatagttgtggatttgagagaagagagccaagactagatggtttatcagtaatcaccctatagcagtggtggaagaagactctcttagtacctaatagcatataaatgtgtggtctaaagacatcgtatatgtatgaacctcataagttcgttcgttcgttcgtttggttggttggtttgctaccctgctatctaataataatatcaataatacccgaagaacccctcttggttctgc

SEQ ID NO: 23643 - DNA, 1009 bp, Oryza sativa nipponbare
  Clone ID: LIB3599-016-A9_FLI
gggaactttggaattggtttgcataaggagttcttggaatggggaatcagtgccagaacgggactcttgggagtgattaccacaatcggttcccaagggagcatgccgttgggtacgttcagggggatagctacttggacttgaagaagttcgatgatacttggcctgaggtgaacaacttcaagcctactgctgctagtattctcaggcgggggttggatcctacatctatcaatgtccttgggcggaagacagcggacctaagggagcattatatcattggtcggaagcttggtcagggccagtttggcacaacttacctctgtaccgagatcaatacagggtgtgagtatgcttgcaagaccatcccaaagcgcaagctcatcaccaaggaggatgtagaagatgtgcgccgtgagattcagataatgcaccatttgtcgggccacaagaatgttgttgcaatcaaggatgtctatgaggatgggcaagcggtgcacattgtgatggagctctgcgctggtggggagctctttgacaggattcaggagaaggggcattacagcgagcggaaggctgcagagcttataagaataattgtcagcattgtggctatgtgccattcgctcggggtgatgcaccgtgatcttaagccagaaaatttcctccttttggataaagatgatgatctgtcaataaaggcaatagattttggtctatccgtgttcttcaaaccagccaccttgcaggaaaaaactcagtattccgcgccttaccagttgatgtggtcgctaatgcttaccgcatctcacgggagcaagcccgaagcatcaagaacaataggggagaagagcacggtgccttcactcctagatttcaacaacaatactacccaggattctcgaatgagtccgaaagtgagactttagagtaatgtaactgagaactagttctggcatatagcaaaataaaacaccacaagtatgaatcttggtggtgattctattct

SEQ ID NO: 23644 - DNA, 1282 bp, Oryza sativa nipponbare
  Clone ID: LIB3599-031-D8_FLI
caagaaccgttcaagaaagcctgtggaaatgtccttggccacgccgccgccgccgtcctcctccgccacctccgccgcgtcgaacacctccgccggcgtcgcccccaccaccaccaccacctcctccccggcgccctcctacagccgcccggcgccgcacgacgcggcgccgtaccaggcgctctacggcgggccctacgccgcggccaccgcgcgcacccccgccgccgcggcgtaccacgcgcaggtgagcccgttccacctccagctcgacaccacccacccgcacccgccgccgtcctactactccatggaccacaaggagtacgcgtacgggcacgccaccaaggaggtgcacggcgagcacgccttcttctccgatggcaccgagagggagcaccaccacgccgccgccgggcacggccagtggcagttcaagcagctcggcatggagcccaagcagagcaccacgcctctcttcccgggcgccggctacggccacaccgcggcgtcgccgtacgccattgatctttcaaaagaggacgacgatgagaaagagaggcggcaacagcagcagcagcagcagcagcagcactgcttcctcctgggcgccgacctccgtctggagaagccggcgggccacgaccacgcggcggcggcgcagaaacctctccgccacttcttcgacgagtggccgcatgagaagaacagcaagggctcctggatggggctcgaaggcgagacgcagctgtccatgtccatccccatggccgccaacgacctcccgatcaccaccacctcccgctaccacaatgatgattaatctcttgaagaagccaagaagtgatcaacacgcggaagaaatcaacagcttctttcacggcgtgcgagctgcatgctgatgctccaggatcgatcgatcgatcattgcatctccaaactaatcacgcttcgatctttcaggacttcatcaatgacaggccgaaacctcctacgagttctctgatgatattcttatttttttcccacttcttttcgttgagctttttgtaatgttgcttcgagtgttactcctacattttctccgaaatggcctcagaatgatgcggtcgggctgattaattaggttagactcttcctgaaccaactaggaatagattttctgcctggttcctgtcagtccttgtaatatctgcagcagcttgtgagacaagcgtgttcgcttttgtgaacgccctttttcttctttccgattcctctgcctgtgatagtactcgctccg

SEQ ID NO: 23645 - DNA, 658 bp, Oryza sativa nipponbare
  Clone ID: LIB3599-054-D1_FLI
gtcatcttatccgtataagctgtagcttagctctgtttctagaattagctccagcaatggcggatccaagcttcttcgtcggaatcgtagggaacgtaatctcaatactggtcttcgcgtctccaattgcgactttccggaggatcgtgaggagcaagagcacggaggaattcaggtggctgccgtacgtgaccacgctgctgagcacctcgctgtggacgttctacggcctccacaagcccggcggtctcctcatcgtcaccgtcaacggctccggcgccgccctcgaggccatctacgtcacgctctacctcgcctacgcccccagggagaccaaggcgaagatggtgaaggtggtgctggccgtgaacgtgggcgcgctggcggcggtggtggcggtggcgctggtggcgctgcacggcggcgtgcggctgttcgtggtcggcgtgctgtgcgcggcgctcaccatcggcatgtacgctgcgccgatggccgcgatggtcagtaagctagctagacggtcactactcactcaccccccccctttcacatccaccaacaaaacttgtcaaattcgtcaccaaaaaaaaaagttagtagagggtgtcacacttcaaaagattaataatgcaattaaagtctgacgagatttatactc

SEQ ID NO: 23646 - DNA, 966 bp, Zea mays
  Clone ID: LIB3600-002-C9_FLI
acattccaaactgaccttgcttcgaagttggatactctttccaatacactcaatgcatcaatagaccagcaaaatatgcacctaaaagctgtggaggatttatgccaatcctgtgttgattcccatgacagggtaaactattactgaaccataattggcatacctaattctggacttaattacctcagtaacttaatattgtatgctcactttttttgctttaacatttgaaggctacttctgagctgaaaaagaagattttggcttcaaaatcattatacatgtcacatatggaagctttccaaaatgttgtcctcctacataaagcaagtgcaaatgccacactagaagatatatcatcactgtctgctacaagctgctgtagtcttgatcaggtacttaacttggatgcttgtatagcttaaacaaaatctacttccatcaagtacttgatcctaactgttctgtttgtactccttttccacagctactagtttgtgttgagggagaggctcaaaatatatttaatgacatccataaattgttaaccacacaccgaagcgaaatgacacacttcactcaacaattaagggaggtcagtcacaaactcactatgtcttatgatttctctcttccctgtagaattttatcaagccatctcttaattggaggttattcatggttttgtagagtttccaaataagcttggacaggacaaaagaaatgtctacctatattattgggctctttgacaagtatgttgaggagacctccaaattgcagagtcactcaaataatactcatgaagcacaaatgaaaagcattgaagattttcagatggtttacgaggtgaaccatttatccctcttttttgtttgctgcaaaattttgtaggtgtgtatccgataccatcttcttgtgcaggagcaatcaaaatcagaggagcagaagcttctagcggacatt

SEQ ID NO: 23647 - DNA, 1375 bp, Zea mays
  Clone ID: LIB3600-002-E5_FLI
gaggctttgataccaattgtaatgacccctgaccgaagatggtgttcttccatggcgtgagccttctcgtcaccgaaaatccgccgcgacagagagaagctgatatttgaagtacaagcaaccggctcaattctgtccacaacactgcctgaaccagaccaaccgtatcagcatcagcgtaccggccgcggaggagccctctctctctctctctctctctccaggcgcatcaagccatggctgctcccaagaagacgatgagagctctgcggtacgacaagtatggtggaggagctgaaggcctaaagcatgtggaagtgccggtcccatccccgagcaagggggaggtgctgctcaagctggaggcggccagcatcaaccccatcgactggaaaattcagaagggcatggtccggcccttcctgcctaggaagttccccttcataccagttggagacatgtctggcgaagtggtagagctaggcagcggtgtgaccgacttcaagccaggtgacaaggtcatctccatcactttcccgaatggaggcgggctagccgagtacgcggtggcgccggcgtcgctcacagtggcacggccgccggaggtgtccgcggcagaaggcgcgtctctgcccacggccgcgtccaccgcgctgcagcagctcaaggccgcgggggtaagcagcttcgacggcggctccggctctggcgccgacagcgacggccccaagaacgtgctggtcaccgcggcctcgggcggcgtcggccactacgccgtacagctggccaagctggcggggctccgcgtcacggccacctgcggcgcgcgcaacctgggcctcgtcgcgggcctgggcgccgacgaggtgctggactacaagacccccgagggcgccaggctgctgagcccgtcgggcaccaggtacgacgcggtggcgcactgcgcgactggcaccccctggtcggtgttcgcgccggttctggccgacagggccacggtcgtcgacgtcaccccgggggtcgccgccgcggccaagtcgttccttcagaaggtcaccttctccaggaagaggctggtgccgctggtcctgatccccaagaaggaggagatggagtggctggtggagatgaccaggcaagggaagctcaggacggtggtcgactccaggtactcgttgagcagagcgcaggaggcgtgggccaagagcatcgatgggcatgccaccggcaagatcgttgtggaaatgggcggtgctgcagagtgaaccggcaagcgggcatggcaagcgtgcacattgtgttggttggttcatggattcgttctctctgttcgatcatcgcgacagccattcataataagccatccatctgatgg

SEQ ID NO: 23648 - DNA, 1063 bp, Zea mays
  Clone ID: LIB3600-004-B3_FLI
catctcgccctttgctgacacctcgccgtcccaaaggaagtcgctaccacttcaactgagcatcgcccctggattcgaaggacaagagcaacgacggcgacagagacccaaaaggatctgcttccccttcatctcttgcacttcctactccgaacagaggacaaggctcatgtgggcagggccggcaggccaaacgtcgtcacgttcgctcccggcggtcgacacatcgtgaaggctggtggtagccggcctccccggtcttcaaatacaaccgtcgctgctcgatcaggtcacaaactcctgctacctctcaggttgaggaaaatgtctacagctagtgagagtgatggaactcatggaagcaaccagagccagtgtgtagtgtctcaagagtcaccacctgccactgagtcaaacaacgatgcagagtcaattgacatagaagatgaagatgaagaggaagatgttgtagctgggtccaagaggaaacgaacttttgctgtttggaaagagttcaccgaagtgcggattggaggcaatgtacatgcaaaatgcaactattgctccaagaagctttcaggatcatccaagaatggaactaaccatcttcgtctccatttgaagtcttgtgtgcaaaagaggatcaaggtgaatggaaagaccatggcacatgcttctttgaggtttggtaaaacagatgctgggacagttttagttgagaactacatctttgatcaagacatagctagacaagaacttagtgcaatgatagtacttcatgagtacccattaagcatggttgatcatgtaggcttcagaaggtttgttggtgcacttcaaccacttttcaagattgggacaaggaatactataaggtataatagatgtgacttctagttttacttctagttcttttgatagcctggagtcatgtggagttcttttgaatcaaaggctctggacgcatgctagtgggtaatgtaatgttgctgctggtgatcatgtagtgtccacgtgtggtactggttaaccaccaataattataattttctggtgatcatgt

SEQ ID NO: 23649 - DNA, 505 bp, Zea mays
  Clone ID: LIB3600-004-E2_FLI
tcgtctcgggctctcatctctaatcttcgggttcgcgtcgcagtgtcttccgcccgggctaccaccatgccgaagcagatccacgagatcaaggacttcctgctgactgcgcggcggaaggacgcacggtcggtgcggatcaagcgggccaaggacgccgtcaagttcaaggtgcgctgctccaggtacctctacaccctctgcgtccacgacgccgacaaggccaacaagctcaagcagtcgctcccgccaggtctgactgtccaggagatttaaggtatcaagccacaaactgtgctttttttgcggtgtcagggacgtttgctccagtgttactttagtttgtaggtgggctccattgctgtgtttgaatgaattatgaagtttgagtttgggatgcgaatgatgtgtcgaacctatgagcctgtgttgtaatggttaccccagaccgcaaaggatggcaatctatcataagttaaactgatttccgtgattttcgcttccc

SEQ ID NO: 23650 - DNA, 1904 bp, Zea mays
  Clone ID: LIB3600-004-F4_FLI
tttcactggcttcatttcgaatcacaaatttcatctcctggagtgttgctttgcttgctcctggaatcttcggaaccgaaggccaccgcgccaaccgcccaattaccgaaccaaaccctaccggtcgcggctcctccatagtccatagtactctcgcgcgcctaaaccctagccatcctcctcgccgccggcgaccgccgccatgagccgctacgacggccgcgctgcggacgcgggctcctaccgcgaccgccgcagcgagggggcgttcggaggcgggtcgagggcgttctcggcgccgagcaaggcggacgcttccgcggcggcctcggagctggatgggctgccacgcttcgagaagaacttctacgtggagtcacccgcggtggccggcatgacggaggaagaggtggaggcgtaccgccgccgccgggagatcaccgtcgacggccgcgacgtgcccaagccggtgcttgagttccgtgatgtgggcttcccagaatatgtgttgcaagagatcacaaaagctggttttgtggaacctacccctatccaatcgcaaggttggccgatggcattgagaggccgcgaccttattggcattgcagagacaggatcagggaaaactcttgcttaccttttacctgccattgttcatgtgaatgcgcagcctattctttcccctggcgatggtccaattgtcttggtgttagctcctacacgtgaacttgctgttcagatacagcaagaagcaaccaagtttggtgcatcatcaaagataaaaagtacttgcatatatggtggtgtgccaaaaggtccacaagttcgtgatcttcaaaaaggtgttgaaattgttatagctacaccaggacgactaattgatatgattgaatcacatcatacaaacttgcgaagggtcacatatcttgttttagatgaagcagaccggatgctagacatgggatttgaacctcagattaagaaaattgtttctcagattcgtccagatcgccaaacactttactggagtgctacctggccgaaggaagttgagcagctagcaaggaatttcctttttgacccatacaaggtcactattggttctgaagacttgaaggctaatcatgccattgttcagcatgtggagatattatctgagagtcagaagtataacaagctggttaatctactggaggatataatggatggtagccgaattttaatatttatggacaccaagaaggggtgcgatcagactactagacagcttcgaatggatggttggcctgctttgtctatccatggtgacaagagccaagcagaacgggattgggtcctttctgaatttaagtcaggcaaaagtcctattatgacggccactgatgttgctgctcgaggcttagatgtcaaggatgtgaagtatgtcattaactatgactttccggggtcactcgaggattatgttcatcgtataggtcgaactggcagagcaggcgcaaaaggaacagcgtacacctttttcactgcagctaatgccagatttgccaaggaacttattaatattctggaagaagctggacaaaaggtcagctctgaattagctgctatgggtcgtggtgcacctcctccatcttcaggttaccgtgatagatatagggggtatgggggtggccgatcgtggagttgacgttcaaatgcttagttgctgctaagagcaatgctttacatttgtttgttgatggatatgttgttttagcacactgataagagcaatgctttacattttggctagtattcggtaatgatggattcacatactcttggatattgacctgtctcgatgctagaaaagtggcatgatatgatgcctgcaatatcattagtttatttttagccatagtttc

SEQ ID NO: 23651 - DNA, 695 bp, Zea mays
  Clone ID: LIB3600-004-H10_FLI
ccgaatctttcgccgccccatcagcccagcagttcttcgctgttcgttgccgttggttccatcggttgatcgaccggcctggagcagagagacagagagagatgggcaagtcctgggcgctcatcagccacctccacaccgtcgccgggccgagcatcaccctgctgtaccctctgtacgcgtcggtgtgcgcgatggagagcccgtccaaggcggacgacgagcagtggctgtcctactggatcatacactccttcgtcaccctcctggagatgctcgccgagccgctcctccactgggtacccgtgtggtacccggccaaggtgctgttcgcggcgtggctggcgctgccgcagttcaagggcgcctccttcgtctacgagaagctcgtcagggaacagctccggaactaccgcgccagatacccgcgcaagggcgccgccgccgccgccgtcggcggcgacgacgacgaccataaggtgcacatagccaaggctgaggctgagcacgaccatgtgcagtgaaagcgtgtggagactggagacgacgcaggagctgaccggagatcatcatcagaggaacttatgtagatctggtgttccaaggtgttcattcgatgtatcctacgtatctctgtaactcttgtggactgccggtgtcgcgtaatgtatctgaactcttcgcgagtgcgatgg

SEQ ID NO: 23652 - DNA, 768 bp, Zea mays
  Clone ID: LIB3600-005-C8_FLI
agatgtttaaaaagagtcaaacacacgagtccttgaactgggctataccaaaggaactatggattgcacattatctagctgagcagaaactcactgattctaagcaacgcagtgctatcatggcagaaattaaatatttgatgagtggatatgaaaagaaacaaaggtcagaaaatctctcaacatgggcttcacagcatccgccaacggaatctaaaaggaggaacaggaagcgcaaggaggaggagcaggagcaccatgaagcacaatacaaccagcagcagcaggaacagaatgaaaacaagttaattcaaggaaagcggcatcagctgcatcaagaagaaaatatggcgcaagtgacacagcagcagcatatgcaaccgacaacaaggccagctactcttaagcttccgacgcctgctattcctctggttctgaatgcagctcagatccaaaactttgcgcgtccagcttacgccgctgtgcctggagttcacaattaccctgcccagccaggttggcctgcagctcaaggaagtccattcgtaccacagttcatgtcaccgcagtatatgggtctgccatttaatccctttggccttcatcctacttgctatcccagacgcagatagcgtagagagttctggcgttccgcgtccatttgctgagtgaaactgtggtgaagcgtacaagttatatgaaacagaccggtatcggttaactggttttgtgttcgtttgttatgctgtctgatggttccttttcgcg

SEQ ID NO: 23653 - DNA, 1114 bp, Zea mays
  Clone ID: LIB3600-006-A11_FLI
acccaacgcgccaggcgggagcttctcaagcacgcgcccaagcttgttgagaccagcaagaagacactgatcctccatggtaccaagactagtgctgtgttgaactctgtgctgtcagatatttaccacctaaagcgtgataatgctgtgaaatataccaagaagaatgacaacattaggccttttgaaagtggtggagaatcttctctggagtttttctctcttaaggcagactgtagccttatagtgtatggttctcattcaaagaagaggcccaacaatctgattttgggtagaacgtatgaccaccacatatatgaccttgttgaagtaggagttgagaactacaagtcaatggaatcttatgtttatgataagaagctagcaccattacttggatcgaagcctttctttgctttcataggggaacactttgagagtgctgaagagctgaaacatttgaaagaagtgctgcttgatcttttcagaggagaggtcgtagagaatctgaaccttgctggtgtggatcggatctatgtgtgcactgcaatctctcccactaccgtctacatgatgcactgtgctctccgtctaaaaaggtcaggtacatctattcctaggatggaactggtcgaagttggaccttcgatggatctggttgtaaggaggcacagacttccagctgaaagtttaaagaaagaagctatgaagaccgctgaacatgctaagaagatgaaaaacgtcactaaggatccagtgcagggcaagctggtcaaggtctacatgccagaccagcaggttggaaagttgaccttatcaaacgacataaagggactaaagagggagcgccgtgaagccaagaaaaaccaggactcaaagaagcaaaaggtcaaccccgagtaaagatcactgaagtttacctttgcattggatacaggtcaggttaagaaaccctggtttgtatctgttcccatctgctgtgttatccaattagaagttgctcgttgtcagattgtgttaaatagtttagggccatcttgttaggctaaagacatgtgtacgactttcacaacaatattgcgtaccaattcatgttaaggctgtctccagcaac

SEQ ID NO: 23654 - DNA, 308 bp, Zea mays
  Clone ID: LIB3600-006-A12_FLI
gagggcatgccggtccccgggcggaaggacggcgcgcgcggcgacctcagggtgaagctcgaggtcgtgttccccacggagctctccgacgagcagcgcgccggcctcgccgagatcctcagagggtcctgctgatcggtcggtgtcgccgtcggtccaattaagtcctatcgtatcaagttttcttgggcgtgtgaccgtgtccgatgagtaactgagtacataaagagagatggtcgacgttcgttgtacatacgggttgtctatgtatatgtcgatatatatgaaacgtgaggcaagccttgtgt

SEQ ID NO: 23655 - DNA, 642 bp, Zea mays
  Clone ID: LIB3600-006-B10_FLI
tcaggcaatcccctctccccctccgccccccagccgaagcagacccaatgtcctgcggtagaggcagcaccggcgaagtcgaaggaggcaaatcggtcgccgcgatgacgccgtggcacgacagcttggcgccgccgcctcgcgtcctcatttcccaccgcccttctgatgccagcggtcaagggattgttctgtcacttcaacatccaagatcaggagatgaagtagggtatctatttattgatggccaactacaagagatcaactggtttaaggagcgttatggtgcttggttcttgggagattatgtttgtgaagatggtggcctttattattgcacccctgttgatcccatcttcattttcctaccaacttttgaagctgcacgtatgtcgaacgataaggatccaggaaaattcagacaattggatgaaatattgtatgttgagggatatcctggttatcagcagctaatgaatgtagctaaccaccatatggaattggtttgtgaagtaaaagaagtatctaacatgaagttctttaggctggacaactccaaggtcttatcttggttgtgctgcaaggtatacgacctaaaggaggtcttccccaagttgggtaaaaattatgccgcccaaacag

SEQ ID NO: 23656 - DNA, 959 bp, Zea mays
  Clone ID: LIB3600-006-B8_FLI
gggctcgatccaaagccagatcggcacgacgagcagagggccccccggagcggcgcggagcaatggcggcgggataccgggcggaggacgactacgactacctcttcaaggtggtactgatcggcgactccggcgtcggcaagtccaatctgctctcacgcttcacgcgcaacgagttcagccttgagtccaagtccaccatcggcgtcgagttcgccacccgctctctccaggtcgacggcaaggttgtcaaggcccagatttgggacactgctggccaggaacgatatcgtgctattactagtgcgtattatcgaggtgctgttggggcgttgcttgtatatgacgtcactcgtcactcaacctttgagaacgttgagcgttggctgaaggagttgagggaccacacagatcccaatatagttgttatgctggttggcaacaaatctgatctccgccatcttgtagcagttcaaactgatgaaggaaaagcattcgcagagagggagtcattgtatttcatggagacctctgcactcgagtcgactaacgttgaaaatgcattcgcagaggtcttaactcagatctaccgtattgtgagcaagagagcagttgaagctggcgaagatgcagcatctgggcctggcaagggcgagaagattaacataaaggatgatgtttcggcggtgaagaagggtggctgctgctctagctgacctgccctgctgtattttttttggagctgtggtgatgtagcttatggtacggcatttccagcgaccgagaactggtagtggcattagcagcttctatgttacctagagagtttattgtcaaactgggggaaaaaaactgaaggttagatcggtgtagatctttctggtactgtattgtgtatccggcaataggcatggtattgttttttttggctgtgaatccactggtaccatgtttaaact

SEQ ID NO: 23657 - DNA, 521 bp, Zea mays
  Clone ID: LIB3600-006-E8_FLI
gtcctagtctgatggccagccgctgggtccgacccgaggtgtacccgctgttcgcggcgatgggagttgccgttggcatctgcgggtttcagctcttccggaacatcaccggcaacccggaagtcagggtaaacaaggcagggagggcagccggcgtgcttgagaaccatgaggaggggaggcgttacgccatgcatggcctcagaagctttgtgcacgacaagacccccgagatcatgccagctatcaacaagttctttactgaccccaagtgaagcaaagcagctttggttggccgctgatgacgatggttctgctactagttgcccttggggattgtgtaccctttttatggcaattcgatatgggggcgtttggttacttgtatgggtgagcctggctcgtatctagtgagcctggctcagactggactggctgagtgcatgcagtatagcgtgtttggttgtgtgtatgtggccagtctggttcacaagagatgttgtttggttgcttgcatgagt

SEQ ID NO: 23658 - DNA, 461 bp, Zea mays
  Clone ID: LIB3600-008-B6_FLI
ctcgccgtcgcggtgccgtgcgccggtgctgttcagtctagggtttcggccctcgcccgccgatccgtccccccgccggccatgtcgaagcaaggagggaaggccaagccgctgaaggcgcccaaggtcgacaagaaggagtacgacgagagtgatcttgcttatttgcagaagaagaaagatgaggaaaaggcactgaaggagctgaaggccaaggcacagaagggcgcaattggaggctcgggtctcaagaaaagtggaaagaaatgagcctggcccacccacccacccatctctaaaacaccttggagaacgataaggcagctgcttagtatctgtgttgcgcttcactatatgtggctgtgagacaatgctgcctcttgtattccgtgttacgcggtgttccagttggtttgcttgatccgaagatgtttcagcctctcatctgctagctttgatac

SEQ ID NO: 23659 - DNA, 1933 bp, Zea mays
  Clone ID: LIB3600-011-E12_FLI
acacacccgagcatatcacagtgacagacacgatggtgagcgccagaattgttgtcctcctcgccaccctcctatgcgctgccgccgcagtcgcgtcgtcctgggaggacgacaaccaccaccaccacgggggccacaagtccgggcaatgcgtgcggcggtgcgaggaccggccctggcaccagcgcccccggtgcctggagcagtgcagggaggaggagcgggagaagcggcaagagcggagcaggcacgaggccgacgaccgcagcggcgagggctcgtcggaggatgagcgagagcaggagaaggagaaacagaaggaccggcggccgtacgtgttcgaccggcgcagctttcgtcgcgtggtccggagcgagcaggggtccctgagggtgctccggcccttcgacgaggtgtccaggctcctccgcggcatccgggactaccgcgtggcggtcctggaggcgaacccgcgctcgttcgtggtgcccagccacaccgacgcgcactgcatctgctacgtggcggaaggcgagggagtggtgacgacgatcgagaacggcgagaggcggtcatacaccatcaagcaaggccacgtcttcgtggcgccggccggggcggtcacctacctggccaacaccgacggccggaagaaactggtcatcgccaagatcctccataccatctccgtgcctggcgagttccagttcttcttcggccccggcgggaggaacccggaatcgttcctgtcgagcttcagcaagagcatccagagagctgcatacaagacctcgagcgaccgtctggagaggctgttcgggaggcatgggcaggacaaggggatcatcgtgcgcgccacggaggagcagacccgcgagctgcggcgccacgcctcggagggcggccacggcccgcactggcccctgccgccgttcggcgagtcgcgcggcccctacagcctcctggaccagcggcccagcatcgccaaccagcacgggcagctctacgaggccgacgcgcgcagcttccacgacctcgccgagcacgacgtcagcgtctccttcgccaacatcaccgcggggtccatgagcgcgccattgttcaacacccgttcgttcaagatcgcctacgtgccgaacggcaagggctacgccgagatcgtgtgcccgcaccgccagtcgcagggcggcgagagcgagcgcgagcgcgacaagggcaggaggagcgaagaagaagaagaagaatcgtctgaggagcaggaggaggccgggcaggggtaccacaccatccgggcgcggctgtcaccgggcacggcgttcgtggtgcccgcgggccacccgttcgtcgcggtggcgtcccgggacagcaacctccagatcgtgtgcttcgaggtccacgccgacaggaacgagaaggtgttcctggccggcgccgacaacgtgctgcagaagctcgaccgggtcgccaaggcgctgtcattcgcctccaaggcggaggaggtggacgaggtgctcggctcgcggcgcgagaaggggttccttcctggccccaaggagagcggcggccacgaggagcgggagcaagaggaggaggaggaacgcgaagaacgccacggcggccgtggggagagggaacgccacggacgtgaggagcgggagaaagaggaggaggaacgcgaaggacgccacggccgcgggcgccgcgaggaggtggcggagacgctcatgaggatggttaccgccaggatgtgaggccgccgcgctcgccaaaacgagcaagaagcaacaagagggtggcgcgcgaccgacgtgcgtacgtagcatgagcctgagtggagacgttggacgtgtatgtatatacctctctgcgtgttaactatgtacgtaagcggcaggcagtgcaataagtgtggctctgtagtatgtacgtgcgg

SEQ ID NO: 23660 - DNA, 868 bp, Zea mays
  Clone ID: LIB3600-012-A10_FLI
ccgccgccgcctcctctctgctgccgtcgccatggggagaaggcctgcgagatgctatcgccaaatcaagaacaagccataccccaagtccaggtactgccgtggtgtccctgaccccaagattaggatctacgatgttggcatgaagagaaagggtgttgatgagttcccctactgtgtgcaccttgtctcttgggagaaggagaatgtctccagtgaggctcttgaggctgcccgtattgcctgcaacaagtacatgaccaagtctgcaggaaaggatgccttccaccttcgggtccgggttcaccccttccatgtccttcgtatcaacaagatgctttcgtgtgctggggctgataggctccagactggaatgaggggtgcctttggcaagcctcagggcacctgtgctagggtggacattggtcaggtactcctttctgttcgatgcaaggacaacaatgctgcacatgccagtgaagctctgcgacgcgccaagttcaagttccctggccgccaaaagattattgagagcagaaagtggggcttcaccaagttcagccgtgccgactacctgaagtacaagagtgagggtagaattgttcctgatggtgtcaacgcaaagctgctcggtaaccatggaagacttgagaagcgtgctcctgggaaggctttcctcgaggccgttgcttaagtccaatctacagttggaatgcgaatccagacgttttgctttagcctatcttattttgctttgtgcaacatgaattttaagtgtatggggtattacagtgccttgtcttgtgtgaacctgcttatctcgtgctgaacatcgttatgcatggaagtacttatcttttgttctgct

SEQ ID NO: 23661 - DNA, 1074 bp, Zea mays
  Clone ID: LIB3600-012-D2_FLI
catcgagagcggggctgtaccgtgcgagactctactgctcgatcgccatggccgccgcgctcaggtgcccggcatccgtcagggtctcgggccccgccgccgcggggctcgccaaggtgcgccaggcgtccagagtcgtagcggtgagcggggcccggcagagccgcggcggcggcgtcgccgtgcgggcgtcgctgttctcgcccaagcccgcggcggccaaggacgcgcggccgaccaaggtgcaggagctgtacgtgtacgagatcaacgagcgggaccgcgagagccccgcgtacctgcgcctcagcgccaagcagacggagaacgcgctgggcgacctcgtccccttcaccaacaaggttggtctcgtctcgtctcgttcccccctctgttcctagtcaagcaagcaagcctctagcctctgctcatccgtccctctctctctccaccaccccaacctgcaggtgtacaacggcagcctggacaagcggctgggcgtcaccgcgggcatctgcgtgctcatccagcacgtccccgaccgcaacggcgaccgctacgaggccatctacagcttctacttcggagactacggccacatctcggtgcagggcccgtacctgacctacgaggagtcgtacctggcggtcaccggcggctccggtgtcttcgagggcgtctacggccaggtcaagctcaaccagatcgtcttccccttcaagatcttctacaccttctacctccggggcatcccggacctgcccagggacctgctctgcacgcccgtcccgccgtcgcccaccgtcgagcccacccccgccgccagggccgccgagccgcacgcatccctcgacaactacaccaactgaactgatgattgatgaatccattatcatccatctctgctctgtctgtcgcggctgtcagaacttgacgagacaagctcccctgctactcatcagtactcctcactcgtagccgtagtttggctactcttatgtgtgtatggctggtttcttcaattcgtgagtgcgtggtagtaccaataagcaataagacgcagagggatcgatc

SEQ ID NO: 23662 - DNA, 612 bp, Zea mays
  Clone ID: LIB3600-014-H10_FLI
gtactgtccccacggagatcacgacacgaaccgagcaagaaccgcacgagccgagcccagcagcaggatggcggcggcggcgagcgggaaggcgccgtcgctggtggtggcggcgagcatgggcgcggtggaggcgctcaaggaccaggcgggcctgtgccgctgggactacgcgctgcgctcgctctaccaccgcgccgccgccgcgccccggatccgcgcgctgtccgccgcgctctcggactccgtgtccgtgccggcggacgcgcccccgcgggcgtcgcggccaccgcccccgccggcgccgcgggacgcggacaggatgcgcaaggcctaccacctcgtgtgctggggccccaactgatcggcggccggccggcgggcgggcgggcgccgactgcatgcctgtagctgtagcgcgcgcgctgaccaaggcctggctgggtgtggttgcctgtagcttcttcttgttgttgttgttggctcctctcgtgtgtgtgtgtgtgtgttgctctcgctccgtccatcgattccatccgtgtccgtcggcagatgagatgagaatgagaatgagaaggcgatgtgaatgctcttccgtcgtctgggttccgg

SEQ ID NO: 23663 - DNA, 667 bp, Zea mays
  Clone ID: LIB3600-015-A10_FLI
aaagtgatctgttgtcatctaattcaattaaattcattgatcatcttgaagaaattttacaggcttatattgacaggagagagcaggttcgtcttatcaaggagctctacgggaaccaaattggcgagctgttccatagtcttccttataatatgatagagtttgtattggaggattttgagtgcaaggttacaatcagtatccgatattcggatctactgcagaccctgccgagtcaggcaagggtcttggcttggccacttcgctcggccaagaaaatatctacaagaagcagcagtgcatcagctgcgcaaccagtaccctttcacctttcatatgccgaggaagcactcaaaaccttgtgtctaccagaagcatacgcagacattgtgctggagctaccccatgctttgaagaggattttatcctctcgggacagtgactaaatcgtgacctcaagatgtccagttttgttgtgcataagattcacatctcaatcgtggggcatgtttttgaagatattgttcagaatcttgtggtagtatagcctgcagttgtggactgcaattcctgtgaaagcaaggcagacatttgcgtgggccgctcgaaatattccggctacagttcctgttaaaagaatcaaaatcctaggaaggccttatggtcg

SEQ ID NO: 23664 - DNA, 911 bp, Zea mays
  Clone ID: LIB3600-015-B11_FLI
ctccgctgcgagcgcgaggcgcggagggaggggctagcgctagcgctagcggctgcggcgccatggccctggccgacgccaccgcgttcccctacggcctgcgcgtcctcgtcgtcgacgacgaccccacctggctcaagatcctcgagaagatgctccgcaagtgctcctacgaagtcaccacatgcggtttggctagcgttgctctccaaattctccgagagaggagaaacaagtttgacattgtaatcagtgatgtcaacatgcctgacatggatggtttcaagcttctcgaactcattgggcttgagatggatctacctgttataatgatgtccatagacggagagacaagtagagtgatgaaaggtgtacatcatggtgcgtgtgactatctcctcaagcctgttcggatgaaggaactccgaaacatttggcaacatgtgtataggaagaaaatgcacgaggtgaaagagattgaaggtaatgacagctgcgatgatctcccaatatttagaaatggtttagatggattggatgagaggggcctatttatgagagctgacactgataccatgaggaagagaaaagacgtggataaggaccatgcagaccaggactcaagtgatggagctactgctaagaaggctagagttgtctggtctgttgaccttcaccaaaagtttgtaaatgctgtcaaccaaattggatttgacagtgagtgctctctaaagtttgataaatttgcaactcccttcatatgttttttttttaaaaaaaaattgcacgacctcaatttaaaatttgcaactatggctctcttgcagaagtggggccgaagaaaatacttgatcttatgaatgttcctggcctgacaagagagaacgtggccagccatcttcaggtatggc

SEQ ID NO: 23665 - DNA, 546 bp, Zea mays
  Clone ID: LIB3600-015-D10_FLI
gcggccaccatggtgaagggacgcacgggacagcgcgtcaggctctacgtccggggcaccatcctcggatacaagaggtccaagtcgaaccagtacgagaccacgtcgctcattcagatcgagggggtgaacaccaaggaggacgtcgcgtggtacgctggcaagcgcatggcgtacatctacaaggctaagaccaagagcagcgagacccgctacaggtgcatctggggcaaggtcacccgcccgcacggcaactcgggcgtcgtccgcgccaagttcaagtccaacctcccgcctgagtccatggggcgcaaggtcagagtgttcatgtacccgagcagcatctaaggttaggtttttgttggagtaaaggtggactctaaatggccatgcttagttcttctctctgagcttaaaatgccatgtgttggcaacttagattgttcatgtactgaacctgttgaagttctaccaaaatttgttgtcgaacggctgaacagttgtcctaatgttatgctataaacagagcttatttccccccgtgcc

SEQ ID NO: 23666 - DNA, 1195 bp, Zea mays
  Clone ID: LIB3600-016-B5_FLI
gctcctcgtcatgctcaagacgccgaaggcatgctcatcaacggcaacttcgagacggcgccgcggaggctgaacaagaccctcatcgtggggcgccactcgctgccggggtggacggtgcagggccacgtggagtacgtctcgggcggtccccagcccgggggcatgttcttcgcggtgccgcacggcgtgcacgcgctgcgcctcggcagccgcgcgtcggcgtcgcagaacgtgacggtgcggccgggggcgctgtacgcgctcacgttcgcggcgacgcggacgtgcgcgcaggacgaggccctgcgcgtggcggtggcgccgtcgctctcggcgcccgccgacgtcgccgtgcgcacgctctacagcggcgcgtccgccgacacctgggcctggggcttccgcgcctcctcccccgtcgcgcaggtcacgttcgccaaccccggcgtgcaggaggaccccgcgtgcggcccgctgctggacgctgtcgccatcaaggagctgcccgcgccgtacccgaccaaagacaacctgatcaagaacgacggcttcgagatcggtccccaggtgctcaggaactcgacggtcggcgttctgctgccccccaagcagaaggacgcgacgtcgccgctgcccggctggatcatcgagtcgctcaaggcggtgcggtttattgacgcggcccacttctctgtccccgcggggcagtacgcggtggagctggtggccgggcgggagagcgccatcgcgcaggtcatccgcaccgtgcccaaccgcgcctacaacctgtcgttcgccgtcggcgacgcccggaacggctgccacggctctatgctggtggaggcgttcgcgggcaacgtcacgcagaaggtgccgttcgattccacggggaaaggcgggttcaagacggcggcgttcaggttcgtggccggcggcgtccgcacccgcctcaccttctacagctcctactaccacaccaaggtcaccgacggcgtctcgctctgcggccccgtgctggaccaggtcaaggttgtgcctgtcaaggcgtagtgaaatgaatcgtgagagcgccgagtgacggtctgctctgctcgtcgtctgtagctgtgctcgtcgtgatttggcgtggtgggttgtgaaagtgtggtcgaattctggacccttcggaatctgatcgtggtgtgctgtgcgg

SEQ ID NO: 23667 - DNA, 855 bp, Zea mays
  Clone ID: LIB3600-016-C8_FLI
gagggcgaccggccggccgtgacggtggagcactgcgaggagaagtcctactccgtggtgaacgtcaagtgcaaggaccggtccaagctgctgttcgacatcgtgtgcacgctcacggacatggagtacgtcgtgttccatgccgccgtgtcgtccgaagccaactacggcatccaggagctgtacatccgccgcaaggacggcaaaacgcttctgaaagacgaagcagagaaggtgatcaggtgcctggaagcagccatctccagaagagtatccgagggattcacgctggaggtgtgcggccgggaccgggtgggcttgctgtcggacgtgacgagggtgctccgggagcacgggctcacggtgagccgcgccgacgtgacgacggcgggcgggcaggccacaaacgtcttctacgtccggaacccctcgggccagccagtggacatgaagaccgtcgaggggctcaggggccagtttggccagaccgccatgctcaacgtcaagagcgtgggcgtgcctgctgcggtggccaaagcggcggagccaagctccggcagcatggtcaggagcagcttcttctccttcggcagcctcttcgcgaagctccgggcctgacaactggtcaggcgattcgaactccagctgtgtgtagaagaaatgaactcagaactagggtagtggactagcgggggtgggcgggggagagaaacagggagcaactgtatctctatgtggcagctgtggttgttgtacagttcataaggagcctctaccagaagaatggtagttctgtggaatgcaggctgcggactgcttgttaaggtaagggtttatcccatctgcgcagaattt

SEQ ID NO: 23668 - DNA, 1500 bp, Zea mays
  Clone ID: LIB3600-016-H5_FLI
gaccccaactcgcggagaccgagcccagtccagcgatgccgccgccgccgcaggcgaacggggggaaggtgaccccgaacctggcgatggacgccgaggccacgcgcatgctcaacctcacagtcctccagcgcctcgaccccgccgtcgaggacatcctcatcaccgccgcgcacgtcactctctacgacttcaacatcgacctcaaccagtggagccgcaaggacgtggaagggtcgctgttcgtcgtcaagaggaactcccagccgaggttccaattcattgtcatgaacaggcgcaacactgataatttggtggaggatttattaagcgattttgaatatgaacttcagccaccatatttgctgtaccgaaatgcttcccaagaagtaaatggtatttggttttataaccaacatgattgtgaagctgtcgcaagcctttttggaagaatattgaatgcttatgcaaaggtgcctccaaaaccaaaagtgcctaccacaaaaagtgagtttgaagaactggaggctgttccaacatctgctgctatagatggccccctggaacctccgctgtcatccacagctgtagtttctaatgcacctgatgaatcgctggtgaattacttcaacggtgctgctagcattgggagcgtaccaagtgcacaaatggctggcagagcacatccatcgaatgatacggtcacaccttcccatgtgccactgattgttccatctgctactccaacacatcaaatgtctcatcctttagggggttcatctgctccaccacttcctctccatgacacaaatccgcatgccagtcagtctgcaaatcttctaacaccagctttctttgcaccaccaccaccctcttcaacatctgtgacaccacctgcttcatccatgatgcctacagcaccacctcttcatccgacttcaacagctgctcaacatccttcatatggcactcccttactccaaccttttcccgcaccgtctccacctccttccctgacccctgcacacaacgatggacttgttatttcaagggataaagttaaggacaccctccagagacttgttcagaatgacgagttcatcgatttgatatatcgtgagttacaaagtgtgcacatgtagactgctgctcactagtctgtacggagtttgtctaaaccaccgatagtcttatggagctgctcgtcgcgacaaagatcgcctccctgtttttcttcttgtgagttttgtatgatttatttcttataaacctgtgcatagtttgttttaatgtagagtgcttatagcagtgcttggtaagcatttatcctgctggtttccaaataactggattgtcgtatagtatttatatgtaactgagcaccaagaatgttagattcccgcgatgcccattctggggcatctcggttttgtaaaacaggacttgtgcaggatttaaatgccatatttttcgtgtgaattaccgtggtggttcctggac

SEQ ID NO: 23669 - DNA, 771 bp, Zea mays
  Clone ID: LIB3600-018-D9_FLI
aggaagatggggctcgcgttcgggaagctcttcagccggctcttcgccaagaaggagatgcggatcctcatggtcggcctcgacgccgccggtaaaaccaccatcctctacaagctcaagctcggcgagatcgtcaccaccatccccaccatcggtttcaatgttgaaactgttgagtacaagaacattagcttcactgtctgggatgtcgggggtcaggacaagatcagacctctttggaggcattacttccagaacacccagggtcttatctttgttgtggacagcaatgaccgtgaccgtgttgttgaagccagagatgagctccacaggatgctgaacgaggatgagctacgtgatgctgtgctgcttgtttttgccaacaagcaagatcttcccaatgccatgaatgctgctgagattactgacaagcttggattacactccctgcgccagcgacactggtacatccagagcacttgtgccacaactggcgagggtctgtatgaaggcctggactggctgtccagcaacattgcgagcaaggcttgaggcctaccttgaatgtcaaccgcgaactgactaggagctccggatgtatcatggaaactcaggacagaatcgcagttgcaacctgttagatgtcttctaccggcactatatatattttttgtttgatgtgtaatgatgttactgttcaacgtttattaccctactatactgttggatgttctttggacctgtttcatttcgcacaaggattggacttcc

SEQ ID NO: 23670 - DNA, 771 bp, Zea mays
  Clone ID: LIB3600-018-E6_FLI
cacgcacggcactactcgtatctttaagcttgctgtgttgcaagcgtaagaaaaagcagtctgcactcgctcggtcgctctgttcagcttgctgcatgctcgcctcgccatcatctcctccagtacggtcgtcgttctccacgccgctatctggtctgcggtaagcagcagctagaggccgttgtaggctgaggatgctggtgaagaagaacaacagcacgtcgatggcggcgggcgtgctgccgctggcgtcgctgaaccacatcagcatcgtgtgccggtcggtggaggcgtcgctgcgcttctacgcggacgtgctgggcttcgtgcccatccgccgccccggctctttcgacttcgacggcgcctggctgttcaactacgggatcggcgtccacctgctgcagtcggaggaccccggcagcctcccggagaataagggcgagatcaaccccaaggacaaccacatctccttccagtgcgagagcatggtggcggtggagcggcggctcaaggagatgggcatcccgtacgtgcagcgctgcgtggaggagggcggcatcaacgtggaccagatcttcttccacgacccggacgccttcatgatcgaggtctgcaactgcgacaacctccccgtcgtcccgctcgccgccgccgccgaccagcgcgcgcctgccgtcctcggggcctgcaagcgggccgcggcggtcggcgtcaagcagcagcagcagcaaagcagcgccggcggcgtgccttcttccgccgccccag

SEQ ID NO: 23671 - DNA, 1326 bp, Zea mays
  Clone ID: LIB3600-018-G6_FLI
tcgccatggtcaggctcaccgccgacctgatatggaagagccctcacttcttcaacgccgtcaaggagcgcgagctcgacctccgaggcaacaagatcgccgtcatcgagaatgtcggagccaccgaggaccagtttgacacaattgacttgtcggataatgagattgtgaagcttgaaaacttcccatacttgaatcgtcttggcactctactagttaataataacagaatcacgcgtatcaatcccaatcttggcgagtttttgccaaagctgcatacgctggtgctcacgaacaatcgtctgacaaatcttgcggagattgatcccctggcatctcttccaaagctacagttccttagcttactggataatactgtaactaagcagccagattacaggctgtatgtgatccataaattgaagcatttgcgtttgctggatttcaagaaagtgaaacaacaggtttgttcatttcctttggaatggctccaaaatatgttttgggatggaccccagaagtgctggcagcaaaagagacaaacaagcaactcttttgactttggattttcacgaattagatgcattaacaccatggaatgctttggctgacatgttttccattatccagtctgcacatgttgcttttgtttctgaattttcttgggagattttttttttttttgctttgtaggagagagttgcggcagcgaaaaagttccactcaaaggaagcagaggaggaggcaaagaaggtgcctgccaaaacgtttactcctggtctgcctgatgctcaggacatcacaatggagccacaaggtcctaaagtagttgctccaactcctgaacaaatcacagctatcaaggctgctattgcaaatgcccacactctcgaggaagctgcaaggctagaacaggtactaagcactggccaagttcctgctgaatttgcagtgcccaagcccgatgcaaacatggccgaagcttcagatggagccgagaagatggacacagatggtgagaaccaagagggcggtgaggctgatgggcagaaacaaggcgaaggaagcaccccaattcaggaggattgaaggcatggtgacatgggctgggtcatccattgtctgagttaggtttgccagttttcgtgggggtgcaggaaagagctagagccttgttgccgcagaactccccctctatggatcgcatgtggatgctaacaagattcttgcttatttttgcagtagatggtactgagaacagaatcagatgttgtaaactatacatacagtcgtgcatgttgccgaatggaccattgtttcggtcgt

SEQ ID NO: 23672 - DNA, 1634 bp, Zea mays
  Clone ID: LIB3600-018-H5_FLI
gagttgctaggaatttaaacatcctcaatccactctagtccacatggatggattttgagattaaaaccagcagagcgtaacaaagctcacgtgcgggatgaaccctggaccgctgaaccttatgcattatacacaagcacagaactcctggtaaatcagttcccgcttcagatctttactccacgcctatgatcgatttcaggagcctgagttttgcgctgagatcactcaggtcggagtcttccctggagccggagccgacagggggttccacgcccacgaatacatagagacccacgagctcggcttccagagtcaaagacggcgtgggacggtacccggttattgttcttagggcatcaagctgctccctcatctgttcctccgtgtagttgtccgtgtcctcagctatcgcattcctcctaaatccttcgttcgccggcttgtactcaacacggtcactcgccgacggcggctcgctttcaccagcagaaatgctcgattgcaaagcaaccaccaccgcgcgtggtgtggcaagatcgtcggtgttattcgccgctccttccagcaccgaccccacggctgcttcgtcttctaccctgctctgaccgtctggcgctggcgatctagaaacttgaatgatccgtggtggtgacgtgctctctgtaggcacggttttgctctcctctgttttcacacactctttctcccgaaattccttgctccttagcgcgtcgtagccagttgtttgatcggagctgtcagcatctggcctactcttgacactagtcatgtcatcgccgatgactgagactgctggactcctactggaaactgtctctgcaacatcgtccacggtcaccaccgagacggcagtagaaacacctccctcaccgtagtgctccgtgccctctgtactagtatcaccaatatccagcacaatgccttctgttaaagcagcgttgataacatcgtcaacattgctggcttgcatcaactcgctttcagcaggtagggcaatggcaatggaatctacttgatcaccagccacctcccctgtacaaggatccgtgtaaatggtcacttctttcacggccatccccactgttacatcaccttctatcttcctctcctccagcactgtatcatccagcaccgacgattctgaaacattagcgtcgtgcagtggtatctcttcttcggttttgtggccctccatttcatccccaatctctgttgaatgagaatcttggcctgattttcggacagaaattgtttcaccatttcccctctgaaccacaataccttcattgcccggcaccgggaagtcacttgattcagtgatgtcgacgctcagtgacagaatctccttggaagactccgcatctttgcacttgtcgtcctgtgttctatcctcactgtctgatacagataattcttggactgattccttggctgtaagaggagcttctaccgctctctgaaccatatcgtcttcaccacgcaacacaggcactgctgatccgaaaacatcggagcctctcggcggtgcctccatggtaatgtactcggtgtcctccatgattgtgccttccttattgtccaacactagtgactcgtggcccaagtcctcg

SEQ ID NO: 23673 - DNA, 552 bp, Zea mays
  Clone ID: LIB3600-019-A7_FLI
gcgccgccatcgatcgatcgcccggaaactgacctctaccgatgtctggagccggcgaggaggataagaagcccgcggagggcggcgcccacatcaaccttaaggtcaagggacaggatggcaatgaggtgttctttcgcataaagaggtccacccagctgaagaagctgatgaacgcctattgcgaccgccagtctgtggacatgaatgccattgcattcctgtttgatggccgcaggcttcgcggcgagcagacccctgatgagctggagatggaggacggcgacgagatcgacgccatgcttcaccagaccggaggcagcgttcctagcaccacctaaaagcagcagctgcggagcctcgttttgctctccgccctgcgtagtactaaacaaaagggaaaaagtctttttaaggaacttgtgatgctctggctccttgtgccattgctgagggacatccttagcctttatttagtggtatggtttggtactttgttctgtcatcactcgtttatctatccctaatacatgccgccatgtttgtacttcc

SEQ ID NO: 23674 - DNA, 847 bp, Zea mays
  Clone ID: LIB3600-019-C11_FLI
cggcaggagctctgggcagcgtgcgcacgtggggtacctagctcgctctgctagcctaccatggctgatcaccaccggggtgcgacgggaggtggcgggggctacggcgacctccagcgcgggggcggcatgcacggcgaggcgcagcagcagcagaagcagggcgccatgatgacggcgctcaaggccgcgacggccgcgaccttcggcgggtcgatgctggtgctgtccgggctgatcctggccggcaccgtgatcgcgctcacggtggccacccccgtgctggtgatcttcagcccggtgctggtgccggccgccatcgcgctggcgctcatggcggccgggttcgtcacctccggcggcctcggcgtcgctgcgctgtccgtgttctcctggatgtacaagtacctgacgggcaagcacccgccgggcgccgaccagctggaccacgccaaggcgaggctggcgtccaaggcccgcgacatcaaggatgcagcacagcaccgcatcgaccaggcgcaggggtcttgagagaagaaccacactcgagcggaccgcgcgcgcgacctccttgaaccactgccggcgcggcggcatatggcccttaaaggcggtggctgctgctacgtacgctgccgtagagtctcggtcgccgcgatagctctagctagtcgtttatgtgttgtgctttgtgtgtgcatgcttgtgtctgggggcatgcagtgcagtgcagtactatatgctgtatgcgtctctctttgatcggagaggcggatgtacagcatgctcgatatgtctagtttggatgtcatgtttatgatgaggaataaaatgcagtgttcaggtg

SEQ ID NO: 23675 - DNA, 558 bp, Zea mays
  Clone ID: LIB3600-019-G3_FLI
ggctcaccccaccaacagcaagcgaaaatctcccgatcccctctagtctccgcggcgaagatgtcggggcgcggcaagggcgggaagggcctgggcaagggcggagcgaagcgccaccggaaggtgctccgcgacaacatccaggggatcacgaagccggcgatccggcggctggcgcgcaggggcggcgtgaagcgcatctccgggctcatctacgaggagacccgcggcgtcctcaagatcttcctggagaacgtgatccgcgacgccgtcacctacaccgagcacgcgcgccgcaagaccgtcacagccatggacgtcgtctacgcgctcaagcgccagggccgcaccctctacggcttcggcggctaggctatgccggtcgcgctcgcgcctcgctgtcgtcgctgcggttcttgtttctgcaattcgcaaggtgtggcttgacggggaaaatgctggttaatgtagcactagatcaagcatgttgtgcgtgtctgaagaaatgccaattgtgacttgctgtttgttcaaacatgttccgtttcttcacatatc

SEQ ID NO: 23676 - DNA, 891 bp, Zea mays
  Clone ID: LIB3600-020-B7_FLI
cggcgcgggcggacaaggagcaggcggaggaggagttgtgccaagccacaatgggtatctcgcgtgactcgatgcacaagcgccgagccaccggtggaaagcagaaggcctggaggaagaagcgaaagtatgagcttggtcgccagccagccaacaccaagttgtcaagcaataagacggtgaggagggtccgtgttcggggaggtaatgtgaaatggagggctcttcgccttgatactggtaactactcatggggaagtgaagctgttacccgcaagacccgtatcctcgacgtggtctacaatgcatcaaacaatgagcttgtgaggacacaaacccttgtgaagagtgccattgtgcaagttgatgctgccccattcaagcagtggtacctcactcactatggagttgacattggtaggaagaagaaaacccctgctgcaaagaaggataatgctgagggacaagaggttgaggcagcagctgaggaaacgaaaaagagcaaccatgtcacgaggaagcttgagaagcgcaaggagggacgtacccttgacccacacattgaggagcaatttggcagtggacggttgctggcatgcatttcttcccgtcctggacagtgtggccgagctgatgggtacatccttgagggtaaagagcttgaattctacatgaagaagctacagaggaagaagggcaagagcgctgtagcttagagcattctcatggattgtcttgcaccgaaatgtgtgtcctgatgagtacacttttttggttagtcgtctcaagttcagagcgttatgccatattttcagacctgatttgtacactgttttctaaaagcgattgagctctagtccaatttgagcagggtatgattatttgttgatg

SEQ ID NO: 23677 - DNA, 778 bp, Zea mays
  Clone ID: LIB3600-021-B3_FLI
gctggcatgcacgagaggaaggcggagatggcccggtttgctgacgccttcatagcgctacctggcggctacggaactctggaagaggtgcttgaggtcatcacctgggcgcaactaggaatccataagaagccggttgggcttgtgaacgtggatgggttctacgacccgttgctgtccttcatcgacatggccgtgaaggaagggttcatcaaggaggacgctcggcgcatcgtcgtctcagctcccacggcgaaggagcttgttctcaagcttgaggagtatgttccggaatacgaggtcggtttggtgtgggaggatcagatgccggcggcggagctggagagcccgggatcgcctcctcctcgtctctggacgtcggctgcccttctctgaccagtttctgcggccggatctcgaagtagtaggcatctatgctgatatatatactaagctagctctagactcagcctgttggtttgttcttttgggatgggtgacagtgtttaccttagcatctatcgttagccgcggtgcagtgcgtttctctgtcattgctgctcttttgggcttttgctcctatagaagcaggaaggaaggcatggtatgtctgtatgtatattccgggtacgtggtgacggacctgatcggctgttcttgttcgctcgcagcctcgcactcgcactgtgtgatggaatgggatgatgatgtactgtgtccggaacaaacaaacaaaaaaaagactaattatgcaatgtaatcgattcgtttctaatct

SEQ ID NO: 23678 - DNA, 1292 bp, Zea mays
  Clone ID: LIB3600-021-C11_FLI
acgcaagctgcgactgaacctccgtggcgacggaggagacggccatggtggcagcgatggagctcgagatcctaggcatgaatttcgggtgcgtcctcgcggctctgtccgacgccaagatccccgacaagggctgcctgctcccgctcatctctaagctgctcggctacgccatcgtcgccgcatccaccaccgtgaagcttccccagatactgaaaattttgaagcatggaagtgttagaggactaagtgtggcatcctttgaacttgaggttgtcggctacacaattgctttggcatattgtattcataaaggacttcccttttcagcttatggggagctagcttttctgttaatccaaggtttgtatttgacttcatgtcttgagtaggcagcatatatgtttctaaagctgatgtatctgtctttgttgatcttcttaactgatgcttttatccgatatgcagcaattattttggttgcaatcatttactattactcaccaccaatgggaaccaaaacatggatgaaagctttattgtatccttcatttctggctgtttattctaactttgcttttgtgttgccaataaagatgtgccaggtcccacggagcagttcaatgaagatcatcaaacttcattaatactttgtatgattacaatgtttgacctgctttccctatacagtggttatttagatattgtggaatggctccaacggttttggctggaaaaatagatcctgctctttttgaagtcctttatgcttcacaacatgctatcttcttttttgctagagttccacagatatggaagaattttacgaataaagggaccggcgagctaagcttccttacctgtttcatgaactttgctggttccatcgtaagagtttttaccagcatccaggagaagactcccttaagtgtgatcatgggctccgcaatcggcatcgtcatgaatggtacgctcttgggtcagatagtactgtaccagaaacccgctccaaagaaacagaagaaagaagattaagcaacatggagaagctgcagaaagttcttcctggttgtttaggattctgttccaacactcgctccacatctgaacaaatggcaccagtataggaagttgttggcaactgttacgagaaaagaacatagtcggactattgctatataacaacatttctgtgctgttgtttttagcacttagcagtgtaccatgacttgagtagttcatataactgcctttagatattgactgcaagctgctgctgatgtgttttcctt

SEQ ID NO: 23679 - DNA, 744 bp, Zea mays
  Clone ID: LIB3600-021-D10_FLI
gcagagagacgccactaccaccaccgcaagcgacgacggggagatgtttctgcgacggatcctgaccggcggaggtggcctggcggcgctgagggcggcgcgcgccgtgaaggagacgacggggatcgtcggccttgaggtggcgcccaacgcgcgggaggttctcatcgggctctacacgcgtacgctcaaggagatcgaggccgtccccaaagacgagggctaccgcaaggccgttgagtccttcaccaatcaccgcctccagatctgccaggaggaggacgactggaagcgcatcgaggaccgaatcggatgcgggcaagtcgaggagctcatcgaggaggccgaggacgagctcaagctcatcgccaaaatgattgaatgggatccgtggggtgtccctgatgactacgaatgtgaggtgattgaagacgacaccccaattcctaagcatgttcctcagcaccggcccgttgctcttcctgaggagttcttcaagacactagatgccgtcaaatcagatcccgccctccaaggcgatgctcctcctcaagtgaaggcgtaaagatgagtcttcccggttatgtcttatgtcatttcacactttgctgcgctgggtagggactagtttcttgtgccatttgccagcaatgtgcttgttccgagcagaataaatttctggcgagtaccatcgaagagtgactttgaacgaagtgattcgacacagtaaatttgttgttgtcc

SEQ ID NO: 23680 - DNA, 564 bp, Zea mays
  Clone ID: LIB3600-022-G2_FLI
gaagctttcagttcagccgagcaccatcgtcacagtcagtagccaagcatatttctttctccgactccgagtgatttgcgctgaacgatcagtttccagagcgagcggagctgagcgagcttgcgttgcttgagagaccctgccatggcttcccaccaggacaaggctagctaccaggccggcgagaccaaggcccgcaccgaggagaagaccgggcaggcggtgggggcgaccaaggacacggcgcagcacgacaagcagggcgacgccaacaccaacaccaacaaggactcctctaccatcaccagggatcactagacgcgtgtatgcacacgcagcacttggtccgatcctgtcgtccgtgaccctgtttgcttgttcgcgagtccagtatagggttgtgcatgtgtttcagtgtcatggtttccttttctacgaaatttggtgttgtaagtttgattcgcatgtacgttgctgtgttttttctgcgtcatcatgtctgtaaacgagtcgggcgggtttgagtgtcctttgttgtgataataaagttggtaaatcgtaatt

SEQ ID NO: 23681 - DNA, 1201 bp, Zea mays
  Clone ID: LIB3600-022-G6_FLI
acggtccacccacacgcaaggtcgcaggtcgcaacccgcgggcggaggggcaggcacaggaccgttgcgttgctgccgccgccggcacgagatcgaggagggatcccccgctctcacgccgctccaggtcgagggccgagcgagatggtgaacaccttcttcctcttctgcgggtgcgtggaccaggccagcgtggcggtggtggagaagtggggccgcttcctccgcctcgccgacccgggcctccacttcttcaaccccctcgccggggagtgcgtcgcgggctccctcaccacacgcgtccagtccctcgacgtccgcgtcgagaccaagaccaaggataatgtcttcgtccaactgatctgcacaatccagtaccgtgttgtcaaggaaaatgcagatgatgctttctatgagttgcagaatccccagcagcaaatccaggcctacgtctttgatgttgttcgggccatagtgccgagaatgaatctggacgatctctttgagcagaagaacgatgtggccaaagctgtattggaggagcttgaaaaggtgatggcagattatggttacagcattgagcacattctcatggttgatatcatccctgacgctgctgttcgtaaggcaatgaacgacataaatgcagcccaaaggcttcaactggcaagtgtttacaagggagaagcagagaagatccttatggtgaagaaagcggaggcagaagcagaggcgaaatatctttctggtgtcggtatcgctaaacagcggcaggcgataaccgacggccttagagagaacatcctgaacttctcacactcggtgtcgggcaccagcgcgaaggaggtcatggacctgatcatggtcacgcagtacttcgacaccatcaaggagctcggggacggctccaagaacaccacgatcttcataccccacggaccaggccacgtgaaggacatcagcgagcagatccgcgacggcatgatgcaggcctcaagcagcaacgtgtaaatcaccgactctctgcacgattggagacggctcggctcaggatgaggcctggagtaccatgttcatagtgttaggttgttgttagtggtaaataatgagtgctggggcttttggcgagtcttgagttacatgcggttgtacaactagtgtggtttgttttatatataaaaatgtatatttacatggttct

SEQ ID NO: 23682 - DNA, 989 bp, Zea mays
  Clone ID: LIB3600-023-C7_FLI
caccgaattccctgcgattcctctcccctcgcctcctcgtctccccctaggggatcgtcggagaggaatcgcaaagagggccgtctcatccgagttaaggaagccatggagcacaaggaggctgggtgccaggcccccgagggacccatcctctgcatcaataactgtggcttcttcggcagcgcggcgaccatgaacatgtgctccaagtgccacaaggagatgataacgaagcaggatcaggccaagctggctgcctcctctatcgacagcatcgtgaacggcagcgacgccgtcatggagccggttgttgctggcagcaacacggtagtagctgttgcccaagttgagttgcaaacaatgaacgtgcagcagcccgctgatgttgccggacccagcgagggggtggcggcgatctccaaaggggggaaggtagggccgaaccggtgcagcgcctgcaggaagagggttggacttacgggattcaactgccggtgtgggaacttgtactgcgcactccaccgctactccgacaagcacgactgcaagttcgactaccggactgctgccagggacgccattgccaaggctaatccggtggtgaaggcagacaagctcgacaagatctagggggggttccctacggttgggtatcaggaagattgtaaaccgcggtaactcgtcatgcggaactgctgccttgccccccgcgcctttctcttccatgtttgctgctacaatcttgttgttgggcattgcagtgcacggtgcacacttgtgtagcccgcctcgagaattcctgcctctgcatctggtcagttctaaaatgatttgcatgttggctatgttgtgtaagctctatttatggtggtctcgctgagacgggtatttggcttcgcagttatctagctatgtgatgtactgttgtcttgtccctgggtattatatggtacactgcagccagtaatagtaatctgcaactgtgcgtt

SEQ ID NO: 23683 - DNA, 468 bp, Zea mays
  Clone ID: LIB3600-023-H11_FLI
gtccgactcccagccgtcgtctgctgcgtactccgcctccagtttggtctgtttcttgcaagttgctcttgcggtagttcccccaactgtcaccatgcagaacgaggagggtaagactgtggacctctatgttcccaggaagtgctcggccacaaacaggatcatcactgccaaggaccatgcctctgtccagatcaacattggccacttggatgcgaatggcctgtatgatggtcacttcacaacatttgctctctctgggtttgtccgtgctcatggcgatgcagacagctccttggacaggctgtggcagaagaagaaggctgatatcaagcagtagattttacatctagtttaccaagaattggacactgccttagctatgttttgaattcatgtcactatatgcaatgttgtgatttcagctggtaccttaaatctgaagatttagtatctttgttgggttcc

SEQ ID NO: 23684 - DNA, 440 bp, Zea mays
  Clone ID: LIB3600-024-F8_FLI
gctcatatcatctgtcacccatggcgaagtgcagcagcttccaaggattattctggttgctttccatgattcttctagcatcctttgttgctcatgcacgcacaacaagtgggcacaccaaagaggacagcaatgctaggaacatgacgatgaccaagacgagggcatcgggcaacatacttgttagccgtaatgacgacgggccatgctatctagattccggtcttaatgagtacgtctgcagaaagactaataagtgctataagagcttggtgctctgcgtggcgagttgtcaaccatcatcatgaattcatgatactgcggagacatcatgatactgcggagacagacggcgagagatgaggctagctagatgctgtttcaccaaaatattatgtaacacccaaatctcccattttaagaaataaataagattttcg

SEQ ID NO: 23685 - DNA, 1433 bp, Zea mays
  Clone ID: LIB3600-024-H1_FLI
ggcgtggtgagtgaggcagcggcgagcgagcgctttcaggcggtccgccacccccacataccttctctctcatttcgtggcaaaacagatttcttttccccaaagcatggatggcctgaagatatagcttggcatccagctggtgagacaatttttgctgtatacactgctgataatggcgattctcaggtttcaatgacaaaccttatatcaggacaacggaaagttactttcctgccagagaagcctcacacaaagggaatcataaataacataagtttcatgccttggtctgatgcatgctttgtaactggaggaagtgaccatgctgttatactttgggaagacaaagatgattcatggaaaccgaagagagtgcataaggatttccattctgctgctgtcatgggtgttgctggattgcaacagaaaagaacaattttgtcagttggctgtgacaagaggataataggatttgatctctctgctggaaggacagagttcaagaacctacttgatagcaaatgcatgagcgtattagcaaatccatgcgatttcaacctatacatggtgcagacaggggatccaggcagacagctgcgcttgtttgatgtgaggctcaggcaaaccgaggttcacgcgtttggttggaagcaagagagcagcgagtctcagtcagctctgatcaaccaatcatggtctccagatggctggtacgtgtcatctggttcagcagatcctgtgatccacatcttcgatatcaggcaccatggccagaatccttgccagtctgttgaggcacaccagaagcgagtgttcaaagctgtctggcaccaaactctgccatatctgacctccatatcatcggacctcaacattgggatccacaaatattcatgaaagcgacatcacgtttttggtgctcagcaatcccatgaaaacctgtggacatttgtttgctcaaagcggaacttggcatcaattgaagaaaacagcaaaatcggtgtgctttgagcttgtttcactggccctgcttcgacattgaccttcggtgcagaagaaccatgctgcgagagagctccacagttggatgtcttgctccagttgatggaaacattcccacctgcttttttgagctgctgctgcagttctttcaccagaacactctttggctcaatgagctgcttcggttacttttgggaagagaagagtcagctatacacattatgtccaatattttcggcaacgtattccctcgtctgttactgctttttttttttttgcccttgttgggtggtttacagggcatttatctaaggccaaaatctatgtgcgccatgcgtagttttatttttctcacacatgtctcgccaacaataatatatgtattgcttgtttttatgtaatgataatattttatcaagtattacgtg

SEQ ID NO: 23686 - DNA, 1009 bp, Zea mays
  Clone ID: LIB3600-025-B10_FLI
ctcgctcaccactcaccagtcaccagtctagcaagcaacaacaaaggcgtaggaggaagcttgttttggaccgagcaagcgagccagccgagcgtgggagagagagaaagaggaattaattgatgggcgaggaggccagctgcgacgccgtcagcctgacggaggccggcaccaacgccaagccggtgggcaaggaggtcggccgcgagccggctgcagcccccgccgccgcggccgacccccggctgcagggcatttccgacgccatccgcgtcgtgccgcacttccccaagcaaggcatcatgttcaacgacatcaccacgctgctgctgcgccccagggtgttcaaggacgccgtcgacctgttcgtcgagcggtaccgcgggatgggcatcgacgccgtcgccgggattgaggccaggggcttcgtgttcggcccggcgatcgcgctggctattggcgctaagttcatacctctgcgcaagccaaggaagctcccaggtgaggtgatctccgagaagtacgttctcgagtacgggactgattgcctggagatgcgtgtcggggccatcgagcgatccggcgagcgggtgctggtcatcgacgacctggttgcgaccggagggacactctgtgctgcgatcaggcttctagaacgtgctggagccgatgtggtcgagtgcgcgtgtgtcattgggctcccgaaattcaaggatttgtacaagttgaatggaaaacctgtatacgtgctggttgagtctcgtgaataatcggagaaatgacaacttattctcaggtgtcagagtgatcagggatattggctgtttactccttgctactgcgattgaacagtggagggacgacatggacaaggacaagtatattcggtgcatcactaagtcttggtgaggggagagattgtagtgttttaggctgagtagtgaagagcctgtagttctgcacggaacatgatggttattagttgatgcaacagcgttgctgttctatt

SEQ ID NO: 23687 - DNA, 1195 bp, Zea mays
  Clone ID: LIB3600-025-G12_FLI
ctccaccctcctctgtcagggtcctccgattcggacttcctcacggccgccgcgcgaaatcccgtctcgttgctccggtccgctgcgcatcctcaggtcaggcatgcccagggcattcacaatgtcgcgggggagaaggacttcggcgcgtacatgtcacatgaactgttcgatgctcagctcactcctttgggttggaaccaagtcgatggtctgcgtgagcatgtgaagaaaagtgggcttgcagaaaagattgaattagttatttcttcccctttactgaggactatgcaaactgcagttagtgtctttggtggtgaaaagtatactgatggtgtaaatgcacctccactaatggtcgaaaatgccagacacagtggccgtccggcagtttcaagtttgaactgccccccatttattgcagtcgaaacctgcagagagcacttgtttcatgtttggtttggttgctgttaaatcagggtgtccatccctgtgacaagaggaggagcataacagaataccggcctctctttcctgcgattgatttttcattgatagagaatgatgaagatgttctttgggaaccagatgtgagagaaccaaatgaggctgtcgcattgaggggtatgaagttcatggactggttgtggacaagagaagagaaagagatagctattgtcagtcacagtggtttcttgtttcacaccttaagcatgtacagcaaggagtgccatccaaccataagagacgaagttagcaagcactttgcaaactgcgagctacggtcgatggtgttggttgacagaagcatgcttgggtcatattcctcaagattcaactatgctggcaagaatccaaccggactagatgtgccaagtgatattgcagataagaagcaggttgacgaagctcagaagaactaaggcaaccttgaaagcataccatatatgacttggattatcaagaaattctgacctttgcgaagcttgtttgctttgaagaggacaagctaagagggcatctacagatagagtttacgcataccattttgttagtcaagttgaactacgcagcaatgtattagcatgtctgctcttttgtctcagcctacattgagattcagggcattggactaggatcatctatttatgataataataaccggatcacctacattcaccaggtgatgcatggc

SEQ ID NO: 23688 - DNA, 663 bp, Zea mays
  Clone ID: LIB3600-025-H1_FLI
ttctggttcgtgggcgagagggaagagatggcggcgtcggacgttgagtaccgttgcttcgttggcggcctcgcctgggccaccgacgaccactccctcaacaacgccttcagcacctacggcgaggtcctcgagtcgaagatcatcctggatcgggagacgcagaggtcccgcggcttcggcttcgtcaccttctccacggaggacgcgatgcgcagcgccatcgagggcatgaacggcaaggagctcgacggccgcaacatcaccgttaacgaggcccagtcccgcggcggccgtggaggcggcggtggcggatacggtggcgggcgccgtgatggaggcggctacggcggtggcggtggaggctacggcggtggtcgtggaggctacggcggcggtgggggatacggtggtgcaaaccgcggcggcggctacggcaacaacgacgggaactggaggaactgagcggtggggtccgctgaggcctagttatcttgttcgcttctgctaccgtgttcaccctagtctagagggggtttatcttcgtctgtggtcgtctcgtgtccgtatgtttcgtttcgtgttcgttgttgttgttgcccatctgtgtttttgaccgcaagctcgctcctctgatgttgttagtgatgtctacaatcgtcc

SEQ ID NO: 23689 - DNA, 790 bp, Zea mays
  Clone ID: LIB3600-026-A11_FLI
ccatcgccgcggcgcttgccccacctctcccccgcccggtagtagcctcgccgccgttgccgagatggggttcgtgtccttcgtcgggagggtgctcttcgtcgccgctttcctcctctccgcctaccaggagtttaatgaattcggtgctgatggtggaccagcagctaaggcccttcggcccaaattcaacgtgtttgtcaaaaatgtatctgctcatctgggagtagctgtgccacacattgagttgaagcatgtgattgctgctacaattggtcttaagggtcttggaagcctcctttttattttgagcagctctctcggtgcttatctcctgctgctgtaccttgctttgatcactcctatcatccatgacttctacaactacgatatggagaaggcagaatttgcaggcctctttgcgaagttcacccaggatttggcgctgatcggagctctgctcttctttctgggcatgaagaactccatcccgaagcggcagggcggcaagaagaaggcccccaaggcgaagacgaactagggctgcttagatagctgcacgcctcaggcggggtgtatcaggccacaggtctatttcgaagcaggcccagcgcgatgcagcgaatgccatcgagctgcgcttttacatgtttatcatcagattccattttgcggggcacggcccggacaaaggtgtgaccggggtgggttaggcgactagattgcacgattatgtacttgcgatttgtttgttgaactgggttgccgacagttaatcttcatttgattt

SEQ ID NO: 23690 - DNA, 1177 bp, Zea mays
  Clone ID: LIB3600-026-B12_FLI
ccctttccccttccctccctccctctccccgcgggccgccagaggcaatttcgccctcgattcgaccccgattcgtccgcccgcgaccgggattccctccgccaagcgcggatctgaacgctgcgctccgtgtcgccgctcgaatccgccatgaagggggccaaatccaagggcgccgccaaggccgatgccaagtaagaaaaacgaatctccggttctcttcttccttgttcgtcccgtggatctgttccgtggcgtccgaagcattcgatttctgttattatgacatccgccgccgcgagtagattttgacctttttttttcccgtcgtcgttgttttgctgtcgctgtctctgtcgtcgtcgtcgtcgactcgattgctttggcatctgcaggctggcggtgaagagcaagggggcggagaagcccgccaagggcaggaaagggaaggccggcaaggaccccaacaagcctaagagggctcccagcgctttcttcgtgttcatggaggaatttcgcaaggagttcaaggagaagaaccctaagaacaagtctgtcgctgcggtggggaaagctgctggcgacaggtggaaatccctgagcgagtcggacaaggctccctatgtagccaaggctaacaagctcaagctcgagtacaacaaggccatcgctgcctacaacaagggcgagagcactgcagctaagaaggctcctgccaaggaggaagaggaggaagatgaagaggagtctgacaagtccaagtcggaggtcaatgacgaggatgatgaagagggtagtgaggaggatgaagatgatgacgagtgatggagctcctcgagacaatggaccgtgcttcatccaacaatggagcggctacacaaggccccgtggcgatcacaaaaaaggagcctatatccatgtactagaattattcagtttcactccacatcgtgatgttttatttttacttttgtcgtgctataacggatagcgctcctcgttggcgccactggcgggtggttctgcctctggtctggtgtgtttgtgtgtggtcacacttgccagccagcagaggcgcctgcttgtacctagattactgtttccattgtcgtcatcatcggctaacattgtcataatgtcagtttgggtaatgttagattaagtaattattgtgttc

SEQ ID NO: 23691 - DNA, 1913 bp, Zea mays
  Clone ID: LIB3600-026-B7_FLI
ggatcctgcgctctccttaccctctccacttccgtttccggatcccgtttccagctccgatccaacccagcatctgtaccgcgccgcgcgagcacgtccggcgccggtgcggcaggcgaaatccgagagcactcctcccccgctacgccgcaccgcccatggccgcagctagccgcagatagagagaggcgcaggcgagggcgtgcagatccagatccggtgggcgggaaggacttgatcgcccccaccaccatggccggcgcggtgtcggcgctcttcctgctggacatgaagggccgcgttctcgtctggcgcgactaccgcggcgatgtctccgcgctccaggccgagcgcttcttcaccaagctcctcgacaaggagggcgattcggaagtgcactcgcctgtggtctacgacgacgctggcgtcacttacatgttcatccagcacaacaatgtcttcctcctcaccgccgctcgccagaactgtaacgcggccagcatcctcctcttcctccaccgtgtaatagatgtgtttaagcactacttcgaggagctggaggaagagtcgctcagagataacttcgtcgttgtgtatgagttgctcgatgagatgatggattttgggtacccacaatacacggaggcgaagatattgagtgagttcatcaagacagatgcatacaggatggaggtcacacagcgtccacccatggccgtgacaaatgctgtgtcatggaggagcgaggggatccggtacaagaagaatgaagtcttcttggatgtagtggagagtgttaacattctagttaacagcaatggccagattgtgagatcagatgtggttggggcactgaagatgcgaacatatttgagtggaatgccggagtgcaaacttggcttgaatgatagggttcttttggaggctcaaggcagagcaactaaaggcaaagcgatagacctcgatgatatcaaatttcatcagtgtgtacgtttggctagatttgagaatgatagaactatatcgttcatacctcctgatggatcttttgatctaatgacatacaggcttagcactcaggtaaaacctcttatctgggtcgaagcacagattgagaaacattctagaagccgtatagaactcatggtgaaggcaaggagtcagtttaaagaaagaagcacagcaacgaatgttgaaattgaagtgcctgttccttcagatgccacaaacccaaatataagaacttcaatggggtctgctgcatatgctcctgagagagatgcaatggtttggaaaataaaatcattccctggtggcaaggaatacatgtgcagagcagaatttagtcttcctagcataacagcggaagaaggggccccagaaaagaaggcgccgatacgggtgaaatttgagataccatatttcaccgtatcaggtattcaggtccgttatctgaagataattgaaaagagtggttatcaggcactcccctgggttagatatatcacaatggctggtgaatatgagctgagacttatatgagttctctcttctctggctgccggacgacttttgaagctgcaggacactaaagatacatatttgctatcgacacagcgaacagttttcatttggatgttggcctggaagtcttctgccgaccatacccctccccgtggtggggcttgctgttcatcttgttaggctcaccttaccctggttattgtaagttaccaatcaagtacagttttggaggaaaggatattcagttttcagttcacttgtattgttattgatttattttgtgggtaccaaactagatttgtttcgttctgtattacacggaaaacatgggctgatttgagttcaacaaaacattgccacatctggcgatgattctggggtgcgggttg

SEQ ID NO: 23692 - DNA, 1114 bp, Zea mays
  Clone ID: LIB3600-026-C2_FLI
gcgttcgccaatggaattcctagtaatagcgcggagcttttaagcttagctgacatggatcttggataacgagtcttaggttctgctactgtttgacgatctagctgatataaggtcctaactgccctatgtgaatcgtctaatcttgcaggccccgaagagaggcggtagggcgccggtccccgccaagaagaaggcggtggtgacgaacccgctcttcgagaagaggccgaagcagtttgggatcggcggcgcccttccgcccaagaaggacctccaccgcttcgtcaagtggcccaaggtcgtgcgcatccagcgccagcgccgcatcctcaagcagcgcctcaaggtgcccccggcgctcaaccagttcacacgtaccctcgacaagaaccttgcaacaaacttgttcaagatgcttcttaagtaccgccccgaggacaaagctgccaagaaggagaggctcttgaagagggcccaggctgaaaacgaggggaaaactgttgagtcaaagaaaccaattgttgtgaagtacggccttaaccatgtgacttacctcatcgagcagagcaaggcccagctggttgtcatagctcatgatgttgatccgatcgagctggtcgtgtggctcccggccctttgcaggaaaatggaggttccatactgcattgtcaagggaaaagtacgccttggatcgatcgttcacaagaagactgcatctgttctttgcttgaccaccgtcaagaacgaggacaagcttgagttcagcaaaatcttggaggctatcaaggctaacttcaacgacaagtttgatgaggtcaggaagaagtggggtggtggtatcatgggctccaaatcacaggcgaaaaccaaggccagggaaaagctgcttgccaaggaagctgcccagcggatgacctaagtcttgccctgttaaattaaaattttcttgtacttgcgatcgtgtgcaatcacggtggttgtcagatctagtttttgagagttttgcttgagaaagaccgagtcaccgaccatgacagaaagacatcatgtaagaattcaaagttttggttctgtaccatctagttcatgtgaatcatcttctatgatggct

SEQ ID NO: 23693 - DNA, 355 bp, Zea mays
  Clone ID: LIB3600-026-D10_FLI
gcgagagctcgtcggcctccgtccccgcgagaagcgagagcatggacacccaagtgaagcttgctgttgtggtaaaggtgatgggcaggaccggctccaggggtcaggtgacccaggtcagagtgaagttcttggatgaccagaaccgtctcatcatgaggaacgtcaagggccctgttcgtgagggtgacatcctgaccctgctcgagtctgagagggaggccaggaggctgcgctgaagcccttgttgtcttggatgtaattctgttaattttgttcaatgtttgtcgaacttgccgtgtgacccatactatatctgctttgggatttagtaagcctggattgcagttttttt

SEQ ID NO: 23694 - DNA, 846 bp, Zea mays
  Clone ID: LIB3600-026-E12_FLI
agagaaggaaaaatatccccaaaccctagctcccgatctcgatggcgaaccctcgcgtcttcttcgacatgaccgtcggcggcgccccggcgggccggatcgtgatggagctgtacgccaacgaggtgcccaagaccgcggagaacttccgcgcgctgtgcacgggcgagaagggcgtgggcaagtccgggaagccgctccactacaagggctccaccttccaccgcgtcatccccgagttcatgtgccagggcggcgacttcacccgcggcaacggcaccggcggcgagtccatctacggcgagaagttccccgacgagaagttcgtgcgcaagcacaccgcccccggtgtgctctccatggccaacgccgggcccaacaccaacggctcccagttcttcatctgcaccgtcgcgaccccttggctcgacggcaagcacgtcgtcttcggccaggtcgtcgagggcatggacgtcgtcaaggccatcgagaaggtgggcacccgcaacggctccacctccaaggtggtcaaggtcgctgactgcggacagctctcctagatctctctgatctggtctgttcggccgccctccctccgtcatcgtcgactccccctgcgtccgttcctttggatctgaataagatggtggtgatctgagtggtggtcttagtttatcatgtatcgctcgcagtttaatttagcggtttaggtgtggatctgtgaaccccatggcgcctctgcttgattcgtgtttcacctgttatgttctgagattcatgataatgctatgagaactgaaattcccgtttcatgcttcttaaatctttgacctctgcggttgtgcc

SEQ ID NO: 23695 - DNA, 1701 bp, Zea mays
  Clone ID: LIB3600-026-G1_FLI
aaaaaaaaaaaaaaccctgagtcccgcaaaacccctaaaccctagcccctcacctctcgcctccgccctcatccgcgcgacttgcagcggttggaggcgaagccggctccatgacgaccctcctcaggcgcgcgtcgctgcggcgcgtcattgccgccgccgccgcctcttcttttcaccctgagagctataagcaagggatctgtggctccacatttcattgccgagagttcgcatcaaaagcaaaaaagaagtcaagtggaacagactctggggaggagaacatgtcaaagaaagacttggctttacaccaggctattgatcagataacgtctgcatttgggaagggggcaataatgtggcttgggcgttcacaaggccatagagatgtaccagtcgtgtctactgggtctttggatttggatatggctctaggaactggtggtcttccaaaggggcgtgttgtagaggtatatggtccagaggcttcaggcaagacaacgcttgctccatgtcattgcagaagcacaaaagaatggaggttactgtgcctttgtagatgcagagcacgctttggatccagctctcgccgagtcaattggtgttgacactaacaatttactcctttctcagcccgattgtgctgagcaggcactcagtcttgtggacacactgattcgaagtggatctgttgatgttgttgtagtagacagtgttgctgcgcttgttccaaagactgagcttgatggtgagatgggtgatgcacatattgctcttcaggctaggttgatgagtcaagcccttcgcaagcttagccactccctttcactttcacaaacaattttgttatttattaatcagatcagggccaaggtagccacatttggatttggaggaccaactgaggttacttctggtggcaacgccttgaagttttatgcatctgttcgcttgaacatcaggcgtattggtttggtaaagaaaggcgaagagacaataggtagtcagattgctgtgaagattgtaaaaaacaagcatgccccacccttcaagactgcacagtttgagcttgaatttggaaaggggatatgccgcagttctgagctttttgaacttggattgaagcacaagcttatccgaaagagtggtggttcgtattatagtttcaatggtaaggctttcaatggtaaaagtaaccttaaatcttaccttactgaaaacaagagtgttgccaatgatctggagatggaactaaagagattgatgggaactgatgcgtctaaagagcaggaggcaggagacagttcgcagagtgattttcctgaagagagtgtcacacctgaagcatcgtcagaagaggatctgggagccataattgaaggttagccagtgatctgatgtgctggcaagtgggaacagaatttctggagcagttgttcctgtaaaacaatatcttgggtcctgaagtcaccaccgtttggatcgacatgcctgtggtgttctggtgatctcatcatagcagacttcagtctttactgtgcttatacagtagtgcagcaggaagagaattcacattgtgtgaaatcatggtgatatctgagaggtggaagttgtagtaagccgggaagggtgaggtattgtggtccgtggcatttaaacttcagtaagcaaacgccgtgtatatatgatgtgcacattttg

SEQ ID NO: 23696 - DNA, 1110 bp, Zea mays
  Clone ID: LIB3600-026-H5_FLI
ctcctctccggggtattgaattcgaaccaaaaaatcaaaacaactcagcgattcgattcgcggcgagtcaagcgggatgccgccgcgcacggctccggcggcgacctcaaccccgccgcggaaggtgcccctccggaagctgctgcgtgcggcgtcggtcgcctgcggggtgcagttcggctgggcgctgcagctgtcgttgctgaccccgtacgtgcaggagctgggcatcccgcacgcctttgccagtctcgtctggctgtgcggtccgctgtccggcctcctcgtccagcccctcgtcggccacctctccgaccgcatcggccccgccgcttcgccgctcgggcgccgcaggcccttcatcgccgccggcgccgcgtgcatcgccgcagccgtgctcaccgtcggcttctccgctgacctcggccgactcttcggcgacgacgtcaccccgggctcaacgcgcctcggcgccatctgcgtctaccttgtaggattctggctgctcgacgtgggcaacaacggcacgcaggggccctgcagggcgttcctcgccgacctcacagatcacatacagtataccatatgcaatggctgctagtcgtgttgaaaatctcggtcttggccaaggcctagcaatgggtattctcaatttagctattgtcataccacaggttattgtgtcacttggcagtggcccatgggatcagctgtttggcggtggaaatgcacccgcttttgcggtggcagccggtgcatctttcatcggtgggctggtggctattctggggcttcctcgggcacgcattgcatcctcgtcctccaggaggagaggcgggacacaccgataagtctgctcatttaccattacaggcatcatcaagtctggaaactctttgtgggttggagaagagcacgctgggagctcttgaatgctgtgtgctctttggtggtttgccccgttgagctattttttgccttgtctccaaatcttttgttgttcaattcaactcgaatgtatgtacgcacgtatgcatgtatgtatttgtatgtatgtggatcatttgtagagagcttaagcaatgaataaaagttacaggagttacgttc

SEQ ID NO: 23697 - DNA, 1487 bp, Zea mays
  Clone ID: LIB3600-027-A12_FLI
gcgtagcggcagcgatgatattttagtcgtactcgtacagaagccacagccctctgctagctagctagctcctgctagaatggaaagtgcaggaggggaagctcggccggtgctgccgccgccgccgccgccggtgcaagagctcgccggcgcagcgaacgacgtgccagctcggtacgtcgcgcgcgcaggcaacgagcccaaggtcacggtaaccgcgccggtcccggtcatcgacctcgcccggctgtgccagccgggcggcggcgccgacgaggcctcgaagctccggctggcgctcgagtcctggggtctcttcctggtacgtacgtgctttaacgcatacgcacgaacacaccgtgtatctatcatgctacagagcactctactatataccgtagatctggactggagcacgtacgtaatggatgtcgagtactatataccgtagatctggactggagcacgtacgtaatggatgtcgagcatgcaggtgaccaaccacggcatcgaggccactctcatggacgccatgatggacgcgtcgagggagttcttcaggcagccgctccaggagaagcagaagcacagcaacatgatcgacggcaagcacttccagctccaagggtacgggaacgaccgggtggcgtcggaggaccaggtcctggactggtgcgaccgcctttacctcttggtggagcctcaggaggacaggagccttgacctatggcccgcatgtctaagggacgttctgcacgatttcaccacagagtgcacgagagtgaaggactgcctgcttcgagaaatggcgaaggcgctagatgagctcggcgacgacgacgactacttcatcgaccagttcggcgacagggccgacacccatgccaggttcagctactaccctccgtgcgcgcggccggacctcgtcttcggcctgaggcctcactccgacggcacgttcctctcgcttctcatgctagacgacagcgtcggcgggcttcaggttttccgggacggagcctggtacgacgtgcgcaccagacctcacaccctgctcgtcaatctaggagaccaaatagagataataagcaatgggatcttcaagagcccagtgcaccgggttgtaacaaacgcggagaaagagaggctatcagtggttctgttctattctatagatcctgagagagaaatccggcccgctgacaaactgatagacgagaaccatccagcactatacaagaaggtgaaagtcaaagaatatactgctggactctacgaacatttctctcgagggaaattggttaaagagactgcaaagatatagcttgttcgctttggattaaatccatggactaatccttagagacaaaaacactgtataagtagtaaaagtcggtacgaattaaagctcaagctagtcgtatctatgtaatgaataagggtgaaacctttgcgatcctagataataaatgaaattaatttttaat

SEQ ID NO: 23698 - DNA, 1200 bp, Zea mays
  Clone ID: LIB3600-028-A7_FLI
ggaacttgtactgcagcttcagagacttgatgctgagtttaacaagacattcagacattcaggttcaacagattgctcggagcttccgtgatagatggatcccccctaataatgcaaggagtgaaccaacagaatatccacatacatcaacatttgtgcatgatatccagggaaccaatacagtctggagttctgctaggaggaaacgcaagagccgctgggactatcaacctgacgagcattataagatgccgggactaaaaatccaaaaagtttgttctggacatggtgaatttgatgttcagtttggctttatgaaaaataagttaaagaggaatcagggcgcaaacaactatcataatgatgttcttggcatggggagttcaacagagggtgaagatgatgaagcccctcctcctgggtttgagtcccagctggaccgtcggcctgcacaactttcaataggcagcgaggttgctccaggactttgcatggagaggtaccaatctagcttgagtatttcatatggggttcctgtaactcttgttcagcactttggaacccctgaatctgaaggaggccaatgccataaaaaatggaaagttgcacctggcgtgccttttagtccttttccaccattgcctccctatccgcgagggaatccttgcccctccacttcgtcttcccagatgtttcagcatgatggaataccccaagttaaacataacaattctggacaacggggaaggatcatgggccgagatgggagagtgcataggtcatggagaaatgagtcaagaacaaaatggcaataccatcatcaaggaaggagattttcgagcactcatcatagatttgaaagatccgaacctgcaagacctcaatagtgattaagggttcagggcagtgattggtaccaaccttgcagtttttgaacctcaagtagtggtggtatacatggtaattcctgcttgtcagaagtgtaacagaaactgtgtcaggctttaacgatgtttaaagagtgtaaatttcagttcattgggggtagagcgtatgctgcacataggccattttccagtgcagtgttactaattaatttggtcattgtttttctctctcccaatgagtatttttcataggaacattttttatttgatttaatcctttttacaggtgataaggataaccaagtttagcgac

SEQ ID NO: 23699 - DNA, 1329 bp, Zea mays
  Clone ID: LIB3600-028-D12_FLI
gggcggcttccgctctccacctccgcctccacccctcgccgccggcgggtgtgaagcttcagcagcggcaactgcgctcgaaaatacagaggcagggtggcctatctcgaagattttcaaaagttgtgtcctattacggtctcacaaccccgccatataaactggatgctctggaaccttatatgagcaagaggacagttgaacttcactggggtaagcaccatcaagattacgtggatggcttgaataatcagctggctaccagccctctgtatggatacactctggaggatctgataaaagaagcttataacaatggcaatccattaccagagtataacaacgcagcacaggtctggaaccatcacttcttctgggaatcaatgcaaccagaaggtggtggcttacctgagggaggtgtgctgcagcagattgaaaaggattttggctcgtttactaattttagggaagagtttatccgctcagccttacagctgttagggtctggttgggtttggcttgtcttgaagagaaatgagagaaagctttcggttgttcatacacgaaatgctatctccccacttgcttttggtgacattccaatcatcagcctagacttgtgggagcacgcttactacttagactacaaggatgataagctaacatatgtcacaaactttatggaccatcttgtctcttggcatactgtcactctacgcatgatgcgtgcagagtcttttgtgaaccttggtgagccaaatatcccagaggcttgagctacaaatacaccctagttatcatcatgaggcatttttcggatacatcggatcaaatcctgctggaggaaccagagagttggaaaatctcatgtctcacaagaaatgcttatcaccccaatgtcatacacgccaagataagctgctaggatttcaccattgcccttggatattgctacaaggaaatcactagtcagcatccagtttgaagacatgcaacaaaacagctctagaagctatggagctggtagattctggagttggcagtgaggcagtgatccaacttgggctttgaagccatggtgctttctctagacggctattatgtccgtagtgttgacgtgttgttagaataatcctggttctgtgttttcataacttcatcatgctagtgttctgttgtagcggaacacagaatggaacggaacgatattcttgttttactggttgaggaacctgttagttttggactgcaggtaaatcttttacttgtatcagacgctgcaagcatgaactttttttgtctggaaggaagttgaaacttctgaacttg

SEQ ID NO: 23700 - DNA, 836 bp, Zea mays
  Clone ID: LIB3600-028-E11_FLI
gtcacaccctctcaatgacggcggtggcgcctgcgggtacggcgacctggacatcttcaggtacgggcgctacacggcggggctgagcgcggcgctgttcgggcgcggcggcgcctgcggcggctgctacgagctgcggtgcgtcaaccacatccagtggtgcctccggggcagccccacggtggtggtgacggcgacggacttctgcccggccaacatgggcctcgccgacgacgacgccggcggctggtgcaacttcccgcgggagcacctcgagctgtcggaggccgcgttcctccgcgtcgccaaggccaaggccggcatcgtgccggtgcagttccggagttggcatatggatatggtggtggccatgcagggtgagctgcgacagggcgggcggcatgcggttcaccatcaccggtagcgcccacttcctgcaggtgctcatcaccaacgtggcggcggacggcgaggtggcggccgtgaaggtgaagggctcgaggacggggtggatcccgatggggcggaactggggccagaactggcagtgcgacgccgacctccgcgcccagccgctgtcgttcgaggtcaccggcgggaggggcaggacggtcaccgcctacagcgtggcgccggcggactggatgttcgcgcagacgttcgagggcaagcagttcgccgagtagagatcgacgccgaaaaccaagtctccggcggtggtgatgtaagtagaattatacgggtggcttcttgctcgcgagtcgtgaccggtgactcgacaaaacgagacgtattgaatggcgaaaggatttccagtcataagaaagtggcagtcc

SEQ ID NO: 23701 - DNA, 1367 bp, Zea mays
  Clone ID: LIB3600-028-G5_FLI
caaatatcttcttaccccaacgccggcacgccgcccaaaaacccttgcggcgtcgcactcacactagcgaccaacccccaaccccagaccttcctctccggcggcggccggcgcgcgcgcgcgagggagatggaccgcccttccggcacatcgtaccagcgctttccccgcgttcggatccgcgagctcaaggacgactacgccaagttcgaactccgcgacaccgacgctagcatggccaacgccctccgccgcgtcatgatcgccgaagtcccaactgtcgccatcgatctcgtagagatcgaggttaactcctccgtcctcaacgacgagttcatcgcccaccgtctggggctcatcccgctcacctccgccgccgccatgcaaatgcgcttctctcgggactgcgacgcttgcgacggcgacggctcctgcgagtactgctccgtcgagtttcacctctccgtgcacgccaccgactctgaccagacgctcgaggtcacatccaacgacctgagatccatggaccccaaggtctgcccagtcgaccaagcacgcgcctaccagcacgcgctcggaggcaccgacccctttggagccaatgcctcgaacgaaaacaggggcatacttattgtaaagctgcgtcggggacaagaactaaggcttcgtgccatagctaggaaaggaattggcaaggaccatgccaaatggtcaccagctgctaccgtgactttcatgtatgagcctgacatacgtatcaatgaagaactaatggaaacattgacggtggaagagagaataagcttgattgaaagcagccctacaaaagtatttgagcttgattctgccaatcaggtggtggtgaaaaacgcggaggcatacacctacgacgacgaggtgatcaagcacgccgaggccatcgggaagccaggcttggtggagatcaccgccaaggaggacagcttcgtcttcaccgtagaaacaaccggtgccatcacagcctacgagctgatcatgaacgcgatcacggtgctgaggcagaagctggatgccgtccgccttcaggacgacgacggcgaccttggcgagctcggcgcccaccttggtgggccttaggagctttgagcaagaaggaatcgccctgtggcctccctccctcccactgcctacgtaggcctatctaactgccgtgcgtgctagtcgatcgatcgaaaccgaacggttctgataaaccttatggtgtctaaagctccagatttatggattgccaaacacccagcaccgaattccagtttaatttccttgcccgccttgttttcgtgcgggtgacatctgcgccgtgaatttgcatgcttgtgcgtcttgtt

SEQ ID NO: 23702 - DNA, 733 bp, Zea mays
  Clone ID: LIB3600-029-A1_FLI
gcgctcctccgccacccccttcttcttcagtttgcctcacattactgccactgacgttcattccgtttccttgcttgctccaggtactcccatcgctatcgaccgggtcctcgagcgcgggagatggcggatcaggagaccccagttgcagttgaggcccctaccccggtccttggggagccgatggacttgatgactgctctgcagcttgtcatgaagaagtcgggtgctcatgatggccttgttaagggtcttcgtgaggctgccaaagcaattgagaagcatgctgctcagctttgcgtgcttgcggaggactgtgaccagcctgattatgtcaagctggtgaaggctctttgctctgagcacaacgttcacctggttactgtgcctagcgctaaaactcttggcgaatggtctgggctttgcaagattgattctgagggcaaggcgaggaaggttgtgggttgctcctgtgttgtcgtcaaggactatggcgaagaatctgagggccttaacatagttcaggagtacgtcaagtcacactagatacagtgcatcggtatctggaacttgtgctctacactagctttaagacctgaatttaaatttgtgctggttcttgggcttttctaggagattatctcaattcttgttttaagtgatgtcatctggtgttaatacaaatcattaagcggtggtattctgcttctgttctttgttaccattccatggc

SEQ ID NO: 23703 - DNA, 893 bp, Zea mays
  Clone ID: LIB3600-029-A5_FLI
ccccactactctctctcgccccaaaaccagatcgccacgacaagggccgagggccccggaggggcgcgtagcaatggcggcaggctaccgggccgaggacgattacgattacctcttcaaggtggtcctgatcggcgactccggcgtcggcaagtccaacttgctctcacgcttcacgcgcaacgagttcagcctcgagtccaagtccaccatcggcgtcgagttcgccactcgctctctccaggtcgacggcaaggtcgtcaaggcccagatttgggacaccgccggccaggaacgataccgtgcaatcactagtgcgtattaccgaggcgctgttggggcgttgcttgtatatgacgtcactcgccactcaacctttgagaacgttgagcgttggctgaaggagctgagggaccacacagacccgaatatagttgttatgctggttggcaacaaatctgatctccgccatcttgtagcagttcaaaccgacgaaggaaaagcattcgcagagagggaatcgttgtacttcatggagacctctgcgcttgagtcgaccaacgttgagaatgcatttgcagaagtcctagctcagatctaccgtattgtgaacaagagagccgttgaagcaggtgaagatgcagcatctgggcctggcaggggcgagaagataaacataaaggatgacgtctcggcagtgaagaagggtggctgctgctctagctgagctgccgtgctgtaatttttttttgggagttgtgggatgtagcttatgttatggcattttcagcgactggaaattggtagtggcatttagcagcctctattacctagagaggtaattgtcaaactgaaaaaaaaaactgaaggttagatcagtttagagctctgtt

SEQ ID NO: 23704 - DNA, 1314 bp, Zea mays
  Clone ID: LIB3600-029-C2_FLI
gcggatagacagcgacggagaggagagcggcgggcggagagaagtggaggaagaagacgaggatggccacctatttcacgctcaacaccggggctcgcatcccctcggtagggctcggcacctacaaggccggccccggcgtcgtcgccgacgcgatcaccgccgccgtcaaggccgggtaccggcacatcgactgcgcgccgctatacaagaacgagaaggagatcggcgttgctctgaacaagctctttgatgacggcgtcgtcaagcgagaagaccttttcatcacctcaaagatatggtgcagcgatctcgcacctgaagacgtgccgttggcgatcgacagcaccctgaatgatctgcagctggattatcttgacctgtacctgatacactggcccttccagataaagagaggcagcgagctcagtccagagaacttcgtccacctcgacatgcccaagacctggcaggcaatggagaggctgtacggctcaggcaaggctcgcgcggtaggcgtcagcaatttctcgaccaggaaactggccgatctgcttgccgtagcccgtgtccctccagccgttgatcaggtggagtgccacccgggctggcagcaggcgaggctcagagcgttctgccactccagcggagttcatttctctgcatacgcgccgctaggcaggatgaaagccgtcgccagtgacccggtggtcgcatccgtagccgagagcttggggaaaactccggcacaggttgctctgcgatggggtatccagcagggccagagcgtgcttcccaaaagcgccaatgagtcgaggttgaaggagaacattgacctgtttggttggtccattcctgatgagctgtgcgccaagttttctgaaattgaacaggttaagcagatcagaaatgacgcgtttgtgcacccccagagtatttacaaaacaatcgacgaactctgggatggtgagatctaaaatgaagatcattttcggtacgaaaccaatctgtaaccagggttgaaatttacgccaaaaaagtagggatatatgcttttgtcttccaagggggggaaaaggcacatgtttatcttaagcactactggcaacaggcatgtggtgtgggttgcattttcggcagggctgagtgacgtcagcatattgttgcattgcagcagatccaatgaaggggcccttgagtaaagcatagaacgaacaattttcatctgttgttgtcgtatgctcgtttcatcgatgactttgtatgtagcattaagtgtagttcttaaataaccgagaagtcatatcctggcct

SEQ ID NO: 23705 - DNA, 1313 bp, Zea mays
  Clone ID: LIB3600-029-E7_FLI
cgctgtgcgggtgcggctcgccgttcgccatccgagccaacgacgaacccgatgccgccccaccgtgccggaggggccgcaggcggcggcgacacgagcgcgttcttcgcggcgacgctagtactttgggctgtgtctgtggggttcgagatcggcgtgcgggggagacgcgagctggcgcccgtggccgccggcttcgccttcttccaggccgccaacaccgcagtccgcggctcggtctcccgcgatccgctcttcgtcaacaccgccgtatcgcttctccactcctccctcacctccgtctccgttatctttgttcttgctaatcaatggcgtaataagggccttgagaacatgtttgagcatgaagaactatttggtggcagttggattggagcatattctgctctgtgcttttcttgtggctactttgcatatgaccaactggacatgctccgataccggctatacagtggatggcttcctggaattctcatgcatcacttgatcctactcatttgctttacactagctctgtataggaatgtcacaatcaactacctaaatctctcccttgtatgtgagctgcactccatatttttacatgtaaggaaagtcaggcgaatggttggatttcgggattttgacagaacagtggtgaagctggaatgggtactcaactggactacctttgtaacagcaagggtgatatgccatatcttgattacttacaagctcatctctgatgcccacaaatttgggaagggcattgagcttccgctagctctacttggtatggcaggaatgaatctgcttaacatatttcttgggctcgatctacttaaagcattcacacgagaaagaaataagcagaaccatcaggattgaatgcacctttcttgatgacggtgtactctaaattttgagaaggctgtagttccgttcttgtagggacatagaggtatgtttaagtcttaattaatcagcaactacactggaggctatggattctttatgtatcaacacgtgctaatgctaagatctctacaagaaagggttgttaatgtgtaatcatgtaggtataacattattgttcattaggagaattaagagagtgcaggcgggtaactggatgcaggatttacatacattttgcaatcaggaatcggaaagaagagaagcgtaccatgtatcaaaccccttggtcccaactctcatacctcatctaaagtaacacctaagcaacttgtagattggcactgtgactttgaggctacaatgctcttgtttattaatatttataatatttgacg

SEQ ID NO: 23706 - DNA, 522 bp, Zea mays
  Clone ID: LIB3600-029-H12_FLI
gccacctgcgtcaggatctccaccgacgcctcgctcaagaagatgatggcgccgggcgcgctcgtcatgttcagcccgctcgtcgccggtacgctcttcggggtcgagacgctcgcggggctcctcgccggcgcactcgtctccggcgtccaggtcgccatctctgcctccaacagcgggggtgcatgggacaacgccaagaagtacatcgaggccggcttgtcggaggaggcgaggtcgctggggcccaagggatcggaggcgcacaaagcggcggtgatcggggacaccatcggcgacccgctcaaggacacctccggaccgtccctcaacatcctcatcaagcttatggccgtggagtcgctcgtcttcgcgcccttcttcgccgcgcacggtggcatcatcttcgaccacctctgatcaatgcatgctgctgacgttccatggcaaaggcgccggctgtcgccgcaagccgcctctttgaatttgccgtgatcagttagtaagaataattgtcgtgtt

SEQ ID NO: 23707 - DNA, 1034 bp, Zea mays
  Clone ID: LIB3600-030-F2_FLI
tcaacactgcagaaatcagattcggagcttcggggggaaaaggcaggcacagtatcgtcgaccatgctgccaggtcgccacccggcgcgccgggccgacgccaccgggacggggccgctcctgccggacgccactcgcgcggtggtggcggagttcgtcgccacagccatgttcgtgttcgccgccgaaggctccgtctacggcctctggaagctgtacaaggacacggcaacgccgggcggcctgctcgcggtggccatcgcgcacacgctggcgctggtggccgcggtggcggtagcgagcaacgcgtcgggtgggcacgtcaaccctgcggtcacgttcggcctgctcgtgggccgtcgcatctctttcggccgtgccgcggtatactggctcgcgcagatgctcggcgccgtggtcgcgtcgttgctgctaacgctcgtctccggcggcacgcgtcccgtgggcttcgggctcgtccgcggcgtccacgagcggcacgcgctcctgctagaggccgtcatgacgttcgggctcatgtacgccgtgtacgccaccgcggtggatcaccggagccggggcggcgcggtcgcgatcgcgcccctcgccatcggcttcgtcctgggcgcgaacatcctcgccggcggcccgttcgacggcgccgcgatgaacccggcgcgggcgttcgggcccgcgctcgtcggctggagctggcgccaccactgggtctactgggtcgggccactgatcggcgccgggctggctggcggcttgtacgagtttgtcatggttgagcaggagcccgaggcgccgctagctgcagttcctcggatgccagtggcctctgaggactactgatgtaggtgtacatgtattgtatccctaccgtttgtattttcactgtgtatctgtatgggtgtaccgtgtatctaggagacaaggaccgagcttggcatctgctttagaggcacgtcatagactttttggatattcccaagaacccttactactagatcaaaataaacacagacatg

SEQ ID NO: 23708 - DNA, 624 bp, Zea mays
  Clone ID: LIB3600-030-H11_FLI
gcgccgccgcaaccccgccccgaccctagtccaacgttcgtgccgcttgctgggccgccgacgcgccaggccgctggagcagctcgcttgccccccagcccccacgccgtgcccctcgctcagcctgcgctgcctcgcactcctcgcgccgctagcccggccggagccgctcttcttccaccgcgcttgccagctgccgccgctcctctaatggtgacgaggtggagccagaagagcccgggcctcaagatcctgtggatctggaccctgggcaccgccgcaattgtggtcggcggtatcgtccggatgcgggtaaacgatgtgcagaagatccttcgggaagaagaggaagccgccgctaccgccacggccacgtcgccccccagcgagcgagtcctgaaagacgaagagtagaacaggaagtggagagttttgcgccatttgagctggggggtgcatctgtatcgggcccataatgtagtatctccattttaaaaaggtttgagtttaggaaaagaattgtttactgtagtgattcaataacccttcaccctgtctgcattacaactttcatatatgatgtgaacgtttggtgacaagaaagagatggcgggcaatatctgt

SEQ ID NO: 23709 - DNA, 700 bp, Zea mays
  Clone ID: LIB3600-030-H3_FLI
cgccaccacatgctgggccgcctgtcgtcgattatcgccaaggaactgctcaatgggcagaaggtggtcgtcgtccgctgcgaggagatctgtatgtcgggtgggctcgtacgccagaagatgaagtacctccgctttctccgcaagcggatgaacaccaagccatcccatggacccatccacttccgcgccccgtccaagatcctgtggcgcaccatccgcgggatgattccgcacaagaccaagaggggggaggcggctctggcgaggctcaagacgtacgagggcgtaccgccgccgtacgacaagactaagcgcctggtcatccctgacgctcttaaggttctgaggctgcaaccaggacacaagtactgcctccttggggagctttctaaggaggtcggatggaactaccatgacaccatcagggagcttgaggagaagaggaaggagaaggccaaggtggcctatgagaggaggaagcagctggccaagctgcgcctaaaggctgaggctacagccgaggaaaagctagggtcacagctggacattcttactccgatcaagtactgaatctgtggtttcgtgcctatcagttttgtggaacatctgatccatcgttttaaaagttgtgacagtataatcttgagtgctattctgaacacattttgtagccggtgaatgtattgtttgttttatc

SEQ ID NO: 23710 - DNA, 1035 bp, Zea mays
  Clone ID: LIB3600-031-A7_FLI
gatccccaaatcttcccagttcccccctcccgctcgacccagatcgaggcctcgatccaccggccatggcgctggagtgggtggtgctgggctacgcggcgggcgcggaggcggtcatgctgctgctgctgacgctgccggggctcgacggcctgcgccggggcatggtctccgtggtgcggagcgcgctcaagcccatgatgtccgtggtgcccttctgcctcttcctgctcatggacatctactggaagtacgagacgcggcccacctgcgacgacgagcacgcctgcaccccctccgagcacctccgccaccacaagtccgtcatgaagtcgcagcgcaacgcgctcctcatcgccgccgcgctcctcctctactggatcctcttctccgtcacccagctcgtcgtcaggctcgaccagatgcagcagcgcgtcgacaagctcaagaagcgcgacgactgatggggctcgcgttcgcgccttccccgcgtccacccggtggtctcgttcttccctctgcctcgtactttctgttttttttatgttggagtgcggatgtcttagatctcgatcgtaatttgaggcatggtgcttcctttgcccttaccgtcttcagataaaaagaacaacgctctttgaaatgatgatatatttaggatgtttggacaaatggtatcgtaatcgatgtgttcaccaatgagttgattggtttcactcgagatacaccgagatatgggtctagttgccatccttgagatattggttattagctactagtgctgttttgatgatgtgactgagcttatgttgtaatgagctagttcttgttcagaataagctgacattaggggccggattttatatcttttgtataaaaaatgagctccaacttggaagctagtcgtgtagctgttctagttctagactgagatgctcatctagtgatcaggtgacatgaatgaatggatagtcacgtttgctgtaatactgttctatcttctagactggaatgcttatataggtgattcaagtc

SEQ ID NO: 23711 - DNA, 703 bp, Zea mays
  Clone ID: LIB3600-031-C12_FLI
tccaaatcgcccccccaaaccctcttcttcccccttcccgtgctcgacccagatcgagggctcgatccgtcggccatggcgctggagtgggtggtgctgggctacgcggcgggcgcggaggcgatcatgctgctgctgctgacgctgccggggctcgacggcctgcgccggggcatgatctccgtggtgcggagcgcgctgaagcccatgatgtcggtggtgcccttctgcctcttcctgctcatggacatctactggaagtacgagacgcgccccacctgcgacgacgagcacgcctgcaccccctccgagcacctccgccaccagaagtccatcatgaagtcgcagcggaacgcgctcctcatcgccgccgcgctgctcctctactggatcctcttctccgtcacccagctcgtcgtcaggctcgagcagatgcagcagcgcgtcgacaagctcaggaagcgcgacgactgatggatccgcatccatccggtgggctcgttcttcctttgcctgccttgtcttcctgctttatgttgtggtgctgatgttttagatctcggatcgtaatttgagacctgctggtagcatttgcttcctttgccttgccgtcttcagataaaaaagaacagcgctcttggaaacgatgatatgtttaggatgtttggacgaatggtatctgtcgtaattgatgtcttcatcc

SEQ ID NO: 23712 - DNA, 728 bp, Zea mays
  Clone ID: LIB3600-031-F7_FLI
cttggctccccttgctaccttgccttcacagatctcccactccccaacagaactgtcacgtctcggcgcccgggggccgtggtattacggctcatcgcggctcggcagtggtggcgcgcagctgaccggatcgagcagcggatggacggcggcggcgggctgggcggcctgcggtggaccgcggaagaggcgtcgacgatcggaggcatcgccacggtgtcgctgctgcactccttcatccccacgcactggctccccttctccatcgtcgcgcgcgcgcagcgctggccgctctcccgcacccttctcgtcacaccatcacagtgatgacatccttggtggccctttcattctacggtgctagccagatcaagttccactgggtggagcgttacgacaagatcctcgtcggcacggtgctgtgccttgttggagtcttaacatatgtgttccatcatcacgatggtgatgagcatgtgcaccagaaactcgtatctccctagatgcatacatactgaagttccatctctgttgctccctatttgtatacaatcctgattatcgacttactctgccgctctggttttgctggagatacgtatcatctgatcaagtgaatatatttgagcaaactgcgtgaagtttgtatcgttgtggtggtagtggcctctttttcggcactctgaaatggtaccttcctacttttggacgcaataaattgttttctg

SEQ ID NO: 23713 - DNA, 1186 bp, Zea mays
  Clone ID: LIB3600-032-B11_FLI
gcgcatatgccccaaagcgaaagcaaaacgttacccgttcgcttagcgcttcagcgtgcgcttaccgccgcttgttgaaccctgctcattctcaaaggtctatacagtttgcccagcaatcaatctagagtacctgtgttcaaccaaacccaccagcagcagcatgaagatggcccaaaatcaacctttataacggcttatatgttaggatctatgttttggagaaatttgcaatttcgccacctagagtgttgctctcttgctattatgccatgccacctgtgtctatgatctgtggacctgtctgtctatgatttgtggatccgatggcaaattagcgatgcccagcgttttgagtggaaaaattgcaaatgcctctatgttttgcttttcatcttgttattttttttcttttttatgacagtaaaacacctcatccccaaatgaagcacatattcaagattgctgcaatactggtagcaatctctgctatctggattgctctccttgaaacctccactgttcctcgaagttatacttggctgcttcccatctacttggtagtggctcttggatgctatggcctttttatggttggatttggacttatgttcttcccaacttgtcctcgagaagctgtactactgcaacaggttagctattttaatgtgaggctaaactgcagaaccctcgaaacttcttgagctgtatttgcagtacatctcatggatcatacagatcatgacaaagaaatcaatgccaaatgatattctttttttttgggggctgtttgagtatgatcataccctggtttattctcatttgtccgagattggcgtattatgcaggatattgtggaggcaaaggaattcttaggaaagaggggtgttgatgtgggctctgagtgagatcaattttaagtggttgacatacatgtctgttttgaaggatcaccattctgttccttggaataggttgcttttttgggtactgtagataggaaacatataattccactatgttcagctattactaacacggtttttgtgagttggcatgttatagttctgcttttgtcaatgatggggctcacattgacttgccggtgtttttcaagttttaaagactgaactgttctaggaatatttggtttctatcttgatttcccgtcagtggaccatttacc

SEQ ID NO: 23714 - DNA, 940 bp, Zea mays
  Clone ID: LIB3600-033-E10_FLI
ctcgctcctccaaccaaacaagccaccccccacgaaacccgcaatcccagccgaagccggacgatgaagagggacggatggcagcacggcgccgtccggggcagccgcagcaaggtgctgaggacggccgccggcgacgacaactccgacgccgacgcggtcgtggaaacggcggcggcggcggcgaggaagccgacgaacgcgtcccggagcacgggcaagtgccggcgggcccggtgcgcgggctgccacgcgcacccggtctccaaggcgcgcgacaaggccaagggcgcgcgcaagctgcgcgcctgcgacgtcgcgctcaaccaccgcctcgtgtcctggcgcgtcgtcgaccagggccccgggtacagcggcgcgtccgcctcctccctgctggcgtacctggccggtggaagcagctggcacgaggaggaggaggacgacgacgagggcggagcggcgcccgacggccggctctctgacctctacgacctcttcgtcggccgcgggcaagaggaggacggcgtggatgctgtaggagagattcaggcagttgaagagcaggggctgctggatgccaaggatggcgaggaggaggaggtggaggacgacggcgacgacatggggttctgcatggttggcaccaccatcgcgctggagttctccgacggcgaggaggactggatcgtggtcgaggagatctgattcccatctcgtcgtcctcggtttggcaaattgggaagggttccaatttgcgaataagacatcctgcccatcctctgtcggtgctgtggtgtgtatgtatatactactcctgctatgttctgtgtgcatatggtaatctgatcgtggtcatggattattacatgattcaaaaaaaaacatgaatgaatttctcatctgtgaatgaatgaataataaagttgacaattggatt

SEQ ID NO: 23715 - DNA, 1658 bp, Zea mays
  Clone ID: LIB3600-033-E11_FLI
tcctctctcctctctcctctctcccccgccccgttcgtctccggcgagctagggtttgcccccccgcctcgccaccccacggctcccgccatccttggatctccagccatgtacggcggagacgaggtttcggcaatcgtcatagatgtgggctcttacagctgcaaggcgggctacgcaggcgacgacacccccaaggccgtcttcccatcggttgttggttcaattgaacaaactgaagacacagatgaccccaagccagagaaggaagctgactctgcatcagattctaagaacggtgccaagcccatggatgtggacaaagccaagacaaaacgcagactttatgtaggccaagagttagagttcaggagggatcacatggaggtgatttcatctatgaaagatggaacggtaactgactgggatattgttgataatatatggaatcatgctttcagacggaggttgttgatcaatcctgaagagcatcctatgctcattgctgaaccatctacaaacactgcacagcaaagagagaaagcagcggaacttatgtttgagaactacaaagtgccagcgctgtttctagccaaaaatgcagtgctcacatcttttgcgtctggacgagctacatctttggtggttgacagtggtggtgggtctactgtggtttctgctgtacacgatggttttgttttacagaagtctgtgtcgacttctccagttggtggtgaatttttaactgactgtatgatgaaaagcttggagagcaagggcatcgtcattaggcccagatattcatttaagaagaaggaaatcagtcctggagaatataagattgtagatcttgatcttccaaacacaactgagagttacaggttgtactgcatgagagctattgctagtgacgtcaaggagtctgtttgcagagttccagacactgcttttgatgaagtggcatatgcaaatgttcctacaacttcatatgagcttcctgatggacaaactattgaagttggtgctgatagattcaaggttcctgatattctatttaatccatctctatcccagactattcctgggattgatggatttgcagattcaataccagtccgtggccttcaacgaatggtcattgatagcgtaaataagtgcgacgttgacatacgaaaagagctattcagtaacatcttgctctctggtgggtcatcatcaattctgcagttaaaggagcgcctggagaaagaagtattggaggagtctcctcaagctgctcgtgtcaaggttatggcaagcggaaactcagtagagagacgtttcagtgtttggattggagggagcattctagcatctcttgggtcgttccagcagatgtggttctccaaagcagagtatgaagagcatggggtttcctatattcagagaaagtgcccttgaagcaggggaaggaatatgtacaaccaatattatgctttacgagccttattgttgccaaagggttccttgtgtacaacagcctggtgccttgccatgttggccaatgaatactcgagactcttttcaagtgacgtttgttgtcttcatggctagttaattttaggtgatgtaaggtgaacgtaagaactaggtcaactaaaatatttatcattgacagt

SEQ ID NO: 23716 - DNA, 581 bp, Zea mays
  Clone ID: LIB3600-034-F11_FLI
tgccgtcctcctgagcatcggcttctccgatgcagcgagggtagttaggcttggtagccatgcgtctgcgggaggtggaggtggcggcgggggaggcggctccgggtcgactgggggtggctttggcggtgggtcgggcggtggcggtggttacggcataggtaagggtggcggggactggtggaacaatttcgtctctagtatagcaggtggtggaggaggaggacaaggcggaggcggtggcaccaatggtgggtccgggtccggcggatcccaaggcggctctggtggcggtggaggctctgggtccggatccggcagcggtggaatccactgagcttgcacttcagtagctagagcctagagccccgcattagtgtcagtccattctgtggttttttgctgtctttgttacgagaattaatcaggaataaagcgtaatgggcttcgtgattgtagttcgagtaggtagcaaagcatgcaactgatatgaatgcatgtaatggctatctacgagtgtgtgcccctagctgtaatctgtttctcatcgatcgttaaggtcgttgcatccggttttattt

SEQ ID NO: 23717 - DNA, 1288 bp, Zea mays
  Clone ID: LIB3600-035-C12_FLI
cgtcaccagtcaccactgagacggaaccgagtaaccgacccacgcaaaaagcgctcagcagctcctgcgcgccccctttcccccgtcggccgatttcgtttatctcctcaatcctggcttgaatccgtgatacgtcgaggcggcgaagagccgaatcgtgccgcaccgtagaggaggctcaggcttctgcagggttttggagcggggcgatggaggcggcgagcaacggtgggctgctgtaccacgaggtgcaggaggggaagctctgcgccgtgcactgcgtcaacaccactctgcagggccccttcttctccgagttcgacctcgccgcgctcgccgccgacctcgaccagcgggagcgcctggtgatgctcgagggctcccgaagccccggcgcggacaacgctaccgcaggggacttcttcgccgagggcgaggggtcccacaacgtctccctcggcggagatttcagcatccaggttttgcagaaggcgctggaggtttgggacctccaggttatcccccttgattccccagctgcagggtcgtcccaatttgaccctgagcaggaggttgctttcatttgccaccttcaggaccactggttttgcatcaggaaggtgaatggggagtggtataacttcaatagtctgtacccagctcctgagcacctgtcaaagttttacctctcagctttcattgacaccctgaaggggtcaggctggagtatctttgcagtcagaggcaattttcccaaggagtgccctatggcaactgaaggctctaacggttttggtcaatggctcacccctgatgacgcccggaggataacagcctcctgtaaccaggttcaagcacctactcagcaggtacaaccccctctacttggtgaccgatcaggagggatgagtgaaatggacatgattgtagcgcagcaagaagaggctgatctgaatgctgctatagctgctagcttgatggacactgggggtccatttgccagctatgatgcagatcaagaatacagcaactcacaagatgctcctgccgctggaccagctcggagcaaagaagaagctgataaatctgagccgagcgcacctccctgtgaggaggaaactcaggagttggcttcaggaagcgacaccaaaagggaggtttcttctgtagaggagaaaggaacagcgagagaagaataggatggcacttttgatcagtctgtaactgagttagactatacacagagaaactgccctccatttcagtggagttatgccttttttggttc

SEQ ID NO: 23718 - DNA, 772 bp, Zea mays
  Clone ID: LIB3600-035-D4_FLI
gcgcagagccagatcaagggaagacgacgcagatctcgccacgcgaacacagttagatcgagggagtaagtgagagtgagagccatgacggagctgttcgacacggccgtgaccagcctcctccacctgccggaggtgctggaccgcctctccgccgcagacggcgaccggcggtcggccggcaaccacgcggcgcacgggcacggccacggacgcgtccacgggctcggcggcggcggcggagcgccggtggacatcgtggagagcccccgcgagtacgccttcgtgctcgacgtgcccggcctctccaagtcagacatccaggtgacgctggaggaggaccgggtgctggtgatgaagggcggcagcgggaagcggaagcgcgatgaggaggaggacatgaacggcgaagggtgccgatacatccggttggagcgcggcgcggcgccgcggtcgttcgtgcgcaagttccggctgccggaggatgcggacacgggcggcgttgcggcgcgctgcgagaacggtgtgctcaccgtcaccgtcaagaagctgccgccgccggagaagaaggccaagaccgtgcaggtcaccatcgcctagaagtcggcagtcggcactcggcagagtagcagcagtagaattgtagcgcgtacgtagtggcctgtcgtgttgggaggagtgctcttttgtttacgtttgtgctgctgatgagccggtgtgtgtgtgtaacagaccgtgcttcttttctgaacaagaattattcaatcgtgtc

SEQ ID NO: 23719 - DNA, 1043 bp, Zea mays
  Clone ID: LIB3600-036-E1_FLI
cgacagacgatgcaagggaacatctgggcagttctcgacggccaaggactcccggagagcatgaccctggtcctgaggttccagctccaaccatcgctggcgagctccaacctcctcggagggtcgtttgatcaggagcactactcatcattgccatctaaccaaatagccgggctgaaggttctgctcatcgatgacgacgagatcaacctggtggtggcccggaagctcctggagaggctaggctgcaccgtttcctcaggctcgggactcatggactcttcctctgcctgtgcctcgttccagctcgtcatggttaacctcgagatgtcagcgatagatcccctggatgctgcctcgaggatcaggcagcagtacaggagctcgcactggcccctggtgatggccatgacgtcggagcagaacgtgtgggagaagtgcgcgcagtccgggatcaacggcgtcctgaagaagccgcttgttctgctggaagtgaaagaagagctcgagcggatccttcagaacacatgatgcctgccatgacccatgagctactaccatgatgaatacgacccccgtccgtccgtctagcatactacatagcagaggggaggggacatggatctcgagttgagaagtggatgcaagtctcctacgctgctgtagttgagtgactgctgtgaggacggaggtggtgacgacgacggatttggcaggcaagcacgagggccgcgttatccgatccatgcccatgccgcgtaaggaggcttcacctcgattcaccaactacataatcacctcgattcacacacgtcaggctttcagtcgataaattcattagtttcatcagaaacggaatgcagttgccagttataatgttggcgtcagtcgcaggggatcttcggccatcgtcgccgcatcagaagcaatgcgcagctccagtggcctcgaccgaacaggacaagaaataggtctagttggatttcttttcgcctttgggtttttgttttaaaagaaagagaacttgattttccttaaactag

SEQ ID NO: 23720 - DNA, 643 bp, Zea mays
  Clone ID: LIB3600-037-D6_FLI
ctcagaggtgggttggcttctcctcccccaccggttcgtgttcaggttctggttcgtgggcgagagggaagagatggcggcgtcggacgttgagtaccgttgcttcgttggcggcctcgcctgggccaccgacgaccactccctcaacaacgccttcagcacctacggcgaggtcctcgagtcgaagatcatcctggatcgggagacgcagaggtcccgcggcttcggcttcgtcaccttctccacggaggacgcgatgcgcagcgccatcgagggcatgaacggcaaggagctcgacggccgcaacatcaccgttaacgaggcccagtcccgcggcggccgtggaggcggcggtggcggatacggtggcgggcgccgtgatggaggcggctacggcggtggcggtggaggctacggcggtggtcgtggaggctacggcggcggtgggggatacggtggtgcaaaccgcggcggcggctacggcaacaacgacgggaactggaggaactgagcggtggggtccgctgaggcctagttatcttgttcgcttctgctaccgtgttcaccctagtctagagggggtttatcttcgtctgtggtcgtctcgtgtccgtatgtttcgtttcgtgttcgttgttgttgt

SEQ ID NO: 23721 - DNA, 899 bp, Zea mays
  Clone ID: LIB3600-038-A10_FLI
gctcgcctcgggtcaaaccctaagcagggagttgatttatccgctgcagccatgagtaagttgcagtctgagtctgtcaaggatgccatctcccagattgttggggatgccaaggagaagaataggaagttcactgagactgtggaacttcagattggtctgaagaattatgatccacagaaggacaagcgtttcagtggctctgttaagttgccccatatccctcgtcccaagatgaaggtgtgcatgcttggtgatgcccagcatgttgaggaggccgagaagatgggacttgactacatggatgttgaggctctcaagaaaatgaacaagaacaagaagcttgttaagaggcttgccaagaagtaccatgctttcttggcatcagaggccatcatcaagcagattccccgtctccttggtcctggtctcaacaaggcaggcaagttcccgaccctggttactcaccaggaatccctcgagtccaaggtgaacgagactaaggcaaccgtcaagttccagctcaagaaggtcctttgcatgggtgtcgccgtcggcaacttggcgatggaggagaagcagatccagcagaacatccagatgagcgtcaacttccttgtttcccttctgaagaagaactggcagaatgtgagatgcctgtacgtcaagagcaccatggggaagccatacagggtgttctaagtatgctcttttgtgaagtctgctaggttctggcagcgaggttttattgaattaaactcttgttaaggatatgtttttggacgatcctatatttcgtcctggcgctactatgtttcagaatggtggtactactataagtatcctagcgctataagtattgcttgaaaggatcaatataatttgcgtgtcatacccgc

SEQ ID NO: 23722 - DNA, 192 bp, Zea mays
  Clone ID: LIB3600-038-B1_FLI
tgcgcaagggctgcggcgacgcctgcaccatccgcccctgcctgcagtggatcgaggcccccgaggcgcaggccaacgccaccgtcttcctcgcaaagttctacggccgggcgggcctgctcaacctgctcgccgccgcgcccgacgacggcgtccgccccgcggtcttccgctccctgctctacgaggcgt

SEQ ID NO: 23723 - DNA, 789 bp, Zea mays
  Clone ID: LIB3600-038-G5_FLI
cgatgggtgagcaggtgaagggcatgatccacgacaaggggccgacggcgtcccaggcgctgacggtggcgacgctgttccctctgggcgggctgctcctggtgctgtcgggcctggcgctggcggcctccacggtggggctggccctggccacgcccgtgttcctgctcttcagccccgtgctcgtccccgccgcgctgctcatcggcacggccgtcgcggggttcctcacgtcgggcgcgctggggctcggcggcctgtcctcgctcacgtgcctcgccaacacggcgcggcaggcgttccagcgcaccccggactacgtcgaggaggcgcgccgcaggatggcggaggccgcggcgcacgcgggccacaagaccgcgcaggccgggcacggcatccagagcaaggcgcaggaggccggtgctggcactggcgccggcggcggcaggacttcctcgtaaataagcaaatcatccatggatgcgtgcgtgtcaatgtcagcagggtcgtcgtggaatgctcttctctgtacgtgggtaaccgtcttttggtcgtcttccccgagtgcgtgataaatatcctggtgttcgtcgtgtgtggtgctgccctaggctggggcctggggtcggctgtgtaccggtatctgttcatcgccgctccgtcgcgttcggagatgtgaataagtgatgtgaaggttaagtttcagctttgctattgctattgtggcttgtgcatcagcggtttgctcgttgactgttatggaaataagcattggtgaaggtattgttt

SEQ ID NO: 23724 - DNA, 1286 bp, Zea mays
  Clone ID: LIB3600-038-H4_FLI
cgacctgattcactactccgctacgccgcattcggatccggccctgagcctttcccgatcccgcccgcttccctgcaccgctcggcacgatccgcccccgctccccgctcccggctccacgaccggtccgccgtcgagctcccggcgcttctgcggccggcgccatggcgaccggcggcggcaacgagcagccgccagcggaggccgagccgctggagctcgtgctgttccaggtcgccgagtgctacgtctacctgataccaccgaggaaaacggctgcctcctacagggcggatgagtggaacgtcaacaaatgggcatgggaaggggcacttaaggttgtcagcaagggagaggaatgcatcattaaactggaagataaaaaaacaggggagctttatgctagggcatttctcagagagggtgaaccacatccggtggaacctgtaatcgacagtagcagatattttgtactacgtgttgaagagaatatagatgggcgtcagcgccatgctttcataggtttaggcttccgggaaagacctgaagcatatgacttccaagctgccctacatgatcatatgaaatatttaaacaagaagaaggccgctgaagagatgattcagcattatgagaagcaatcttcagtggattacagcctcaaagaaggggagacattggttcttcagcttaaaaataaggaaacaggcaccaagacaaaatcgacattttttgagcaaggcctaaacaagctctccgttaacgaaaagacaagcgccaaggaggcccccgtctcccttaaactcccaccaccaccaccttcgcctgtctcaccgacggattctggagtcgctgcctcgcctttcaaagcagaatttcctccccaagagcaaccagctgctgaacccgtcagcagaaccagcgctctcccttccaaaggcgaacctgctccagagctaccagctgctgcagagaagatggaggagcaagaaaccgtggatgaagacttcggggacttccaggctgccgggtgatatcatgtatcttgtacatacatcatgttaccgagactttttttttctttctatttttggttttcaatcagctgtggcttctgccggcactctgttcctgtatagagagcttccatctcataacctacatacaaatacatggacaaacgttgtacccttttctttgagtttccatctcataacctacgagagaggaggaagaatgaaagcaagaggagctacctcctccatcctttgggggtgtttggtccc

SEQ ID NO: 23725 - DNA, 658 bp, Zea mays
  Clone ID: LIB3600-039-A1_FLI
cagaagctacctaaacttccagccgtctcctccgcacgcgaaaaccctagcagctccgtagtccctctcctctggaggtattcgcagtcgaccgtgtcctcggagcacgatgaaggttgttgctgcctacctgcttgctgtcctcgctgggaatgccagcccctccgctgaggatttgactggcattctggagtcagttggctgtgaagttgacaatgaaaggatggaactgctgctgtcccaactgagcggtaaggacatcaccgagctcattgccgcgggcagagagaagtttgcttcagtcccatgtggcggcggcggtgtggctgttgcggcaggtgcacctgctgctggcggagctgctcctgcagctgaggcaaagaaagaagagaaggtggaagagaaggaagaaagcgatgatgatatgggcttcagcctcttcgactaggttgcacagtcatcacagtattgtttcgggcagtgaaatcaaagggaaaccagagtcatgtttagattttaaccttattttatgttggaaagtactgcaaagactgctaattgtctctgtatttggtaattcagctgtagattgctatgatggttgggatttactcgtgaaccagagtttttctatcttatatcctgaattggttatccc

SEQ ID NO: 23726 - DNA, 543 bp, Zea mays
  Clone ID: LIB3600-039-A2_FLI
aacggtcgtcgtcgtcggtgagtgtgggagtcctggacaagaagggccgtttcctcgtcagtgtgttcatggacgagagctgcggcccgccgccggccgggctactcgcttccgtcctcgaggccttcgacgacatcggactcacggtgcttgaggctagggctacctgcgctggttcctttcggctagaagctgtaggagaggaagtagtagatgggggcctcatcatcgacgcgcacgcggtggagcaagcagtagttcaggcaatcaagaattgccctgcaaattaaactaatcgacctagtcctccaattcgatcgatcgagttgacgatgcgctggtggtgtagcacaaagttcatgccaagagactccgagctatatatacatactgattcgcatcgtactttttgaagagagcaaagcatttttttctctcttgcctgccgcaaggagtcagtcttgcgagttctgctatttagtcaggccagggggcacctgtgctcatcgtttggcaatgccaatatatatatctcaattatcc

SEQ ID NO: 23727 - DNA, 1179 bp, Zea mays
  Clone ID: LIB3600-039-E3_FLI
gcggcacgccgctgaaacggtctccaaccccactgggcaactgcaactgcctgcgccagcgcccccctcgattgaaatctcgccgccagttcggtcgcactcgcaccgcagtcgtcttctccttcccttcccttcccttccctcctcgctaaaaagccaacgcaaccgctcctcctccttctccgcctcctccggtccctcccctacttccccccagcacgcctcagcctgcattccgccacccacgcgactgatcgaccgacgacttccccattcccgccccgcaacccgcagggctctgggctcggaggaaccgagggcgagggacctccgaccgggaccgggccgggcgacatgttgggcgacctcctctccaggatcctcctgctcctgttcggctacgccatgccggcgttcgagtgcttcaagacggtcgaggcgcgccccaacgacgcccgcatgctgcgcttctggtgccagtactggattatcgtggccatggtgatagctgttgagagcgtgatctcttggatgccaatgtattcagaaatgaagctagctttctttgtgtacctgtggtaccccaaaactaagggaagtgacgttgtatatgacacctttcttcgccccatagttatgcaatatgaaccgaacatcgagcagagattgttccatctaagggcaaaatctgggcagttaatttccttctacatgaagaattttgcggataaaggaacagccttcttcatggatgtcctccgttatgtcgtatctgagaaacctgaaggatccaatgcagagcaaaggagcaagaagtccggctggagccccttcgcgaccaagcgccgaccaccatctccgccgccggagcccctcttcgacagcaacccggacgccgccgtgctggccgaggccctgcgtggcgccatcggtgcaaagccccggcgttcgcccaacgacaaacattactagagggaattattaagagcgattttagggatgattgtttgtacatagaatgaacgaacgaatcaatcaaaggcacaggggagaaaagagttagtacatagcaaaatccagcaatacattcaccattgtgaagaacggatggatggatttgtacctagtacggttcaagtaaatctgatatgatggaaatggttagtttttattgcgtcg

SEQ ID NO: 23728 - DNA, 548 bp, Zea mays
  Clone ID: LIB3600-040-C8_FLI
ctcaaagtggatcgatgaagtgcgcaccgagagaggtggcgatgtgataatcgtgctcgttggcaacaaaactgatcttgtcgacaaaagacaagtgtccacagaagaaggagagagcaaggcaaaagaattgaatgtcatgttcatcgagaccagcgcgaaagccggcttcaacatcaagccgttgttccgcaagatcgctgcagccctgccaggaatggagacattgtcagcaaagcaggaggacatggtggatgtcaacctgaagtcgacttctagccagtccaactcgcaacaacaggagggaagtggatgcgcctgctagaagtgtgttagcttcaggcatactttcacttgaagagcgtgtgtcggtaactgttgtataagcagttacatatttcactagtgttactacttactatccttaattctctgatgcttctgtagtgaggctcacatcgttttctcattttccatcttgattttgtatgttgcggcaaaagaccagaaataacaacattttgaatcacaccgggtcttttgtttcg

SEQ ID NO: 23729 - DNA, 716 bp, Zea mays
  Clone ID: LIB3600-040-F5_FLI
gttcgtctttgggacgaactcactctgcgcctttgcgctcaaccttgccgtctttctgctggtcggcaagacctcggcgctgaccatgaacgtcgcgggagtagtcaaggactggctgttgattgccttctcgtggtccgtgatccgggacaccgtcacaccgatcaacctgttcgggtacgggatcgcgtttttaggggtgggctactacaatcatgtcaagctgcaggcgctcaaggctaaggaggcccagaagaaagccacacaggctgatgaggaggccgggtcgctcttgcaggagcgcgatggacacagtgatcgcaagagcgacaatcaagcctagagggccagatctgatcctggcttccccatattgggcatctgatgcaaggtgcaaagactggtgtttggtctgtggttgctttcaaggaggtgtgtgccggttgcttgcacatctttaactctgggtctgaagagcaaatcagaagtatttatggcttaggaaatatgcacctgctttgctggagaactttgtcctgctatttatttatagacacttctgatctacaggaaggcggccattcctcactacctctctttgcccattgtctacatttatttgttctactagtagattaggggactacagatgtactcctgcagatggttaatttggtggctattttcgatatataatgagcttacagtaatctacg

SEQ ID NO: 23730 - DNA, 1232 bp, Zea mays
  Clone ID: LIB3600-040-G8_FLI
gttaattttaagcagaattggatgggaaagggtggccgtttgacaaaaccagttaccaatatttactgggaaacagttgcaactaaccttgacgagtttcttgaaatatcagagaagttatccaaaaagggtcgtgctgaatctgctattgcagattatcttaagacagaagttattccagctgtggagaattttcaaaagaaaaaagagagacgtttaaaacggcaggagaagaaggacaaacttttagcttttactaacacattccaaacccgttcattgcgggaacgtcggcctgtcagctacaattactctgattttgatcgttccatcgaggaggcgataagagctgtacagaaaggaaaagtacaaggttcacgtgaggcaggaacagaagagaaacctgcttcacatcatggagacaaaggtgccgatggaagatctgacatcaattctgaaaacaacaaaaatggaggacaggaggatgccaagtacctaagtgacctgagctctggcgatgaggaagacggagactacagtgacaggggtgtcagctccgctgacagtgacggagacaataatgcttctgattcctacaagagcgacatggaggaggatgtgtctgtaccacgcaagagaacccgtcttgctgcccgtttggcaaatgacaagcctcggccagggcttcgtcggagccaacgaaacatgaagaatgatgaagagactatgcatccaggtcaggtcacccctccaccaatggcgaagaaaacactgaggcaaaggcccacgcctgtctccaagcagcctgacattactttctcgagctctgaagacgatcttgcacaggttgttgcagactcagaggatgaaagtgggtaatttggcagaggttcggttgcatgcggtattttggattttgctttgtgggagccggttgaattccacaggtttagcgtcactaggcacttccatagtttcacactttcacttctaccggctggccggaatcagacgcagacagcaccggcgttttccccatatccgatgagttatcttcacgaagtcattggggcacctctgacccacttgtatggtgatttgtacatatgcatttagacactatactgcgatgcatcaccactggagcacccaaaaatcttgctgatgaaatgcttctgctgtgaactatattatccatgcattcgaagggaaatggtgcttatgtttgcttt

SEQ ID NO: 23731 - DNA, 832 bp, Zea mays
  Clone ID: LIB3600-041-A9_FLI
cagcggtgggtgctcggctatcttcaagagacaagagtggagggcgccgaagagcagcgcaggggggagatgaacagcggcgtggacacgcaggcgcgggcgttcgcggacgaggtgcgcggtagtttggagacgaaggactggatgctggacctcggccacccgctcctgaaccgcgtcgccgagagcttcgccaaggccgcggggatcggcgcagtgcaggcggtcgccagggaatcgtacttcatggcgactgaaggcgagggaggatctgtgtccggcgcaaggaaacgctcgttcccggagctcaatgggacgaacagtagcagcatcaagtcggcagaggccatggtgaaaagcgtgagcaaagagtcgttacagtgggggctcgcggctggggtgcactccggcctcacctacggcctcgcgggggtgcgcgggacgcacgactggaggaacagcgccgtggctggcgccatcacgggcgccgcggtcgcgctcacgtcggagcacgcgtcgcacgagcaggtcgtgcagtgcgccatcaccggcgccgcgctctccacggccgccaacgtgctctccggcatattctgagccgccggccgtgccgtgccgcttgatttccgaggattggcttatagttctgtcacccaatcattcgggtaccgtcgctcttacgcttcagtacgataacttgggagcgttgcattcatgctttcacttgcattgtcattacaacttgggagcgttgcattcatgctttaaactaatgctatcgtgtaacgtacggtgtacgatcttgcattgtcattacaacttattatggcct

SEQ ID NO: 23732 - DNA, 181 bp, Zea mays
  Clone ID: LIB3600-041-B3_FLI
ataggggcctaccatggcggtgacgccggaaaccgtgagaactacatcaacgagctcatcaagaggatgaactaggctctctcttgtatcctgtgagaatgcttttctgtgtcagcgtggttgtttttgctctagtaagttgacggataatgatggatatgcaattatttttttggtgttc

SEQ ID NO: 23733 - DNA, 540 bp, Zea mays
  Clone ID: LIB3600-041-B4_FLI
caggctcaccacaccaaccaacaagcaaaaattccccaatcctctcgtctccgcggcgaagatgtcggggcgcggcaagggcggcaagggcctgggcaagggcggcgcgaagcgtcaccggaaggtgctgcgcgacaacatccaggggatcacgaagccggcgatccggaggctggcgcggcggggcggcgtgaagcgcatctcggggctcatctacgaggagacccgcggcgtgctcaagatcttcctggagaacgtcatccgcgacgccgtcacctacaccgagcacgcgcgccgtaagaccgtcaccgccatggacgtcgtctacgcgcttaagcgccagggccgcaccctctacggcttcggcggctaggcctgccgcgccgcgcttcgccgtcgctgcggttctggtgttgctgcagttcgcaagttgtttgtgtgggcggaaaaatgctagatactgtagaactgcagtgcggtatgctgcacatgctgtgtttgtctgaagaaatgttgtcaatgctggcttgctctggactc

SEQ ID NO: 23734 - DNA, 1080 bp, Zea mays
  Clone ID: LIB3600-042-H10_FLI
gatacccattagtagatgctggcatgagggaactctgggctactggttggacacataatcggataagagtgattgtctcaagtttcgctgtaaaatttctacagataccctggatttggggaatgaagtacttttgggatgtgcttctggatgcagacctagaaagtgatattcttggttggcagtacatatctgggagtttgcctgatggacatgagctcagtcgtcttgataatccagaggttcagggtcaaaagtacgatccggacggtgaatatgtaagaacttggattcctgaacttgctagaatgccaacagaatggatccatagtccatgggctgcgccaaactctatattacaagttgctggagttgagctgggctttaactacccaaagcccatagtagaacttcatatggcgcgggaatgtttagatgacgccatctccacaatgtggcaattggacacagctgcaaaacttgctgaactagatggtgaagttgttgacgacaatctgaataatatcaggaattttgatatcccaaaggtggttttgaacaagaaattatcaccaagcacttcatccatggagcacagggtgttgtctactaatggcaaggacgaaaagtcgcagcctactgaagtgaaggccctgtacaaacagattattcgagatgatatgatgaatgactcaaacatggatgacacatgctctactgctaacttgaaagtgacaaggaaaagatctagcagtgatagtgcgttcaatgttccctcatgttcatcctcattagtcatggaatcacggattcatcataatgaacctagttctgttctgtattcaggctacttccagaagacagcagacagagatggcactagtaaggttgaagataatgacagtgaagatagtggtacgagcatctctaggccatccaagaaagctgcttagcattagcgcattgaagatgttgcaaatcttcaatgagaaatatttaccgtcacatgtaatttagttggtgcgtttgtagtgatcatgcaaaagctgttctgtgaattataattagttttacacggcc

SEQ ID NO: 23735 - DNA, 675 bp, Zea mays
  Clone ID: LIB3600-043-A10_FLI
cttccgtccgagtctgagctcatctccacgcgccgccgccgccgctcgacgcccaccgcgcagccatggcggaacagactgagaaggctttcctcaagcagcctaaggtgttcctcagctcaaagaaatctggcaagggtaagaagccaggcaagggtggcaatcgattttggaagagcattggccttggtttcaagactcccagggaagcaattgaagggacctacattgacaagaaatgtccattcactggaaccgtttctatcagaggcagaattattgctggaacatgccacagtgctaagatgaacagaaccatcattgttcgcaggaactatctccactttgttaagaaataccagaggtatgaaaagaggcactccaacattccagctcacatctccccatgcttccgtgtgaaggaaggcgaccatgtcatcattggccagtgcaggcccctatcaaaaactgtgaggttcaatgtcgtcaaagtcattccagctggatctgctgctgccggcaagaaggctttcaccgcagcctgagtttaagactatgttccatgagtagtttatatagtgatgtctttttttgttaaaaaaactgccttctaggcttgtgcctttcgactatggtttggagattgttcccatcttaatgaagtccaatcatctg

SEQ ID NO: 23736 - DNA, 930 bp, Zea mays
  Clone ID: LIB3600-043-D4_FLI
accggtttccgtttcccggtactcccgatcagtacaggaaacggtaaattttaccggttccagtaaataccggacgagaagttcgtccctgcatcaattagatcatttagttttgtctaaaaaaattagctttatcgtagtagctcggtagccccctctgatctgtttctagatctgccactgtgcggaaccgctgctgctcggcccgttctatcacagatccatggcggagaaggaggcggcggctatgtggggcggcggcgacaagctcattctgcgcggccttcagttccatggcttccacggtgtccttcaggaggagaagacgttgggacagatgttcgtggttgacatcgacgtctggatggacctcgccgctgccggcgagtccgactgcatcgctgacactgtcagctacaccgatatctacagcattgcaaaggatgttgtcgagggcacgccacgcaacctcttggagtcggtagctcactcgatcgcagaggccacactgctcaagttccctcagatctccgcagtccgagttaaggttggcaagcctcacgtcgcggtgcgaggcgttctggactacctgggcgtggagataacgaggcacagaaagaaagaatgagatgctgtacacatgtggtgatggggagccagttcaatgctgatggcactgcggccataaccataatccacgcacgcttgttggcaactaggcatatccctttcacctctgaactgttggaatatcgggaatctgttcccctagttgctttattacgaattcagaatttcagatcatatctgggtagtaagatcaaccttcttctggtctgtaacatctttttttttgtccatgttgctagtcgttgctcttcataccaactcatttcttgcacaaccattgagcctcagtttattgctagt

SEQ ID NO: 23737 - DNA, 1026 bp, Zea mays
  Clone ID: LIB3600-043-F1_FLI
caagaatgagggagatcaagcatggcgacagcaattgcacgggaactgccctcctggtcgggatcccaaacgttgggaaatcggccatcgttaatgcgatacatcaaattgggaggattgcggcagcagagaaggggaagctcaagcatgcgattgtgagcagccatcctggagaaaccagggacatacgtggatacaagattgctagtcatccgaatatatacgtgttggacactcctggtgtgctttcgccgagatttgcagatgatggttctggccccaggctagccttgacaggtatcagttactttacttcaaagtttatggcttcacttaactacatgcttttgcaggagccatcaaggattccttgttagaggattacgatactgcacagctccttcttgcgatagtgaactcagggaaggaatataggaagtgggagaagctgaataaagcaggagattccttttcttgtggcaacacaatcacgcccaggggccacaacagtaaagagcaatatgcttcagatcacactcaggattccgtcgtgaaagcagtccgccaggtgctttttgagaccatatctagttttaacggggatctagggcaggtggatgagctaaggagattgatcggccaccaacttgtaaacttgcagcaggttttcaaagtcttgactgaaccaagtgagaatatctgtaaacctatagctactaaactggtcaatctatatcggacaggaaggcttggccgatataccttagaacatgtcccagatgttaggcaggaagttgtcgcagaattacctaccgcctaaagcatgccctgttttttttaccttaaaacaaggattatgcattggtttggccaggatacagtacagcccctcctagctgtaggttgcccatggagcatgaagcgcctccggtgttccattagaggccaaaaactgaatcaaccacagtgtactatgtaagtcttgcggattgactactcgggtgcattagtttggcagataatctt

SEQ ID NO: 23738 - DNA, 595 bp, Zea mays
  Clone ID: LIB3600-044-G7_FLI
gctggggccctgagctgagagcagagcagggagcgaaactttgcgctgagattgagctgctcctacttggaaggcggcggcgtcggcaatggggtcggagacgttcgtggagatcctgctggccatcctgctgccgccggtcggcgtcttcctccgctacggcatcggggttgagttctggatctgcctgctgctcaccatcctgggctacatcccgggcatcatctacgccgtctacgtcctcgtcgcgtgacagcacaacatggtgtggtaggtatgacgacgatggtgaccgtccgcccgcccgccgggagctggaatatatgagacccagacccagtgcttctgatccatccattccatgcatgcagtgatgcaggcatacgtacgtttagcccatgctgtatgtttgtgtcttgctttagttagctttagctagctgctgcagcttagcttctctcagctcgtctaccgatccgttttgctgtgcccatggacatggatgggaagaaggaaccgtagcttgtatgcaagtgtgtactagagtccagagtttctactctgctactgattctgaatccagacatgttttctg

SEQ ID NO: 23739 - DNA, 731 bp, Zea mays
  Clone ID: LIB3600-045-F12_FLI
atctcctcgcatttccttgcaaccgattgccttcccccctcccaacccaagaccgatggcgcccaaggccgagaagaagcccgcggcgaagaagccggcggaggaggagcccgcggcggagaagacgaccgccgggaagaagcccaaggcggagaagcggatccccgctggcaagtccgccggcaaggagggcggcgagggcaagcgtggcaagaagaagggcaagaagagcgtggagacgtacaagatctacatcttcaaggtgctgaagcaggtgcacccggacatcggcatctcctccaaggccatgtccatcatgaactccttcatcaacgacatcttcgagaagctggccggcgaggccgccaagctcgcgcgctacaacaagaagcccaccatcacctcccgcgagatccagacctccgtgcgcctcgtgctccccggcgagctcgccaagcacgccgtctctgagggcaccaaggccgtcaccaagttcacctcctcctaggcttgcacgctcgccctttgtaggcttctcttgtgttgatgttcgccttgtgttgtagttagatgttgctggtttctctgtcggcgctgctctgcttctgtaggaactgcgtcatgtaacctagcaaggacttgtttatttgtgaatcatcaacactttgttgttgatcacttatgttccaaattctgagtttgacgctggagcatgcctcatttgttgctgg

SEQ ID NO: 23740 - DNA, 831 bp, Zea mays
  Clone ID: LIB3600-046-A9_FLI
gccgcgctgcatccttccgcttcctctcgctccctctgctctctcgcggtcgcagtctcgcagatcccgatcgcgcaaggagccagcgtagagggtgatcgacgatggcgggcagcacgcgcgcagcgcacaaggcgttcctgctctgcaactacacgctgctgggtgcagcatcggcgtgcatcttcctcacgctctcgctccgcctcgccccgtccgcgtgcggcctgctcctcgtcttcctccacgcgctcaccgctgtcttcgccgccgcgggctgctcgggctccttcaccgacggcggcgccggggccggccgcgcgcacgccgcgcacacagcgggggccgtgctcaccgccatcttccagggcgccgccgcgctgctcgccttcacccggaccgccgacttcctagccgagctgcggtcctacgtccgggaggaggacggcgaggtcattctcaagctcatcggcgggctcggcaccgccatcttcgtgctcgagtgggccgcgctagcgctcgcattcgcgctccggcttgacgatgatggcaacgaggagattgacggtgagcactgcaagagctgggcgtcagcgtaccatgtctgattctgctctgttcagacaccggagacgcgagagatacaggcacacaaaccagaaattgggggggggggggattttctcttctattatttacagctgtggatctattccgctgttgttacttgttactgtggtcatgaaccgaagtgcaaaggcaaatgttttgctttgcaatgtattcaattcatctcttagaaattgcaataaagtacattcagtgagccgt

SEQ ID NO: 23741 - DNA, 1351 bp, Zea mays
  Clone ID: LIB3600-046-D3_FLI
aaaagaaaacgatacacgccgcgatagaaacactcagacacaccctctccatccgcccctccaccctcctcttcctcctcccgtcgcggcttcccccgattggcatccggggcgggcccatcccccacccggccgccgcgcgcgtccatggacggcctgcacggtacggacgcctgcttctcccccgcgagggccgtctcgccgcaggtgaggctaccggggccgccggacgtgggcagtcagtacctggcggagctgctgcaggagcaccagaagctgggacccttcatgcaggtgctcccaatctgcagcaggctgctgaatcaagaaataatgcgggtgttgaatatacggcgccagcatggtgctgctgtggactttgagaagtttgcagccgcaagccccaaccagatacatccgtcaccccccatgccgaacttttgtggaaacggttttagtccatggaatgggatgcattcagagagagtaggtgttccgcaaggagctatgggttggcaaggacccccacagagccctgcttcttatatcgtcaagaagattttgcggttggaagtaccgacagaaacataccctaatttcaattttatcggtcgtcttcttggaccaaggggaaattctttaaagaggattgaagcctgtacaggctgtcgtgtattcatcagagggaaaggctcaattaaagattctggcaaggaggaacaactcaagggaagacctggctatgaacacttgagtgaacccctccatatcttgattgaagctgagttacctgctaatgtgattgatgcaagacttgcaaaggcacaagagatccttgaagagttgttgaaaccagtggacgagtcacaagactactacaagagacagcaactccgagaacttgccatgttgaattcgccactccgagaggagagtccacgttcaggcggtgctcctccaagtcccttcagtaagactgtctccggtaggccgaataaaacaggggacacagaattgtagatgacactatttatcactgtttgaagagagaagtttgaaataggggatctactggagatagcctaacggcggcatgaaaagagtgaaacaatgacacccattcctccatcttgatcctccggcaaccccacttagtccatgccttcacatcctattttccatgagcaaagctttcatgatggtgttggtagtgtgtgacatcctttaatgtactagcaggtgaattttgatctcccatcccatgtgacattaaccttgagtgacagatgactatgcgtagtgtatcctctatgactgtataattagaacatttgatttatttgttactggt

SEQ ID NO: 23742 - DNA, 705 bp, Zea mays
  Clone ID: LIB3600-046-F12_FLI
ggggaaaaccctagccgccgccaccgaagcggcctcccaggtaagcaggagcgtccaccccgccgccgtcatgaagcgcaatccccgcgtcacgagctcccgccggaagtgccgcaaggcgcactttacggccccgtcctccgtccgccgcgttctcatgtccgccgggctgtcgacggagctccgccacaagtacaacgtgcgctccatcccgatccgcaaggacgacgaggtgcaggtcgtgcgcggcacctacaagggccgcgaggggaaggtggtgcaggtctaccgccgccgctgggtcatccacgtcgagcggatcacccgcgagaaggtgaacggctccaccgtgaacgtgggcatccacccctccaaggtgatcgtcactaagctgaagctcgacaaggaccgcaaggcgctcctggaccgcaaggcccggggccgcgccgccgacaaggctaagggcaagtttactgccgacgacgtcgctgccgccgccgctggtggcgccgccaccggcgcctctctccaggagatcgactaggctcttcacggtcatctgatggttgtcgtaccgccttttcctcatctctttagtttttgctaccaatgattatgtgatagaggttttatgttatttgaaaactgctctgtgcctggatgagagttctggaacataatgtgaacctgtgtgtctgtgacctg

SEQ ID NO: 23743 - DNA, 1006 bp, Zea mays
  Clone ID: LIB3600-046-F8_FLI
ccgccgcaaacctccggtcctgtgccataccgccattccattcttaatctgggcgccgaagaagagaggacgggagcgaggtccggtcgaagaatcgtagcgggttgggggaggggggagcggcggcggcggcggcggaggccggtcggtatgattcaactgctgttcctcgtgctgttcgcggagggcgcggtggcgctgctcctcatggtgaaggtcgggccgctgcgggagctcgcgatgcgcggcgtggaccaggtgaagacgggcaagggcccggccacggtcaagacgctggcgtgcacgctctccgtcatcctcatgtccagcgtcgccagcatcctcaagatccagaacagggggctcaagctcggcaccgtcagccccatggaccaggtgctctggaggacgcacctcctcgaggcatccctcatcggatacacgctattccttgcatttgtaatcgaccggctgcaccactacctgcgaaagctgttgacactgaggaaaacatccagcacatccagagaggaggtagagaaacttcagatggagaaccggtcgctccgcgaaaaggaggagaaatcctccagtgagacgaagaggcttcagcgagagattgcgaggctgaatgagggcatgaagaagctgaaatctgagaccgaagagcacgagaggaaggcgtcggtggcagaggcccatgtcgacgcgctgcagaagcagtcggaggagctgctcctggagtacgaccggttgctggaagacaaccagattctgcagactcagctacttagcagaggctaagctaaggagcttggtttgttagcaagactcctttaccaggtagtgtcgtagagccaaggacttgcccgattctgaatgcttacatgccgcggttctaaatttcggcatgtccattgtggttcttggcgtccatgctgttcctaacttgtgatcttgttgatgtatggatgcagcgtgtatttttagagttcatgtttcttcc

SEQ ID NO: 23744 - DNA, 735 bp, Zea mays
  Clone ID: LIB3600-046-H11_FLI
cttctcctccccctcttatcaagtcctcctcgggttagggttccttagggttttgtggaggggcgatggcggcggctgatgtggagtaccgttgcttcgtcggcggacttgcctgggccaccagcaacgagtcgctggagaatgccttcgcctcctacggcgagatcctcgactccaaggtcatcaccgaccgggagacggggaggtcccgcggcttcggcttcgttaccttctcctccgagaactccatgctcgacgctatcgagaacatgaacggcaaggagctcgacggccgtaacatcaccgttaaccaggcccagtcccgtggcggcggcggcggcggcggcggcggtggctacggcggcggtcgcggcggcggcggctatggtggcgggcgccgtgacggcggttatggcggcggtggcggctacggcggtcggcgcgagggtggtggcggcggctacggaggcggtggcggctacggcggtcggcgcgagggtggtggtggcggctacggcggcggcggcggcggctggagggactgatgtgtggccccatcctggcttcggccgagttatcttatctatctatagtatcgtgttaccgttcgcttctgtcaccgtgttagtgtccgttctacctttggattaggtgttggtaccccttttgttcgctttggttgctcccgctatgaaacgagacgagagaagaatgagcaaggtttttgttcgcatc

SEQ ID NO: 23745 - DNA, 650 bp, Zea mays
  Clone ID: LIB3600-048-A1_FLI
ccggccagcctcgcagccccgtggtctgctagcggctagccacagaatccgtgatgatgtgttacgaatttactgcttcgagactggtttgtacactgttgtacttctctactctgtatttgttcccacagggttattataggaaatgcagtcatgctgtgcttctctagccaataagcctttgttgctcctgttgacttgcagcggagagaccaggagccatggtgatccctccaccagcaagggcagctagagtcacccgtttcctcaagccctacctattgaggatgcatttctcaaacaagagaagctgttgagaccaaacatggagtcgacccgcgacgtcgcagcagctgcaaagattggaaagttgctcggcgagcgcctgctcctcaagggaatacctgcagtgtccatccacatgaagagagaacaaaagtaccatgggaaagtgaaggccgttatagattcagtcagagaagctggagtcaaactgttgtgattgcgatgttgaaaacattggacttagcatttgtgcaatggctgagctgtaatttttaagtgtttatcaatgcaaaatggctggacgttgctgttctgaaattctgggccaattgttactcaggtcaataaaggactttgtttggact

SEQ ID NO: 23746 - DNA, 1109 bp, Zea mays
  Clone ID: LIB3600-048-C1_FLI
atctacatcgaacacttcgttcagacggcggcggcggccatggcctctgctgcagggtccgaggaggcgtgcagggagatccgcggcacgtgcggcgcgccgcggcgcctgggcctcctgctggctccgcggagccccgccgagaggcagcagatcagggcggcgtaccgtgccaggttcggcgaggacctcgccgcgaccctggcggcccccaacaccaaccaggtggacgagctctccaagctgctctacctgtgggcgctggagccggcggaacgggacgcggtcgtggcgcgggaggcggtcgagggcggcgtgactgcggccggctaccgcgccctcgtcgaggtgttcacgcgccggaagcaggaccagctcttcttcaccaagcaggcctacgcggccaggttcaggaggagcctggaccaggacatggccaccgagccgtctcacccttaccacaggctgctgctggctctcgcggcctcccgcaggtcgcaccacgacgacctcagccagcacgtggcgaaatgcgacgcgaggaggctgcacgacaccaagaacagcggcgctggtgctggttctggttccgtcgtcgacgaggctgtgatcctcgagatgttcagcaagaggagcatcccgcagctcaggctggccttctgcaggtacaaacacatatacgggcatgactacaccaaggcactgaagataaacgggtctggcgaattcgaaggacctctcagagtcgttgtcaagtgcatctacaacccttccaagtactactccaagttactgcacagaagtatgctacccgcagcgactgatacgaggatggtaacgagggctatcttgggcagcgatgatgtcggtatagacgagatcagatcagcgttccagagtagttacgggaagagcctcgcagaatacatccaagaaaacttgcctgggagtgactacagggatttcctcgtggctgtggcgagtgcgtcagtggcacaatgaggttgtccatgcttgtagttgtagcagaggtatccctgagttgtccatggaagaaaagaagaaaaaaaaacactgttttgcacgctgcaaaagtaagtcgaacaagg

SEQ ID NO: 23747 - DNA, 444 bp, Zea mays
  Clone ID: LIB3600-048-H4_FLI
tgtccattcacgcacctagggttttcgcgccgccgccgccgccgccgccgcagccgcaacaatgccgtcgcacaagaccttccggatcaagaagaagctggcgaagaagatgcgccagaaccgccccatcccctactggatccgcatgcgcactgacaataccatcaggtacaacgccaagcgcaggcactggcgccgcaccaagctcggcttctgagcgtcgggattggccggctgctgcgtcggaaggctagggtctaagagctatcttccttctgttttatcaatgtgtcagtttttctgtaagctagcaagtgttgctatgacgcttttattaagattctggtgagcggtgatgttaagagaaaattggcactactgtggtgtaccccaagattccttgcagcattgctatgctaagtaaagaaccctttatcttattat

SEQ ID NO: 23748 - DNA, 465 bp, Zea mays
  Clone ID: LIB3600-048-H8_FLI
caacatggatgggatggacttctcgaatttcggtggcatgggtggtatgggcggcatgggtggcatgggtgatatggctggtatgggtggtcttggtggcatgggtggtatgggtggtcttggtggcatgggcggtatgggaatggatgatttcgaagatgagagtgatgatgaagaagaagtgtcgaaacctcaagctgcggacaaggctgttgaggctgaggagacggagtcagcggaaaccaagattgaggcggctcagagcagttgaagatgcttatgatctaagctagattgtatcctcatgttaattctgctgaatcggaggacaaaccttacatttatggtgctggcaagtcccagtggcgtgccatgaaaatttacgttccgtcttttaactgggtatccgagtgtcgtgctcagcatattatggatattatttccgtaatgcttcctttggtcgcc

SEQ ID NO: 23749 - DNA, 377 bp, Zea mays
  Clone ID: LIB3600-049-B3_FLI
gctgctcgggacaacaagaagaaccgtatcgtgccgcgccacatccagctggcggtgcggaacgacgaggagctgagcaagctgctgggcactgtgacgatcgcggccggcggcgtgatgccgaacatccatcagaccctgctgcccaagaaagctggtcagaagggggacatcggctctgcctcccaggagttctaagcgtttcggcggaatgaggagagggaccgccccctgtttctgtctcgtccgcgtggttgtgtttcagctctgcggtttttgggggagtgctgtcgatgagttgggattgatatgggttgtggggatgtaaacaaacgcagcgcgttgtttcatgaatgaatgatggatagaaggaacat

SEQ ID NO: 23750 - DNA, 519 bp, Zea mays
  Clone ID: LIB3600-049-B4_FLI
gtgtgcatgcatcacagtcacacacacaatcactcacacacacagagaagaaaccgaacgagagtttagctatagccaagccagcgtgcgtgcgtgcgtgtgtgttgctagtagtactagctagcaaaataaacagaagcaagcaagctagctagagctaaggatcgagatcgaccgaccgaccgacgatcagctagcatggcgcgcttcgtggatccgctggtggtggggcgggtgatcggcgaggtggtggacctgttcgtgccttccatctccatgaccgtcgcctatgatggccccaaggacatcagcaacggctgcctcctcaagccgtccgccaccgccgcgccgccgctcgtccgcatctccggccgccgcaacgacctctacacgctgatcatgacggaccccgatgcgcctagccccagcaacccgaccatgagagagtacctccactggatagtgattaacataccaggaggaacagatgctactaaaggtgaggaggtggtggagtac

SEQ ID NO: 23751 - DNA, 1097 bp, Zea mays
  Clone ID: LIB3600-050-E4_FLI
accgggcacaccccccgagctcagcttagctccactccagctccaatcacagtcgtgaccagagcgcgagagctagctagagggccgtgaaaatgccgatcaataggatcgccctggggagccaccaggaggtgtaccacccgggcgccctcaaggcggcgttcgctgagttcatctccaccctcatcttcgtcttcgccggccagggctccggcatggccttcagcaagctgaccggcggcggcccgacgaccccggcgggcctgatcgcggcggcggtggcgcacgcgttcgcgctgttcgtggcggtgtcggtgggcgcgaacatctccggcgggcacgtgaacccggccgtgaccttcggcgccttcgtgggcggcaacatcaccctgttccgagggctcctgtactgggtggcgcagctgctggggtccaccgtggcgtgcttcctgctccgcttctcgacgggcgggcaggccacgggcaccttcgggctgacgggcgtgtcggtgtgggaggcgctggtgctggagatcgtgatgaccttcgggctggtgtacacggtgtacgcgacggcggtggacccgaagaagggcagcctgggcaccatcgcccccattgccatcggcttcatcgtgggggccaacatcctggtgggcggcgccttcgacggcgcgtccatgaaccccgccgtgtccttcggccccgccctcgtcagctgggagtggggctaccagtgggtgtactgggtcggccccctcatcggcggcggcctcgccggcgtcatctacgagctgctcttcatctcccacacccacgagcagctcccctccaccgactactaaaagccgaagccgaccgacccaggggtgcgcagcgcagcgcagctagcatccagcgctctctccccgctcgccgccgtttagtttctctcgtgcacgtgcatgcatcgtagactgtctcaggccgccgctgcgccggcgccgctcgcatcgtttgcttccttggaccagcagtcgtcgccgtcaggctgaactgcttgtaaccgtgaattccggacccgtttgcttctgtaagatttgtgcatttgcctgagt

SEQ ID NO: 23752 - DNA, 1037 bp, Zea mays
  Clone ID: LIB3600-050-F7_FLI
accccccttcctcctccgatcgagccagggccaggcaacctggtgctccgcccctcgccgttaccgcgacgcttcggcctctggctccaccgcctgcctccgtggctccgtgacgagacacgacgccgagaggtcacccccacaccgcgccgaggccaccccgcttgggattgtgaggtaaagcgtgatggcagcgccaccggcgagggcccgagccgactacgactacctcatcaaactgctcctcatcggtgacagcggagttggaaaaagttgtctcctgttacggttctcagatggatcattcaccactagctttattaccactattggcattgacttcaagataaggactgtcgagttggatggcaaacggattaagttgcagatctgggacactgcaggccaagaacgtttccgcacgattactactgcttactacaggggagcaatgggcatcttgcttgtgtacgatgtcacagacgagtcatctttcaataacataagaaattggatcagaaacattgagcaacatgcttcggataacgtgaacaaaattctggtggggaataaagctgatatggatgaaagcaaacgggctgtgcccacttcgaaggggcaagctctcgctgacgaatacgggataaagttttttgaaacgagtgcaaagacaaacctgaatgtcgagcaggttttcttttccatagcaagggacatcaaacagagactttcggagaccgattccaagcctgaggatcgaactatcaagatcaaggctgaaggggaagctgaggcagcggcggcggcgcagaattcagcttgctgtggctcctgagcacttgtcaccgcaagatagtggcgttctcgcgcatgtaattttcatcgtttcattctttgccagcgactctctccttgtgcttcttgagctatcgcagttgctgtggcctggacaaatgggtgttaactgttaagtcagagcagttacttgctgtattgtgggaactctacccatggtaaggcgtgcataatggctgtgc

SEQ ID NO: 23753 - DNA, 616 bp, Zea mays
  Clone ID: LIB3600-051-D9_FLI
caggaacagagcgaggcgacgccgcggcacctcttctccggcgaagggaaatggcaaccgttccaggggatctgatctggcaggttgtgaggaagaacaactccttccttgtgaagcagttcggcaacggcaatgccaaggtgcagttcaccaaggagccgaacaacctctacaacatccactccttcaaacactcgggtttggcgaacaagaagactgtgacgatccagccagctgcaaaggactcggctgtggtcctctctactaccaagaccaagaagcagaacgcacctgcgaagctcagccacaagtctgtgatgcgcaaggagttccgcaagatggccaaggctgtgaaaaaccaggttagtgacaactactacaggcctgatctgaccaagccagctcttgctaggctaagctcggtgtaccgcagcctccaggttgccaagtccggtgtcaagaagaagaacaggcagtcctaagcgctaagtttgtgttctgtcagggggcatgttggtgctcgtagtcccagcttatatttatctatgttccaacagttttgagacttgttagaactgagcaaaccatgttaagatgctgctgtgtgtcattcctt

SEQ ID NO: 23754 - DNA, 946 bp, Zea mays
  Clone ID: LIB3600-051-F1_FLI
tacgccttccctctgaaaactcttcattctcctctcctccgccgcgccgccaacttcccctcccgtcaactccggctcccgacagagcaagaggcggagaactacacggtggaggaccttgtggccctgaatccgtacaaccccgacatcctcaacgaccttgagaagttcgtcaacgagcaagttgcgtctcaaacatataacttggatgcaaatctcagccttcttcgcctgtaccagtttgagccaggaaggatgagcatacatattgtggcccacatactgatcaaggctctcatggcaatgccggcccctgacttcagtctttgcttattcttaattcctgaacatgtgcaaatggaagagcaattcaaggcattgatagttctttctcactatctagagactgctaggttcaggcagttttgggatgacgcagcaaacaaccgccacatattggaagcagttccaggttttgagcaggcaatccaatcctatgcaattcatgtactttccttgacataccagaaagttccaaggcatattcttgcagaggcaatcaacattgaaggtctcgctttggacaagtttcttgagtaccatgctgcgaactcaggttgggtaattgagaagggtgggcagtctcaagtgattgttcttccacgcaatgagttcaatcacccccagctcaagaagaacacagctgataccgttccatttgagcacctaacacgcatattccctgttcttagctgattcaggcgtagtgagagatatacaatagaactcagagcgagtgaagcttctctaagcaattgtatcatctcctttgtggtataccgtattttaagatctcggtatacctgttcttttttatggctgaattggtacctgcaacttggttattactataacgaaatgaccagttatgagattggtcggccct

SEQ ID NO: 23755 - DNA, 577 bp, Zea mays
  Clone ID: LIB3600-051-F11_FLI
agcccattaattactccccttccccccatcccccagctgcttcagacgagcgagcgagcgagccaccgcccgagagagagagagagggagagtgagagtggggattcaagtttcaaactcactatcgaggggggataggaaggtggtcactcatcggtccacagctagctcgtcgccccccatggctgactggggccccgtggtgatcgcgacggtgctgttcgtgctgctcacgccgggcctgctgttccagctgccggcgcacggccgaatcgtcggcttcggcaccatgcacaccagcggcctcgccatcctcgtccacgccgtcctctacttcgcgctcatcaccatcttcctcatcgccatcggcgtccacatctacgccggctagctagggtgtcttctagtccacacccccttcgtctcttcctctcatcatcggcctcttgcttcctcgtcatgtactactagtctactactactcctagtctactactactactagtagtcttcgtttcgcggataccccgcagtatgttggtatttattatgggattgttatggtgttttatgttcc

SEQ ID NO: 23756 - DNA, 793 bp, Zea mays
  Clone ID: LIB3600-052-E6_FLI
gcacgtgcagctgtcgggagcaggcaatggcgccggatctaagcgaactcgccgccgccgctccagcccgtggcgcctacctcgccggcgtcggtgtcgcggtcctcctcgctgcctccttcctcccagtagccgagtcgtcctgcgtgcgagataactcattggtgagagacataagccaaatgccgcaaagcagctatgggattgaaggattgtcacatataacagttgctggtgcgctcaatcatgggatgaaggaggtggaagtgtggcttcagacaataagtccaggtcaaaggacgccaatccacaggcattcctgtgaagaagttttcactgtcctcaaagggaagggtacgctcttgatgggatcaagctcactaaagtacccagggcagccacaggaaattcctttctttcagaataccacattttcaatccctgtaaatgatccacaccaggtttggaattctgacgagcacgaagatttgcaagttcttgtgatcatatcgagaccgcctgctaagatatttttatatgatgattggagcatgcctcatacagccgcggtactgaaattccccttcgtctgggatgaggactgcttcgaagcagcaaaagacgaactctaggtcacaagtgtttcctgcaatttatctgcttcatccatgatcctgctggtgctggactactacaattctcagcactagttgtaataaagccagtgcgcttttcatgtataattctgtattgtggctcgcgaaaataaaatttggcaacggtttatgaactt

SEQ ID NO: 23757 - DNA, 1112 bp, Zea mays
  Clone ID: LIB3600-053-C3_FLI
gaaaaggaaaagaagcgcctttgcccaccgcgcgatcaatcaatccggggtccggcggcctgccatggtgaagctggcgacggccagggaggcgcggctgtacgggccggcgctggcggcaaggcggtgggagtacatcaacgcgggaacatacgtgttcgcggcgctgctcctggtcctggcggcggcgctgtccatgtccgtgtccgcggccaggccggggctcgccgtaggcgccgtggcgctggcggccgtggcggccgtcaacgcgcacgacctcgccgcgcacctggctggcgtcgactgccgcgtgggactggcgaggtacgatgcccagctcgggctcgtggagttcctcgtgccggccgtgcacgcagccgggtgcgcgctcgccgccgccggcctggcgctgctggcctccccccactcccagtcccagcagcggcacgcggcgaccatgctgctcgtcgcggcgctgctgtgggtgctgggctccgtgctcaactcctgccaggtgtacgagcgcgccgacggccgcgcgcagctgctgcagtcgggcgtgcaggtgcctcagctgctggggagcctgctgttcctggtcgccgcggcgctaaaccgcccccgcagcggcggcgagccggcgtggctgtgcctggtcgggagcgtgctgtggctggcggcagcgctgctcaacgtgctgaaggtgttcgccatgcaccagagcgacgcgctgcggctggagaagctccgcggcggcgcgcaggagtggctcagccgcgaccgcgagggccgcgtgccgctcaactgggaggaggcagccaggagacgggcgctgcccaccgagctccggtgatcatcgcccgcgccaggcgccacccatcatttcccgtgccgtaaaatgaggggaaaagggtagataaataaattgtttcggcgccacccttttgggccgttgcttgggctcaatggcggcccgaagccccggattgtagggcccattagctgctggagcttatcgcattccatttcctatgtccgagtcccttgcggctcctttggaaggaaaaggaatgagagaattaagagatggattgaagagggttggaaggatt

SEQ ID NO: 23758 - DNA, 756 bp, Zea mays
  Clone ID: LIB3600-055-C6_FLI
ggctccccttgctaccttgccttcacagatctcccactccccaacagaactgtcacgtctcggcgcccgggggccgtggtattacggctcatcgcggctcggcagtggtggcgcgcagctgaccggatcgagcagcggatggacggcggcggcgggctgggcggcctgcggtggaccgcggaagaggcgtcgacgatcggaggcatcgccacggtgtcgctgctgcactccttcatccccacgcactggctccccttctccatcgtcgcgcgcgcgcagcgctggccgctctcccgcacccttctcgtcagtcagtacccacctcccttccgcgtgcctcgttccccccatttgctgcggttgccgctcgttactgttcaccgcctcggcgcctccagatctggttatctcctaattctaagaggttgggtgaaggctagctcccaattgatggtgcaagagtgtgccattagggttttactctggttgggctgctctcggtggttggttcccttggatggatccggttttgcatggtgtcattaacaaacgatggcagtttttgtgtcatggtagtgtggtggtgcctggctgctgcctattgcgtgtagcatatgctgagtattgcctgaacatctgaatgagattgcatgggcatcatgttcagatgcgcatgctcctatgatctgattttctgtgtgggatggattcgtaagactgcatttgtgcttctgttaccttcctacttttggacgc

SEQ ID NO: 23759 - DNA, 845 bp, Zea mays
  Clone ID: LIB3600-055-G2_FLI
gcgcaccacaagcgagcgagggacccggggcggaagaagagagagaagacgtctctctcctctcggcgtccccgttccccaacctctcgtctgctgcctgcctgcctgcctgcctgcaaaaaggagtttgtcatggcgtctaagcgcatcctcaaggagctgaaggacctgcagaaggacccccccacatcatgcagtgcaggtcctgctggtgaggacatgtttcattggcaagcaacaattatgggaccacctgacagtccctatgctggtggtgtttttttagtgaacattcatttcccgccagattaccccttcaaacctccaaaggtttctttcaagacaaaggtcttccatcctaatatcaacagcaatggaagtatatgccttgacattctcaaagagcagtggagccctgctttgacaatttctaaggtcctgctctccatctgctccctgctgaccgaccccaacccggacgaccctcttgtcccggagattgcccacatgtacaagacggaccggccgaagtacgagtcgacggcccgcagctggacgcagaagtacgcgatgggctgacgaacgctttcctgctcgtccacccgactggcgtctcaagaaagtcgttcctgggcgccattgttcccttggatttgttgttggtcgtcgtgtgtatccctgatccatctaggatcatcgtattgtattgtagtgtatgtatatcgtcggcctaccatcgttgccattcaccatagtgaggtggttggacatgcttcgcctatatgcacctgtgcttgccgtccttcgggtcggtgctctttggttaatgttcatcgaagacgttg

SEQ ID NO: 23760 - DNA, 690 bp, Zea mays
  Clone ID: LIB3600-055-G9_FLI
cgacgcagttcggctgccagacaaaaaccctaaccaccgtcgccgccgccgccgccgccgctcttcctcgagatgggaggcaagtgcccgcaccgcaaggtaaagaagcgccgcctatcccacaagacggctcgccgcggcaagttcctcctgaaggccgacgatgccgtctatgacgagctcgtcaagctggccgaccagggcaaggacgctgaaaccaaggagctccccgtcgatgaggaccttccaggcctgggacagttctactgcctccactgcgatcgctactttgcaagtgaaagcgtgaaggatgatcactaccgctcaaagcgccacaagaaaagggttaaggtaatgtctggaccggccccgcacacgcagcttgatgcagaactcgctgcagggatgggaaagcctgacaacggcctgaagctcatgtccatgtgaaggaacctcttgctggtactggtacttgttccgtgcctttgttgctgccgtacaattgaagctgctttgcgcagtaagtaatagcaagagttatagcagacggtttttttttgttgtacgcaagactttcgaagtgggtgtaagttgttttagagtggtggcagaggggggggggggtgtcaatgcatgtatcatgaaaccatttatcgacccataccagtgatgatgatgatgatgtctcgt

SEQ ID NO: 23761 - DNA, 150 bp, Zea mays
  Clone ID: LIB3600-055-H4_FLI
tgcgttccgcatccttccctcaactggtgctgtgctctcttgtttctagcgtacgatgaatgatggattttatcccgggcctggaacattttgcatgctctagcttcatgttgattattatatagcaaaattagcaatgtatttcttact

SEQ ID NO: 23762 - DNA, 620 bp, Zea mays
  Clone ID: LIB3600-056-B4_FLI
gctgccgccgtcggccgtcctccgccctccagtccgctgctcgcccgaccggagtgaggcggcgcggcgatggagcacgggtcgttgacagactcgacgtcgtcgactttctccatcatggacgaggaccacactctcgccaactctgccagattcgtcctcaaccaggacccaagggtagcattttgtggatataccatccctcatccttctgagaagaaagtgaacataagacttcagacaacaggagatgcagcaaaggatgtactgaaagatgccttgcagaatctgatgattatgtgccagcatgtcagagggacaatggacaccgcggtggttaaccatagagcaaaaaatgctgcagaagaaatggatgttgatcggaactagaatgaacgcagtgtttgttgagaccaaacacaatatcattacagcttttagtactggtcagaagctcggagctcagtcattgttccagttgtctgtaggagtaacggtcgtattcattggcttccacttctgcaatactgaaacttcttcagtttactgcataattgcttttagcaatatattattatgatgacccaaacaatattgaattatggtgaattaaatttttg

SEQ ID NO: 23763 - DNA, 951 bp, Zea mays
  Clone ID: LIB3600-056-G4_FLI
caagccagcgcacgtcggtaggcacgccaccatgccggggctcaccatcggcgacaccgtccccaacctggagctggactccacccacggcaagatccgcatccacgactacgtcggcgacggctacgccatcatcttctcccacccagccgacttcacgcccgtgtgcacaacggagatggcggcgatggcggggtacgccaaggagttcgagaagcgtggcgtgaagctgctgggcatctcgtgcgacgacgtggagtcgcacaggcagtggaccaaggacgtggaggcgtacggcgggaagcagcagcagcagcaggcgacgacgacgaaggtgacgttcccgatcctggcggacccggcgcgggacgccatccggcagctgaacatggtggaccccgacgagaaggacgcggcggggcggagcatgccgtcccgcgcgctccacgtcgtcgggcccgacaaggccgtcaagctgagcttcctgtacccggccaccacggggcggaacatggacgaggtgctgcgcgctgtcgactcgctgctcaccgccgccaagcatggcgggaaggtggccacgcccgccaactggaagcccggggagtgcgccgtcatcgcgcccggcgtctccgacgaggaggccaggaagatgttcccgcaggggttcgagaccgccgacctgccctccaagaagggctacctccgtttcaccaaggtttagctagccgacgtacggcacggacatctagctcgtctgtcagtccgcgtcgaccggggtgcgcggatcttttgtgcctgctggtggtttctctgactagtactagtatatatataggctctatgtatgtgcgtactatgccgtgccgtgttgtctcgtgtagtggtggcaaccggttcgtggcactaccgcgctagtattgtccacccatatcaatgtcctcttctgaactt

SEQ ID NO: 23764 - DNA, 1033 bp, Zea mays
  Clone ID: LIB3600-056-H10_FLI
gggacacaaatatacttactacacactcgaaacacatactagatgggtacaccgtacacatattaaacgacacaggagctcaacggcccagtcccaccgatgtgctgtaaaggtaggccacatcagcaccgacactgggcccactaacccgacacggaatcagcacacagacacattatttattcgaccacaacacaaaacgacgctcctttactaggcggggcccgccgcgccacgtaggacacgacgtgaacccgaacacaaaagcaggtttttcctagcgacctatgccggcgccatgccgtgctgttgccgtggcagtggcaccagcgcggcgcacgccagtcgccaggtgacaggctgacgcagcgagctagatcggccgccgtccggcgctgggctggactcactcgacggacttctcgacggcggcctcgggagcaggggccgccgcttcctcctcggtcgctgcgacctcaggagtggcagcaacagcaggcgctgcctcctcctcctcctcgttagcctccacagccgccacctctttggtctcggcggctatctccggctcagcagcctcgaccggggcagcagcagcctccgtctctgctgccggcgcggcggcctccgtctctgcttccttgacctccgtctctgctgccggcgcggcggcctccggctctgcttccttgggctctgcctcggtcggctcagcaacggcctcggcctccttggtctcagtctcagtctcggcctccaccggctccggctccttagcgacgacgacctcggtctccaccgccggagcagcggtctcctcgttcggggtctcgacggcggaggcggcggccagctgggcagcctcctcgacgggagcggcagtcgggacctggacctcgacggcggccattggtgcagtgcagctagctggacgtgtgtgtgtgtggactgtggagcaaacaacgaaggcactgaagctcggagctaagcagagtgcagagctcaccagtgtgacgatggctggctggcgtgt

SEQ ID NO: 23765 - DNA, 564 bp, Zea mays
  Clone ID: LIB3600-057-F5_FLI
tctctctcttcgcagacacaaccaaaagaccaagggggaaaaatagtaaagaaacggagcgaggctcctccgatttcttatctatcctgatccaaaccctccgagggggaaacaattcattccgcacggcatccgggaaggtctgcgtcgtcgccatggccaccgaggaagtcgccaagccgtccccgatcccgccctaccccgagatgatcctggcggcgatcgaggacctaggcgacaagagcgggtcgaacaagtcggccatctccaggcacatcgagggcaagtacgacggcgacctgccgcccgcgcacgcgtcgctgctggccgcgcacctggcgcgcatgaaggagtcgggcgagctggtcttcgtcaagaacaactacttccgcgccgacgcgcccgacgcgccgccgaagcgcgggcgcgggcggcccccgaaggcgcgggaccccggcacgccggtgtcgccgccatcggggcgcgggcgcgggcgcccgcccaagcccaaggacccgctggacgccgccgtgaagcaggccaccgcgggcatgcccagggccc

SEQ ID NO: 23766 - DNA, 639 bp, Zea mays
  Clone ID: LIB3600-058-A10_FLI
cgaatatattagtctgcctttttacccatgatgatgcatgcctttttacatctgaacgctgacattggcttttcttgtttcccatctgactaatatacagctaacacacagacaaaaaaaatagcagcatgtcggaggtgaaggactccaatgtgcctgctgcacttgatggaaatcctcaacctatggaccaaactgaagacaattctatgccctcagcacagcaacaggaagaagcaatcaagaagaagtttggaggactaatgcccaaaaagcccccactcatctcaaaggatcatgagcgggcctactttgattctgctgactgggctctagggaagcaaggtgttgccaaaccaaaaggaccgctggaggcacttaggcccaagcttcagccaacacgccaacaacagcaacaacgtgcaaggcgccctatttacacttcgtcagaaaacgaggacggagacggggctggtgctgaggatatgaacatcaattgaagtggactagtggagtggaatgcctgctcagattggttgatgagcaagtcgtcactatatgtcaagtgttgtagtttgctttgcaattattggaggaattaaatgatcgtctgctgggttcatgagtcgaacatttgat

SEQ ID NO: 23767 - DNA, 1623 bp, Zea mays
  Clone ID: LIB3600-058-D5_FLI
ccggcggcaccccgcagtcccggcgtcccgcacccacgtcctacaggcagaccaagcaaatggcgatctcgatctcgcaggaggccttcgactccatggtccgggagaacatggaggacctcggcatggaccccgatgaggccctcgctgacgccgttgaggcgctcaccctccagggcgccgatctctcaggtatcgttaagcgcgtgccgggagaggccaccgcggcggaggtgagcccggtggtgcgggttctggacgaactgaaggcctctctcagcgccagcggcgggtcggagcaggatctcgacggactcgtctctctgctcgatgagttgcgcaatctgtgctgctccggcgagggttcggagaatgcagcgatcgcggtacggaatggcgtcgtggaggcgctcgtcgccctgtgcgcgtccgctcgggtcgagcaggagaggctgcttgcttcggccttgaagagtctgagctccgtactccgtgatgtgccaagcactgaaaagttcagacgaagtgagggacccaaaattgtcatggatctcttgcaaggaggctcagaaaattcagatttattggatgctggatttagtgttgtggcagcaggttctgctggcaatgaagttgtgaaagagtcctttatggacctgaaggtcgatgaactcattctgcgggttatgaaggataaatcaaaatctaatgtgcaaagtttgtatgatgccatacgtgttctgttgaaacctgatgacaaccgagtggtagcttctcaggtatatggatactcccggagatttgctgaaatcggggttgcagaagttcttgtcaatgcacttcgtgagcaagtcgctccttccagtttgccatctgcttgtgctgctttaaagtcgattgcagtcaatgatgaaatatgccgttccatatctgaaaatggtggaattgatgtgcttcttcaatgcatcgacgaggcaggtgagcagaagaacaaagttgtagcaagatcttgctgctctttgttgtccaagcttgctgcaagcgatgcaaacaagtccattatcattcagcgaggtggttttgataggttcctaaagttgacatccagattttctgaagatcctgctataattcaagaggttatgtctatggtgacggtcctcacactgaggtcaccagaaaatgcagcacgtgcaatggaagaaggctatgggacactggctatacagtcaatgcaaaggttcccctcctccgggcagactcagaagcaagcatgccttatgattcgcaatcttgttgcccgaaaccctgagaacaggaccgtcctgcttaatgatggtgcagaaaagcttattagaaaggccatggccctgcacggaagctgtaaagatgctgcctcgtctgccttgagggacctgggcctcgacaactacaatgcatagacaccagtgaccagtcacaccatagaaagtgtgcgtcgagttagtttggtcgcggtagaatgttttggaggagaaatacattgtgagttatcgaggtgccgcactgaaatgagtttgcagaattgcgttactgtggttgcatcaatggtttcagtttgttgggcaatccaacttcagggct

SEQ ID NO: 23768 - DNA, 399 bp, Zea mays
  Clone ID: LIB3600-058-G12_FLI
gggacaaaaaaaatgaggagtctagcttctcgtgtcgtttgtttctgcatgatctcctcgttgttcatctctgcatttgcagccagtcgtcagccggcgatctttcaatcggactatgcagacgatccaagtcctgctccgacaccgcaccgacctcatgcggcaccgataccgccaggtgacagtcgtatctggatgaacagccatgacggcggaacgagtacgctgccccgagatgcagcgaccccctctgcgtcaagatgaaatgaatcaacgatacctcagacttggatcccctggtggcctgtctgggagatcttagttttaggcacaaaacgggtgtaaatcactggctaaataatgacaataatatttccagagttaattacttatcctatc

SEQ ID NO: 23769 - DNA, 450 bp, Zea mays
  Clone ID: LIB3600-059-E8_FLI
cggatcgacatcgacatcgacccatggattcttcggccctcagcaatccgcgtctcatggcgctcattgaggaggagaaaaaaagggccatggcgaacgagctggtggcgaagctgacgtttgtctgctgggacaagtgcgtgacggggagcgtggggagcagcctgagcaggagcgagacctcgtgcctgtccaactgcgcgaaacgcttcgccgaggtgaagatgatggccctgcagcgcttcaccactaccggacgcggctgaagtcccaaccaccacgcgcgcatctctctctctctgcctctgcgtggacggagcaatgtgtgtgtggtgtcctctggagtgtgccattgttggtgagatggtagaacatgtcaatgtatcctatgcttttttttttgtttaagacggtgttagaattaagttgattctgagatgttgatgcaag

SEQ ID NO: 23770 - DNA, 1436 bp, Zea mays
  Clone ID: LIB3600-059-G10_FLI
acactcgctttcttcggttcttcctcctcgagcagccacttccgtctctaaccctacagcgacgacgagagcgaggctatgaaggggaagaagccggtcaaggagctcaagctcaccgtgccggcgcaggagaccccggtagacaagttcctgacggcaagtggcacgttcaaggatggtgagctgaggctcaatcagagcggcttgcggcttatctctgaggaaaacggggatgaagatgaatctacaaagctgaaggtggaagatgtgcagttatcaatggatgatcttgagatgattcaagtcattggcaaaggaagcggtggtgttgtccagctagtgaggcacaaatgggtgggcacattgtttgccttaaagggtattcaaatgaacattcaggagtcagttcgtaaacaaatagtacaggagctcaaaataaaccaagcaacacagagccctcatatagttatgtgccatcaatctttttaccacaatggtgtaatatatcttgttcttgagtacatggaccgtggatcgcttgcagacattgttaagcaagtgaagactattctggagccataccttgcagtactttgtaagcaggtcttggagggtttattgtatcttcatcatcaaaggcacgtgattcacagggacataaaaccatctaacttgttggtcaaccgtaaaggtgaagtcaagattaccgacttcggagtgagtgctgtgctagcaagctcaataggtcagcgagatacatttgttggaacctacaactatatggcgcctgagcggattagtggtagcacttatgactacaaaagtgacatatggagtttgggcttagttatacttgagtgtgccattggccggttcccttatataccttcggaaggtgaaggttggttaagcttttatgaacttctggaggccattgtcgatcagccaccaccttctgcacctgcagatcagttctctccagaattctgctcatttatctcctcttgcatacagaaagatccggctcagaggatgtctgcttcagaactcttgaatcacccttttttgaagaagttcgaggataaggacttaaacctggggattcttgtggagaacctggaacctccaatgaatatacccgaatagcctgtcgtttttagtgatgaagcctttgttgtgccttcagggtttggcctcgaagcctcttggcatctgctcctcaactgcagcctccctacctgaatatgctataacatcattgtatgattcaagccccttgtggctatctgagcataagagtagagggaactatgctgcattccgtgtatggtcaccttattgtagctattgttgcgacgggccttgtgattttgagtcttgttttaacttttgcagtcttatcagcggtggattcaaaatgaacgaactgaatattc

SEQ ID NO: 23771 - DNA, 835 bp, Zea mays
  Clone ID: LIB3600-059-G6_FLI
ctcggcagtcggcacgcaggctagcagcacagcagcagccagagccatcccctctcctcgctacgcttcgcttcctcggcgccgattcctcctcctcctcctccaccctcgtccgtcccgttccggcgcgcgagctcgcccgagatggcgaacgcgagatcgggtgtcgctgtgaacgatgagtgcatgctgaagtttggcgagctgcagtcgaagaggctgcaccgcttcataactttcaagatggacgacaagttcaaggagatagttgtggaccaggtcggggatcgcgctaccagctacgatgacttcacaaacagcctccctgagaatgactgccgatacgcgatctatgatttcgactttgttactgcagaggatgtccagaagagcaggatcttctatatcctatggtccccatcctccgccaaggtgaagagcaagatgctttatgcaagctcaaaccagaaattcaagagtggcctcaatggcattcaggttgaactccaggccacagatgcgagtgaaatcagcctcgatgagatcaaggatcgggcacgctaggcgcaccgccatcgtgagtttcatgatcacgcatcatggactcgcctactactgtggatttgtacgccattatagacttggtgctgcgaaagactgctttggtgatttgtgggtttgttgctgtgtaaaaagatcctcatggcttccagaagaccatgaaggtttggatctatcatgtaattccttgttatctgccaattatgtatgaactatggacatgtgttgcgctgttcaactcactacaaataagtaatcgatatattccctaccc

SEQ ID NO: 23772 - DNA, 1028 bp, Zea mays
  Clone ID: LIB3600-059-H2_FLI
gggctcttctcaccaggactggcatcctgccatggctccaggccaagatcgttgatcccgtgctgcaggtcatcagaaggggagcagaacccaagcaactggccttctctgctgccctcggtgtcacgattgggatctttccgatatgtgggaccactgttattcttggtgctgttgttgtagcaatgttgggaagtcgttgcaatgctgttactcttatggttctaaatttggccgccactccaattgaactaagcttgatcgtccctttcttgcgtttgggtgaagccgtcactggcagcgggcacttccccttgacagccgacgcattgaagaatgttctcaccggtcatgcctcaaaggatgtgctaatgagcatcgtccatgcgatgctgggttggcttattgctgcaccaattgtactggtcgtgctgtacgccgtttcgttcccttgtttcaaggtcctggtcaacaggtttggtggtattccttcgagccccaggaccccaatcaaagcggtgtagccagtgcctggccggatcctctgcagttacatccgtggacatagctgcagatgtgtcgctgacatccggggccggccgtggcgtggccccaaacgtcagtgactcgacgtaattgcagaggaaacggtttcagccagtgaggcatgctgaatgcccctggaattgtgtgcaccaagttctttgtgatgccgtcggattgagatgggttccggcatcatgttgctcggccatcccaggcactggcgaataaatatgatgacttgagaggcatgtgtcctctgtgattgtgtatgctggtttcacaaccatatatagcgagatgcgtatttatgaatttatgaagtcttgataaataaagctaggaagcacaggggtcacggaccattgtgccattcttcccgatgtaggcgtgggttgtgttcagctaaattttctgtgggcgttgtacatgcttgcaggaattcagtgccagctgtttgaaatttgaatcataggttcagtggc

SEQ ID NO: 23773 - DNA, 1113 bp, Zea mays
  Clone ID: LIB36-001-A2_FLI
gcgcaccaatcccgacgcgaatcgcccagaacgcgaggcggaatttcccattctcttggacccccccccccccccctctgttcttcctccttcccccgctcctcgtccacacgctccgctccgattccgcccgcgtccgcggacccagatccggcgcccgcgcccatggcgacgcgcaggcgaatgttcctcaaggtcatcatcctcggcgacagcggggtcggcaagacctcgctgatgaaccagtacgtcaacaacaggttcagcaaccagtacaaggccaccatcggcgcggatttcctcaccaaggaggtccagatcgacgaccgcctcttcacactgcagatatgggatacggcaggacaggagcggtttcaaagtcttggtgtggcattttataggggagctgactgctgtgttcttgtatatgatgtcaacgtatccaagtcatttgaaaagctcaacaactggcgtgaggaattcctaattcaagccagcccatcagacccagagaatttcccatttgttgtgcttggtaacaagatcgatgttgatggtggtaacagccggactgtttctgagaagaaggctaaagcatggtgtgcttcaaagggaaacatcccctactttgagacgtcggctaaagagggcttcaatgtagaggctgcatttgagtgtatagcgaggaatgctgtaaaaaatgagccagaagaagatatgtatcttcctgatacgattgatgttgggggcgctggaaggcaacagcgttcgtcaggttgtgaatgctagaagatatggagcactgcgaattgctcggttggttggtctgattctctagggcttgttgtttgggtggcctgtgtcatcatttcatatatgtatttagtttgcaaaactgctatttgtggacactggatagtttggaagtctgcatgcgggtgcttattgtcgactcccgtgtagatgcagagaactcatttgtaactgccgtttcggtgttgtatcgtatctgcgctagatgctagtgttgtaacgcttttgattgttgatggattgcatatatgtactgtatttgtacatgaacagaacgtagtgcccattttcatagtgttc

SEQ ID NO: 23774 - DNA, 923 bp, Zea mays
  Clone ID: LIB36-001-D8_FLI
gaacgaactaaaacccgcgatctgaagcgactagtcgaaggcggcggcggcggcgatggggagcgacctggagacggagaagaagaagaccccggtggcgctgatgcccatcgcgaagcctctcgctggaaagaagctctgcaagcggaccctcaagctcgtgcgacgagcctctgaggccaagtgcctcaagcgcggagtcaaagaggtagtcaagagcattcgccgcgggaacaaagggttgtgtgtgattgctggaaatatttctcctattgatgtgattacacacgttccaatactatgtgaggaatctaatgttccttacatatatgttccatcaaaagaggatcttgcgaccgcaggaaccactaagaggccaacttgttgcgtcctggttctgaccaaaccaaacaagggggagctcagtgacgaggtgaaggataaactgaagtcagactatgactaagttgtaacggaagttgctgaggctacatctgcaatgttctaaggaccattcagggaccacatcatctgagaatcatgcagctacattcttggcgtactatgtaacctgatccctgtcagtctgccctgcttgcgtgaaccgcaccagtatgctttgcatggtggctggagggatatgactatatgagtttacctatatattatggactatccttgttggcgtattgttttattaacgattatatttagccagttataatccgttaggtgagcagattgtttgcttgggttaccagatcttggtagccagtgggtgcggttccaggtcttctgttgatgacttatcacaagatgtgcttgtgattcccgtgtatgaggaattgcgacatcgtagaggcgtaggctatgttcagtagatcgtgccttgcctcgtgtataataatactgttttgtatcgt

SEQ ID NO: 23775 - DNA, 697 bp, Zea mays
  Clone ID: LIB36-001-F6_FLI
cgcaaggtcgcaaacatgtctaccgtgctccagcgcccgacccccggcacggtccagtgcttcggccgcaagaagacggctgtggccgtcgcctacaccaagccggggcgcgggctgatcaaggtgaacggcgtcccgattgagctcatcaggccggagatgctccgcctcaaggccttcgagcccatcctgctggcggggcgctccaggttcaaggacatcgacatgaggatccgcgtccgaggcggcgggaagacgttgcagatctacgccatccgccaggccgtcgccaaggggctcgtcgcctactaccagaagtacgtcgacgaggccgccaagaaggaggtcaaggacatcttcacccggtacgaccgcacccttctcgtcgccgaccccaggcgctgcgagccgaagaagttcggtggtcgtggcgcccgcgccaggttccagaagtcctaccgttgagcgctcggctgcccgctcttgccggacagttgcctgtgttgtcccaacttgccagatcgatgcctgtacccgtggcttaattttctatcatcggagctacttatgtggttctataactagatgctgttttaccttcaacttgtgctgttgtaccttcatatttggactttttaagccttgtgtcggacgcctttggcattgaaatatgagagattttgaagactaaaaaaac

SEQ ID NO: 23776 - DNA, 430 bp, Zea mays
  Clone ID: LIB36-001-G6_FLI
cacacggaacactcagtgcctgcacgcacgagcgaattaccaggcgtttgcgatgggcggagaggccacgaatgccggcggcgggggtatccgcgcgcggatggagcactacctttacagtggcgagaagaagcacgtcgtcgccggcatcgccatcttcgctgccgtcttcggcgtcccatggtacttcatgacgcgaggggcaaagcatcaatctcaccaagattacatggaaaaggctaacaaggcgagatcagagaggctttcttctggacagtcatctgcactaaaagaatgaatgttgtattgcctattctggtccctgaccttcagagcttgtcatagatcatacactgtattgatttgcactcaacggatttgatctgttgttaaataagcaggttatctttctttctaatatcagttgtgg

SEQ ID NO: 23777 - DNA, 511 bp, Zea mays
  Clone ID: LIB36-001-H9_FLI
atcattcggattgcgcgggggtctggtcgtcctgtcagggatgtcatcgacatgctggaagagtataagaggcttgctaaaatctggggcaagatgaagggtctcaagatcccaaagaaaggggagatgagtgcactgtcccgcaacatgaatgttcagcacatgagcaaggtccttcctccgcagatgcttaaacagattggtggcatgggcggtctgcagtctctgatgaaacagatgggatcgaaggagatgagcggaatgtttggaggcatgggtggcgagcggtaattttacgtcctgtttttggtggatcgtcgctgtgaacttgtgatgctaaattgagagggtttagtgctgcggtctgatcatcgtcagaggtttacatgaagatcagcctgcgccatgttatggaacaggcttactgtagctccccatgcctgaaaatttaatttgtatgattatgaacagtacatttgtcctcgaaaaaatgtaagatataatatttgac

SEQ ID NO: 23778 - DNA, 841 bp, Zea mays; identical to SEQ ID NO: 23575
  Clone ID: LIB36-002-D12_FLI

SEQ ID NO: 23779 - DNA, 751 bp, Zea mays
  Clone ID: LIB36-002-G8_FLI
gctgagggacagatatacattgataggcagctccataacagacagatttatccacctattaatgtcctgccatctctttcacgattgatgaagagtgctattggtgagggcatgacacgtcgagaccattcggatgtatctaatcagctttatgccaactatgctattggaaaggatgttcaggccatgaaggctgtcgttggagaggaggcactctcgtctgaggatctgctttacttagagttccttgacaagtttgagaggaagtttgtgacacaaggagcatatgacacacggaacatcttccagtcactcgatcttgcatggacattgcttcggatcttccctcgcgaacttctccaccgtattccagcaaagaccttggaccagtactatagcagagatgcttcccactgaatcactgatcgttgatcagtgttccaatattttggcaagtgcagctttgaataaattgaacagattggcctcgtggccattttcctgtatttatctgtagtcaggtccaattcttttctgttggtgagcgcaagttattcatagatgactcggtcatgggaatatttgtaatattatgtcatgtatcgttaaatttcagttgttttgtttcagctgccagaactgttagcaagagtattctggagctggaagctcgaacgcaactggttgtatctatatccttgaatgccgaataaaggaggggcaataaactgcagcgaaatatgtgctgtcc

SEQ ID NO: 23780 - DNA, 808 bp, Zea mays
  Clone ID: LIB36-003-B1_FLI
agttacctccatccaccagaccagaccagaccaatggccctgcgcctaccaatctcatcgtcccacgggctggcctccacgccggcgccaatctccacgacgacgtgccggccggccgtcttggcgacggccgcggcccagaagaggagcctgctgctggcgacggcctccgagacgaggggagtcgcgccggtgaggtccagcgggatcgagacgagcacggtgggtctgggatgtgaggccgtcaccgggcaggtcacggaggtcaacaaggacaccttctggcccatcgtcgaggccgccggcgacaaggtcgtcgtcctcgacatgtacaccgaatggtgcgggccttgcaaagtgatggctccgaaattccaggagatgtctgagaagaacctggatgttgtgttcctgaagctcgactgcaaccaggacaacaagccgcttgcgaaggagctgggcataaaggttgtgccaacgttcaagatcctcaagggtgggaaggtcgtgaaggaggtgaccggcgccaagatcgacgagctagcgcaagccatcgacacagtcaagtcagactgacaaagaaagcaagtgatgcaactagctagtgtagacgatgaatgaatgagtccctggccggcaaggctgctagatacgtacgtacgtacgtactcatcaacaattaatgatggatgatggcaatggcaaatatacagtcaatgattcatatatgcatgcatggactgctatgctagctagcagccctttgtaaatatattgtttaaggaaatgattcatatattcagccctt

SEQ ID NO: 23781 - DNA, 743 bp, Zea mays
  Clone ID: LIB36-003-B5_FLI
ctcgacttcatcgagggattaccccgttctggacatgctaattgcatcttggtggttgtggataagttctccaaatatgggcacttcttgattttatcccatccattcactgctgctcgcgttgctcgggtgtttttggatcacatctataaattgcatggattacctaccaatattatttcagatcgtgatcgtatttttacgagtacgttctggcagaacttattccggctcaccgacaccaagctttgtatgtcatcagcttatcacccgtaatcggatggccaaaccgagagactcaatcagtgtcttgaaacctttttgcgctgtttcgtgcacacttgtccttccaagtggtcacaatggatttctgttgctgaatactggtataatactagttttcattctgccctcggtcggtcgcctttcgaagtattatatggttacaagccgaagcactttgggttatctgctgcttcagtaacttctgttcctgaattgaacgagtggatgcaagaacgggaggtcatgaacaaggtcattcaactgcatctgcaacgtgcatgtgaccgtatgaagcgccaggccgataagaagagaacagaacgcgtcttcgctgtcggtgattttgtctacctcaagttacaaccctatgtacaatcttcagtggcagcacgttccaacaacaaacttgcttttcgattctttggtccttataagattctggacaaagttgggtctgt

SEQ ID NO: 23782 - DNA, 693 bp, Zea mays
  Clone ID: LIB36-003-B6_FLI
gataaaatctcttcgttcacaaatagacaacatggagtcgtcgttctcgtcgtccttgggtaataacagcagcaggatactggtcattggtggtacggggatgatggggcagcacctcgtcaaggccagcctcgccgccggccaccccacggccgtgctcgtccgcccagccagcagcagcaagctagagcttctcgagaccatcaagggtgacatctacgaccacgagagcttggtggcggcgttccaccaggttgacgtggtcatctccgccgtcggccaccacggaccgcatgacctagaagacggccagctcaggattgtggcagccatcaaggaagcaggcggcagcgtcaagcggttcgtgccgtccgagtacgggtgcgacgtggagcaggccgcgcgatcagcggcggtgctggagccggcgcggagcatcgtgctggccaaggtccgggtccgccaggccatcagagccgccgggatcccgcacaccttcgtctgcagttactgggcgcacggcttcgtgctgccgcgcctcggtgacccccacgccgacgggcttccggccaccagggccaccgtcttcggggacgacgccacgcgcgccatcttcgtgcacgaggcggacatggccgcggtcacggtgagggccgtggacgacccgcgggcgctcgacaagaccctctacct

SEQ ID NO: 23783 - DNA, 911 bp, Zea mays
  Clone ID: LIB36-003-D9_FLI
ccaggacagcgtccacagaaagaagaaagagcacagagagtggagtagtggacagaccatggagctctgcgtctctacacccccatcctccgtccgcgccaccgccgcgcccatatccttcgccccgccccgacgtggcgcgtctgcctccaccgccgttccgccccaccgccgcatcccaactcgagtctggcgctgcgccagcgcggccgtgcctggcccggtgccctccgaagagccggcatccgcctcctacgccgtcgtcgtcacggacaagcccgatacgcctgccgacgacaaggccgaggaggttagcgccgcgcctagtggctccgcggaggcgcctatggcagagctggtgccgtcagaggcgtcatcatccccagatgatggcggcctggatgagattctaagcaagttgaacattgaagtgactccgactttaatcctcactggatttggtgcttttattgctttatggatcctatcttctgttgttgctgcagttgattcagtccccctgctcccaaaattgctggaattaataggaactgcttacacaatttggttcatcgcacggtatctccttttcaaggaaagcagagatgaactgtttgcaaagttcgaagatctcaaacagaggattatttgatctatcgtcgaccttttgccacgtgtttaggctttacagccagcttattattaggttttctccctttcgtttgaaatatttctgaatgggtaaagaaggtcatgtatctaaattgtctcctcatggggtctgttaattgttatcagaccccaagttcggctagtgcgcttcttcaggtcaatatggattttttttttactcaatcctatgtgtatactgtcgagtaaagctttaaaaaggtgaatacggttagtatctt

SEQ ID NO: 23784 - DNA, 533 bp, Zea mays
  Clone ID: LIB36-003-E10_FLI
ctggaacgggaaggacggcgagttcaagctgcaggtgcaccgcagcgtggctctggtgaacaagtcgtccgcgttcctcactgacgacaacctcgtgccggagtcgtggtgggtggagcggaacaaggggatggtcatcggagaaaccgggctgtggcagctcgaaccgcctggcgaggagcccgtaccgccgttcgtgaccgggaaggtcatcgatgacgacgaccatgtcgctgccaccaccaccactactactaccacggctagtaaggagacgaagacaccggtcaaggataagaatcggttcgggactcagcttttctcggcatgctttagaggggtcaatcagtctgtcgataactgaatggttgaatgtttggaggatattttgctactgttgtatcggtttgtgttggtagttgggacctctgtcgcagttctggaagaacaacaacactgttacgatgttaattcctcctctccctccttgcttcggaaggaaaaaaaatagtgagtgtctttatctttctctt

SEQ ID NO: 23785 - DNA, 681 bp, Zea mays
  Clone ID: LIB36-003-G11_FLI
gcgtacgcgtgtgctctgatagcttgctccaggacgtacgtacgtacgtagatcgatccatcgatcgctagctagctgacgaccatggcgtccctctcctctgccgccattaccgccccttccttcacggccgcgcccgctcgcgcagtggtcagcaggaggtccttcaccgtgcgtgcctctctccgcaaggccactgccaccgccgccgtggccgttgccgccagcgtcctgcttgccggcggcggcgccatggcccaggaggtgctgctgggcgcaggcgacggcgggctcgtcttcgagcccagccagttcaccgtcaaggccggcgacaccatcaccttcaagaacaacgccggcttcccgcacaacgtcgtgttcgacgaagacgaggtgccgagcggcgtcgacgcctccaagatctcgcaggaggagtacctcaacgcgccaggcgagacctactccgtcaccctcaccgtgccgggcacctacggcttctactgcgagccgcaccaaggagcaggaatggtcggcaagatcacagtcaactaaagctagctatccattccatgcatctcgatctgtatgtactccgcccgtcgatggatgatgcatccatctctacttgttttcctcacatgtacaacaattaatgcaacaaattaagtacgtacttgagag

SEQ ID NO: 23786 - DNA, 719 bp, Zea mays
  Clone ID: LIB36-003-H11_FLI
aattaagttcgtgcacgtacgcacgcaccgggacaccagcaacccccaacagcgccactgtccagtgcgcgcgtcaagcttgcttagctagccgccatggcctccctcgccgccgtctccgtgaagcccgtggccatcaagggtctcgccggcagctccatctccggaaggaagctcgccgtcgccaggccgtcggcccgctccatccgcaggccccgcgcagccgccgtggtggccaagtacggcgacaagagcgtctactttgacctcgacgacatcggcaacaccaccggacagtgggacctctacggctctgacgcgccctcgccctacaacccgctacagagcaagttcttcgagacgttcgcggctccgttcaccaagagaggtctgctgctcaagttcctgctgctgggcggcggctcacttctggcctacgtcagcgcgtcggcgtcaccggacctcctgccgatcaagaagggacctcaggagccgccgcagccgggcccgcgcggcaagatctaagctcagcttctccatttgcatggtctagtagcttgctttgtactgctagcgccggtcgatccgtcgcaatcgtcatggatcatctctctatcttgttgttacgctgttcataatttggtatatttgccattccgctattgtgtactctttggcatacatacaataattaaaatggcgttgcgtggctctcatat

SEQ ID NO: 23787 - DNA, 622 bp, Zea mays
  Clone ID: LIB36-004-A9_FLI
caggcagcacccagcaccacaccacagaccaaaacgaccaccgcacccgcagcagcgaagtgtccaagcggcggcatggcggagagcaaggcgcgtgtcgcgctgttcctggcggcgctcgcggcggcgagcctgctggcgctggccccggccggcgccgcgacgacgtgcgcgccgacgcagctgaccccgtgcgcgcccgccatcgtcgggaacgcggcgcccaccgcggcgtgctgcgccaggctcaaggcgcacccggcgacctgcttctgccagtacaagaggaaccccagcatgcagcgctacgtcaactcccccaacggcaagaaggtcttcgccgcctgtaaggtgtccctgcccaggtgctgatgctgagtgagtcgtctgccgccccatcaggtcgatgtcgatccatcctgctcgatcgatcgatcatgctactacttgagcacctttgggcagagtttagtattgctcgagaataataaacggagacgtaccactcccagtacttggtacagtgtgagttcgatctgctctctgcagaaagacttggtatatatgccgtcatgtatgtatacgtgtcacgtgtactactatgaactatgatgttacaaag

SEQ ID NO: 23788 - DNA, 833 bp, Zea mays
  Clone ID: LIB36-004-B12_FLI
cgtgtttgttgatgagttcagctgcataggatgcaagaactgtgctaacgtgtgttctaaggtcttcgaaatcgaggaagatttcgggcgggcaagagtttatgaccaatcaggcagcacagaactgattcaagaagctattgatagttgcccagttgactgcattcactggacttcagctgcgcaactgtcgctccttgaggatgaaatgcgcagagtggagagagtaaatgttggattaatgcttgctgggatgggaggctcaattgatgtgtttcggatggcaagttcacgctgggagaaaagacaagccaaagtcctggagaaggtcagaaggcggatgagccaagatgattccagaaagggtggctcatggagtgacatctggggggcaccaacaagatacgagaagaacgaagaggaggtgaaggagagagcaaagcagccgcggctgcagcaaggaggtggcgggagtactcacggaaaggcgccgacaagcctccaacattcaagcttccgaagcagtgcccagcaaggagtgagaacccaacacagtcagagatcgtatggaacactgcagagatacttagcccccccattcacttcgtgtatagcctgatcatttacagagagccgtaagcctgtatagtatctgctctctgactccacatggtatacctgtaaatcctctgttagtgatagctcgggtcgattacccatagagtttctcagattgcagacgcaaaacaagtgtacacagaaagccttaatccatagaacacgggcacatacttttacaggatggcattatgtcaaatgagtcggttgtcttt

SEQ ID NO: 23789 - DNA, 634 bp, Zea mays
  Clone ID: LIB36-004-F3_FLI
gggaccgtgatgacagacgggaagagcaaaagtcttgttgcttaccatgaagttgggcatgcaatttgcggaactttgacgcctggccatgatcctgtccaaaaggttaccttagttccaaggggtcaagctcgtggtcttacatggtttatcccgatggatgacccaacactcatctccaggcagcaactttttgccagaattgttggcggccttggtggtagagctgctgaggaggtcatatttggagagcctgaggtgaccactggagctgctggtgacttgcagcaaattactggcttagccaagcagatggttgtgacattcggtatgtctgaaattggtccatggtctctgatggagggtggagcgcagagtggggacgtcatcatgagaataatggcaaggaactccatgtcagagaagctcgcggaggacattgattcggccgtgaagcagttgtcggatgaggcctacgagatcgctttgaggcacattagaaacaacagggaggccattgacaaaatcgttgaggtgctcattgagaaggagacagtgaccggagacgagttccgggcgatcctttctgagtttgccgagatccctgttgagaaccgggttcccccagccacac

SEQ ID NO: 23790 - DNA, 988 bp, Zea mays
  Clone ID: LIB36-005-E9_FLI
gtcattaagaacaagaacttatcagttaagcaacatgatgatgagatagaggttgaaattgatagcatggatgctgagacactttgggagcttgacaggtttgtgtcgaactacaagaagaacctgagcaagcaaaagagaaaggccgagcgagcgatgcttgcccgacaagatgcagagttgcgtgcacagcaccctatacaacaaccacaaccaaccccagtcccccaagaaccttttggtgaaaaatctccaaaacaagttgtgaaagattcgctggaaggcgagcaactgccagcatctgcaccagaacaaaatggtgagaatagacagaatgcgagtagttcaagcaattcaagcagctccagcagtggctcaggatcatcttctagtggctcagacagtgatagctcctcttcagatggatctgatgctggcaattcatcttgagatatagatgcatgcctttttcttttgagaccagtgccatggggccttgggcgcctccgttctggtcagccctgatgttaacgtttctgctagataccgttcttgtttggtagacgagaaacattgtgtggctggtgttaaatggttcagaagttctgtcgagtaggcaataactgcctatttgacgcgacaatagcaccataagattgtacatgcttaccttgtctggcttagggaacccctgtagtttaagtaggttttgtatgtcgattcacccgctgatgaaggcagtaacttgtaggtttcgtggtgtacccgcctaataagactaggcttgttgctgacaccgtcccttggtacaccgcacttttgctaggagccctctggctggcccagacagtactagcatgtacattagcggcagcttgaacgctgattttgtttagctgtgttgattgcagtatgtaggaaggcgactgctgtatgcatttttttcttacttttgtttaacttacggatgaaagcattggcaggccat

SEQ ID NO: 23791 - DNA, 306 bp, Zea mays
  Clone ID: LIB36-006-G3_FLI
gtcggcgcccgcggatcggaccgtcatgaccatatctacctacgcatgatcactacttgaatgtctactactgctacgtactactactgaataaaaaaacctctccgcgcacatcgtccttgtgtttgtgtgtgtgagagagagaggagacggagagccggccatgtccttttggctgtttgtttggtttatttttgagttcatgcggtctttatttatttccatgtacgctgcttcctcgtacccactttaaatttgtaccatgcatgcatgttccttatgatacactcacctctttttgtttgc

SEQ ID NO: 23792 - DNA, 1549 bp, Zea mays
  Clone ID: LIB36-007-A1_FLI
ctttccgagacaggcacgcacgacacgcgctcgcacgcagagcaactgcttcgatctctccgtgtccgtcctctactctctagctaaccgcggtcggcccggggaggtggcgatgggcagcgaggacatgctcgtcgagatccacccccgcgagctccgctttctcgttgaggtgaagaagcagagttcatgttgtatccatcttgttaataagtcagatcaatatatcgcattcaaggttaaaacaacttctccaaaaaaatattgtgttcgaccaaatataggagttattcttccattggcatcacgtgattttacagttactatgcaagcgctaaagaatgttccacctgatttgcaaacaaaagacaagtttcttgtgcagaccacagttgttccatttggtacagctgacgaggacatcgttcctgcttttttctccaaagaaactgatcaatatattgaggagaagaagttgaaagttgtcactgtcagcgtatcagagcctcaagtagagaagctcatcaatggagttccccatgccaaggaaacagctggagttactgtggcagagcagacactagatagtgtgaatgaagcacctaatgtggtgaatgaagttcgtcattctctgaaagcaagctttccgtctttaagtggaactcctgctactttcaatgaaaactcctcatctgtaaacgaatgccctactatcctgcaagaatttctagtcccatccaaacaagcttcatttgcattgtcagaatctgcttccaatttgcaagaatcctctgttgcctctatagaaactctgttttcttcaacagaagcaagtgtagacctgaaagaatctccaccgctggaatatactcctgctccaagtgaagttccatcattaagtgataaagaatctaccaatgctgataatgtttatatacctcaggtaaccaaagattttcaaaatttacagatgaaacttaacaatcttgaagtaaaacttgatgaggctaaaactttgattgtaaaattgagggaagcaaacagaactaccatcctagagcgggataaattgcagaaagagatggtattcttgaaaagggcggaagctgctgcaaggagtcagtccatcggttttcccctgcttttcgtcatctacgtggcagttgttggcattttgctcggttaccttctacacctatgaggatggtgaattttagaagaagcacctgcgccattgctgatctctcttggagtcgctgagttcctgaacctgggttactttgtcagagtgaacctactgtcacgtcatgattgtcacattagtcagatgaacttgcatacatcttaggaccgggggtgataattactggagtatatagaaatagagcagcttaattttttacttggtataagaatagagtagtggttgatatatgctttgatcgagaaggccctgtaaccaggagatcatatccttgatacttctcctttcatgacaaggaacctccccttgtccttgtcacaatacgaacagaaactataaagagtt

SEQ ID NO: 23793 - DNA, 603 bp, Zea mays
  Clone ID: LIB36-007-C1_FLI
tcttccatacgaccataccctacctccaaattcccaattgtcaacctctcctcagagttcgagtgaccatgtcggggcgcggaaagggcgggaaggggctgggaaagggcggcgcgaagcgtcaccgcaaggtcctccgcgacaacatccagggcattacgaagccggcgatccggaggctggcgagaaggggcggcgtgaagcgcatctcggggctcatctacgaggagacccgcggcgtgctcaagatcttcctcgagaacgtcattcgcgacgctgtcacctacacggagcacgcccgccgtaagaccgtcaccgccatggacgtcgtctacgcgctcaagcggcagggccgcaccctctacggatttggcggctgaggggtcaggggtgtcccccagcttctgctggtcgtggcagaagtcttgggtcgcggtcacgaaatggagtgaggcgagagtattcttgcccatgtgcttagtttcgtaggcttatcactctagactctagtgccttggtccagtagtagcatacgacttgtactgcatttacttgttctgaacctctaaatatgatgaaatgtggattcacttgatctcacag

SEQ ID NO: 23794 - DNA, 1001 bp, Zea mays
  Clone ID: LIB36-007-F3_FLI
aagcagcgtgggcaaagctacgagcgcccggctagcttcgccatgaacatgggtggggtgtccccgtcgacagtccggtgcaagcactgcagcacgcagctcaccgtgtgccccggcgagcgcgccatccagtgcacgcaatgctgcggcgtgacgcgtatccggcggcggcgggtccagcggccggcggcggcgccgcccaccacgggcttcccgcgcgcccgcggcaagaagcgggccctcctgatcggcatcacgtacgccggcacgcgccggggctgcggccagctgaggggggccctcaacgacgtcaagtgcatgaggcaactcctctgccagcgcttcgccttccccagcgactgcatcatcatgctcactgatgaccagaaggacccgttcaggctgcccaccaaggacaacatccggttggggatgcagtggctggtggaggggagcagcgagggcgactccctcgtgttccacttctccggcctgggcgcgcaggtcgccgacgacgacggcgacgagctggacgggtacgacgaggccatctgcccgatggactcgttccagaagggccccatcctggacgacgagatcaacgagactatggtccgcccgctggtccacggtgtcaagctgcacgccgtcgtcgacgcctgccacagcgccaccgtcctcgacctcccgttctgctgcaacatgtccagaagcgggagctggcagtggaaggacgagagccccccgtccggcgcctacaggggcacgagcggcggcaaggcgatgctcatcagcggctacagtgacggcaaagccaagtccagcgtggccagtgcgcagaaccggaggcctgcgcgaccatgggggccatgacgcacagcttcatcacggcggtggaacgcgagccgcagggtgtcacctacggccgcctgctcacctccatgaaggccatcatgaccaactccggcggctgcgccgtgcagggtcctattggcgccggc

SEQ ID NO: 23795 - DNA, 690 bp, Zea mays
  Clone ID: LIB36-008-A5_FLI
attcgggaggcggaggagggagcggcgcgcacaaggcggcctcgggctccgcgccctcgccggcgcctaaccccacggcgatgctctcggcgctcatgagcaagcgcgccaagctccaggaggagctccgctccatcgagcgccaggtttatgatatggagaccacctacctacaggagactaatcaatttggaagtgtgctgaagggtttcgaatcttttttgtcatcctcaaaaaacacctctaaccttaagcgctctcggaaatttcaggctgacgagaggttattctctctgtcatctgttacttctccagcggttgatgaacatttggctggacgagatgatggaagagagtatggagcaggtcgttctaagggtggaagcacccctgcgaacgggcaaggcaaaccgaagaagggagggcgccctggcgggcgagacggcaagagactacggccgtcgaatgacccagacctggacgacgaagatgactactaactcctccatcatgtaggcctactgtagcgggttaacttcaatttagcgtctagcagcacatgattctttacgaattgcttcccttctcgtttgttttgcttggttgcatcttcgcttccttccccaactcttccgatttgtaatataacataggtcaatgaaaattagccagattgttaaaattttgtgc

SEQ ID NO: 23796 - DNA, 1087 bp, Zea mays
  Clone ID: LIB36-008-H12_FLI
cacgcgaaaaaaaggagatagagtacacaggttacagacaggcagagagcaaagatgtgtggtggtgcgatcctcgccgagctcatcccgaccacgccggcgcgccgcggcggcgcggcatggcccgccggcaagtgcaagcggcggaaggcgaacgacttcgaggccgcgttccgggagttcgacgaggactccgaggaggaggacgagggtgtggtggagagcaagcccgccttcgtcgtccgcgcctcgtccgcggcgacgcagcccaggccgcgccaggagcagcggagccggcgccgggcgcccgaccagcagcagtacaggggcgtccggcggcgcccgtggggcaagtgggccgccgagatccgcgaccccgtcaagggcgtccgcgtctggctcggcaccttcccctccgccgagtccgccgcgcgcgcctacgaccacgccgcgcgccacatccgcgggcccagggccaagctcaacttcccctcctcctccgcctccgccgccggggcccccgccagccgcaagcgcgcccgcgccgccgacgccgacgccgtcatcgacctcgaggaacaagagcagcgcccggccgcggcggccctgaagcacgaggccgccgagtgctccggatccgacgcgctcccggacttctcgtggcagggcgtgtcggcggcctacgacgagccccccgcgccgcgcccggccttcgacttcgaggcgcggccggagagcgccgcggacgaggcgtcgccccgggcctccgactccgagtcggacgcgctgttcgactcgctcctcttcggcgaccagttcgccttcttcgacgccggcgcgtacgagtcgctggacagcctgttcagcgccgacgccgtgcagagcaacgccgccgcggcggcggaccaggacatgccgctgtggagcttcgacgacggctgcctcgtcgaggacaacctctcgttttaagcttcggcgactgttgttgtgtcttgagttttgtaaattacgacctgttttttttttggagtttctgctcatgtatatctgtatcgatggtgagctgaatgaaatcatccttctcagg

SEQ ID NO: 23797 - DNA, 580 bp, Zea mays
  Clone ID: LIB36-009-F3_FLI
attgaagattaattactatgtttagtatttgcttaacagactgtgcctgattgccacaatctgtacaagaattcattcacatatcacagtcttcaacgggacaggcctttggattttgatgaggcaaaccaatatctagagaaatgtgaaagagataaatcgcgtgttcttgttcattgcatgactggaaaaaacaggtctgctgctattgttgcagccttcttgatgaagtctagagggtggagacttgcacaatcttttcaatgggtgaaagatcgaagaccacaggttcaactgacagatggttagcttcataccctttgaagcttgttgactaattaagacaccgtctctattacattatgaatcattggttccttgcctatcaaatgttaacattttttctcacctgaattgacagcagtctactctatatacacagtgaataagcactgctaaactactttgtttagtttattgtgtagttcgtatctctgttagcaatttttcagagactagattaatacattatgaatgaatatagcagctttcacgtccccttaccccccacgccgcacac

SEQ ID NO: 23798 - DNA, 450 bp, Zea mays
  Clone ID: LIB36-009-H6_FLI
ggagaggagagatgatgatgatgccgacggcggcgtcgctgatggacgatcttgtcgaggagttcctcatccgcctcccgcccgacgaccccgcgagcctcgtcaacgcctccctcgtctgcaagcggtggagccgcctcatcgccggccgcgtcttccgccgcaagttccgcaagatccaccgcgccaagctgctgcacatggcccgggggcaggtctataggcagcggcggcgacggcggcagcggcagtgatggagcggcccgtccggtccgaccgtcgattggctgcttgctctgcatcttctggcttctgcaaccaggaagctgactgaacgctcgctattgccaataattaattagtactattttcttcgtttcttttttttatttgtcgtatacgaactaaaacagagttagtgataatgataatgataatttgtagcagtgc

SEQ ID NO: 23799 - DNA, 806 bp, Zea mays
  Clone ID: LIB36-009-H8_FLI
gcactcccgggtctccagcattcctatcctctccccgcccgcccgtgccgccgccgcggcttcccttcctctcccgagccaagatgaatgttgaaaagctcaagaagatggcaggtgctgtgcgcaccggggggaagggtagcgtgcgcaggaagaagaaggcagtccacaagactacaaccacagatgacaaacggcttcaaagcaccttgaaaagaataggagtgaacagcattcctggtattgaagaggtcaacatctttaaggatgatgttgttattcagtttgtaaatcctaaagtgcaagcgtcaattggtgctaatacatgggtggtcagtggaactccacagacaaagaagctgcaagatctgcttccgtcgattatcaaccagcttggtcctgacaacctggacaatctgcggaggctcgcagagcaattccagaagcaggcctctggtgcttctggtgcagaggctggtgccagcgctggggctgttcaggacgatgatgatgacgttcctgagcttgtccctggagagacatttgaggaggccgcggaagagaaaaaggagtcctcatgattttgctacatgcctgctgttgttaaaccatgccattagaagggacctgttgagaactctgacctaccttatttgtgcctgtgggactggttatgtcatgatcgagaatttggtagggcgtgctggtgggattttacatgaagtatgcctcttttttttcatccatatctcccttgcttttgtgtggtaaaagtcctgttaatggtaaaggccacactttagacc

SEQ ID NO: 23800 - DNA, 749 bp, Zea mays
  Clone ID: LIB3601-002-G5_FLI
gcaataatgtaacaagcatcagcccagcccagccagcttccattcccaaggaaaccctccgctcctcccacgtctcccatggccgccgccggctcagccgcagcgccgcttcgccggctgttcctccgcctccgtgacccgccgccgctgccctttaacacgctcctatcccgcctcgcgccacatctgcagcaaggccccaccctagccccagcaccagccccggctcttgcactcccgacctcgacgccggcccaaacgccatccgggattctccgcgacgcgctcttctccttccacccgggcctccaggcacacccgtgcctagatccgattgggggtgcaagggacgaggccggcccaggggcggcggaggtgtgggcggacagcgtgaagaagaagcgcaagcgtaagatgaacaagcacaagctccgcaagctccggaagcgacttcgccgccagacatgagggctctctcctctccggttagacaccttgtcattgagttgcgtccagtgatttcatctctccttcggttgatccgtagagcaagacagaaaggagatacgggtgaatgacaagagggctgtgtaatgaataactggttttgatcacattttctgtagcccgctcactgtgttagaagattttggttggtttcgacaaggatcatgttccacaacgagacaaacgtttgttaagccccttgttagttactgtatgcaaatggaaatgttgcgttgctcaat

SEQ ID NO: 23801 - DNA, 871 bp, Zea mays
  Clone ID: LIB3601-003-B5_FLI
ggcggcggcgcgggcggacaaggagcaggcggaggaggagttgtgccaagccacaatgggtatctcgcgtgactcgatgcacaagcgccgagccaccggtggaaagcagaaggcctggaggaagaagcgaaagtatgagcttggtcgccagccagccaacaccaagttgtcaagcaataagacggtgaggagggtccgtgttcggggaggtaatgtgaaatggagggctcttcgccttgatactggtaactactcatggggaagtgaagctgttacccgcaagacccgtatcctcgacgtggtctacaatgcatcaaacaatgagcttgtgaggacacaaacccttgtgaagagtgccattgtgcaagttgatgctgccccattcaagcagtggtacctcactcactatggagttgacattggtaggaagaagaaaacccctgctgcaaagaaggataatgctgagggacaagaggttgaggcagcagctgaggaaacgaaaaagagcaaccatgtcacgaggaagcttgagaagcgcaaggagggacgtacccttgacccacacattgaggagcaatttggcagtggacggttgctggcatgcatttcttcccgtcctggacagtgtggccgagctgatgggtacatccttgagggtaaagagcttgaattctacatgaagaagctacagaggaagaagggcaagagcgctgtagcttagagcattctcatggattgtcttgcaccgaaatgtgtgtcctgatgagtacacttttttggttagtcgtctcaagttcagagcgttatgccatattttcagacctgatttgtacactgttttctaaaagcgattgagctctagtccaatttg

SEQ ID NO: 23802 - DNA, 1290 bp, Zea mays
  Clone ID: LIB3601-003-D6_FLI
cgaattccccacgcgcccgcccccaatcccgccagctcggcggcggcccagggatccatggagaagtacgagctgctcaaggacatcggctccggcaacttcggcgtggcgcggctcatgcggaacaaggacaccaaggagctcgtcgccatgaagtacatcccgagggggctcaagattgacgagaatgtggcgagggagatcataaaccaccgctcgctgcggcaccacaacatcatccgcttcaaggaggtcgtgctcacgcccacgcacctcgccatcgtcatggagtacgccgccggcggcgagctcttcgaccggatctgcagcgccggcaggttcagcgaggacgaggcgaggtatttcttccagcagctcatctgcggtgtcagctactgccacttcatgcaaatttgtcaccgggacttgaagctggagaacacgctattggatggcagcccggcgccgcggctaaagatctgcgactttggctactctaagatggcagacgtttggtcttgtggagtgactctttacgtgatgctggtcggtgcgtacccttttgaggaccccgatgatccaaagaatttcagaaaaacgattgggagaatagtgtcaattcagtaccagataccagagtatgtccacatatcccaagactgcagacagctcctggctcggatcttcgtcgcaaatcctgcaaagagaatcacaatcagggagattaggaatcacccctggttcctgaagaatttgcccagagagcttacagaagctgcgcaagcgaagtactacaagaaggacaacagtgcccccaccttctccgatcaaaccgttgaagagatcatgaagattgtagaggaggcccgcacgccaccccagtcatctactccggtggctggttttggttgggctgaggaagaagagcaggaagatggcaagaggtctgatgatgacgagcagtatggggaggatgaggactacgatggcgaggacgagtatgataaacaggtgaagcatgtacatgccagcggcgattttcaacacctcctaaaatgaagctcctggcagcgatcaagtccgcaactggtgagatactgtctggatttgttgtagtttgtggtgctgagatgctgcaccctcggcgcgtacttgtagtttccttctgtctggatcccccttttttttcgcatattgtgtgctatactctgtaaattatcaaactggcttcctcaatgcctatgtaatgaaccgttgagtgattaagatagaaggcgaaatataatttct

SEQ ID NO: 23803 - DNA, 1213 bp, Zea mays
  Clone ID: LIB3601-006-C12_FLI
caggccgcatcgcgatcagtcatctctttccctcccagccttcctcctgcgtctcgctctcgccggaggtcaggcgcaccgccgccgggcgatggacgcctcctaccgccgcgccggcaccgggagtggctccgctccccgctccgtcgaggacatctacaaggactaccgctcccgccgctccgccatcctccgcgccctcacccacgacgttgaggagttctacgcgctgtgcgatccagagaaggagaacctgtgcctgtacggctacgcgaacgaagcgtgggaggtagcgctgccggcggaggaggtgcccacggagcttccggagccggcgctcgggatcaacttcgcgcgcgacgggatgaaccgtggcgactggctcgcgctcgtcgccgtacactctgactcgtggctcgtctccgtcgcattctactacgccgcgcggctcaaccgcagtgatcggaagcgtttgttcggcatgatgaatgatctgccaactgtttttgaagtcgtctccagtggtgtgaagcaatcaaaagagagggatagatccggtactgacaatggtggtagaaataaactgtcggtaaagcaaacaagcgagccacgattagaaaataacgccagggagcctgatgagggctacgatgaagatgacagcaaccacagcgaaaccttgtgcgggacatgtggtggaatatacagcgctgatgagttctggatcgggtgcgacgtgtgcgagaagtggtaccatggcaagtgcgtgaagatcacacctgcaaaggcggagagcataaagcagtacaagtgcccaagctgctgcaattcaaaaagacctaggccgatttaggcctatagcatcgccctcctcccgggaggacggccatggatggaagaagactggacaagcaggtcagagtttcctcttgcgcaaggtcaatgccgccttgcgatgtttactgtaccttttcgattaagcttacatatgacgaacgatgatgatgctaatgttagcagggaaagatcacacattaatttataatctttttgtggtttctccatgccgtggagagttatggtagtctgtatgttgccggagaaggaataggggcagaggaagcctttgtaatctttctataggtggaatgtgcagcttatgcgaagataataataatccgtgatgttcatgttaatatattttatttactat

SEQ ID NO: 23804 - DNA, 1145 bp, Zea mays
  Clone ID: LIB3601-006-D3_FLI
ccgccatcttctcccctgctccgctctccgtcgatggaagggtcgctaccgccgttgccctcgccctcgcagtccatgtccatcgatggaagggtcgctacagcccttgccttcgcctccgcaatccatggacgcccccgccccgagacgtgcccacccagagagccgagccgctcgctcaccttgctaccccacacccgtcttgttctcctcctcgtcccggcgctcctactactcccctccatggcgcacagctttcaggtgccaagttcattccgacattaaagtatcccctacattggacttgaaggacgatagcaaatctgaaacttggaggatcaagatgctctatgacggtgattgcgctctctgtatgcgtgaggtaaacatgctgagggaaagaaacaaatcctatggggcaataaagtttgctgacataagctctaaagattactctccagatgacaatgaaggccttgattatgaaattatgtggcatccgaagcggagtcgtcggaggacttggttacgacttctcgttcttgatgctgttcttcacgtatggcctttgcttctacgtcggtgcgcagtttgtgcgccaggggaaaactacctttctagatgttttcaagggttttttcgcgttagttctggcagctattggagtcccgcaggcgagtgcgctggcttctgatgcgaccaaagcaagggactctgctatttccatcttcggcgttctggacagggagtccaaaattgactccagcagcggcgacgggatgacgttggagaatgtcagtggcaacatcgatttcagcaacgtcagcttcaagtacccactgcgtcctgacgtccagatattcagcaacttcaccttgtgcattcctggaaaggattccggctctcatcaagtgactcctccccctcacgttgactttgcggacagatgtctcaattctagtggtggagctacgaacaacaatccaatgtcctgatcgagagcgatggagctaatgtttgaacttgtgcgtttgaacttgtgaactatggatgagaacttgtgtgaatttgtgaacttatgtatttggacttatgtgaatttgcgaacttatatatatggacttatgtgaatttgtgatatgaac

SEQ ID NO: 23805 - DNA, 811 bp, Zea mays
  Clone ID: LIB3601-006-H6_FLI
gcttcatcttccctcccttttttactcgcgatcggcacgcaggcggcggctgcggcgctcaggctcgggctctgcgactgcgtcagcggcttcccctccggcctctcgccagtcaccgcgcgccctcggccccggtcctctgcacaccggccggtgaccctgcgtgcttgcctttctcctcccgcctccggtggatcgtcaacggcgcccggccccggcggcagcgctgcgcgcgtctcgagggcagcgggagccagcagccgctgctccaccaaggcggaagcattttggaaccctgaactctgggctttaagaagacactactgctgcaaccatgagcaccatgaagttttgtcgcgagtgcaacaacattctgtaccccaaggaggacagggacaggcgcaccctgttctttgcatgtcgcaactgcgagcatcaggaggtctctgacaataactgtgtctatcggaacgaggtgcaccatactgctggggagcgaacacaggtcttgcaggatgtagcttctgatccaactcttcccagaaccaagactgtccgctgcaatctctgtgggcatggagaggctgttttcttccaggccgcagcaagaggggaggaggggatgaccctgttctttgtgtgctgcagcccagattgtggtcatcggtggagggaatgatgcgatgaaatcttcgctctaatagttgtttcatcagagcatgaaacttaacttgttttgtagttttcttggactatgtatttcgaatctgacctaagattaatgagagaatgtctttccaatattttattt

SEQ ID NO: 23806 - DNA, 2351 bp, Zea mays
  Clone ID: LIB3601-007-A9_FLI
gccactacccaccgcaccccacctctaccctcacgcgctgctggtagcccgcagctacctgcctcccttcttgcacccaccgctgccgtcctgcccagatcccgctcgccggtggtgctcccctccccccgcgccgctggcgccgccggagcgagggggactgcccaaaccctagtgggagttggagactaggaggaagggcgcgagatccggcggcggccaccccgatgggggacttcaacgtcgcgctggtgatcgtggcggcggtggtcagcgtgctggtgctgctcgtcagcgtctacctgctcgtcaactaccagcaccccgacgacgtcaaccaggcctacttccccaagctcgtcgtcgtgctcggcctcaccgtcgccgtcctctcaatcctcatgctccctgccgacgtcgccaatcgccaggcctgccgcaaggccgtctacaacggcgcctgcagtctcacgctccccatgaggacgctctggctcgtcgtctacatcgtagacgccgtcctcgtcttcctcgtcatccccttcgccatgttctactacgagggcgaccaggacaagtccgtcgggaagaggctcaggactgcgctcatctgggtcgtcgcgtccgcggtggtgtgcggcctcgtcctcggcattctatacggacttgttggtaaagtggacttcactgtgaggcacctatcttcatcggtccagacatttccaaactcattttctggattctcaagtggccagccttgctttagtccattgactcgtcagtgtgcggcttctactgcaccggctaactcgcaaacaacttggacaatgcgtgctaccttccctgaatatgtggttgctcttactacaattgttggatctgtgcttttcacgatatttggtggtgtcggaattgcctgccttccattgggacttatattctcatttgttcgtcgtccaaaagctgtaattacacgctcacaatatataaaggaagcaactgaactgggaaagaaggccagggagttaaaaaaagctgctgaagccctacaccaagaagaaagaagtgggaacaagggccggaaatggcgcaaaaatgtgaaggctttagaaaaggagttattactcctggaagatgacatgaaggctctagaagagatgtatcctcaaggagaacaggctgaggctacttgggcattcacagttcttgggtacatcgggaaacttctatttggtgttgttgggttaattgtttcaatagcttgggttgcacatattgtcatatacttgttgattgatcctcctctatcttctttcctgaatgaagtcttcataaagttggatggtgtttggggtctgcttgggactgctgctttcgcattcttctgcttctatcttcttattgcagtgattgctggggagatgatgcttggattgaagctagtttttatcacaattcacccgatgaaatggggaggcactttaatgaactccttcctgtttaatgttgggctcatactactttgctccatcagtgtgattcagttctgtgccacggcttttgcctactacgcacaagcaactgcagctcaagagatatttggccacactttgcaatcccttcgtggaattaagtatctttacaagttagtctcccaaatgaagagcagatttagttgctctgttttacaggtgttgtagacattattaaatttcgactgtattctgatcctttaccacaaaacatgcaggtacaatgttttccagtatggctttgttgctcttgccatcctcactctcttctactatgctatatttggatggagaaagaggaaaccaacaggaagattccagctctcaaattgatttgctctgtaagtgaagtttgacggattcatcatatgtgccccctgagtggtagttcagttagcatcttagaaatgtatatgatcaacaaaaccaaaccaatccaaaccaaatcatcttcccaaagagttgaggaactgcaaatgatcaactctgagaccttaaaggccagaattatcaactctgagactttgaaggcaagaatggggcaactgttggttaccacggacatggatgttaaagtagaacccagttgactttgcaatgtacacatttcttgtatcggctcttcatttacgtctgtattatcgcttttatgattggatgatgatgttattcttgagagatgttcggtgtgtttgggggcgcttagcccccctttgatattcattcgtgttgggagttaggtcaattcattgcttttatatgtgttatatactgtgattacaatgcaagattctaggttgtattaatgatgccttgatc

SEQ ID NO: 23807 - DNA, 939 bp, Zea mays
  Clone ID: LIB3601-008-C10_FLI
tctcgcacgttctctctcgccttccacagggccaggccccccctcccctcgctctcccatctcatcatctcggcggctgcaataaaataaatctcgtgcaggggggaaggcgtacgacgacgtggacgcaccgtcaaaggcaccaggctgagcaacccctccctctctccctcttatccccaaggcgaggagcggagcggagaggagggcccttctgcttgtttctccgctttgcaagatgtcgtccccgagcaagcgccgcgagatggaccttatgaagctgatgatgagcgactacaaggtggagatggtgaacgacgggatgcaggaattcttcgtcgaattcaagggcccggccgaaagtatctaccaaggtggtgtctggaaggttcgggtagaactgcctgatgcatacccttacaaatccccgtccatcggcttcatcaacaagatttatcacccgaatgtcgatgagatgtctggctctgtctgtttggatgtcataaaccagacatggagcccaatgtttgatctagtaaatgtttttgaagtattccttccacagctgttgctgtacccaaatccttctgatccattaaatggggaggctgcagcactgatgatgcgtgatcggcctgtttatgaacagaaagtgaaagaatattgtgaaaagtatgctaaaccagaggacgctggcatcaccccggaagacaagtccagtgatgaagagcttagcgatgatgacgacgacgacgacaatgactccggggacgaagctatacttggcaatcctgatccttagtctgagtaggaaacagcgcagtcaggtcatcaatacattgtccaattgcagaaactgcaagtaaacaaaaactgaaaaactaaaaagaaaaaaaacctctggatgtcatgtaaataagtgtactttgtatgttctcc

SEQ ID NO: 23808 - DNA, 623 bp, Zea mays
  Clone ID: LIB3601-009-B8_FLI
gcggcggcggaggcaccggcaccggcaccgcctaggaaaggaaaccgaggaaactacagccatggtggtacggatccgtctggcgcggttcgggtgccggaatcggcccttctaccgggtgatggccgccgatagccgctcccctcgagacggcaagcacctcgaggtcctcggctactataacccgctcccagggaaggatggaggcaagaggatgggcctgaaattcgaccgggtgaagtattggctgtcagttggggcacagccatcagatcctgtgcagagtattctctttcgtgccggacttctgccaccacctccattgctagctatggcacggaagggtgggccacgtgataggcgccccattcatccaatgactgggcgccctctggatctcgagggtgtcgcaattattgataattccaatgctcctgaaggcgatactgaagtgcctacagatgaggtggctcaataagccttttgtattagcatagcatatgtagcggtgctgcaaaagaaaacttgtttgatgtgcttgtggcaagactttgggtactcgtacaatgtggcaaacttttaaacaggtaactttcatccatttctcttcttaaaaatatgtc

SEQ ID NO: 23809 - DNA, 780 bp, Zea mays
  Clone ID: LIB3601-009-C3_FLI
tccgcatctactgacgccgccgccgccgccgccgcgctctctccgtcggactagtcagaggatccgtcatggcgaagaaccccaaggtgttcttcgacatcctcatcggcaagtccaaggccgggcgggtcgtgatggagctcttcgccgacaaggtgcccaagacggccgagaacttccgctgcctgtgcacgggcgagaagggcctgggctccgcggggaagccgctgcactacaagggctcggccttccaccgcgtcatcccgggcttcatgtgccagggcggcgacttcacccggggcaacggcacgggcggcgagtccatctacggcgccaggttcgccgacgagaacttcaagctgcgccacacgggacccggcgtgctctccatggccaacgcggggcccgacaccaacggctcccagttcttcatctgcaccgcgcagacgccctggcttgacggcaagcacgtcgtcttcggcaaggtcgtcgatggctacgccgtcgtggacaagatggaggctgtcggttctcagtcaggtgccacggccgagagcgtacgcatcgaggactgcggccagcttgccgacgactgagggcctcgctgtgtccgattgtaaccaaatgaatgatcaataaatttctttctttcattcttttgtttctgtggagatggataccggcctgtagttaattaaccaatataaactatggatggatggggcggtgatttgatcaagacatctgtatttgttactcttatctgtctattgtatttag

SEQ ID NO: 23810 - DNA, 1633 bp, Zea mays
  Clone ID: LIB3601-011-A12_FLI
ttgaagtcatttggggtgatgggtcgatttcaaaggttgggcctcatgaaatatatgttgttggccgtgaagatgatgatgcctcactagatgacggaacagcctctgatggtgctagctgggagactgttgatgacaatgaaatggatgtacttgatgattctgcaaaggatgattcacaaagcatacctgagaatagcattgaaagggaagatggttcattcaactcccagaatggaagttctgttgcaactggtcccctttcagttgcttttgggtttgtgacccgactagcgagtgatctcttcgctcgaggtagaaggcatttagatagatcgtcaaactcggatgctatggatgaagttgagtctcaccagtctaatgaagtttcagaaactagtgatgacattgataagattaatgagaataatgtggaatcgccagaggatgctgcagtaatagaaaacgattcttctgtcgagaagtctgtagatgtggtcatggctgataatcttgtagatttggaatgtttcaaacactttgatattctgcaatgtcctccagaccaccattaccttgaaaacatagcccagggcacgggtggaagaaagtgggtaaaaaaagtacagcaggaatggagcatacttgagaagaacctaccagactatatttatgtcagagtctttgaggatcgcatggatctcttgagagccgtgattgttggagcaagtggaacaccctaccaagatggcctgttcttctttgatttctaccttccacctgagtatccgcaagttcctccgtcagcatactaccattctggtggtttgcgtgtaaatccaaacctgtatgtggatggaaaggtttgcttaagtctcttaaatacttggaccggcagagggaacgaagtgtgggacccatcatcatcaagtattctacaagtactggtttcacttcagggattggttctcaatgaaaaaccctattttaatgaggctgggtacgagaagcaagttggtactgttgaaggggagaagaatgcagtgccgtataatgagaatacgtacctgctgagcgtgaaatccatgctgtatatattgagacggcctcctttgcattttgaggattttgtgaagagccatttccgcaagcgtggccactacatccttaaagcctgtgaggcatatttgcaaggaaatgttgttggcactctcactgacgacgcatgcaccaccaacagaagcacggagcactcgagctctgtcggcttcaagcttgcactagcaaagattttaccaaggttgattacagccctgaaggagcatggagctgattgcgaccaatacgagcaccttggcaaaacagaccccgttagagagagctgatcattgagtgacttgtacttggatcttttgccttttatatctgttcttttttcgggtttcagaaaagatggtgacttaataccaccaggctgttttcgtataaatgtacattcaaagtttgttgtttccgtcaaacatttggaaaatatggccccaaatgatttattcgatacatggagccgagctaccctgtacagttgcgccgtgtttggttcgatgtaatgtaacgttatcagatttcttggagt

SEQ ID NO: 23811 - DNA, 530 bp, Zea mays
  Clone ID: LIB3601-012-C2_FLI
caaaaatatgtctccctatccgagcgattcgccgaaggaaccgcccacgatggcgccggtccaccgcgtgcacaagacgggtctgcctcgagcttcgcgttggcaggtcggtcttgtgatggctcctcgtcgtcggcgcaagtgcggggtggcgacgactgcgggtcttaggcgacaccgtcacaaccgctgcgtctgcaccgtccagaagtgacgcctccaccttcctctacgcgcagacaccaattcgaccaccttcctcgccaacaccctcagcctcgaggagaacgaggtgtgtgtatcgcgttcatgaaagccatcgtgcctggtgggattgaattcgagatgtacttctctgtcaggagaaatggcgtgggatttggtttgtatctcgattcttctgtgtgcgtctaagtagatcgcggtcatctgtacaggctatagattggtgccttcttccaatctccccctctcttagttccccaccctctccgtcttccatttgtatattggagacctatatctgagat

SEQ ID NO: 23812 - DNA, 1014 bp, Zea mays
  Clone ID: LIB3601-012-H10_FLI
gcacgcagcacgcacggacgccatcgaggaaccctaacaagagcacatcacacggggcgacggtttggcgccgcgccaccggcgactggcggctggtgccccctctcggtccccactccccagcacggtgacggcctgctgcagcagatggtaaattatttctcagactcagagtgcaagaaagttggttcgtccagggaagaggaatagaggttatggttttgtgtgagattgattagcatctgccttcaaatcattcccttggtatttattgagcactgcaagcggttgaggacttgaggtaaacatgctgaagtgcatcttgagccagtcatggaagagaggagcacatatgctacatgcaggaaattcagcaccagctgtactaacttgctggagtcaatttcacagtgggcaggtctggagttcttccaggagcttcttcggcgtggaggacttcgtggacgaggacaacagtaggccatacacgtacaagaaggagaagaggtccaagaacccccacaagcacatctcgttcaagcagcgcaccatcgcccacatggagccgttcacgctggacgtgttcatctccaagcgcttcgtctcggcgtccctcacgcaccggtcgacctgcaggcaggtcgcggtcgccgggaccaactccaaggacatcaaggcggcgctcaggtcgaggtccgacgtgccggcctgcctggccgtcgggcggttcctggccgagagggcgaaggaggccgacgtgtacacctgcacgtacacgccgagggaacgggacaagttcgaggggaagatcagggcggttgttcagtcgctgatcgataacgggatcaatgtgaaactttaccttgactgagttcggtgctgtatgagtagttgttctgttggaacttgcgcgtgggtttatctgttgccagggttgcaggttcgaattatttttgtgtccttatgttgataaattttttttttgctcagatgaagtaaaacacatcattggat

SEQ ID NO: 23813 - DNA, 678 bp, Zea mays
  Clone ID: LIB3601-012-H6_FLI
cgcaaattgcaccaagaaatccatcgagaggccgtcgacaggggaattaatggcgtcgtcgtctagcagcagccaccgccgcctcatcctcgcagccgccgtcctgctctccgtgctcgcggctgccagcgccagcgccgggacctcctgcgtgccggggtgggccatcccgcacaacccgctcccgagctgccgctggtacgtgaccagccggacctgcggcatcgggccgcgcctcccgtggccggagctgaagaggagatgctgccgggagctggcggacatcccggcgtactgccggtgcacggcgctgagcatcctcatggacggcgcgatcccgccgggcccggacgcgcagctggagggccgcctagaggacctgccgggctgcccgcgggaggtgcagaggggattcgccgccaccctcgtcacggaggccgagtgcaacctggccaccatcagcggcgtcgccgaatgcccctggattctcggcggcggaacgatgccctccaagtaactgcgaagagcatagtgcatgaggaatgagcttgtagctagctcatatgtctgaataataagcacagcaagaagatgaatgcatttctcggatcgttcatccggaacaataattaaaggggatccggatttgttcttgtgatataattaacgattcctgtt

SEQ ID NO: 23814 - DNA, 612 bp, Zea mays
  Clone ID: LIB36-010-E1_FLI
ctctcctctgccgccgtcaccgccccttccttcgccgcaccagcgccagcccgcgccgtggtcagaaggaggtccttcaccgtgcgcgcctctctccgcaaggccaccggcaccgccgccgtggcaatggctgccagcgccctgcttgccggcggtgccatggcccaggaggtgctgctgggcgcaggcgacggcgggctcgtcttcgagcccagccagttcaccgtcaaggccggcgacaccatcacattcaagaacaacgccggcttcccgcacaacgtcgtcttcgacgaagacgaggtgccgagcggcgtcgacgccaccaagatctcgcaggaggagtacctcaacgcgccaggcgagacctactccgtcaccctcaccgtgccgggaacctacggcttctactgcgagccgcatcaaggagccggaatggtcggcaagatcaccgtcaactaattaagctagctatcgatcgatatccattcatgtattagctgttgcttcctgctttgtactccgccgatctgtccatctctacatgttttcgtcttcacacaacaacctctgctacgactacgtatatatgcatgctactagctgattgatttt

SEQ ID NO: 23815 - DNA, 1045 bp, Zea mays
  Clone ID: LIB36-010-H6_FLI
ccagttgactcaagcgccatacctctgctccatagtgggcacccgtgtgtcacgggcacgacgagattcggcggggatggcgcggtggcgggcgcggcgcctgctgcctctggccaccttcgtcacactcggcatgatccttggatctttgcttcagttagcacttcttcatcgactagatggctattcagtgcatgcagatagtgatccagaggctgttcttcttcgccttggatatgtgaagcctgaagttatcagctggacgccaaggataattgttttccataattttcttagttcagaggagtgtgattacctaatggcaattgctagaccaagactccaaatatccactgtagtggatgttgcaacaggaaagggtgtaaaaagtgatgttcggacgagttctggtatgtttgtgaattctgaagaaagaaaatctccagtcgttcaggctatagagaagcgaatatctgtgttctctcaaatacctaaagaaaatggggagctcattcaagtattgaggtatgaagctagtcagtattatagaccacatcatgattacttctctgacacttttaaccttaagcgcggagggcagcgtgttgctacaatgcttatgtattgacagatggcgttgtaggtggtgaaactcactttccgcaggcaggagatggagagtgcagctgtggaggaaacgtggtcaaaggattgtgtgttaagccaaacaaaggggacgctgttctcttctggagcatgggattggatggtaacacagacccaaacagtatccacagcgggtgccctgttctgaaaggagagaaatggtccgcgacgaaatggatgaggcagaagatgactttctgattagagctggtttggtgggtacagggagagttggtcccactccaggggtaacacctgcaagatgtctcattatagcaatgcatacagcaacacatggatttcgcagggtcagacctgtgcaatcgctgttaacgcttcgtcgttcaatcacagggttggcgaggtctttgatactgcc

SEQ ID NO: 23816 - DNA, 585 bp, Zea mays; identical to SEQ ID NO: 3855
  Clone ID: LIB36-010-H8_FLI

SEQ ID NO: 23817 - DNA, 401 bp, Zea mays; identical to SEQ ID NO: 23591
  Clone ID: LIB36-011-C12_FLI

SEQ ID NO: 23818 - DNA, 857 bp, Zea mays
  Clone ID: LIB36-011-D6_FLI
gcggctccttcgcggcgctgcttatctcccgctcccggctcccctcctcccccgcgccgcgatgaacacagccatggccaccacctccttatccctccaaggccgcccatcccacgctcccactaggaagctctcctccccgttcctcggagcccccgcgtcctttctccggccgctggctcccacgcccgccgccggcccctcctcgcggcggacgcttgccgtcagggccatggcgcctcccaagccgggaggcaagcccaagaaagtggtgggccttataaagctggcgctcgaggccggcaaggcgacgccggcgccgcccgtcggcccggcgctcggtgccaagggagtcaacatcatggcgttctgcaaggagtacaatgccaagacggccgacaagcccggctacatcatccccgtcgagatcaccgtgtttgatgataagagctttaccttcgtcttgaagacccctccggcttcagtcctgctactcaaggctgcaggtgtcgaaaaaggttcaaaagagccacaacggcagaaggtgggaaaggtaacagtggatcaagtgcgtgcaatagctcaagagaagttgccggacttgaactgcaagagcatcgactctgctatgaggatcatcgctggcaccgccgctaacatgggcatcgatgttgatcctccaatccttgttaagaaggaaaaggtcctcttgtagtttgtttttgctggcaccaccagtgcccattttgagattatatgtgaaaggaccaagatgatcaaaagagtgaattgagtttctctaaaatatcttgtataaattaatgcctattaatgagtccatttcaccctttgtatct

SEQ ID NO: 23819 - DNA, 1125 bp, Zea mays
  Clone ID: LIB36-012-B10_FLI
caaaagggtcccaactctcaactcgcgctcaatgcatccgctatcgtctctcctcctgttccgttccgccgcgccgcccagcgcgctccccttgcggcggcggcggcggagtcacacgccagtgcgagcatcatggcaggagctgggggcgtgctggtgttttccgccatccccttcactgcagtcaaggccctcgccaacagtcccctgggtgcccgcctccgccgccgcctcgaggacaggaaggccgccgcagctgccgaggctgacgctctccgcgctgcctcgcgcggcgcccgtaacaacagcttttggtacggtggagatcggccacggtggcttggtcccgtgccttacgactaccctgagtatttgacaggagagtaccctggagattatgggttcgatattgcaggtctgggaagggatcctgttgctttcgcaaactacttcaacttcgaaatcttacattgtcggtgggccatgcttgctgccctcggtgttgttgttcctgagctattagatctatttgggttagtgcattttgtggagcctgtctggtggaaagttggttatgcaaaacttcagggtgataaccttgattaccttgggattcctggattccgaattgctggtggtcaaggcgtcgttgtaattgcaatctgccaagccctcttgatggttggaccagaatatgcaaggtattgtgggatcgaggcactagaaccattgggaatatatcttcctggtgacataaactacccaggaggacccctttttgatcccttgggcctgtccaaggatcccgtggcatttgaagatctcaaggtgaaagaaatcaagaacggtcgccttgcgatggtagcatggtttggattttacatccaggcggctgtcacaggcaagggccctgtacagaacctggttgaacacttgtccgacccactaaataacaatatattgtcctccttccactaaatgaaaatatgcaagagtggcacgaaccatagcaacgggtgtatattgtattagcgtttacagttttacactaatgggttctgaaaattggctattatatttatttagatagacatttaacggtgattagtgatctatttgcagttt

SEQ ID NO: 23820 - DNA, 1511 bp, Zea mays
  Clone ID: LIB36-012-C9_FLI
ctcgcgcctcccactcctccccgccactcgccgccagcgaccaaccatcgcccgcccagcagcagcacggccccacgccaggactcgacccacgcgcggctagctaagctcccgccgccatgatcacggccctgcaggtctccggcggcggcctgccgctcctgttcgcccggcgccggcgccgggcgttccggccgccccaagcggtggcgtccgacgccgccgccgccgccgagggcacggcgagggaggatggcgggaaggtggccctgggcgggtccggcgtctccgtcaccaagctcggcgtcggggcgtggtcctggggcgacaccacctactggaacgagttccggtgggacgatacgaagctgaaggcagccaaaggagcgtttgacgcgagcatcgactgcggaataactttcttcgacaccgccgaagtgtacggagcaggggtatcgggagcgattaattcagagagtttactaggaaggtttatcaacgagaggcagcggaaggagcaggtggacgtggctgtcgcgaccaagttcgcagctcttccatggaggttcggtcgtgggagcgtcatctgcgcgctcaaggcctcgctggatcgcctcggtgtctcgtcggttgagctctaccaactccattggccagggatatggggcaacgaagactacctggacggccttggagacgctgtggagcaagggcttgtgaaggccgtcggggtctcaaactacagcgagaaacgtctccgagacgcgtacgagcgcctcaggaagaggggggtcccgctcgcctccaaccaggtgaactacagcctgatataccggaacccggaggagaacggggtgaaggcggcctgcgacgagctcggcgtcactctgatcgcgtactccccgatcgcccaaggtgctctgacgggaaagtacacgccggagagtcctcctaaaggccctcgaggacggatatacacgccggagttcctgacgaagctccagccacttatcaaccggatcaaggagatcggaggaagctacgggaggacttcaacccaggtggtgctgaactggctggtgtgccagggcaacgtggtgccgatcccgggcgccaagaacgccgagcaggcgcgggagttcgctggcgctctcgggtggagcctggcgcccgacgaggtggaggagctccggtccatggcgcgccaggtcaagcccgtcatcggcttcccggtggagaagctgtgaccacccccatggcactggtatatatcaggccactgtagtagtgtaatgtatagtaggactgtaggtacgtagatgggcaaagcataccatttccatcgcgagactgcggacgatgtatgctacattgctactgaacgtagcgtcacgccgtcgaccagagatcacagtagctgtctgcgctaaggacgtggttcactacttgcgaaagtcagtgttttaattacatggaaaaaattataaaattatacaatttttatctgtttc

SEQ ID NO: 23821 - DNA, 669 bp, Zea mays
  Clone ID: LIB36-012-F10_FLI
cagagggccagaggcgcagaaggcagtcgcggacaggaggaagaggaagaagaagcggcagcgagcgaggatgccgtgcctgaacgtgtcgaccaacgtgaacctggagggggtggacacctccgccatcctcgccgaagcctccaagtccgtcgccaacatcatcggcaagcccgaggcctacgtgatggttgttctcaagggttcggtgcctatggcatttggaggtacccaggagccagcagcttacggtgagctggtttccatcggaggcctgaaccctgatgtgaacaagaagcttagtgctggcatcgcttctatcctggagtcaaagctgtctgttcccaagtcacgcttctacctcaagttctatgactcgaagcgctcggacttcggttggaacggctccaccttctagacttgaggtctgcagctgaaataaaagaaattcgtggaatcatggtacctaatgcccatggctattgcctattaaggacaatgtcataagatgtgtcttaatcggtgctgaactgagaaacagtaactgttgtcgtggaactggaagtggggtgctggcgtgtcagagtgcttgcttcctacctagcatagcatgcctgtgctatcttgttattggtattggcttgatatcagtctatattatcatttatt

SEQ ID NO: 23822 - DNA, 1333 bp, Zea mays
  Clone ID: LIB36-013-B1_FLI
cagtgcaacgtcggtatgttcacgcgcgccgagctgctggaggccagcgtggagcttcgtcatcacgccctcggctacgtcaagtccacggccctccggtgcgctgtcaagctcggcgtcgccaacgccatccagcgccgtggcggcagggcctccgtcgaggacctgctcaccgagctctctctggacgcaagcagactccgctgcctgcacagcgtcatgcgcgcgctcgccgcgttgggcgtcttcaaggaggggagcgacggcgagtacggcctcactgccgtttcctctctgctcgtggacgacgacagcagcgtccgaggtagcctccggccgatcacgctcttgtacctggagcctgcattcatggcgccagtgctcaacctggcagattgggcccttgctggtgtcgatggtagcgacgacgacaacaactgcagtgctcgaggaacggcgttcaagatgacgcacggcgaggacgtctgggatgtcctcgcgcgcgacgcctttctgggcgacttcttcacggcgcgctcgcgtcagagactcggttcctcatggacatagccatccgcggatccccccaggtgttcgagggaatagcatcgctagtggacgccggcggtggcaccggcgcagcagcccaagcggtggctgcagcattcccggacacccggtgcacggtgctggagcttccgcaggtggtagacgctgctccgattgatgggccggttcgctttgtcggaggtgacatgacgaagttcatccctcctgctgatgccgttcttctaaagaatgtgctgcatgactggagtgacaaggattgcgtgatcatcctaaagcgatgcaaggaggcgattgccgccagtggaaaagtgatcgtcatagatattgtacttgggtcatcttcccttgcaatttgcaacgagacccagctctggcttgatcttttcatgtccacggtaacgacgggcaaggagcggagggaggaagaatggtatcggctattcaaggaagctggattcagtgcgtacaagatctgcccagttctagggcttctctcggtcattgaggtttttctgtagccaccctgttcatctgggagactgggactggggctgctcatcacattttacggcattgtacgtctgttttgtaccaaaccttcttctgatttactattccctcgcgcgtagcgctcctacggactatagtgtagtatgcttcatccatgaaaccaatgtgtattgaaaacaccctacaaactacctttctaatagcaagtttaataatatagccgccagcaggcggtaagaaatccttgcaacct

SEQ ID NO: 23823 - DNA, 773 bp, Zea mays
  Clone ID: LIB36-013-B8_FLI
gcggccgcggattccatggacctcgatgccgacgcgcaccggccgtctaagctccgcgccatgccttccctctccgacccctcgaagccggcctccttcggccagcccacctacgacggcgtcatcgcagggcggttgtcgggacggcggtggaaggaggcccgcacccggcgagcgtcggccgtggcggtgtcgcggaagccgaccccgctggagcagcgcgtccgggagaagtcgctgaagcgcgcgtaccaggcccgcaaggcggagctcaaggaagagatccggcagaacaaggtggccaagcggaaggcccgcgaggagcgtgagaagcggaagcaggagaacgtgctccgcacgggcaccaaactgcagagggtcaccaacccaaagacgatccagaagatcgccaagtccaagaagcgcaagcagctcaaggtcgtccccgacgagttcctcggcggcaagaagtcggtggccaaccggcgcatgcaggtgcctggactcgaaaattgaatctgacaggcctcgatctctctgtatctgttctgtggcggcgttgagttggcaaggttagttcgacgacgattttgtacttgcttctggttatgtagtttgaagcgtgattaaattaagcgattaaaatggcgtgcaatagaagttatcaagttctgatatgagattttactgccgcatagtcaattttgttgggattatgggctttcgatatgaggttgccaatacatctatccatcagtgacctttgtattaac

SEQ ID NO: 23824 - DNA, 646 bp, Zea mays
  Clone ID: LIB36-013-D1_FLI
cgcttcgccttcacccgttcgccgtgcggccgagctctctctagctccgccgcttgctagtcgccttcctcccaaatggcgaccgccatgcggggcagcagcctcctgcggttcggtttccgccatgcttcctgcctcctcttccagtcccctcggtgtcctgccccgagcctgggtctgaacctggccgttggccgcaccgggcttatacgcctccgatgctcggcggccggggccggcgacgccggtggcaagaaggtgtcggctcggctggctctgacgcagcaggtgctgcggaacgccgaggagcgcgccgcgtcggcgggttcggaccctgcccccaagatcaccctggatcatgttactgttaattttgcaagaagtggtggtcctggtggtcagaatgttaacaaagttaacacaaaggttgacatgcgattcaatgttaaggaagctcactggcttggggagagaatcaaggaacggatattacaagcggagaagaataggataaataaagatggagagcttgttatatcttctacaaaaactagaacacagaagggcaatattgaagatgcattgcagaaaatacaggcaatcattgatgctgcatcatatgttcctccacccccaacagaagacc

SEQ ID NO: 23825 - DNA, 1082 bp, Zea mays
  Clone ID: LIB36-013-D9_FLI
gggaaagtgtttttctgttattcttggtggagatcaagtcccaaatggaaaaccttcccctgacatatttttggaggctgcaaagaggcttggtgcaaatccatcgtcttgcttggttatagaagattctgtcgttggagtcaagggtgccaaggcttctggggcaaaggcagttgcagtaccatcacttcaaaatcagaggaaccactattacattgctgatgtcatcctatattcgcttttggactttcaacctgagatgtggggtcttcctccatttgaagatcgcattcaaggtgttctgccaattgatcccttactttcaaatgcccggataggtggtaaaattttgaacaacattcattgggtaatttcagatgactgtgcctacgagtatattcctgaccaaatatcaggaatttttttgggttgggtcaagtccaaagtgcatggattctccaaggtgatcgtagctactgggtgggacttctcacagcagaccgtcgagagagtgatgcatgtacattttcttgattgctctggcacggttgaaacagagcctgtgaagctgctcataattggttacatccggaagctccaaagtgcagatgatatattgcaagcattaagcgtaactgacgaagacaggagaattgcaagggatgcattggatctcccaactttctctgaatatgctaatgaccttcatcttgcctgagtccggctttgtcattgcaagctctcacctcactacctcacgtttgtatttgttattgttaacaagcaaacatgatgatgccagctgcgttttcttctatgaagacttcatatggaatgcacttcttgctcggagaagattagagaagagaagggcggaaggcatgaagcttgtctttcatctagaggtccatcgatgttatcgtatgctgtaaaattttcacgtttaatttttatatactctcttcatccacaaatctagctcaagctaagtttgtagtaaagaatgttagcacttacatataaaattaaagttattataacaatatattttataactaatataatggtacttattatgtatt

SEQ ID NO: 23826 - DNA, 522 bp, Zea mays
  Clone ID: LIB36-014-B8_FLI
cacgcgaccacgcccccgctcctctcgtctctttcttcgcctcttccatcgcaggattcggcggccatgggcggcggcaacgcccagaagtccaagatggcgcgcgagaggaacgccgagaagaacaagggcggcaaaggcagccagctggaggccaacaagaaggccatgaacatccagtgcaagatctgcatgcagaccttcatctgcaccacctccgaggccaagtgcaaagaacatgcggaggcgaggcatcccaagaacgacctctaccagtgcttcccccacctcaagaactagtaagcagcagaagcatatgctctgctcagctaaaagacaagtactacatatatatatatacgctgtgtgtcaattaatgggttctaggctgctgctgatgcggctgcttcgttcgtgttgccccgtctgattatgtactgtaacccttggctgtcagcctgctgtgctaaaaaccattggttctgtgtggattcatgctgcctgcctgtgctgtgcttgctc

SEQ ID NO: 23827 - DNA, 1022 bp, Zea mays
  Clone ID: LIB36-014-D11_FLI
gattatagtagctgggtttggtttgtggctggctggctggctggataccacaccggtaatagcggccgagagagcaaccacgtccacggccatttaactgtcatctctcctcctgatttccttctctcctttcctttttgctccgatccgatccgatcaatgaccaagtcgaagggtggttcggtggacgcgcgcacgctggtggcgcacgtcctggcagcgggcgccgtcgtgctggtgctcttgtggtgcatccacttccgcggcggcctcgccctccgctcccaggacaagccgctcatcttcaacgtccaccccgtgctcatggtcctcggccccatcgtcctcggcggagaagccatcctcagctaccgctctctcccgctcgcccgcgacgccaggaagaaggtgcacctggcgctgcacgccgcgggcctcgccgcgggcgtcctcggcgtctacgccgtcttcaagttccacgtcgagagcggcatcccaaacctctactcgctgcactcctgggtcggcatcgccgccatcaccctctacggcctccagtggaccgccgggttcctcgcctacttcttcccgggcgcctcccccgccaccaggcgcagaacgctgccgtggcacgccgtcttcggcctcctcgtcttcgtgctcgccgtcggcaccgcgcagctgggcttcctcgagaagctcaccttcatgcagggcccgccactgcgcctgcccaagtacggcgcagaggcgctgctcgtcaacttcacctccgtcaccgtgctcctcctcggcgtcgccgtcgtgcttgccatcgtcgatattgacgggacccggtacaacaccatcatctgactcagcgtcaagctgctgcatgctactacgatcagggatcgatgttgcctgtggtgtgtaggtgtgtggtgtacagtacagtacagatttatatgtttgtccggtgtttctgtgtgactaaactaaatatcataaaaaaatatatatattacaagttctttgcatgg

SEQ ID NO: 23828 - DNA, 720 bp, Zea mays
  Clone ID: LIB36-015-B5_FLI
ggtgttgaattagctggaagttcagttcaattgccccttgtgtggaatattcaagtgagcacatggctacgatactatgtctatgagaggttaattcagaaaggaaagaaaccaggtttccttcaattgttgggtacacagacagtcagtgccatctggcatggactatatcctggatatatcatattctttgttcaatcagcattgatgataaatggttcacgagttatatacagatggcagcaagcagcgagcagttcattcctgagcggtatcctggcctttctaaattttgcttatacattgctggtgcttaactactcctgcatcgggttccaggtactgagcttcaaagaaaccttggcgtcctaccggagcgtatattatgttggcacaattgttcccattgtgtgtcttctgctgggcaatgttatcaagccagcaaggaaggcgaaggctcggaagaccgagtgaggaaatactcaatcaagtgacctttacatagaagaaagatggtgaagcttcaacgaagataaggacattctagttttcaatttatttattctgtctttttgtacggtatcaaatttagcataaggataatgtggtgaccccggttctcctacctcggaactcgattgcgattgatcaatcattaaaacgtgacacaaccactggattttcctttacttaatgactactcatacgtgtgtgcgaatg

SEQ ID NO: 23829 - DNA, 888 bp, Zea mays
  Clone ID: LIB36-015-C4_FLI
ctactatatatcgatccaccatccctcgcagctccaaagcattgaagcaaagaaccctgcaactgcaacaagccctgacgcttaatacatcggccggcactcgatcggcagcagatcaaagatggcggcggaggagggggagaaggcgaagagcggcggcggcgggcagcagatgacggtggtgcgggggctggacgtggcgcggtacatggggcggtggtacgagatcgcgtcgttcccgtccttcttccagccgcgggacggccgcgacacgcgcgccacctaccggctgctggaggacggcgccacggtgcacgtgctcaacgagacgtggagcaagggcaagcgcgactacatcgagggcacggcctacaaggccgaccccggcagcgacgaggccaagctcaaggtcaagttctacctcccgctcttcctccccatcgtccccgtcgtcggcgactactgggtgctctacgtcgacgatgactaccagtacgcgctcgtcggcgagccgcgccgcaagaacctctggatcctgtgcaggaagacgagcatcgacgaggacgtgtacaaccagctggtggagcgggccaaggaggaaggctacgacgtgagcaagctgcacaggacgccgcaggacgacccgccgccggagagcgacgccgcgcccaccgacaccaagggggtgtggtggttcaagtcgctcttcgggaaatgactgcccgtcaccgcacgcgcgcgtgctccggtactgtgcttgcagttgcagcaaataaaaccaggcctgagtgagtgaggattggtattttagctttgtagtatctgtctcgctatctgtgtgtgtggaactgtggactgtgctgttacgttatacgtgcatgtattttt

SEQ ID NO: 23830 - DNA, 848 bp, Zea mays
  Clone ID: LIB36-015-D12_FLI
ggagaattttgatccggttcagatcgctcaggcatatgagaaaaacggagcagcatgccttagtgttcttacagatgaaaagtactttcagggaagtttttacaacttggaggctatacgcaatgctggagtccagtgccctcttctgtgcaaagagttcattattgatgcttggcaactttactatgcacggtccaagggtgcagatgctgttcttctaatagctgctgtattacctgaccgcgatatcaaatacatgttgaaaatttgcaaaatacttgggatggctgctttagttgaggttcatgacgaaagagaaatggaccgtgttttagggattgatggtgtacagctcatcggcatcaataaccgtaatctcgagacatttgaagttgatattacaaacacaaaaaagcttctggaaggtgaacgaggacaggttatagctcaaaaggatgtaattgttgtaggagaatctgcgctgttcactcctgatgatatatcgttcgttcaaaacgctggggtcaaagcggttctcgtcggggaatccctcatcaagcaggaggatccagggaaagcaatcgctgggcttttcggcaaagatatctcgcatgctggtgctacctagagacgacgcagaagagcaacagaataagccagaaacgctactctttcgcagagtccgggttgcatcattttgtgtaggggagaaaatcgagtgttgcaatcagaaatccaccctttcgcagagttttgatcggtcgttttgtttacctgacctgccaacttccccatgctgctatttttttgtgaccgagccatctcaataattacagattttagtgcac

SEQ ID NO: 23831 - DNA, 672 bp, Zea mays
  Clone ID: LIB36-015-E11_FLI
ctcccgctcgtcctcctcctctcctcctggacagcagagcacagcacaacacaccgagaaagaacaagcagccgccaccggagctcggaaccaccatcagcagcagcacacccggtcaaccttccacacgcgcacacacacacacacatggcgtcgcagcagaggcaacagcaggcgggagcggcggcggcgtcctccgccgtgggcttcgaggactacctgccggtgatggcggagcggctgggcgaggacgggctgatgcgggagctggcgagcgggttccggctgctgatggacccggcgcgcgggctcatcaccttcgacagcctccggcgcaacgcgccgctgctgggcctgggcggcatgtcggacgccgacctccgcgggatgctcgccgagggcgacttcgacggcgacggcgcgctcagcgagacggagttctgcgtcctcatggtgcgcctcagccccgagctcatggacgagcccaggcggtggctcgacgacgccgtcgaccaggcggcccgcttcctcttcaccagctgatgatgacgacgacgatgattgataactaataattaaggctactagatgatcgttgagatgtttcttcttcttcttcttcctcctcctcttgccgctgttcatatagctggatggatcaggacttgtgct

SEQ ID NO: 23832 - DNA, 644 bp, Zea mays
  Clone ID: LIB36-015-E4_FLI
cagcaaagcaacacgcgcctcgatcctcctcgcccctccggcctctcctcccctccctgcacccgcacctgcggagagcgccgcaagctagctgcagaggagcgagacagtagcaggaggaggacgagaggaagaagagatggcgggctgtgatggagccaagtcgtcggcgtccatggaggaagaggcatgcgcggagaagaagtacggagggatcgcacccaagaagcccttgatatccaaggaccacgagcgcgcctacttcgattctgcggactgggtgctgggcaagcaagccgcgaacagcagcagcagcacgaggaccgcagccgcggtcgagtctctgaagcccaagctgaagagaacgccgcaccaccagctgccgcctcgtaagcccacctgcgcttccagttgagacgcatggccacgcgtcgcagctgctggaggaggagctcggtcagagtcaaggactgaggatgccgacgagctcgagctcggataaatgttttagctggtccggaatcgtagggacgacgacgagccagaaagatccgaatccgagatgccgtctggcttcttggcgagcagcgcctgttattgtgtgccataaagaacggatcaattaattatcaattgtctggctg

SEQ ID NO: 23833 - DNA, 696 bp, Zea mays
  Clone ID: LIB36-015-F2_FLI
cttgaaaggggagagagagagagagaagagagagagaagagagagagagagagaggagtgggagacccgcgagaggctgccgtgtagggaccgtagactcagcgactgcgaaggagggataaggggatggccgggatcggaccgatcaggcaggactgggagccggtcgttgtgcggaagaaggcacccaccgccgccgccaagaaggatgagaaggccgtcaacgccgcgcgccgcgccggtgcggagatcgataccatgaagaagtacaacgctggtacgaacaaggcggcatccagcggtacatccctcaacaccaagcgcctcgacgacgacaccgaaaacctcgcccatgagcgagttccaagtgatctgaagaagaatctcatgcaagcaaggctcgataagaagctgacacaggcacaacttgctcagatgataaatgagaagccacaggtgattcaggagtatgaatcaggcaaggcaatccccaaccagcagatcattagcaagctcgagagggccctgggaaccaagttgcgtggcaagaaatagctttcctacgagtttgtgtcccggagcatcataatagggggaagacaaggcaagctgtctgcttatttgtctatgtttggtatctcaagtcctgcggactgtttctgttggcacaagagggaataaatgtgttcacggacc

SEQ ID NO: 23834 - DNA, 1006 bp, Zea mays
  Clone ID: LIB36-015-H10_FLI
tccagcttcgactggctcgcagtggcaactggcaggtaggcacacgcgaagcgataaggtcggttaagccgtaacagtcgttgatgtcgccgccgccgtcgtccctcgtggtgctcccgctcctcctccccctcctcctcgccgctgtatcccacgctacggctaatgcggccggtgccggcgcccctcccccagtgccgacgccgtggccggagcagttccacgcggtggtcttcaccaatctcaccgagagcggcggccggctgcagctgatcgacctgtactacgactggcccaggggccgcaacctcaacctcatccgggaccagctctccagcgacccgctctacgacgtcgagtggaccaacggcacctcctacttcttcgactccgggtcctgccgcaccatgcgtttccccgtggggatcctgccgcctgactggctcgccgccggcgccgtctatctcggccgcgagcacgtcgacggcttcgactgccacctgtggaccaaggtcgacttcgtctggtactacgaggaagtcgccaccggccgccccgtccgctggaatttcttcaatgggatgcagcagcatgtgatgagctttgaggtgggaggagtgctggaagactccaagtggcaggcgccccctcgctgcttcagtggcggcaatgccgacaccgccaacgcggctgcggatggagttcatggcgaggaagccggtagtgttgatgtgatggacagcatgatcaggttcgccgtggctccggctgcagcagtagctgcatcatttgaccagtgagatttttgttttcctgatgtttggctgatgagagagtctctgccaacggtgatccacgcgtcctggtgattctgctacgctctgttgatcacattgtgctttgtataaccctggctgatttgtggtaacaccgacagtcactgtacatttcctggtactgatccactgaacttaactatcctgctgtcatggaacatgaggggcac

SEQ ID NO: 23835 - DNA, 559 bp, Zea mays
  Clone ID: LIB36-016-A3_FLI
cgctcgcgcagtggtcagcaggaggtccttcaccgtgcgtgcctctctccgcaaggccactgccaccgccgccgtggccgttgccgccagcgtcctgcttgccggcggcggcgccatggcccaggaggtgctgctgggcgcaggcgacggcgggctcgtcttcgagcccagccagttcaccgtcaaggccggcgacaccatcaccttcaagaacaacgccggcttcccgcacaacgtcgtgttcgacgaagacgaggtgccgagcggcgtcgacgcctccaagatctcgcaggaggagtacctcaacgcgccaggcgagacctactccgtcaccctcaccgtgccgggcacctacggcttctactgcgagccgcaccaaggagcaggaatggtcggcaagatcacagtcaactaaagctagctatccattccatgcatctcgatctgtatgtactccgcccgtcgatggatgatgcatccatctctacttgttttcctcacatgtacaacaattaatgcaacaaattaagtacgtacttgagagagacccttcttcttc

SEQ ID NO: 23836 - DNA, 651 bp, Zea mays
  Clone ID: LIB36-016-A5_FLI
cggacaatcgcgcccaggctgcattagctcgccttgaagctcttgagagcgataatggtggggtcgaggtggtagatcttaatgatgatgagtacggatccacggatgaagaagaccctgttctcatgcaaaaaaaacagtccaagatcatgaaacgtaaaacaaggcaagggaaagctttggagaagagggcagcaagatcactcatggatgtgctacaagaagcaaatttggagtccgttcctcctcatgtgccaacatattcaagggctgctgtgggtccaccgagcacttcatctcgacgccactactgctcagtttgcggtagctctgcaacctacacatgcgtgaggtgtgggacgcggttctgttcatgccgctgtcaagtcatacacaatgatacacgctgcctgaagtttgtggcttgatcggctggatatgtataagctacatttgatgtatgtccacatcctaatggctgttcatatgtgctctgatcagtatgatatacttgctgactatgtatcctactctgtaggtgggggtttggtaagttgtagaaaaccattttctcagtagtgtactgcagttgcaccgaccacttttgtttttttttcccagaaatgttgtgcgagctcgcagttatgcagt

SEQ ID NO: 23837 - DNA, 565 bp, Zea mays
  Clone ID: LIB36-016-E2_FLI
gcttctggcgaccaaattctgccgtctccaccgccgccgcagccagcgtcaccggagggatctgccgtctcccttgctccacgcgatgaacaccgacatcaccgcctcgactaagccggagtacccggtggtggatcggaacccggccttcaccaaggtggtcggcaacttctctgcgctcgactacatgcgcctctccaccatctccgccgtctccgtcaccgttggctacctctccgggatcaagccggggatccggggcccgtcgatggtcacgggcggcctcatcggggtcatgggagggttcatgtacgcctaccagaactccgccgggcgcctaatgggattctttcccaacgacgccgaggttgcgcgctacaagcacaagcttcattgaggatccagctccattccgtctctcttttcgcaaccgtttcgcctgttcctttcctgattccgtgttaacttcagtactttatctgggcactctatggccttggttaaataaaagtggtatgttgttgcacggttatgaggattcgatgatacaattcacctcatcttt

SEQ ID NO: 23838 - DNA, 1019 bp, Zea mays
  Clone ID: LIB36-017-E11_FLI
gcaacgccacagcttgcgcccgcaatggcactcgtctccgcctcctcgtcctccaccaccgccgtcacggcgctccccaggaatgggcagcgggcgtcgtcctccttcctcggcggcaagacgctgctgagacaggccgaggcggcccggccgtcgttcgccgtgcgcgccgcggcggaccccaacaggccgatctggttccccggcagcacccctccgccgtggctcgacggcagccttcccggcgacttcggctttgatccctggggcctcggatctgacccggagagcctgcggtggaacgtgcaggcggagctggtgcactgccggtgggcgatgctcggcgcggcgggcatcttcatcccggagttcctgaccaagatcggcgtcctcaacacgcccttctggtacaccgccggcgagcagcagtacttcaccgacaccaccaccctcttcatcatcgagctcatcctcatcggctgggccgagggccgccgctgggctgacatcatcaagcccggaagcgtcaacaccgaccccatcttccccagcaacaagctcaccggcaccgacgtcgggtaccctggtggcctctggtttgacccgctcggctggggcagcggctcgccggagaagatcaaggagctgcgcaccaaggagatcaagaacggacgcctcgccatgctcgccgtcatgggcgcctggttccaggccgagtacaccggcaccggccccatcgacaacctcttcgcccacctcgccgaccctggccacgccaccatcttccaggccttcacccccaaatgaggagttgaacttattattagcattttgaggagtgctaccacacatgcatcgtcaggttgatggccgatatatatgaaacttcacattttttttggtggggaaggactgctgagtagactgtcaatgatggaatgctcgtggtgcgagtgcgatgcatggtgtacttgtactatgttgtaaccagtgtaaaaaggggatactcgttagatgtt

SEQ ID NO: 23839 - DNA, 890 bp, Zea mays
  Clone ID: LIB36-017-G7_FLI
gcgacatggcgcccgccgcccggtggtccacgtcccctgtgctcttcctcctgctgctgctcgcggcggccacggcgacgacgacgacgacgaccactacagcaaagcatgagcatccgtcgccgacgccgtggccggagcgtttccacgcggtgctgttcacgaacctgaccaactacacggaagcctccacgggcccgccgctgcgcgtgacggacctctactacgactggccgcggcggcggaacctgaacctggtgcggcaccagctgtcggccgacccgctgtacgacgtggagtggaacaacggcaccggcttctacttcgactccaaggcgtgccgcgtggagcagttccccgtgggcgtgctgccgccgtggtggctctccggcggcggcgccgagtacgtgggccgccgcgtcgctggcgggatcgactgccacgtgtggggcaaggccggcttcatcttctactacgaggaggcgcgcacggggcggcccgtgcgctgggacttcgtcgacgtgacggggatccagcagttcgtgatgagcttcgagcccggagctgcgctggaggacgacgcgcagtggcaggcacctgcatactgcttcccggacgacgacgacgccgcaaggagcagtggtgaggaggaagctggggatgggcttgaggcggcgaccagattactcaggaagctagcaggagctgcagcaacgcattgactgtgttgtgttgtagtaataattactatgcgacatgtaccgtattaatttcgagcacaacagatatacttatgttcttgtagtactacctaattgcctagtttcctattgctgctcctgttgaaaacaaacagatatatgatccaaataatatatatatatggccac

SEQ ID NO: 23840 - DNA, 560 bp, Zea mays
  Clone ID: LIB36-017-H11_FLI
gaatgaaaagcttgtcattaggtgcctccaaggtatggcttcagatgagaaaaggaacctatattttgtgtcaacaaatgcaacgtccacatttcgttccatagtttcaagttatcctggacggttgactcttgtcacaatacagtgcccaaatcctgacttcaacaaagagcaaaataggtggagaatggtgcgaagaatgctcattgaagctatcgtcgaccttcttcataccaatggacaggtttatctgcagtcagatgtggagtccgttctgctcgtgatgaaagagcagttcctctcctacagcaagggtcagcttgtcacggacggcgatggtggcaactgcatcgataacccgttcggcgtggtatccgactgggagcgccatgtcctcgctcgcggagctcccatgtacagggcgatgttaaagaaaatgtgattccatttcctccgtctctgaggtctgaacattgcattgttttgtcaccatggctgcttcggacatggacaacgttcatggattcactcggttagataaaactctcttcttttcggag

SEQ ID NO: 23841 - DNA, 830 bp, Zea mays
  Clone ID: LIB36-018-C7_FLI
aacgctatcccatcttctcacacaaaaatatccgcgcgaccccgacctccccctcccactccgggcagcaagcagcagccagcaggcatggggatacctgtggtggttcccgtcgcggcggcctactcgtgctcctcctccctcgccgcgccaccgagggccgccgccgccgcggcgagggcgccgagccgcgcgcacgtcgcggcggccgggatgtcctccagggcgtcctccttcgccgggggcagcggaggcgacctcgcggcggtggccgcgtcggtagccgcgcggcccaggagagcgggctccgggggaggcggcgcgctcgggtgcaagtgcctcttcgggctcggcgtgccggagctcgccgtcatcgccggcgtcgccgcgctcgtgttcgggcccaagcagctccccgagatcggccgcagcatcggcaagaccgtcaagagcttccagcaggcggctaaggagtttgaaactgaactgaagaaagagcctggggaaggcggcgatcagcccccacctgcaacccccacagcggtaagtggcggggaggagaaggggcttgaggcatctagtagcaaggagagcgcgtgaggatcaggatctatctagtgttgtttatgaaaattgtattctgggcttctcgagttagcagttcatatccttttaaccgcatcgcggtttcaggccatgtagcgatattgtttgtagtttgtaccgggaataacatatttggttgagcttctacgtattgaagaaacaacttatctgtgaagctgatgtgaacaaattctatttattatctatttttagtttgttctgag

SEQ ID NO: 23842 - DNA, 1076 bp, Zea mays
  Clone ID: LIB36-018-D2_FLI
tactgcatacacaacacagagcatcagaaggagctgcgatctgatcgacatggctgccgccaccatggctatcacctcccgcgcgctcatcggcaagccggcggctggcacgagggacgtcttcggcgagggccgcatcaccatgcgcaagaccgccgccaagcccaagccggcggcgtccggcagcccctggtacggtgccgaccgcgtcctgtacctgggcccgctgtccggctcgcccccgagctacctgaccggcgagttccccggcgactacgggtgggacaccgcggggctgtcggcggacccggagaccttcgccaagaaccgcgagctggaggtgatccactgccgctgggccatgctcggcgcgctcgggtgcgtgttcccggagctgctcgcccgcaacggcgtcaagttcggcgaggcggtgtggttcaaggcgggctcccagatcttcagcgagggcgggctcgactacctcggcaacccgagcctggtccacgcgcagagcatcctggccatctgggcgtgccaggtggtgctcatgggcgccgtcgaggggtaccgcgtcgccggcgggccgctcggagaggtggtcgacccgctgtaccctggcggcagcttcgacccgctcgggctcgccgacgacccggaggcgttcgccgagctcaaggtgaaggagatcaagaacggccgcctcgccatgttctccatgttcggcttcttcgtgcaggctatcgtcaccggcaagggccccctcgagaacctcgccgaccacatcgccgaccccgtcaacaacaacgcctgggcttacgccaccaacttcgtccccggcaagtgagcgagggcatgatgcttgcatgcgtgtaccgtagacgtacgtattcctacgtactgcaggttgcaccagtatttgtgaagggagctttgggagccagagattgtaccgctagtgtatttgtatgcatgctgtggagctgaacaataaaatatgctgtaaatatattatgtcttcatttatgcgtactgatgattaggttgtgagcacgtcctaaaatacaaggtcaacgaat

SEQ ID NO: 23843 - DNA, 1179 bp, Zea mays
  Clone ID: LIB36-018-H8_FLI
gggcgaccataagcatggccgcgatcaggcaggccaactgcctccgacgggacggcgccggcgccggcgcgcgctgcgacgcgccagggaccgtgctcatgctggcgttcagcgtggtccaggtggtgctgtcccagttccctggcctggagcacatcacctggctgtccgtcgtcgcggcggccatgtcgttcgcctactccttcgccggcctcggcctctccgtagggcactgggtgtctcgtggcggcggcggcctcgggggcagtgttgcaggtgccgccgcggcatcctccaccaggaagctctggaacgtgcttctcgccctggggaacattgccttcgcctacactttcgctgaagtattgatcgagatccaggatacactcaagtcaccaccaccggagaacaggacgatgaagaaggcagcaatgtacgggatcggagccaccaccatcttctacatctccgtcggctgcgctgggtacgccgcgttcggttcgaatgctccgggcaacatcttggcggcaggcgggctgggtcccttgtggctcgtcgacattgccaacatgtgcctcatcctccacctgatcggtgcataccaggtatacgctcagcctgtcttcgcttcggttgagaggtgggccgcctcacggtggccagaagccaagttcatgagcagcgcatacaccgtgtccgtcagcatccccctcttgcagagaggatcggtcaccgtcgcgccgcacaagctcgtcctgaggaccgccatagtcggcgcgacgactgcggtggcgctggcgatacccttcttcaacgccgtgctggggctcctcggcgcgttcagcttctggccgctcacggtctacttccccatcagcatgcacatcgcccagggcaagatcgccagggggaccaagtggtggtgccttctgcaggctctgagcatggtttgcttggtgatctcggtggccgtgggtgtaggctctgtcactgacattgtcgatagcctcaaggcctcttctagccctttcaaaattgtaggctaacaggttactgtagtcatgtacaatgctctgagccgatcgtgcattgaggtttaaacgaaatgtggtgcgcgaattcgcgtcaaatatcgaaacttctcgattgaatttcagagagtatttattgaatttgatc

SEQ ID NO: 23844 - DNA, 641 bp, Zea mays
  Clone ID: LIB36-019-C8_FLI
cccgtataagagccccttcctcactccggaaccccattccccgccgcctcgcgcccccgctcgcttcacttctctagagatggcggtgccgctgctgacgaagaagatcgtgaagaagcgggtcaagcagttcaagaggccccacctcgaccgctacaagtgccttaagccaagctggcgcaggccaaagggtattgactcccgtgtcaggaggaagttcaagggatgcaccttgatgcccaacattggttatggttctgacaagtcgaccaggcactacctccccaacaagttcaagaagtttgtggtccacaacgtttctgagctggagttgctcatgatgcacaacaggacctactgcgctgaaattgctcacaacgtgtccactaagaagcgcaaggagatcgtggagcgtgctgcgcagctcgacattgtggtcacgaacaagcttgctaggctccgcagccaggaggacgagtagtctggtttcttgtcttaacgacgaactggatgttgccattcctttctgtaggaaactactttgcttgtgtcttgttagtactgaaaaccagagtcactcctacctttttgcaatcagtagctactaaaatgtggcagattccactatttccttgcttatc

SEQ ID NO: 23845 - DNA, 287 bp, Zea mays
  Clone ID: LIB36-019-G12_FLI
aagaaggaagcggaaagcatggtggtcgagccctagagcacacagttctgggcttctggcaaactatttcctgagacgttcatcatttccatcacagaaaaataaagctcgggtgccttctgttgatttcgacgtacatttccctgccgatggtgtccagcccactgttgtcgctggagaacacgtcgtttttagacttgtgatgttttactactgttttgacactcgttgtatttctgtatatcgcgtcagactgtgaaataaaagcagtacagtgtgtttcttgc

SEQ ID NO: 23846 - DNA, 1029 bp, Zea mays
  Clone ID: LIB36-019-G6_FLI
gtgggtctccgacaatggcggcgctcgctccatccaagattctgggcacccagctcaacttcgcgggctcctcccgctacgccaccgcagcgcccaccgcgggggctcagaagattgtctcccttttcagcaagaagcctgcccagaagcccaagcccgctgcggtatcgtcgtcttctccagacatcagcgacgagctcgccaagtggtatggtcctgacaggaggatctacctgccggatgggctgttggaccggtcggaggtgccggagtacctcaccggagaggtccctggagactatggctacgacccttttggcctgggcaagaagccagaggacttcgccaagtaccaggcctacgagctgatccatgccagatgggccatgctcggtgccgctggcgctgtcatcccagaggcctgcaacaagttcggcgctaactgtggccctgaggctgtctggttcaagaccggcgcgctgctcctggacggcaacaccctcaactacttcggcaacagcatccccatcaacctggtggtggccgtgatcgcggaggtcatcctcgtcggcggcgccgagtactaccggatcaccaacggactggaccttgaggacaagctgcaccccggtgggcccttcgaccccctgggcctggccagcgaccccgaccaggccgccatcctcaaggtgaaggagatcaagaacggccggctggccatgttctccatgttcgccttcttcatccaggcctacgtcaccggcgaaggccccgtggagaacctcgccaagcacctcagcgaccccttcggcaacaacctgctcaccgtcatctccggcgccgccgagaggacgcctagcctgtaaggacggacgccacgccgccgagcaatgccaagtcatgcgctgctgcatgccgtctttgattttaccgggataaaaagctgtatgtgagggtctgaagaatgtgcaatgcccacgcgtgtaaattatcgagagggggaacaaaccttttcattctgattgtgat

SEQ ID NO: 23847 - DNA, 520 bp, Chlorella sorokiniana
  Clone ID: LIB3602-017-G8_FLI
cgatgtacgaccgcatcgagaacctgatcgaggcgggcgtgctggaccccgccaaggtgacccgcagcggcctgaccaacgcctgctccatcgccggcatcatgctcaccacccaggcggtgatgactgagcagaagcggaagaaggaggcgctgccgggcatgtcccccggcggcatgcccgctggcctgaccatgtaaatggtcgccgggctgctgatggctccatcaacacggagcagcttagtccgccatgccggccgcgctgctgggccattccttacagcgcggccgcgccctcctcccatgctcgaactgaaaacatgcccttgcacacagaagacccctcaacgctagtaggctaggatgccggcgggcgcatgccggacgtattgtcgcatgcccatgccttggcttttctgcacccctccacaccccatttcatacgacttttcgcctcccatctgctggcattgacatcgccgctgcagcttcggaacacagctttaaaacaacacacc

SEQ ID NO: 23848 - DNA, 1672 bp, Chlorella sorokiniana
  Clone ID: LIB3602-055-H10_FLI
cggtggggcgcgacccccgcctctcttctccgctcatggctgccagcctggcggcggggctggcggcggcgggcgccggcgtggcgcgctttggcccctgcaccaccccagccatgttcatgagctgcatcctgcctgggcacgagtacgacggagcggtgatgatcacagcctcccacctgcccgtcaaccgcaatggcgccaagttctgcacgggcgagggcggccttgagaagaaggacatcacgcagctgctgacccgggctgctgagctggcggaggaagcgggtcagcgcccctcagaccgccacaccgacgccgcattcgtcatcacagccgcgctgcaggccagccgcagcctggtgtcgtacgtcgatttcctgccggagtatgctgcctacctgcgtgagctgatgaagcgcagcatcgcgcaccccaccaaccccgacgccccgctcaccggcttcaaaattgtggtggatcccggcaacggcggcggcgcgttcatcgcggatcaggtgctgggcccgctgggtgctgacgtgtcgggcagcatcaatttggagccagatgggagcttccccaaccacatgcccaaccctgaagacaagcaggcggtggcggccacgcgtgcggctgtgctggacagcaatgcagacctggggatcatgctggatacagatgtggaccgcagcggtgtggtggaccggaatggcaatggcatcaaccgcaaccgctacatcgcgctgatgagcgccatcacgctgcgggagaacccgggggagacgatcgtcaccgactcgtgcaccagcaacgggctggcggccttcattcggggcctgggcggcaagcacttcaggtacaagaagggctacaagaacatcaccaacaagggccaggagctgaacgcggcgggcgtgccctgccccctgatgatggagaccagcgggcacggcgccatgcgggaaaactacttcctcgacgacggcgcgtacggcgcgctgaaaatcgtgattgagatggtgcggcggcggctggagggccagggagacatcgccgacctgctgcaggagctgcgggagcccgccgaggccatggagatccgcgtggccatccaggcctcggatgtgcgggcagagggcgagcgcgtgacggccgccttcaagcagtgggtggatgcaggctgcggcggcgccagccactggaagctggaggatgagaactacgagggctggcgcgtgaaggtgctggagggcgacggcaaggaaggctggctgctgctgcgcccctcgctgcacgatccagacattgtgctgaatgtggagagcgagcaggcgggcggcatgaaggccatcctgcagcacctgctggagttcttcaaggagcacccagagttccaggtgtgcaccgcaaaggtggaggactacgtttacacgtgacccagttgatgcgtgatgacccagagctggagacggcgggcggcggcagctgcaagggttagtcatacagccgggcggtcgttgctcggcacggcttgcatcgttgcagcgccggcggtgcattactgcgcagccgcacaactgccctggcacccctgcgtctgttgtgcgcgttcgtgagctagaactgtgaactgtcgcattgattaagctgtgtaacgtgtgcgtcgggt

SEQ ID NO: 23849 - DNA, 1052 bp, Zea mays
  Clone ID: LIB36-020-B8_FLI
agaaccaagagcagagagacatggcgccccaccagcagcagcgggcgctgctcctgttcccactcgtcttcctcctcctcctccttgccccgcccctcgccggcgcgtggggaaaggagggccacatcatggtctgcaagatcgccgagaagtacctgtcggagaaggcggcggcggcggtgcaggcgctgctgccggagtcggcgggcggggagctgtcgacggtgtgcccgtgggcggaccaggtgcgctggcactaccactgggccagcccgctccactacgccaacaccccccaagtctgcaacttcaagtattctcgggactgccacaattctcgtggccagcaagggatgtgcgtcgtcggggctatcaacaactacacggaccagctctacagctacggccagaagacttcgtataacctgacggagagcctgatgttcctggcacacttcgtcggcgacgtccaccagccgctgcacgtaggcttcgaagatgacgagggcggtaacaccatcaccgtccactggtaccggaggaaagcaaacctccattacgtgtgggatgtcagcattattgatacggcaatcaaggacttctacaacaagagcatggataccatggtagaggctctcaagatgaatcttacagatggatggtctgacgacatcgtccactgggaaaattgcaagaacaaacacgcgacctgcgcgaacgactatgcgattgagagcatccattattcctgcaactacgcctacaaagatgtggagcaagacatcactctaggagatgattattttttcagtaggtacccgattgtggagaagaggttagcgcaggctggaatcagattggcgttggtacttaatcggatatttggtggaggtgaagcggatgatataccactacaagtacagtaacagctctaataaaaggaagcatagctattacaaggatttgtccattacgtcgtctatacatcaataaattggcatgaatttgtaactccattgctatacatcaataaattggcatgaatttgtaac

SEQ ID NO: 23850 - DNA, 872 bp, Zea mays
  Clone ID: LIB36-020-D4_FLI
aatccacactccacaagcagccatggcgccacccatcacgtccctgtcgtctctcatggcgtccagcccaatcccgacgccgccaccgccgctcccgaagaccagcggcagagcgctctccgtcgcgccctgcggctccgcgtcgtcctcgtcgccgtccacttcctcgactcctcatccggtggcggcgtcggcgggcaggagggggctgctggcgctgggcgccgggttcctggcctcggccgcgctgctgtccccggcgggcgacgccggcgccacgcgcatcgagtactacgcgacggtcggggacaagatgtgcgacctgagcctcgtcaagtccggcctcgcgtactgcgacgtcgaggtcggcaccggcgtccagcccccgcgcggcgagctcatcaatgtgcactacaccgcgagatttcccgacggtacgctgttcgacagcagctacaagcgcgggaggccactgacgatgcgcataggcgcaggcaagatcctccgagggcttgaacaggggatcagtggcggcggcggtgtgccgcccatgcttgttggtggaaagcgcaagctgatgatacctgcgtcactggcgtacgggcctgaaccggcaggctgcttctcaggagactgcaacatccccggaaactccacacttctatatgaccttttcctcgtcgggatctacaagtgagccctcgatgacagggaatgttcagaacctaagtgtgtcacacatggagggtttcaggaggaattcttggcggtgaaagcacctgcagaggcagagccacttgcagaagcttctgtactccagagagctacctggattgaataaaatgatgatatataaaccatccttgttacat

SEQ ID NO: 23851 - DNA, 584 bp, Zea mays
  Clone ID: LIB36-021-E6_FLI
ctctccccgcgtgctctccctctctctcgcgcgcgcggcgacgactcggctagtcggctaccgccgccgccccctacgccagcttcccagctcttcgtcaggcccttctccgtcaacgagcacccagcacatatcctgagcccctccacacctcaacgatggcgggattcagaagccttgcacccaagaccaggaacctggtggtggctgggggcctgtcggccttcgtgctcggggtctactactacaccatgagagccgtgggaggcacggacgagctgcaggtggcgatcgacaagtttgaggagatgaagaagaaggacgctgccagaaactccagcacaggaggatcgtaaacgcggcgcccttctcgtctctgtactgaacctggatctgcaggctgacatgatacggtagtcaagtcgctcagtaggccaagaacatgcgtgcctctactgtgcaataaataatgtgtgatactctttatcagatagagcttggcagcttgtgttttaaggagagatgtacactcgagtgtttttgtcctatgatataatagtggtcgcaatgtctaaatttccctg

SEQ ID NO: 23852 - DNA, 1398 bp, Zea mays
  Clone ID: LIB36-021-F8_FLI
cccgctgctgcctgctctcctccccgaaggccgaatccgatagccagcgccaacaaaacccctctccgcgcccgctccccaccggtgacagcgcgcccatggctgctttactccgaacggccgcggccctcgtgcccccgccctcgtcgcccctgtccgcacgggagccgcgtgggcggtgcctgcggctagcctgctcccggcgcgcgccggtccgacagcttcgggcgtggccactgccgactccgcacgtcttcggtcgctctgggggccggttccggcgcctgagcgtcaccgaggccgaggaggccgcgcagacggcgacgcaggaggatccagaaaccaaagttactggagagagtgctgcagatgacagtgctggaagcacagacgaaactccatctattattgtgacaacactgcagtcatacagagaagctctggttaatgatgatgaagcaaaagctgctgagatagaatcctttttactttctatcgaggatgagaagaactctcttttgagcaaaatcacttctctagatgtcgagctagcaactcaacgtgaacgtatcttgcggattagtgctgattttgacaatttcaggaaaaggacagaaaatgagaaacttaacatgatggaaaatgtgcaaggggaacttatagagagctttttgcctgttctcgataactttgaaagagcaaaaatgcaaataaaggtggaaacagagggagaggagaaaataaataatagctaccagagcattaataagcaatttatcgagattcttaattcattgagtgttgaagatgttgaaactgttggcaaaccatttgatcctatgctgcacgaggctattatgagagaagaatcatcggagtatgaagaggggatcattctccaggaattccgaaaaggcttcaaacttggggaaagactacttcgcccagcaatggtcaaggtgtctgcagggccaggccctgaaaattctggagatgatgaccctacagttgttgaagatagtgtggcacctcaaaaggttgaggatgttgaagaagacggttttgatgacggcgatgcagaataggtggctggagcttcagctgtgaatcaacaagaacaggtccagaaattttgatgcttttctggagggtgccaagcaggtaataggattagtaccaattcgttcaaactagagttaggtccccaaatgtgttctttactgctgctgacatgggggtgttggtattgcgacaaatttgtgtttctacccgccgtggtcaactttttgttcttacgaaggggaattttcgtggttcatagatgcaaaaatgatatttgtaaggactaaattggctcagtttgctattgataatcaatatatgaattccattgtttgt

SEQ ID NO: 23853 - DNA, 752 bp, Zea mays
  Clone ID: LIB36-021-G2_FLI
ttcccgagtctccagccaaccgcatccagtccacccccatccccctcgaccccgacaaacccgacccgatggcgcccaaggccgagaagaagccagcggagaagaagccggcggccgaggagaaggcggagaagacgaccgcaggtaagaagcccaagtccgagaagcgcctgccggcctcgaagtcctccggcaaggagggcggcgagaagaaggggaagaagaaggccaagaagagcgtggagacctacaaaatctacatcttcaaggtcctgaagcaggtgcaccccgacatcggcatctcctccaaggccatgtccatcatgaactccttcatcaacgacatattcgagaagctcgccggcgaggccgccaagctcgcgcggtacaacaagaagcccaccatcacctcccgcgagatccagacctccgtgcgcctcgtcctcccaggagagctcgccaaacatgccgtctccgagggaaccaaggccgtcaccaagttcaccagcaattgagcagcctgcagcgtccacggatttgttaggtctccccttcttacaagggttcttcgtcgtgtcctctacccctccccgcctatgtatgtgctgtgaaatcgttgatgttctcgtcgggtgaacaaaggccagtagctagcttgcctgcttcataaatcgtgccggattgtaatgggcctcttagatttgacgcccctattttggaatatagttgtatcggtgccttccctgcttgct

SEQ ID NO: 23854 - DNA, 1059 bp, Zea mays
  Clone ID: LIB36-021-G7_FLI
gcagaggtctgacttcgaaggcattttccgtgctatggatggactcccggtgaccatccgactcctggaccctcccctccacgagttccttccagaagggaacatcgaggacattgtaagtgaattatgtgctgagacgggagccaaccaggaggatgccctcgcgcgaattgaaaagctttcagaagtaaacccgatgcttggcttccgtgggtgcaggcttggtatatcgtaccctgaattgacagagatgcaagcccgggccatttttgaagctgctatagcaatgaccaaccagggtgttcaagtgttcccagagataatggttcctcttgttggaacaccacaggaactggggcatcaagtgactcttatccgccaagttgctgagaaagtgttcgccaatgtgggcaagactatcgtacaaagttggaacaatgattgagatccccagggcagctctggtggctgatgagatagcggagcaggctgaattcttctccttcggaacgaacgacctgacgcagatgacctttgggtacagcagggatgatgtggggaagttcattcccgtctatcttgctcagggcatcctccaacatgaccccttcgaggtcctggaccagaggggagtgggcgagctggtgaagtttgctacagagaggggccgcaaagctaggcctaacttgaaggtgggcatttgtggagaacacggtggagagccttcctctgtggccttcttcgcgaaggctgggctggattacgtttcttgctcccctttcagggttccgattgctaggctagctgcagctcaggtgcttgtctgaggctgcctcctcattggcaaccggattgcctgctgctggtggatgtggtgatcaacagtattattacagagccatgctatgtgaacattactagtagcagtgctcataaaagctacaatcccatgtcctttttttccccagtcatgtaaaacttccaaactgctccatggttcaaaactctgttcttcaatacatcatcaattatcgattatatacgtggcaagtttttttc

SEQ ID NO: 23855 - DNA, 369 bp, Zea mays
  Clone ID: LIB36-022-A7_FLI
gggcgactatgagggccaagtggaagaagaagcgcatgaggaggctgaagaggaagcgccgaaagatgaggcagagatccaagtaggctgatggggattgtggatggtggtgtcggcatagttgtgttacgtttcttcgatgcgtgagttcatggagagatgtcacatcctagttcgtcgtcaccgtttgccatgggtccaatggctcgtcttggaaacctgcacttcagtaggccatctatcgtggtttctagctatatccagagttgtgctaagacaaatcagtcagtcgttttgtgaacctattatgatggagctttatttgctgctaatatcgacctacctgttaagtaattgcaacgttcgtct

SEQ ID NO: 23856 - DNA, 485 bp, Zea mays
  Clone ID: LIB36-022-C5_FLI
ctggcaaagcccggctctatcacaccgcacaccaagtttgaggctgttgtgtatgtgcttaagaaggaagagggtggccggcactcacctttccttccctggttaccgcccgcagttctacatgaggacaaccgatgtgacagggaatgtgactgtgattatgaatgacaaagatgaggaggcgaagatgtgcatgcctggtgaccgtatcaagatggttgttcagctcatccagcctgttgcttgtgagcagggtatgaggtttgctatccgtgagggtggtaagactgttggtgctggtgtcatcaacaaaatcattgagtaaactggatatatcatatccaccacgagaattttccttgtttactcaaagcgaaatgctctgtagttgttattatgtgttgagttttaggggttgttcttgtgaaattgtagtatgacactctttcgccaagtgaatttgcataatttatgacattcacgac

SEQ ID NO: 23857 - DNA, 386 bp, Zea mays
  Clone ID: LIB36-022-G6_FLI
gctgccggaggcagaataggagaggcaggcgatgacgatggcgacgaaggcggcgtgcgtgctggcggtgtgggtgctcgtcgcatcgggcctgtccgacctgggctcagcgcgcgcgcccctgggcagcaagccgcagcgggagttcgactacttcgcgctctccctccagtggcccggcaccatctgcgcctccacccgccactgctgcgccaccaacggctgctgccgctcggagcctctccagacgttcacgatctgtaagtgctcggcctttcgatttctgttcatatgttccgtcaggtgaatacgggatcggtttcgtctgaatttcgcgactgttgccgctcgagcagacgggctatggccggactaagggcggccgc

SEQ ID NO: 23858 - DNA, 1026 bp, Zea mays
  Clone ID: LIB3603-001-C9_FLI
cctctccccttttctccgtcctctcctagtccacacggctccaagggaacaggcgagatggcaatcctgtacgcgctggtggcgcgcggcacggtggtgctggcggagcacagcgcggcagccaccaacgcgggcgccatcgcgcgccaggtcctcgagcgcctccccgacggcggcgccgacagccacgtctcctacacgcaggaccgctacgtcttccacgccaagcgcaccgacggcatcaccgcgctctgcatggccgacgacgccgccggaagacggattcccttcgcatttttggaggatattcatggaaggtttgtcaagacatatggccgggctgcgctaaccgctcttgcatatgcaatgaatgatgaattctcaagggtcttgagccagcaaatggattactattcaaatgaccctagtgcagatagaataaaccgcatgagaggtgaaatcaatcaggtccgtagtgttatgattgataacattgataaggttcttgaaagaggtgatcgtttggaactgctggttgacaagactgcaaatatgcaaggaaatacagttcgattcaagagacaagctcggcggttcagaaacactgtttggtggagaaatgtcaaactcacggccgcattgatacttctcctcctggtaataatatatgtcgttctagtcttcgtgtgccatggtttcaccctaccaacttgcataaggtaaggcatgatgtgcacatagtgctctttgctgtgcatgtttgtgcctatcaccggggtccggggggcagcagccattgcaattgtttcttgtgtagaggaaagctacatattatgatgtgattgtgagaactcaattaaagatatgaacttaacataaaaagtgcttcttgtgggtttggctatgaccttgtaggtctatgagaattcggtgtttggattggtgtttatttgtggctattcttgtgtctgtacatgaattcagttacgacgagtattttatggctatgctaatgtaatattcttg

SEQ ID NO: 23859 - DNA, 1204 bp, Zea mays
  Clone ID: LIB3603-001-E1_FLI
gcttccggccccgctcctcccccaaaatcccccaaaacctgacgcgctggagggccgatccgcggctccccgccgccttatccgagcagtctcctcggcccagccggggatccaagcgggatggggtacttgagctccgtgatcgggcaccccaccgatggatcctccgtcagcggcggcggcctcagccagaatggtagatttagctatggctatgcaagctcccctggtaaaagggcatccatggaagacttctatgagacaaaaattgattgtgttgatggtcagatagttggtctttttggagtttttgatggtcatggtggtgctaaggtagcagagtatgttaaagaaaacctgttcaacaatcttgttagtcatccaaagttcatcagtgatactaaagtcgctatagatgatgcttataaaagcaccgacagtgaattcttagaatctgacagtagtcaaaatcaatgtgggtcaactgcatcaactgctgtacttgttggtgatcgtctcttcgtcgcaaatgttggtgactctagggctatcatatgcagggaaggaaatgctattgctgtttcaaaggatcacaagcctgatcaaactgatgagcggcagcgtattgaagatgctggaggttttgtgatgtgggcaggaacatggcgcgttggtggtgtacttgctgtttcgcgtgcttttggtgacaaactcttaaagcaatatgtggttgtggatccggagatccgagaggaagttgttgatgacacgctcgagtttcttatccttgcaagtgatgggctgtgggatgtggtctctaacgaggaagctgtcgcgatgactagatccattaaggacccagaagaggctgcaaagatgctcttgcaagaggcgtacaagagggagagcagtgacaacataacttgcgtcgtcgtgcacttcttgcatgggcaaggtagcagcggatacgcttaaagcgtagcagtaaaattattttacgcagtggtgtgctcggatgtacatgcgtcgattgatttcccgatgttaaatggagaaacgtaaccacgtaaggtaggaaacgtgtattatgatgggttgaactgggaaatgcgtgtaccctatatactatatatatactgtagtttggtctgtattgtggtcgcagacgatgtttgggtctgaagatagtgttgtattgttgtgg

SEQ ID NO: 23860 - DNA, 1001 bp, Zea mays
  Clone ID: LIB3603-002-D7_FLI
tgcaactgcaaacccctcctccgattcctcccccgcacgcggaagccccccgcagctcttcgtccccggaggaccaagaccaccaccggagatgtcgtacgcctacctcttcaagtacatcatcatcggcgacacaggcgtcggtaagtcgtgcctgctgctgcagttcaccgacaagcgcttccagcccgtccacgacctcaccatcggcgtcgagttcggggcccggatgatcaacatcgacaacaagcccatcaagctccagatttgggatacggctggtcaagagtcattcagatccataactagatcatactacagaggagctgctggtgctcttttggtctatgatatcactaggagggagactttcaatcaccttgcaagctggctggaggatgcaaggcagcacgcgaatgctaacatgacgataatgcttgttgggaataagtgtgatctgtctcacaggcgtgcagtgagctatgaggaaggcgagcagttcgcaaaggaacatggtcttatcttcatggaggcctctgcaaagaccgcgcagaatgtcgaggaggcatttgttaagactgctggagcaatctacaagaaaatccaagatggcgttttcgatgtatctaatgagtcttatgggatcaaagttggatatgtagtccctggccaatctggaggtgctggtagctcttctcaaggtggtggctgctgcagctaatctgctaacgcccttatgtacaaaggcatatctgcggtgtagctgcgttatctctatgttgctgagcgtaaaatagttactgctccagggtgctttgttatttgatgcaccaacgggtggcagtgcctgaacgatttgagacattcagttttatttatgtcaggtgttcataaacattctgtaaatcactagattcttcaccgtcattcgtcattaagcgctcacaaattctgtccgtttgcgcgtgtaaataagatacctcgatgcatcgtttggtgcg

SEQ ID NO: 23861 - DNA, 613 bp, Zea mays
  Clone ID: LIB3604-002-D11_FLI
caagactttggctgagaactctggtttagatactcaagatgtgattgtttctctccagaatgagcatgaccgtggattagttgtggggttgaaccatcactctggggatccgattgatccccagatggaaggcatcttcgacaactactctgtgaagcgccagatcatcaattctggacccatcattgcatcccagttgctgcttgtggatgaagtgatcagggcaggccgcaacatgaggaaaccgacttagatttttgtcgccacctagccgagacttatttgttctaccttttgttttggttttgtgcctagtagtgatctggatgatacgtttgacttgagttggtcccatttcacgaagcaggtcgcattcgctttttttttttgggattactgcgtgcttccattttaacatgggattttagttttatcgatggttttaacatcctcctatgaggaaacaaagcctctagagagacgaggttgccttcccgaagttagtgccaccaaacttgctgcatggaacatgaagaagcaatgtttataacaatgttattatcaagtaatccgatgtgatggataaaatattggtactggcgtttttcctctt

SEQ ID NO: 23862 - DNA, 691 bp, Zea mays
  Clone ID: LIB3604-002-F12_FLI
gtcgtttcgcgtgacgttggcaggctagccgcgcgcgcttgttggaggacatcatttgctagatggcgcgtaccaagcagaccgctcgcaagtccactggaggaaaggctcctaggaagcaactcgctacaaaggcagcccggaagtctgcacccacaactggaggagtgaagaagcctcaccgttaccgcccagggactgttgctcttcgtgagatccgcaagtaccagaagagcactgagttgctgattaggaagctgccgttccagaggcttgtgagggagattgctcaggatttcaagacggatctgcgcttccagagccatgccgtgcttgctctgcaggaggcagcagaggcctacctggttggtctcttcgaagataccaatctgtgcgcgatccatgccaagcgcgtgaccatcatgcccaaggacattcagctggcaagaaggatccgtggcgagagggcgtgagtctgtcgacgggaggaagaactctgcgctcgttttgtgtgttcgcctctctcaccctgtaagttttgtgaaaagataatctagtaaactgtacttggcctgtttgactgtagccgcagtagcgtatgcgcatactattggctgttgtcgtgtctggagtcttttatccatccattctactacttaataatcgggttgctgaacgtgtatccagactt

SEQ ID NO: 23863 - DNA, 736 bp, Zea mays
  Clone ID: LIB3604-002-H6_FLI
gcgcaccatggcagccatcgcgatcttgctcgctgccttcttcgtcctcgctccggatctggccaccgcaggggcagcggcagcggcgcagagcgccatctcggccgtgttcgcgttcggggactccacgctggacccgggcaacaacaacggcctggccactctggtgcgcgccgaccacgcgccctacggccgcggcttcccgggcggcgcggccacgggccgcttctcggacggcaagctcatcaccgactacatcgtcgagtcgctcggcatcaaggacctcctaccggcgtaccgcggcagcggcctcaccgtggcggaggcgtccacgggggtcagcttcgcgtcgggcgggtccggcctcgacgacctgaccgcgcagaccgccatggtgtccacgttcggctcgcagatcaccgacttccaggccctgctcggcaggatcggcatgcccaaggccgccgggatcgccaacaggtcgctctacgtggtctccgccggcaccaacgacgtcaccatgaactacttcgtcctgccggtccggaccatcagcttccccaccgtcgaccagtacagtgcctacctcatcggcaggctccagggatacatccagagcttgtacaagctgggagcccggaacttcatggtatccggcctgccgccggtggggtgcctgccgatcacgaagagcctccacagtctcgggtcgggaggttgcgtcgccgaccagaac

SEQ ID NO: 23864 - DNA, 1326 bp, Zea mays
  Clone ID: LIB3605-002-D7_FLI
tcaagaaaaaaaagggcaggaacatttccagtgagaccagtcagaaggtaaaaccggtgatctcatgcccagaatcagatggttgtgctagagcttccattaatggatgggagtggcgcaattgggcacggaatgctactccgtcggaaagggctcgtgtgagagggtaccatgttcggactattctttctgcctcaaatgataatgtgtggaaaaattctcaagcaaaggtttcatctgcaagaacaaatcgggttaaactgcgaaatctgttagcagccgctgaaggttctgaactgctgaaaattacccaaatgaaggcaaggaaaaagcgtttgcgttttcaaaggagcaagatccatgattggggtctggtcgcacttgagtcgatcgaagcagaagactttgtaatagaatatgttggtcaactgattcaccggcgggtctctgacatacgtgagtctcaatatgagaagagtgggattggaagcagttacctctttcgcttggatgatgattttgtggtcgatgccactaagcgtggtgggttagcaaggttcataaatcattcttgtgagccaaattgctacacaaaggtgatcactgttgatggacagaagaagattttcatttatgcaaagaggcgtatatatgccggtgaggaaatcacatataattacaaatttccattggaggaaaaaaagataccgtgccattgtggttctcggaggtgtcgtggatcaatgaactaagaaggccatcttttgaggttgctgcaacacttaagattcttggctgtgtgcaactcatcaatcaggatttacatcaatatcaaaatatggagtgcacgaacatgctggacagcaagaacaaactgccgcattatacttatttaagctatattggtcagactaattccacggtatcccaaggatggtgcaagaggaagcccatactgcgctgccctgtggaggtcgcgagcatgggaaatcagttgaggatgggctgagctagtaaagggttgttttctgacaaggccagtactattgtttttttttgacatacctgggtggagttgcaaactcttgtacaggcgcaggctttacttattacattgtttggattggggatatagttcacatggtgcatacgaaacggttagattggtttaaattctctacctcgtccttaaatcatttatcatactaattagttattgaaagatgaaacacccgaaccactagttcttgtaatacttccactgcttttgtgaaggatgttatgagcatcaaaccgaactgaatggatgccctgctcctgttgatc

SEQ ID NO: 23865 - DNA, 1209 bp, Zea mays
  Clone ID: LIB3606-002-F7_FLI
gggcgcgccgccacagccgggcgcgcctctcgatcgagatccaggagatatgcctcgttatgatgatcgccatgggaatacacgcttgtatgttggaagattggcccctcgcacccgttcccgcgacctagaatatcttttcagcaaatatggaagaatacgtgaagtggagttgaagcgtgactatgcattcattgaattcagtgacccccgtgatgctgatgatgcgcagtacaacctagatggcagggaagtcgatggaagccgtattattgttgaatttgctaaaggagttcctcgtggttctggtggttcacgtgagtacatgggaagaggacctccaccaggaacaggtcgttgttttaactgtggaatggatggtcactgggcaagggactgcaaggctggtgactggaagaacaaatgctaccgctgtggtgaatcgggccatatagagagaaattgccagaacagtccaaggaatctcaggcgtgataaaagctattcacggtctccatccccacgtggtggacgtggccgcagccggagctacagcagaagccggagctatagccgatccagatccccatctggatctcccaggggtggacgccgtgaacgtgacgagaggagatctaggagtcttagctacagcaggagcgcaagccccaggcgttctgtctcacctgcaaaggaaaaggagcgcagtcgcacacccaatggcagtaggagcccaaggagccccagcccaagggctgaggtgagcccaccactgaaggataatggtgcacgcaatggctcagaccatgaaggcaaccctggtggtggagagaacagcaagaggagtcggagcccatctgatggctaccgtagccctgtggccaatgggcgcagcccgagcccgagggacgatcggagcccaagccccaagggcaacaacgaagatgacgagcgccgtggttcacctagaggaagtcagtcccccctgaactgagaaattctgatcaaatttgggccgcacgattcggttgtaactgttatattttagtttgagacaacaaactgtatttgctcatttctcatacagtcaggtttatgctttttgagctagaaaacatgtgtaagaatttgttaccttcaagctattcctggtttgtgatatggtaatacttgaactatttagcttgccaaatctgaatacttttaact

SEQ ID NO: 23866 - DNA, 1177 bp, Zea mays
  Clone ID: LIB3606-002-G4_FLI
ccaaaccaaacccagtagcgctgctcccagcagcagcaggcacgaacaaccgcccttgccacctcacctccagaaccagtgagtcactgtacgttaccggagcaagcaaagaatggcgtcgtcgctcaagttcacggtgcggagggggccggcggtgctggtagctccggcgtccgcgacgccacgggagcttaagcgactctcggacatcgacgaccaggacgggctgcggctccacgtccccatcatccagttctaccgccagaacgcgctcatgggagggcgggaacctgcgccggtgatccgggacgccatagccagggcgctcgtgccctactaccctttcgccgggcggctcagggagctagaaggtcgcaagctcgccgtggattgtaccggcgagggtgtgctgttcatcgaggctgaggctgacgtccggctcgatcacttcggggacgagctgcaaccgccgttcccatgcctcgaggagctcatctttgacgtccccggctcgtccgaggtcctgggctcgccgctcctcctcttccaggtgacgcgcctggcgtgcgggggcttcatcctgggggtgcggctgcaccacacgatggccgacgcgcaaggactcgtgcagttcctgggcgccgtggcggagctggcgcggggcgcggcggggccgacagtccggccggtgtgggggagggagctgctggaggcgcgcgacccgccgcggccggcctttgcgcaccgcgagtacgacgaggtgccggacaccaagggcagcatcatcccgctcgacgacatggtgcaccgctccttcttcttcgggcgccacgaggtggcggccatccgcgccaacctcccgccggacctccggtcccgcgcctctaagttcgacctcctcacggggctcctatggaagtgccgcaccgcagcgctcgccctggacgccgacgaggtgatgcggatgatctgcgtcgtgaccgcccacggcggcaaatccggcgtcgccatccccaagggctactatggcaacgcctttgcgttgccagccgccgtcgcgacggcaggtgatctcgtcgccaagccgctcgggtacgccgtagagctggtgaagcgggccaagggcgaggtgaacgtggagtacatgcggtcggtggccgacctgatggtgctgcgc

SEQ ID NO: 23867 - DNA, 1552 bp, Zea mays
  Clone ID: LIB3606-002-H9_FLI
caactcgccgtctgccttctgcgcctccatttcggcctctgtcccttgcaagttcaatctcacctccaaccatgggtaaagagaagccccacatcaacattgtggttattggccatgtcgactctggcaagtcgaccaccacaggacaccttatctacaagcttggaggcattgacaagcgtgtgatcgagaggttcgagaaggaggctgctgaaatgaacaagcggtccttcaagtacgcgtgggtgctcgacaagctcaaggctgagcgtgagagaggtatcaccattgatatcgctctgtggaagtttgagaccaccaagtactactgcacggtcattgatgcccctggacaccgtgacttcatcaagaacatgatcactggtacctcccaggctgactgtgctgtccttatcattgactccaccactggtggttttgaggctggtatctccaaggatggccagacccgtgaacatgctctccttgcgttcacccttggagtgaagcagatgatttgctgctgcaacaagatggatgcaaccactcccaaatactccaaggcacgttatgaagagattgtgaaggaagtctcatcctacctcaagaaagttgggtacaaccctgataagattgcctttgttcccatttctggttttgagggcgacaacatgattgagaggtccaccaaccttgactggtacaaaggcccaaccctgcttgaggctcttgaccagatcaccgagcccaagaggccttcagacaagcccctgcgtctgcccctccaggatgtgtacaagattggtggtattggaactgtaccggttggtcgtgtggagactggtgtcatcaagcctggtatggtagtcacctttggtccaactggcctgactaccgaggtgaagtctgttgagatgcaccacgaggcacttcaggaggctcttccgggtgacaatgttggcttcaacgtgaagaatgttgctgtcaaggatctcaagcgtgggtttgtggcctccaactccaaggatgaccctgccaaggaggctgccagcttcacctcccaggtcatcatcatgaaccaccctgggcagattggcaacggctatgcccctgtgctggactgccacacctcccacatcgctgtcaagtttgctgagctcattaccaagatcgacaggcgctctggcaaggagcttgagaaggagccaaagttcctgaagaacggtgatgctggtatggtgaagatgatacccaccaagcccatggtggtggagacattctcagcgtatcctccccttggtaggtttgctgtccgtgacatgaggcagacggttgctgttggagttatcaagagtgtggagaagaaggacccaaccggcgccaaggtgaccaaggctgctgccaagaagaaatgatgcgatcctgcgcctgctttagcaatacctagttttcatcattacaagttttgtttgtggtcgttgctgttattgtgtgaactgttgagctctgttagcctgtgcacttttatctatttatttggtaccttcttgct

SEQ ID NO: 23868 - DNA, 973 bp, Zea mays
  Clone ID: LIB3606-003-G11_FLI
gtttgagtgacaatgccataacaaatgccatagatatacacagatcgataagtggaagcctgcacattacagtatctaacaacgattgtggtgttcgtgaatatgatatggagagatatcagctcgtgaaccactaccgatataactggccggttaatcacacatccgtgagcccagataagaaacttttggctgtggttggagatgatcgagatgctcttcttgtggattcacgaaatggaaaggtaacctctaccctagttggccatctggactactcatttgctacggcatggcacccggacagccggacattcgcgaccgggaaccaggacaaaacctgccgcatctgggacacccgcaacttgtcgacctcgcttgcagtactgcggggcaacatcggcgcgatccggtgcatccgctactcctccgacgggcggttcctggtgttctcggagcctgccgacttcgtccatgtgtacagtgtggctgcggactacaagaaacggcaggagatcgacttctttggtgaggtgtccgggatcacgctcagcccggacgacgagtccctgttcatcggagtgtgcgaccgcgtctatgccagcctgttgcagtacaggatgatccgcggattcgactatcttgactcatacgtgtgaagaactgtgttgtgctaggtgctggctgaaggttctgatgcgcggttcagggaatatatctgcctgctcttagttcatggcgaatgatggttcggtgggactcgacgccagcgaatctgccgtgtaaatagtttagaatttgaagcgtagtgtagtgctgtggaccaatgctgtctctgaacatacatatgatcagagtaatgtgtgtttgcgttgttagtttcagactccggaatacaaatagttttggaccaaattcctaaagcctgtttgtactgtggaacacatgaaagggctagtttgtattcacttcg

SEQ ID NO: 23869 - DNA, 1487 bp, Zea mays
  Clone ID: LIB3606-004-C11_FLI
tccacgctctcgtctccgccgcgctaggaacttccaactcccaagcccagccgcctgcctagggttaaggtcgcccctccgccccctcgctccgctcgtgaccggcagggtttgtcgccgccgttggatatgtcgcggacgctggtgcagccggtggggcagaagcgcctcaccaacgtggcggtggtgcggctgcgcaagcacggccagcgcttcgagatcgcctgcttcccaaacaaggtgctctcgtggcgctcccgcgtcgagaaggacatcgacgaggtgctccagtcccacaccgtctactccaacgtctccaagggcatcctcgccaactccaaggaactcgccaaggccttcggcaccgacgacctgacccaaatctgcatcgagattctggagaaaggggaactccaggtctccggcaaggagagggaggcgcagctctccagccagttccgcgacatcgcaactattgtcatggagaagaccatcaacccagagacccgccgcccctacaccatcaccatgatcgagcgcctcatgcacgagatacacttcgccgtcgacccaaaccttacctccaaggaacaggctctaaaagttatcaagaagctcacagagcatttccccataaagcgtgcaccactaagggtgcggttcactgcaccaaaacccaattttccaggccttatggagaagattggcggatggaatgctaccatcatttcaaaggatgaattgagcactcagccttctattgtatgcgagatcgagccatctcttctgcgctcatgtgaggagcggttgaaggatgtgcaagggagggtcgaagtgctgtctgtctccacgcacgtagaaagtggcccatctgtggaacaacacgacagtgtggaagtgccacaagcggctcctgtaaaggaacctgatgctgttgctcagataagtgagaccatgcagaaacagagcatttctactgaaagccagggcaatgcacaaggcaagcaacagagaaggtgcaaggagtgtgatgtactcgtggaggacaagctatacagagagcactgcaagagtgggtggcacaaacacaactacacacgccacaagaatgggctcccgcctctcagccaagaggagtgtatggtggagatggaattggccgactccaagaaagaccttaaagactacgatttctgatgaggatggttaacaaggggtgcacagggcatgaagttgttgccagtccgtttttattttaatgaggaagtgaggagtgaggcacatggtcgttttctgatgctgtataggaattattagaatgagatggtttagccacatctttgaactgagggtagaacctgtctgtctgtggattgctttggctttgtatcgtagacgagtgaacttggtagtggcattccaaatttgacattctatgcgggctagaaattcgcttgttttaatacttatcggcatcctttcttttt

SEQ ID NO: 23870 - DNA, 1256 bp, Zea mays
  Clone ID: LIB3606-004-E5_FLI
ggcgaccctgacgatgtgaaggcagatgaaataagtcttgttaggaacttgtattctttggtcctttcatactacctgcgctttgttagaggtggctggcatcaacttgatgatactgctaattattttctcttaaaaactgaccagggacaactatcatgttctgatttgcttagggacatacttgatgatattgctgggagcctgcttcacaaatctgtggaagataatattttccttttacagccttgctgtgataatgttttacattttttgaaccttatacaggagctgcttatcagtcaaatgggaattaggctattgtttctctctcccagtatttcggaggaatcttcacatgataacatatggaaagaagatattaagtcaacagtaaatgatattttaaataccgagagccatggtcaatttacaagattttctgatgtaaatgaagtcagtgatgattggtggattttctttgacaaggtgtggagtattatacgtcatttgaacggaaaaggaccaagcaaatttataccaaaggatccaaatgttgaggttgcatctttggggcaaagggcgcgtggactggtggagtctatgaatgtccctgctgccgaaaaggtagctgttgtatctggaggcggaggtattggtactgcattaggtataaaagtgaacagatttgctgagaaagcgacaacgtcgagggaagagataatcccaagaattttcttccaccttgtgattctgtacctctgcaaagctggattggagaatgcatccaagtgtgttatacagttcatgtcgttgcttccgattcttcttatttcagaagatgaccaaagcaaaaataagttgcactttttgatatggtctctactaattgtaagatctcagtatgggcaacttgacgatagcgctcgtttccatgttttctcgcacttgattcttgaaactattatatatgggaagtccatgttggtcactaatatcttagagagagatgattcggtggacgtcaacaacaaggagactggattcatccttagctttatacagaagaatcgtgttcttgctgcggtttgtatctttgccccctccccctatctttgtctggaattattttgttgacgcgtacaaaatgagaagggtgtgtttgaagttttgtgcatttaatcaattactcgatctattccaactgatgattgttacgaataaaaaactcaacctacgaggagtaagattaagat

SEQ ID NO: 23871 - DNA, 1109 bp, Zea mays
  Clone ID: LIB3606-005-B2_FLI
cacaattatttgtgctcccgctccttccgtccgtccttcctccccccttcccctctccctcttccaaccgccgctcctgctgccttgcctctcagcccagggacgccaaggtctctgccaggatggtgtaggccgtgcctctcgcgcattatgaggtgtggtggtgagggatgggcgatggcctttgcagatgaaggagcgacagcgctggcggcctgaggaagacgccgtcctgcgcgcctacgtccggcagtacggcccccgcgagtggcacctggtgtcgcagcgcatgaacgtggccctcgaccgcgacgccaagtcgtgcctggagcgctggaagaactacctccgccccgggatcaagaagggctcgctcaccgaggaggagcagcgcctggtgatccgcctgcaggccaagcacggcaacaagtggaagaagatcgccgccgaggtgcccgggcgcacggccaagcgcctcggcaagtggtgggaggtgttcaaggagaagcagcagcgggagctgagggacagccgccgcccgccgccggagcctagccccgacgagcggggcaggtacgagtggctgctcgagaacttcgcggagaagctcgtcggagagaggccacagcaggctgccgctgcgccgtcgccgctgctcatggccgcgcccgtgctgccgccctggctgtcgtccaacgccgggccggccgtcgccgccgccgccgtcgcgcacccgccgcccagaccgccgtcgccgtccgtgacgctcagcctcgcgtccgccgcggtggcgccgggcccgcccgcgcccgcgccatggatgccggagcgcgccgcggccgacgcggcgccgtacgggttcccgagcccgcctcagcacggcggcgccgcgcccccgggcatgacggtcgtggacgggcaggcgctggcggagctcgccgagtgctgccgcgagctggaggaggggcggcgcgcgtgggcgacgcaccggcgggaggcggcgtggcggctgaagcgcgtggagcagcagctggagatggagcgcgagatgcggcggcgcgaggtgtgggaggagttcgaggccaagatgcgcaccatgcggctggagc

SEQ ID NO: 23872 - DNA, 902 bp, Zea mays
  Clone ID: LIB3606-007-B7_FLI
cgagaagagcggcggcgcgggcggacaaggagcaggcggaggaggagctgtgccaagccacaatgggtatctcgcgtgactcgatgcacaagcgccgggccaccggtggaaagcagaaggcctggaggaagaagcgaaagtatgagcttggtcgccagccagccaacaccaagttgtcaagcaataagacagtgaggagggtccgtgttcgtggaggtaatgtgaaatggagggctcttcgccttgatactggtaactactcatggggaagtgaagctgttacccgcaagacccgtatcctcgacgtggtctacaatgcatcaaacaatgagcttgtgaggacacaaacccttgtgaagagtgccattgtgcaagttgatgctgccccattcaagcagtggtacctcactcactatggagttgacattggtaggaagaagaaaacccctgctgcaaagaaggataatgctgagggacaagaggttgaggcagcagctgaggaaacgaaaaagagcaaccatgtcacgaggaagcttgagaagcgcaaggagggacgtacccttgacccacacattgaggagcaatttggcagtggacggttgctggcatgcatttcttcccgccctggacagtgtggccgagctgatgggtacatccttgagggtaaagagcttgagttctacatgaagaagctacagaggaagaagggcaagagcgctgtagcttagagcattctcatggattgtcttgcaccgaaatgtgtgtcctgatgagtacactttttttggttaatcgtctcaagttcagagcgttatgccatgttttcagacctgattagtacactgttttctaaaagcgattgagctctagtccaatgtattgataatatctgctgttgtcct

SEQ ID NO: 23873 - DNA, 967 bp, Zea mays
  Clone ID: LIB3606-008-F5_FLI
gccttctcggcgcgctacgcctacgactgagctgaaagaagcggtagatcggcgttagcggcgagctagggttccggcgagtgcacccaatggcatcggaggcggcgcggcggcggcaggagatggcagaggaggggcaacggcacctggaggagactatcgcagcctcgttccagatcctcgtatccatgaacgacgagctctgcaacgccggcctttggtcctcctcatccgtctcggccaccgctgcggctggctaccagcaccatcactctgctactcttccgaccccacactctgtagattccgacgctgccgacgcagggggcgcgcccagccccggcgggtcgctcgacgaggcgaggcaccgctacaagtcagccgtggcggcgctgcgggcatctatctctgccgtgtcgtcctgcgctcaggacattggatcaacagaatctgaagctgaccatgcagagattgagagattggaagagcatgctgctgctttgagaaaggaaattgaaagcaaaaacaagcaagtaaaactcctcattgatcagctccgtgacctaatagctgacatagcaatgtggcagagcccttgctcagtgtgaagtgtcgaagttagagacagtagcctggacgtctggtataggcatattgtgcatgttggttaactgaccacttggaagggagcaatagatggaatatgactgggctgcacgggaaaagaaaatgaagatgccctctataataccaactaaacgtgtgttgggacatcgatgcaaatgcagatagggatgtaatatgttggacatgaatgttattttggacacgactgtagatacacgtatctttttgaaacgtgtggattttcgctgtgacgaaagtcctgtaatgttttctcttgagaaaaacaatctagaatgatatttggattctcacatgcaatgcacattatttctgttaactg

SEQ ID NO: 23874 - DNA, 991 bp, Zea mays
  Clone ID: LIB3606-008-G12_FLI
ctcgatatgtgttggatcctggctagtcatcgcgcaggttatgtttccatttggaactacaacacacagggaagggtgactgcattgaaggtcaccaaggaagcaggggacggctatgggtatatctgcatctatgcatacacaatggacaaagtgaagaaatttgaagcttatcatggcaaacctgtcagcttgttggctgttcactcaacctacccgttcttgctttcgtcgtcgtcttgtgaccgctcaatcaagctttgggcctgggaccagcaatgggcgtgcactcgaacattcgacgctcacacgagcggagtgcagcatgtcaggttcaacccagctgatgtcaacacttttgttagtgtttcctgtggtggcgcctgtgtaaaggtctgggagattcattcttccacccctatcaccacattgtttggtccgaacaacgttgattatttcactgatgctgatcgccagttccttctcaacatttggtcccagaaggcaacaatattggatctacagacacaaaaaactgtccacaggctccttgttcaccagcgggagatgcgtgatgttgcttgccacccgacacttccaatattggctaccagattagatgatgggactgtttgtttgtgggacgccactacctacaggcttgagagaatcattcgccttgagtcctccattcaacatacggcgttcaaagacacagcggactcaatatggctcgttgttgcgtgtgaagacgggatggaaattcttaaaattaacatgccaacatcaacgaagtaagcaatcagcctgcaccagagatcaggccaaagagcaatattagagttaaaaatatttgcaccgcatggctctagagcctgactgaactatgaccttgtttgtttcggcttctgacagcctctagccattaaaagctgttgcggactgccaaacgctcaacttttcagccagcttctataaaattcgttggggc

SEQ ID NO: 23875 - DNA, 1588 bp, Zea mays
  Clone ID: LIB3606-009-E2_FLI
ccgtacttcttcttttttttaaaaaaaataacactgatatttgtttaaaagtatttgtggtgctccaattattgctccagttagtgatgatggaagagaggcgtcattacctcgatgtgtgcttgttgttggagtaatatactactatatctctacaactattaaaagcgaactgtagactgcccccgctcgagcagcccgcacgacgcaaatccccaatataaaaaatacggttggttgtttcacacggacgcgcgtttgtcgcgatcgacgatcgagaaaatcctagggttttcctctctcgccgccgccgacttaaagaggacagaggagtaggcgaagtagcgccgggagaggaacatggggacgccggagacgtcgagggagccgtgcccggacaggatcctggacgacgtcggcggcgcgttcgggatgggcgccgttggcggctccgcctatcacttcatcaagggcatctacaactcccccaacgggatgcgcctgtccggaggcgcgcagaccgtgcgcatgaacgcgccgcgcgtggggggcagcttcgccgtctggggcggcctcttctccaccttcgactgcgccatggtgtacgcgcgccagaaggaggacccttggaactccatcgttgcgggcgcagccacgggcgggttcctctctatgcgccagggcatgggggccgcgggccggtccgcgctcatgggcggcatcctgctggccctcattgagggcgccggactcatgctcaaccgcgtcctcgccaacccgccgctgcccgccgacgatcccaaccttacagcggctatgggcggcaaccctttcccgggcctgccgcaggcgccgccggtcgtgacacctccggaagcggcgacctccagcggcgtgggtggcttgttcgggggactgtttggcaggaaggaggaggataagaaacccagcgcagtcgggggcaagtcggagatcttggagagcttcgacacgcccagcagtccgataccatcgttcgagtacaagtgaggaaaaggtatggcgccttttaaaactggggtcacagcctgggatgaaatgaaagggacctgcacactgcgctgcaggcaggcaggcaggccggcctagcaagcgatgatgaatcaagcaaccataccggaaattgcagacagagagggtctgcaattacaagcacttaatcgaggactgcaatttgcgtaaaggaagaaactattctgtttttacattggttaatccaaaacatgatttagtgtttagaaacatatactcatcaagttacttcagtcaatggagcataaccttcaacctttcctatggttagagatttttttggtggaatacaaggcagcaaaagagaagtcgaaagagatagataggcttgcaaaggagcgtcaaaagcagaggggaaaagagtatgatgtggaggcagggatagagataccagaagagagaggtctagggagcatgcctataatcgtgatcgtaaactgatgaacattgtgtttctgatatttctatgtatgctgaagctttgttccgatatattggaatcgaatgttaaattagt

SEQ ID NO: 23876 - DNA, 1259 bp, Zea mays
  Clone ID: LIB3606-010-G12_FLI
cgccgtcgcttccgtcgagccgggggcgacgtccgtcgctgcctcatggggcgtcaagcttaccgccgacgccctcctcgccgacctcgcggacgatgagttcgacctcatctctctaccgggagggatgcctggttcttccacttttggagaatgcaaagttttggagaaaatggtcaaaaaacatgtagagaagggcaagctttatgctgcaatttgcgctgcaccagcaatgactctaggaacttggggtttgctcaatggcttaaaggcaacatgttatccttcgttcattgataaacttccttcagaggtacatgctgtggaatcaagagtgcagattgatgggaagtgtatgaccagtcgtggaccgggaacagccatggagtattctgttattttggttgagcaactatatggaaaggaaaaagctaaagaagttgctgggccaatggttatgcgtcctcagcatggtgtggaattctctatgaaagaggtgaattcaactagttggaatgttggtggaacaccaaatattctagtaccgatcgctaatgggacagaggagatggaagcaactatgataattgacattttgcgtagggcgaaagcaaatgttgtggttgcctccttggaagacaagctagagattgttgcatccaggaaggtgaagatgattgctgatgtgctgttggatgatgctcttaaggagcaatatgatctcattctgttacctggaggtctgggtggtgcagaagcatatgcaaaatctgataaactaatggatctgatcaagaagcaagctgaggcaaatagattgtatggagctatatgtgcctcccctgcgattgctcttgaaccacatggcctactaaagggaaagaaagctacatcctatcctgctatgtggaacaaacttgcagaccaaagcgaatgcaacaacagagttattgttgatggtaacctaatcaccagccaaggtcctgggacttctatggaattctcgcttgccatagtggagaaactctttggacgggagagagcccttgagctggccaaatccatggtttttatttgagttgaaatggtacgtgtacgtattacgtattaggtttctggagtatgtacttgtgtaaatcgaggcatgctatgttctttttcttgtggaatgtacttcaaattcccttttaaatagaaataagacgaacacttgtaatgtgttccatatgcagtaaaaggtttgaggcaaacattaagcg

SEQ ID NO: 23877 - DNA, 1447 bp, Zea mays
  Clone ID: LIB3606-011-A8_FLI
cacgaaccaaaccaccgcctcctcccccgaccggagaggagcctcaccgccggcgcccatggcgacacgctacttgatcgtgtcgctgcccgtgcagtcgcccggcgccaccgccagctccctgtggtcgcgcctccaggactccatctcccgccactccttcgacaccccgctctaccgcttcaacgtcccggatctccgcgtcggcaccctcgactcgctcctcgcgctcagtgacgacctcgtcaagtccaatgtcttcgtggagggcgtgtcacacaagatccggaggcagatcgaggacctcgagcgcgccggaggggtcgagaccgggaccctcaccgtcgacggcgtccccgtcgacacctacctcactaggttcgtgtgggatgagggcaagtaccccacaatgtcccctctcaaggagatcgtcggcagcatacagtcacaggttgccaagatcgaggatgacatgaaggttcgagcatcggaatataataatgtaaggagccagcttagtgcgatcaacaggaagcaaagtgggagcttagcggttcgtgatctttccaatctggtaaaaccggaggatatgatcacctcggaacatctcgtgacacttcttgcaattgttcccaagtactcccaaaaagactggttgtcaagctatgagaaaattgacacattcgtggtacctaggtcatctaaaaagctctatgaagacaatgaatatgctctctacactgtaacactgtttgctaaggttgttgacaattttaaggtccgtgctcgcgagaagggttttcaggtccgtgattttgagtacagtcctgaagcacaggaaagtcggaagcaggagatggagaagctactgcaagaccaagaagccatgaggaccactcttcttcaatggtgctatgccagctacagcgaggtattcagttcctggatgcacttctgtgctgtgcgtgtctttgtagagagcatccttagatatggtctccctccatcattcctgtctgctgttcttgcaccatctacaaagagcgagaagaaagtaaggagcatcttagaggagctctgcggcaatgcccatagtatttattggaaatccgaagacgacgtaggcgtcgccggtctgggaggtgaaacagaggcgcacccttacgtctccttcaccataaattttgtctgagaccggcatgttcctggccgtctgcggcccaggcaatatttcgagcagaactgccataaattctttgttgatttgtcggttcatgtgctcctgtaattcacatcacagagagaccagccgatcaataatgtagtttctgaggacatgtttccctgcagtattgtaccttgggagcgcattgtaaatggcctggaacagttgtctactggatttgtttatttatttacaataaaagccatgtgaaaataagtaact

SEQ ID NO: 23878 - DNA, 1249 bp, Zea mays
  Clone ID: LIB3606-011-B8_FLI
acttaccctgacatcggacatgctgcctttggtactgctggccgtatcatcatctcgataatactgtatatggaactatatgcatgttgcattgagtatttgatcttagagagcgataacttatcaaagttgttcccaaatgcacacctaaccatgggtaacttgactctggattcacatatgctatttgccatcttgactgctcttgtcgtcatgcctaccacttggcttcgtgatctcagctgcctcagcttcatttcagctggtggagtcattgcatctatcgtcattgtctcctgcttgttctgggtgggacttgttgatcacgttggcacagtcgagagtgaagggacggcactgaaccttcctggaatccccattgccatcgggttgtatgggtattgctactcaggccatggagtgttcccaaacatctactcttctctgaagaaaagcaaccagttccctgctgttcttttcacctgtatcgctctgtctactgttctgttcgctgctgctgcaatcatgggatacattatgttcggtgaatctacagagtcccaatttacactgaacttacccccaaatcttgtggcttccaagattgcggtctggactacggtgacgaatccaataaccaaatatgcgctgaccatgactcctctagccctgagtttggaggaactgctacctccaaataagcagacatacccgaacataatgatgcttagatccgctctggtggtatcttcccttattattgctctgtccgttccattttttggacttgtcatgtcactggtcgggtcttttctcaccatgtttgtggcctatattctaccatgtgcctgctttttgtctatcctcaggagtaaagtgacctggtatcaggtagtactgtgtgtgttcatcattgtcgttggactttgctgtgttggtgttggcacgtactcttctctttctaagataatacaaaagtaccaatgaattgtgccctagaattatgtatgatgtgtccatgtgttttcgaatagccagttttcttttctgggatggtggcgctggtctggaagggggagggggatgtcattctttgtaaattttttgttggcatgagaggaagtggaggaatttgataaaatagggcaggttgtgttatcgaaggagtattttgtctgaaattgttctcgtgacggtaggtgctgctggggaccccccttctgttgcccccccctttttcgtttgcccc

SEQ ID NO: 23879 - DNA, 694 bp, Zea mays
  Clone ID: LIB3606-011-E7_FLI
cttcgtggtccgtgtttaacgggcgtagagagagaaagagaacagagcgagagagggggaggacgaagccctccgcgtcgtctcctgctgttccatcccacatctattctgcctcggcttgcaccttcgacctcgctgaaagttctgacctcaaactgaaaggggcctgtgaagcgtttccttgcggcagtgcaatggaggtgaacatctctggttctattttcatcgtcgggtaacaagaaactaatcagggagtctcttcccatttcttgcagtggaggaatgtttagctacagccgcgcagcatgctttccagagcataaattggtggaagagaagtttgatgctaccactttgccagaagaaccgagccagacacaataacatcaaactgagtctgagatactgcactttacaaattctttcgatattggcagattgaagaccaacaagatttgaagagcagcaagatcagcttgcacctgcagtttgaagaaatcctttcaaagaagactgcttgcggcaatcttgccttcactccacaagcatgtgctgtgttatgcgtaccatgtaatgattgtagtacttgacaactgataccaaagtagtggatgcttttctttcgcatgaagtcatgttgatttttgtacgttctaacagcgtctccatcaatatcctattgaatctcccatat

SEQ ID NO: 23880 - DNA, 978 bp, Zea mays; identical to SEQ ID NO: 22567
  Clone ID: LIB3606-011-G4_FLI

SEQ ID NO: 23881 - DNA, 871 bp, Zea mays
  Clone ID: LIB3606-012-A6_FLI
aaaagaaaaaaaacacgagaaaaatcaaatcaggagacggggattccagagagcccctctcgggtagggaagggaaggagaggcgaagcggaggcgagatgggggcggccgaatccgtgccggagacctccatacacgaattcaccgtcaaggattgcaacggcaaggaagtgagcctggaaacctacaaggggaaggtcctccttgttgttaacgtcgcctccaaatgtgggttcacggagaccaattacacgcagctgacggagctttatcagaagtacagggacaaagacttcgagatattggcattcccttgcaatcagttcttgcgacaggagccaggtactgatcagcagatacaagactttgcttgcaccagatttaaagctgaatacccagtttttcagaaggtgcgcgtaaacggaccagatgcggcgccggtttacaagtttctgaaagctagcaagcctggtttgtttgggtcatcaaggatcaaatggaactttaccaagtttctcgtgggcaaagatgggaaggtcatcgagagatacggaacctcgacagctccaatggcaattgagaaggacatccagaaggcccttgaggaataattttttgtgagcttgtctcgtctcatccaccacacacttgcagcagaaataggcacttgctgaaatatttcgtcgtagtaacattcagaccggacgtctttgcttatctgtagtaaaaattctgtgtaatgttaccctcctcttcgccttccgttcgtgtaagtagaggttgtattaagtagccatcatctgctagcttttgccctttctgtgtgaagaagtgaagacatggtatattgatgcaaaacttaacgttggtg

SEQ ID NO: 23882 - DNA, 1405 bp, Zea mays
  Clone ID: LIB3606-012-B7_FLI
acaagagctcacagaactggatgaaaatgaaatgagaatggccaaatcacagcagtgtgcaggaacaagaaagaagctggcttttctgtcaactccagtggagctcaagagtgttgtaccgcatgaaaccaccaaacattgccaagatatggaaccagaaaagacagagggcccactgtgcaagagaaattcccactgcatcaaggatggaagtagtttgaaaattcccgaaagtaccaaaggcaaatggttagcagaggaagatgaaattctcattaaaatggttaccaaacatgggaaaaactggcaaactgtagcatttgctatacctggccgagaagcaaaacaatgccaaatcagatggacacgcagtcttgacccagcaataaagaaacaggattggtcagaacaggaggatctaaaattgattcgagctcatcaaatatatggaagtcagtggcttaaaatggtcaaacatttccctgggaggacaaatcatgcactcaaagaacactggagaaatcgtatcaaaggaaaactgaatttttatttagcctcaggattgctagaacaagttccggacctggaagaaggtggtatatcagttccagagagcagtcagtcagaaattccgaaggacagtcagggttcagctgacaggagtggaccgccaccagttttacgagcacagcccaaatctaaaccggaactcccagaaaacgctggtacatcaggagaaggaacttctgattccattcgtcttaaagggcccaacgcccatccaaccgaagtttctgaaaaggtattggctaaatcaaagcagcgtgccagagccagaaggagattggattttctgtcaaccccagtggagctcaaattgtgcactgctgcggcaagttgtcaaaggcctccccagaaaatggatcaaccgggtccagtggccgagaacatctctccgtcagatgcatgtcaagacatttcacagaatgttccaccagagcgtgcggatgccatcacaccgctggctgctagtaaccaccattcaccagcgacaccagttgatccattctctctcgaaatgcatgaggcgaacgcatcagatcttctggacatgtcctactgtgatggcttgataatcgattctcctcgtgatccacatgacggtagcctcatgtagaagaaaaagttaccaacgcaaaatgacacttttaatagcaagagacgatggactgtcttcctgaaatccagcaactccctgtataaaaatcgtgttgcatgttggatggaacttgtatcttgtcttggcaaaaataattgcattgctgttctgttaatgcccctaactggtttggagagcatttttcttttgcaggtttgaagagcattttgaggggtgttgtaggtc

SEQ ID NO: 23883 - DNA, 542 bp, Zea mays
  Clone ID: LIB3606-012-D10_FLI
ctttccttcggaactctctcgtgctcacctcatccgtccgacagatccacacgaatcctctgattcagagcagggtgttggcattgatcagacgcctgccatggcggatcagttcgaggattcggcgaacaatgtgatcattgaggaggtgaacaagggcctgaacccaggaatggtggttctgcttgtggttgcaagcttcctgctgatcttctttgtggggaactatgcgctgtatgtgtatgcgcagaagacgctcccgccaaagaagaagaagccggtgtcgaagaagaagctgaagaaggaaaagctgaagcagggggtctctgcgccgggagagtaaacggccatgctgccgatcctcccgtccagagctcctattcacatgattattagagaaaaaaattatatatatataccagatggagccgtagtgttggagtaactttgttctgtagatgctctgtctttaatggtacatctgtattggagactttgagaccttgtttcagcaactgatgaatcttagcctgagccgagct

SEQ ID NO: 23884 - DNA, 1050 bp, Zea mays
  Clone ID: LIB3606-012-D5_FLI
tgttaacaagccaaaggggtacatttgctcatgtggtgaagagtcaaaatctgttgtctctttatttaatgattatttgaagggctggaacaagattcaaccagggttgccaaaaccacgcttgtttactgtgggtcgtcttgatgttgccacggctggtctgataatagtcacaaatgatggtgagtttgctcaaaagcttgcacatccttcttcaaatgtaacaaaagaatatgtggtgactattgatggtgccgtgcacaaaaaacatctcatagctatcagtgaaggcacaaaaattgatggggtcatgtgcattcctgatttagtagaaccattggctgcccaatcagatacaagaaagacccgcctaaggatagtggttcatgaaggacggaatcatgaagttcgtgaacttgtacagaatgcagggctacaggtttatgcattgaaacgtgttcggataggcaggttcaggcttccagcagatctgggaattgggaagtttgttgagctcaaacaggctgatatcaaggcactagatggcaacaactagagatgacatctgatgtggctaataagcgcatcttgtccaaagatggtagtaatcctcaaagtcacaatacatgagctgctactcaactcagaaagcttgtgaatgttctggatgtccattggtggtggtggctgatgatcaagtgtggcaaacatgttttgccttgaagaacttgtgaactactccatacttcgcctgcgctgcgaatctccacatcatatcaaacggcagaaccaagtccgcgatgcagcagtcgtttggtgaggatggaacattgtcaaatagcgatcttctgttggcatatacattttactctctattctaaattataatttttttagatgcattgtttttactaaattaaaatatcttatagtttagaatgcatcttgtccaacaggtagtcaataatggcagacgagttatatttggccaaattacattgtactccgtgtaccgagaactgtttttttaagaatcctttattgaccagg

SEQ ID NO: 23885 - DNA, 1069 bp, Zea mays
  Clone ID: LIB3606-012-E3_FLI
ctagctcgacattaatttcgttccggtaaggggaatccggaatcgttcggcatggataatcagcgagccacctcaacctcaaagggaatcggctgctagctaggagctagcgaggaggagggttatcggctcctccggcaatcctgaggccggctagctgagggcgaggcagcgtcacgcccgtccgtatgcatggagagccagagggtggtggtggtggtggaggacgcgggcgccgcgcggtcggcgctgcagtgggccgtcggcaacttcatccgcggcagcgactccatcacgctgctccacgtctgcccgccggcgcggtcgcgcaggaagcgccgccgcctccgcctcggcggcttccagctcgcgctcgccttcaaggacctctgcaacgtcatcgccgaggccaaggtggagatcgtggtgacggagggggagctcggggagacggtggtggcgacggtgaaccagctcggcgcctccacgctcgtcgtcggcctccacgacaagagcttcctctacagcagggcgccgagccagtacagccgagtcatcaggagcctgggctgcagggtcctcgccgtccggcagcacgccacggcgcgggacggcttcctgaacgccgagctcacccagatcgagaccgtgaacctgcacataccaccgccaaagatcccgttcccgatgttcacgctcccccttggcgtgatatggagaagatcgaagcggagaaagtgatactcaaactgcggggaagacggaggaacagcagaacaggaacagcacggcaggcatagctgagcctgtcctgatggctagtagatatatacacgtacacgcacgcgtgcacatcaacggaggcgcagcaaatctgcggattgacgtaactgtaatgacgacagcggcaggcacagaatgttagagaggaagggtatactccagctccgggaaagacggccccgtacttgtattattagatgattaatcgacaggttggtttactggaaactagaggagccattctgttttctgaagaaaaagaagaatggagcaaggttagaggact

SEQ ID NO: 23886 - DNA, 1200 bp, Zea mays
  Clone ID: LIB3606-013-B11_FLI
gccgtcgctggtgaggatctggatccttcagggtgcgtcaaaaggttgtcagtctgcaagttgaatcatggcggagcacttggcttcgatctttggtaccgagaaggacagggtcaactgccctttttacttcaagattggggcttgtcgtcatggggatcgctgttctcgtctgcacaacaggccaactatatcgccaactcttgtgcttgctaacatgtatcagcgccctgatatgataactcctggagttgatgctcaaggccaacctattgatcctgagaagatgcaggagcattttgaggacttctatgaggacatctatgaggagttgggcaagtttggtgagattgagaatctgaatgtttgtgataaccttgctgaccacatgattgggaatgtctatgttcagttcagagaggaagaacaggcagctgcagcatacaatgctcttcaggggcgcttttactctgggcgccctataattgttgagtattctcctgtgaccgacttccgtgaagcaacctgtaggcagtttgaggagaacagctgcaaccgtggtggctactgtaatttcatgcatgtgaagcaaattggcagggatctcaggaggaagctgtatgggcgttctgcttccaggaggtaccatgcgagaagccgaagccctccaccgcaaaggaggggctatcgtgaggactatcaccaccgtgatcgtgacgagtaccgtggcggcggcggcggcggcggtggacggggaagaggtagcaggcatgacaggtatgatgatggagcaggtagaggcggcaggcatgacaggtacgatgatggagcgggtagaggcggcaggtatgagaggtatgatgatggaggaaggcgtaggcatggtagccccccgaggcgtggaaggagcccggtcagggaaagcagcgaggagcgaagggccaagattgagcagtggaaccgtgagcgggagtcaaaacagtgagctctctgtggcaactgttctgagacgtgttattcggtggacttgttgcttagctcgtctttcactgctatattctaagtatgcttgtgtggctgatatgcttgagtgcaggactcagttcaattttgtggttaaatcggacatgtaaactctatttatttccttgtggattgtgttgaatcatttgccattatgttatgctgacaattggtatc

SEQ ID NO: 23887 - DNA, 2175 bp, Zea mays
  Clone ID: LIB3606-013-E6_FLI
taatccttcacttgccgcctcccggtccagaagaaataaatatacgtacatggctagtgattctggcgaaactgagagtcatagtgatttaccttctataaagatgtcttctactagaactgattttgagaatgaaagctatcttcagcatcctgtttatttttctgaggagcagacttctgacttcattgagaagcaaataaccgagtcttccgagagggaatgttcagaaagcgagactgaagatgatgctgaacttctgcaaaatgcaagtgtgattctacgtacagaatcacatgctccttgtccgtattctattccagtttctgacaagttcaagcatgtggattatgaggacaatgaggtgatctattctacttatatgccccagttgaatgaatatgaggaagaggatggttcttctgagctgggtgtctctcagtggcacatgaaaggtaaacgtaacaatcgtaatgccgtgaagagattagtggatatgagagatggaaatacatggttaaataaatacaatggatcattaaaaggatctttgcataacacaaatggtgggaatcccagaaaagaaggtatgcacacatctggtgagcagttttttgaggaaagcttttaccaaataaaagaggagcccaattatgattctgatgaaactaatttatttgagaacatgagccattcagagactaacttgtactatggtaaaaaatacccttcatacttgagaaccacaagagatcttagccgaggctacagttactttaatgactcttcaaatgtttctcccctaaacaaggacactgaacgaatatatcatgttgatcggaatgcatattgggatagaccttcattttaccaaaggaagttgacttcaagttttggtggcatgggaccaatgttgttcaatgttaacctcaaagttcaggccagctaccaaggagagcatgtccctcttgtctctttgatgagcagacttaatggcaaagcaattgttggacaccctatccaaattgaaatagttgaagatggttccacagcggtattctgtggtgacagtggtatgcaagagaccacagctgctccacctgcttggccaacaggtagaaggactgccatgcaaagagttccccgttcaaatccatcaggagcactgttggatggcgataatgaaggtggtcttgtgtattctgattatgagacgaaaccaaccttaagaaagtactcatcttcttcgaatcaccaggttaaggtgaataataaaatcagttctaatgctaggaggtcatcagctaagccccctaagaagtcatccaagaaaacaaacctctcaagccagaaacttagagctctctcttccatctccactgcaaaaaaccatcatggagaaggtggtcaagcgaaggcaaattggcacaatgacatatttggtggtttaatgggatcagaaggagcagttcctctagtgacatgtgtcccaacgaaggttgtgttcactaggatattggaagcagttggaaggccacctctgtctgccgctcgccgtgttagaatggctagtcctccggtacgagatcctccataggcttcaactgtagtgctacatgcggtttatgtcgccagccgtcgacatgcaagttttatgtacattcctgttaattgatgaagaggcagaccattcaatcatccggtaacacctgtgaggagtcgattgacatggttgctccgtaataacttggaacagctgatcccttattagcagtggtgacaacctgtaaaaatgagtaatatttctgactggagactgaggtcatgaatgcttcagagcagctcacatatttctgactggagactgagtccatgaatgcttcagagcagctgagccatcgataccatgaagaggtactcttcggtgtagctagcactggtaactttcgtcacaactgtctcctgtaaagtactagtttcaacattttaggtggcaatttagtcaaaacatttgtgccgtcatatatagcgataggtcatagatttcctaatgccatgtataatccctcaattacatcctgatgtgtctgtcatttgttgtcgagaagtagctggttcaactgtatgtttagagaagcatgtgtacctagtcgatgtaatatattaatatatatc

SEQ ID NO: 23888 - DNA, 631 bp, Zea mays
  Clone ID: LIB3606-013-F9_FLI
gggacttatgaaaaacgaggctatggttaaatcaatgagccgctctggagattacagggaacttctcaagggcccactgtattatgctgctactataacttttgccacgtctcttttatggagaacctcaccagttgctatagcacttatatgcaacttatgtgctggggatggtatagccgatgttgttgggagacgcctaggtaaagaaaagcttccatacaatcccaacaaatcatatgctggaagcatagcaatggcggtggctggttttctggcctcagttgggtatatgcattacttccacactttcggttttattgaggaaacatggtacatggctttaagcttcctcgtggtctctgtagctgcagcactcgttgaatcgcaccccatcagcacagaacttgatgacaatttgactgttcctttgacatcattcctagttggtagcctcatcttttgatgtttaggcgcaaggacgtatgagatgtttctccgtcatgctgtaatcttctgatgtttaggctcaaggacatatgagatgtttctccgtcatgctgtattttatgtaaaacgtttctaaaatactactataattgtgagaatctgtacctagagtttggagaat

SEQ ID NO: 23889 - DNA, 1582 bp, Zea mays
  Clone ID: LIB3606-013-G9_FLI
tcaccgctttcccgcgcgctcctcctcctcgccgcgctcgggctcttctccatctccttcctctcactccgctccctccgccccgccgcggaccccgccgacaagtcccgccccctcctccggctccactcctcttcgacggtgtatcactctccggaggcgttcgcggtggggtacgcggagatggagcggagcttcaaggtgtacatctacccggacggcgaccccaagacattctaccagactcctcgcaagctcacggggaagtacgccagcgagggctacttcttccagaacatccgagagagccggttccgcaccgatgaccccgaccaggcgcacctctttttcgtccccatatcgccccacaagatgcgcggcaagggtacttcatatgagaatatgacggtgatagttaaggactacgtagaaggtttgataaacaagtatccttactggaacaggacactaggagcagatcacttcttcgtcacctgccatgatgtgggtgtgagagcatttgaaggacttcaattcatggtgaaaaactctattagagttgtatgttcaccaagctataatgttgactttataccgcataaggatattgcccttcctcaagtactgcagccgtttgccctacatgaaggaggaaatgatattgacaacaggataattcttggcttttgggctggccatcgcaattccaaaataagggttatcctagcacgagtttgggagaatgacacagaacttgctatcagcaacaatcggatcagtagagctattggagagctagtttatcagaagcagttttaccgtaccaagttctgtatctgtcctggtggttcacaagttaacagtgcacgtatatctgactcaatacactatggttgtgttcctgttattctgtcagactactatgatctgcctttcaatgatgcccttgactggagaaagtttgcggttatacttagggagagagatgtgtatcaactgaagaatatcttgaaatctatatcacaggaggagtttatttcattgcataaatcgctagttcaggtgcagaaacactttgtgtggcattcacctcccgtctcatacgatgcattccacatggttatgtatgaactgtggttgcgtcataatgtaattaagtactgaagcctctcagcctctgagttttgattgataacccaaatgactgatctatcagaaagacactaccaagtctgacagcttgctgttgctaccttggaaacggcaatttggttagttgctctttgaatatccagctggatggatcattgaataatgttagctatgcatggtgcaacgaagagcatgttcaagaaagagttggccgctgtccagcatatatgacaaaactgtagtcctggttaattgatagattagctgattcttttaacaatagttagccttctcatatttcaatcttttcttatatttcacagatcagcttggttgattgtatgtagtgtctcgtgcaatttttttgtgttcaatggcttcaggcatgtaaggttgtctccaacaactttcctataccatctcccatttc

SEQ ID NO: 23890 - DNA, 556 bp, Zea mays
  Clone ID: LIB3606-014-B12_FLI
cgtcggttcacttctccaggtaaggaaagggttcgtactcatggcgccgccgcagccaaagtcgggccttttcgttggcatcaacaagggtcatgtcgtcaccaagcgcgagctgcctccccgcccgtgccaccgcaaggggaaatcaacgaagagggtgtctatggtcaggggcctgatcagagaggttgctgggtttgctccttatgagaagcgtatcactgagcttctgaaggttggcaaggacaagcgtgccctgaagcttgctaagagaaagcttggaactcacaagagggcaaagaagaagagagaggagatggcgggcgtcctcaggaagatgaggtcggctggtacgcacactgacaaaaagaaatagagagcatttcaagttcatggagctggctgccagagattatgttccagtgtctgattttccatacatgtagaacctaatagacatgtcaaagtattatgtatcgaaccagctcatgggattttgctccttccaatgcatccagggtttatgtatcgaaccaatttatgggatcttgctctt

SEQ ID NO: 23891 - DNA, 827 bp, Zea mays
  Clone ID: LIB3606-014-C8_FLI
agcgtctgctgaggctgaggatggcgtcccgctcgtgctcccgctgcgctgccttggcgccgcacgctgcgctcccgctctcctctctcctcgccccctcgccctctgccgcgcgccctcgatccgcgcccctctcgtgcgcagctcggccgtgcaggggccacgcggcggcgtcagcgttgcacggcgcggcagggcggaggcccccgagcgtggcggcgatgtcgtcgtcgacgccgccgccgggatccgtgcagaagtcggaagaggagtgggaggccatcctcacgccggagcagttcaacatcctacgcctcaagggcaccgagtaccctggaacgggtgagtacgacaagttctttgaggagggcatttataaatgtgctggatgtggaactcccttatacaaatcatcgacaaagttcaactcagggtgtggctggccggcattctatgaaggacttcctggggccataaggcagacgccggaccctgatgggaggcggacagagatcacatgtactgcttgtggaggacacttggggcacatattcaaaggggaggggtttaagacgcctaccaacgagcgacactgtgttaacagcatctcgcttaagttcaatccgtcccccgaggaagcctgacggcagatgaactcccaatctgtaactcaacaacagaataaatttggactttgtttgttgctttcacattgtgtagagagctatgagatcgagtttgtcattcctcggatcatttcgaatatgatgtaaaaaatccaatcacaagtgctggtctttgttgataaatcaatgtacctcagtttt

SEQ ID NO: 23892 - DNA, 1197 bp, Zea mays
  Clone ID: LIB3606-014-E3_FLI
tcccctcctcctcctccctgttcctggacgccggctccggcgccggctcctcatcgtccgcgggagactgaagtggtgaacgcggaagaaggttgtcattttgctaagttaaagttagatcattggagcaatgccgccccataagatcgagacggggcaccaagatgtggtgcatgatgtcgccatggattactatggcaagcgcctagctacatcctcctctgataatacaataaagatcattggcgtaagtggaacctcacaccagcagcttgcaactttgagtggacaccagggcccagtatggcaagtcgcatgggctcatcccaagtttggttccatgcttgcatcctgcagctacgacggccgagtgatcatctggaaggaaggaagcaagcctgatgaatgggcactggtacacacctttgctgagcacaagtcctccgtgaattccatcgcgtgggcgcctcatgagctgggtctatgcttggcttgtggttcatcagatgggaacatttcagtcttcactgctcgttctgatggaggttgggataccacgcgtattgatcaggcgcatccggttggtgtgacctcagtttcttgggctcctgcaatggcaccgggagctctaatcagcgcggggtcttctggtcagtttgagtatgttcagaaactcgcttccggtggctgtgacaacacggtgaaggtgtggaagctcaacaacggcagttggcggatggactgtttccccgccctacagatgcacaaggactgggtgagagacgtcgcgtgggcgccaaacctgggccttccaaagtccaccatcgccagcgcctctcaggatggaacagttgttatctggacagcagcaaaagaaggcgagcagtgggaaggccggttgctgtatgatttcaggacccctgtgtggaggctgtcgtggtcactgactgggaatatactggcggtgtctgacggcaacaacaatgtgaccctgtggaaggaagctgtggacggcgaatggcagcaagtgacgactgttgagccataggtctctagagttgtccctcgtctatattgccttaatacttgtagtttttgtgtacctatggccctgtgtgggtagcaagcaggccacggtgcatgactacttgagacgtgatttcaggctcgggcagaagtgaaaaatgaacttgttgt

SEQ ID NO: 23893 - DNA, 410 bp, Zea mays
  Clone ID: LIB3606-014-G10_FLI
gtgatgctggaccagatggcggatgcagctgagaccattgcagtgactccagaggagaacgaagctatacttcgtcttgaagggatgggctttgaccgggcactggtcctggaagtgttcttcgcgtgcaacaagaatgagcagctgaccgccaactacctcttggatcacatgcacgagttcgacaacgatgacgggctcggagggccaccgctatgagggcgctctcgatccctacatcatgcgaacgaaggctgtagggcagtagtaggaaaacgttttgggattcgtcccgtctgttcgctcactctacatattcgtttggctttgctgtttagtacagaatttctagatttacagacttactacttgatatcctgatatagaggtcacggccaagcttacttttt

SEQ ID NO: 23894 - DNA, 1302 bp, Zea mays
  Clone ID: LIB3606-015-D11_FLI
gtctttcttcgcttgcgtgctctcgccaacaagagagctggcgattcagatcgcagagcagtttgaggcgcttggatcagctattggtttgcgttgctcagtgcttgttggaggagtggatcgggtgcagcaagtgttatccatcggaaaacgtccacatattgtagttggaactcctggccgtcttttggaccatttgacagagactaaaggttttagccttaagaaaatcaagtatttggtattggatgaagctgataaattacttaatgtggagtttgagaaatcccttgatgacattctaagcgagatgcctaaagacaggaggactttccttttttcagcgactatgaccaaaaaggtaaataaactgcaacgtgcttgtctcaggaatcctgctaaggttgaagtgtcctccaaatattctacagtagattcacttaaacaagagttctattttgttcctgcagatgacaaggattgctatcttcttcatgttctgaacgagaggctggagagcatgatcatgatctttgtgcgcacctgtgaatctactagactccttgctcttatgttgaggaatcttggtttgaaagctatgtctatcagtggccagatgagtcaggacaagagattaggtgctttgaacagattcaaagcgaaagattgcaatatccttatttgcactgatgtagcaagtcgcggcctcgacattcaaggagttgatatggtcatcaactatgatattccaatgaattctaaggattatgttcatcgggtgggcaggactgcacgtgcagggcgatcaggatacgctgtatctttggtgaaccaatatgaagcccagtggttcgtgctgatcgagcagctccttggcaagaaaattgaccagtgtaaggtggacagagatgaagtccttatacttaaagggcccatatccgatgcaaagagaattgcgctgacgaaattgaaggattccggtggccacaagaagcggagaaatgtgggagatgacgatgaagaggttgaagatcattcttctcattctagaagaccgaaatccttgaagagatcaaacagacgatgaaggctctggagcatgtctggactgcctcgtttcgtgcaagtcctttgtggttcagcgcagatccaccctgtggtggtttggagtgatgctttgcctatttatactagggccagttaagacgttcacttgacaccattccttgggttgaaagcaagtctcccccaattttgtcatcccgacccaaaccatgcttacataaggaatcattttttgct

SEQ ID NO: 23895 - DNA, 811 bp, Zea mays
  Clone ID: LIB3606-031-H3_FLI
gactgctccccctcccccgcaccagcctcaagccctcaaggcctcaaggcatcgccggcgccgcaacttcgctgaggaagcccgcacccctgcccggatccgatggccaacagcaacctcccgcggcggatcatcaaggagactcagcggctgctcagcgagccagcaccggggatcagcgcgtcgccctcggaggagaacatgcgctacttcaacgttatgatccttgggccggcgcagtcgccctatgaaggtggagtttttaagcttgaactctttttacctgaggaatatccaatggctgccccaaaggttaggtttctgacaaagatttatcatcccaacatcgacaagcttggtaggatatgcctcgacattctcaaggacaaatggagcccagcacttcagattcgaacagttcttttgagtatacaggctctactgagtgcgccaaatccagacgaccctctttcggataacattgcaaagcactggaaagccaatgaagtagaagctgtcgaaacagctaaggagtggactcgcctgtatgcgagcggtgcatgagaacgcagtgatgttcttgatgtaataacccatcatacttcagtcctcatctattgccatttgcttgataaaaaataggctggagatatttgccatggaatgaagtctctacatgactatcactctgaattgtttggttgtacacctgtggtcggttccctttaccttggggcacctttgacaaatcagtatctgtggtagaacttgctgatactgtaatatatttgttacttcatgtagaagagct

SEQ ID NO: 23896 - DNA, 1242 bp, Zea mays
  Clone ID: LIB3606-041-E5_FLI
gcggcggcttaaaccctagttctcactcccatcgccgcttcagctccgccgcagcagatggagttctggggtctcgaggtcaagcctggttccactgttaagtgtgagcctggatatggctttgtgctgcacctttcccaggctgctcttggggaatcgaagaagagtgataatgccttgatgtatgtcaaaattgatgatcagaaacttgccattggaaccctctctgttgacaagaacccacacatacaatttgatctggttttcgataaagagtttgagctgtcgcacacatcaaaaactaccagcgtcttcttcactggctacaaggttgagcagccattcgaggaagatgaaatggatcttgattctgaagatgaagacgaggagcgggatgttccagtagtcaaggaaaatggcaaagctgatgggaagaaacagaaaagtcaagaaaaggcagttgctgcaccttcaaaatcaagtccggattccaagaagagcaaggatgacgatgattctgatgaggacgagactgatgattctgatgaggatgagacggacgattctgatgagggtttatcttctgaagaaggcgatgatgattcaagtgatgaagatgataccagtgacgatgaggaggaagacactccaactcctaagaagcctgaggtaggcaagaagagagctgctgaaagttccgtgctgaaaactcctctatctgataagaaagcaaaggttgccacaccgtcatctcagaagacaggtggcaagaagggcgccgccgtccatgtggcaactccacacccagcaaaaggcaagaccattgtaaacaatgacaaatcggtcaagtctccaaaatctgcgccaaaatctggtgtcccttgcaaatcgtgcagcaagtcattcatcagtgagacggcacttcaggctcactcgaaggcgaagcatgggggcaagtgagtcgcaggtccaatagagtcaacaacaaatgcgaaacatgggagaggagggtaagcgagagtctcgaaagagtgtcggtggaagtaggcctaaccttattttgtttagagacgggctatgcgttcgatgtagcaaaacaaggctgtggtttatggtcttcaatatttgggttgtgtatttcgatttttttctgaacgtgtctcggattgttgtgctgcgaattggttgtttctgtcacgtttctttctctatttgaatgacctgtcgcattctatttcttgg

SEQ ID NO: 23897 - DNA, 1006 bp, Zea mays
  Clone ID: LIB3606-041-H5_FLI
cccggccacgcaggcggacatgcagaacctcggcgccctgctcgcggagtggcgggcgaggatcacggaggaatccgtcgccaagtctttgcctcctcaacctcaaccccttctcctcaccgcgacgctctacttctccaaccacctgttcggcacgcccgacggcaacctcgactaccccgtggacgccatcgcgagcagcctcgactgggccaacgtcctcaccttcggcttccgcggggacagcggcgtcaccgcggccgacgcgccgctctacgacacgtcctcgcacttctcggccagctacggcgtggtctcgtggctggacgcggggctccctccgtgcaggctggtgatggggatacctctgttcgggaggtcgtggttcctcaggaacaaggccaagaacgggctaggcgcgccggccgccgccgccgggacgaagcagaggaggagcaaccagactgggataatcgcgtacgcggagaccgaagagtacctgagctctcaaggcaccgtcgtcacctacgacgaccagtcggtggcggagtatttctgcagcggtgacctctgggtcagtttcgacggcgcgcaggtcgtgcagcggaagctggagttcgcggcgaggtctcagttgctcggctacttcctctggaccgtcggcttcgacgattcgaacagcacaatctccaggaaaggtcagtagctagctactgagacatgacagccatcggagtcatggcaccagtatgctcagggtggttttggaatcatgcacgcaggaggttcaaaccaatacgttgcatttaactcgtcttcagtatcacttggtagctgctattcgagatctctcagctgtttgctgtcttcagtacttctgttggttattctgtttcgttaaagcgtatcagtaaacaggccagaaatgtaaaataatagtttcaggtgatatattcatcaaagcgaacgtctaatacatgttcaggtgtatttgttgacttctctc

SEQ ID NO: 23898 - DNA, 1704 bp, Zea mays
  Clone ID: LIB3606-042-A12_FLI
ccgggagtctcccgatccttcttccaccacctcaccggtggtgtcagggccggctcgcggacggtgcttggactgcccccgtcccgtcatggatcgcgccgagctcaccaccgaacaggttctgaagcgagatattccatgggagcattacatgtcaactaagcttatctccggaacgtgccttcagcttttacggcgatatgaccacaaaccggagagccagcgagctcctttgcttgaggaggatgggccagcatatatccgagttttcctgaatatcctgcggagcatctccaaggaagagactgtggaatacgtgcttgcactcattgatgaaatgcttgcaacaaatcctaagcgtgcagcactgttttatgatcaatctttgtcgggtgaagatatttatgaaccgttcttaaggttgttatggaaaggcaactggtttgtacaagaaaaaagttgtaagatattgactgttataattagtgcacgaccaaagcttcagaatggcacacttccaaatggagatgcttcgaattcgaagagcaagcttacttcaacacacgatgtattgagaggtttggttgattggctctgttcacagctgaggaatcctacacacccgagctgctctattcctacttctatccattgcctctccactttgctaagagaaccatatgttaggacattatttgttcaagctgatggcatcaagctgctcattcccttaatttccccagcttccacacaacagtcaattcagctcctttatgaaacttgcctctgcatctggcttttatccttttatgatgctgcagttgattatttgtccaccacaagggttatgccaagacttgtagaggttgtcaagggctctactaaagagaaggtggtcagagttgttgtgttgtccttccgcaatttgctggcaaagggtgcatttgctgcccagatgatcgatcttggattgccacaaatggtacaaaacttgaaagctcaagcatggactgatgaggatctgttagatgctctgaatcaactagaggtgggactcaaagaaaacctcaagaagttgagttcctttgataagtacaaacagcaagttcttcttggtcatctggactggtctccaatgcacaaagatccaagtttctggcgtgagaacattaacaattttgaagaaaatgatttccagattctgcgagttctcatgacaatcattgacacatcaagtgacaccaccgctcttgccgtggcctgctacgacctctcacaattccttcagtaccatccatctggccgaatcgtggtggcagacctcaaggctaaggaccgagtcatgaaactcatgaatcatgagaacactgaagtgaggaaaaatgcattgatctgtgtgcagaggctcttccttggcgcaaagtatgccagtttcctgcaggcttgagaaaagctgagtcttgtatttagatccagagaacccctggtcatttttcagaatggctgttgagaaagaaaaaccttgaaaattcttgttcagtgtatcctattgttatttgatttctgaagccgatgtataataaataatcagagtcatagaatgctcgatgtaataaagtgtccatgggcttgttgattcatttatgtaaattttgacttgtaacattagcaaacctcttttttgttattcttctgcctgacaac

SEQ ID NO: 23899 - DNA, 1506 bp, Zea mays
  Clone ID: LIB3606-049-F1_FLI
caaaaggatgatctgatgtgtttacacttctttattccatttgatgaactgttagtttctggtgtgaagtttgatgtgccagtagaattttatctgtggccacaggcaaaggatgcaagctttatgtacatttaacatgcatgcaactatgctgtattatgttccagcagaagctatgttttaacttggcctttttatgctacatatgtatagccagttaaaagccctgtgacgatttgtggtgatattcatggccaattccatgatcttttagaacttttccggattggtgggaaggtactcagtgcactgcataatctttgtgcattatatctctttgcacttttgatgctattcatttcattctccaagagctgatagaccattctttgttgtttactagtgtccagatacaaattatttgtttatgggtgattatgtggatcgtggctattactctgttgagacagtaacgcttttagttgcacttaaggtgcggtacccgcaacgcattacaattcttcgtggaaaccatgaaagtaggcagatcacacaggtgtatggcttctatgatgaatgcctacgaaaatatggcagtgcaaatgtctggaagatcttcactgatctttttgattattttccgttgacagcattggtggaatcagaaattttctgcctccatggtggtttatctccatccattgagaatcttgataacgttcgcagtttagaccgtgtccaagaggtccctcatgagggacctatgtgcgaccttctgtggtctgatccagacgatagatgtggctggggcatatctccacgtggtgctggatacacttttggccaagacatatcggagcagtttaatcacaccaacaatcttaaactcgtagctcgggctcaccagttggttatggagggatacaactgggcacatgaacaaaaggtggtgaccatattcagcgcacctaactactgttaccggtgcggcaacatggcgtccatcctcgaggtcgatgactgcaggaatcacacatttattcagtttgagccagctcctaggagaggtgaaccagacgtgacgcggaggacacctgattatttcctttgagttatctgccagaccatttttggaatttgcccaatgttggaatagtgatgctagccagtaacaatttttgttggatctatatgataacttaaccgaccagcaacagtaagaaaatgtggaagctgcatctgtcattgcaagaggtgctcgctaacagtaacaggtcgacgacctatacaccccaagctgtcaaaagatccgcttgtctacccaacccaccaagtggtgcctcccttgggctttgggacgtcgagtttacgctttcagcgtagagttgcctcagttctgtcttgtgtgtcagctagttttgtgtttgtgtcttgtgtggttgctcgttgtagcttctgtgattaaatgacaacagacaagctggtctcgagtgttgcaagaattgg

SEQ ID NO: 23900 - DNA, 1665 bp, Zea mays
  Clone ID: LIB3607-005-G11_FLI
gcgcagagataggcgtcttcgtactcgcctacctccgcggctcaaacctttcccccttctcccaattccctccgtcggccgccgctccatcccgtacgacgacaccatgagggagtgcatttcgatccacatcggccaggccggtatccaggtcggaaacgcgtgctgggagctgtactgccttgagcatggcattcaggctgacggtcagatgcccggtgacaagaccattgggggaggtgatgatgctttcaacaccttcttcagtgagactggtgctgggaagcacgtgccccgtgctgtttttgttgaccttgaacccactgtcatcgatgaggtgaggactggcacctaccgccagctcttccaccctgagcagctcatcagtgggaaggaggatgcagccaacaactttgcccgtggtcactacaccattggcaaggagattgttgacctatgccttgatcgcatcaggaagcttgccgacaactgcactggtctccagggcttcctcgtcttcaacgctgttggtggaggaacgggctctggccttggttccctcctcctagagcgcctgtctgttgactacggcaagaagtccaagcttgggttcactgtgtacccttccccccaagtttctacttcggtagttgagccatacaacagtgtactgtccacccactccctcctcgagcacactgatgtggctatactgctggacaatgaggccatctacgacatttgccgccgatcccttgacattgagcgcccaacctacaccaacctcaacaggcttgtgtcccaggttatctcatcccttactgcctccctgaggttcgatggtgctctgaacgtggatgttaacgagttccagaccaacctggtaccctacccgaggatccacttcatgctttcttcgtacgctccagtcatctctgctgagaaggcctaccacgagcagctctctgtggctgagatcaccaacagcgccttcgagccatcttccatgatggccaagtgcgacccacgacatggcaagtacatggcctgctgcctcatgtaccgtggtgatgtggtccccaaggatgtgaatgctgctgtggccaccatcaagaccaaacgcaccatccagttcgtggattggtgcccgactggcttcaagtgcggcatcaactaccagcctcctagcgttgtgcctggtggcgacctggccaaggtgcagcgtgctgtgtgcatgatctccaactccaccagtgttgtggaggtgttctcccgcatcgaccacaagttcgacctcatgtacgccaagcgtgccttcgtgcactggtacgtcggtgagggtatggaggaaggtgagttctctgaggcccgtgaggacctggcggcgctcgagaaggactacgaggaggtcggcgctgagttcgatgagggcgaggatggcgacgagggtgacgagtactagagaagtttgctgatgacgcagcatcaggccagtgtgctgcccttatcccgtgatctgccgtgagttgctcctgctatcgtgttatgtgtgtctgttctgaagtattgtgtggtttacaacacctgatgttgtaagagttgttaattcccctgcattgctaccgggttattgagaataattatggctgtttacgttgttgcttc

SEQ ID NO: 23901 - DNA, 672 bp, Zea mays
  Clone ID: LIB3607-022-G7_FLI
gcagatctttgtgaagacattgactggcaagaccatcaccttggaggtggagtcgtctgacacaatcgataatgtcaaagccaagatccaggacaaggagggcattccaccggaccagcagcgcctgatctttgctggcaagcagctggaggatggccgtaccctcgccgactacaacatccagaaggagagcaccctccacctggtgctccgcttgcgaggtggtatgcagatctttgtgaagaccttgactggcaagaccataaccctggaggttgagagctccgacaccatcgacaacgtgaaggcgaagatccaggacaaagagggcatccccccagaccagcagcgtctgatcttcgctggcaagcagctggaggatggccgcaccctagcagactacaacatccagaaggagagcactctccacctggtgctccgcctccgcggtggtcagtaagccatgggtcatttaagctgctgctgtacctgggtatctgcgtcgtctggtgccctctggtgtacctctatatggatgtcgtcgtctaataaacatctgtggtttgtgtgtcatgaatcgtggttgtggcttcgttggtttaatggacctgttgtgtcctctgtgtgttgtacccaaaactcttctgcagcagtatggctcgaatccttatg

SEQ ID NO: 23902 - DNA, 1594 bp, Zea mays
  Clone ID: LIB3607-049-C1_FLI
gccccctcctccacccttgcgccgcgctttcacagctctcccgcctccggatccagatccgccgccaccaacgcctgctcctccccctcctgctgcaccaccaccatcaagaggtccagcagggcggcagcggcagcggcggcggcggcgacatggggcgtgacggcggtggcggtgtcgccggcggcatgtctgactcggtgctccggaaggtgctcctctcctacttctacgtggcggtgtggatcttcctctccttctccgtcatcgtctacaacaagtacatcctcgacccaaagatgtacaactggcccttccccatctcgctcaccatggtacacatgggtttctgctcatccctcgccgtcgcgctcgtccgcgtcctccgggtcgtcgacctccccacatcgccctccatgacgccgcagttctacacctcctccgtcgtccccatcggcgcgctctacgcgatgtcgctctggttctccaactcagcctacatctacctgtccgtgtcattcatccagatgctcaaggcgctgatgcccgtcgccgtctactccatcggcgtcctcttcaagaaggagaccttcaggtcctcctccatgctcaacatgctctctatctcattcggtgtggccatcgccgcctacggcgaggcgcgcttcgacgtgcgtggcgtcgcgctgcagctcgccgccgtcgccttcgaggccacgcggctcgtgctcatccagatcctgctcacgtccaagggcatctcgctcaaccctatcacctcgctctactatgtcgcgccgtgctgcttctgcttcctcctcgtgccctgggccttcgtcgagctgcccaggctgcgcgccgtcggcaccttccaaccggatttcttcgtctttgggacgaactcactctgcgcctttgcgctcaaccttgccgtcttcctgctggtcggcaagacctcggcgttgaccatgaacgtcgcgggagtagtcaaggactggctgttgattgccttctcgtggtccgtgatccgggacaccgtcacaccgatcaacctgttcgggtacgggatcgcgtttttaggggtgggctactacaatcatgtcaagctgcaggcgctcaaggctaaggaggcccagaagaaagccacacaggctgatgaggaggccgggtcgctcttgcaggagcgcgatggacacagtgatcgcaagagcgacaatcaggcctagagggccagatctgatcctggcttccccatattgggcatctgatgcaaggtgcaaagactggtgtttggtctgtggttgctttcaaggaggtgtgtgccggttgcttgcacatctttaactctgggtctgaagagcaaatcagaagtatttatggcttaggaaatatgcacctgctttgctggagaactttgtcctgctatttatttatagacacttctgatctacaggaaggcggccattcctcactacctctctttgcccattgtctacatttatttgttctactagtagattagggactacagatgtactcctgcagatggttaatttggtggctattttcgatatataatgagcttacagtaatc

SEQ ID NO: 23903 - DNA, 890 bp, Zea mays
  Clone ID: LIB3607-053-A1_FLI
gcaaccagcagcacctccatcgaatcttgtaggcaaagccaataatcaatcaccagcgacatcaattccttgcccggccgcgcgtcgaggaaccgcgccgcacagttccagttccatgggcaaggtgcgctccttcttctgccgcgcccgcagcggcaagcgcggcggctcccggccaggctcgtcgtcctcgtctctctcgtccccgtgcccgtccgcgaggagggcgtcgccgccggccggggacgagacggagcgcgtcttccgcaagttcgacgcgaacggcgacggccagatctcgcggtccgagctggcggcgctgttcgagagcgtgggccacgcggccaccgacgacgaggtgtcgcgcatgatggaggaggccgacgcggacggcgacggctacatcagcctgcccgagttcgcggcgctcatggactcggcgtccggcgacgccgacgccgtcgaggaggacctgcgccacgccttctcggtcttcgacgccgacggcaacggcctcatcacgcccgccgagctcgcgcgcgtcctgcgcggcctcggcgagtccgcctccgtcgcccagtgccgccgcatgatccagggcgtcgaccgcaacggcgacggactcgtgtccttcgacgagttcaagctcatgatggccggcggattcggcaggatcggtgcctaggaacaaggattctgccctgctccgctccccacaaaaaaattggattcatttcattctatgtacatatatgccctatagatcacactggaatcacggagatgtttcctaggtccagattatttgcacgcccagcggcagcacataaaaagcccccattttatttgctagtttggatgttcaaacggattgttttggcttcatcaat

SEQ ID NO: 23904 - DNA, 1339 bp, Zea mays
  Clone ID: LIB3607-053-D4_FLI
ccaaagagagttggtgctgatactaagcctcatacaaggaaggccagttatgcaatggaaacagagtcagcgaaattaaagcgtaatgcacggaagagccctgcagtgccatttgagccttctcaaacaaacaccaccattgaaaatgagaagacaagacggaatccaaggaaattaagtagcactcctgctgagtcagttcccgatggccagttaacagaacttgagaaggttaaacgtagccttaggaaggttactagttccatggttgaaacctcaaaggtgcctagcccaacaactgagattcctgaccgtcaagaggtacaatgtgagagaccactaagaagtgcaaagcaagctccaattcatgttgagaatcaagaacctcagaatgttaatctatcggacaatgcaaagatggatattctggtaccagatatccagcctgacgtggaagttgcttcagatctagtcacaatcacaaatgaagaaaaagttgatgagacaccgtctgttgttgctccagcgactgaaattatgccactgcaagacatcaacagcgaagaaaatgctttggtgaatgatgtggaagagagatccaaagaagaacatccatctactgataacctgaaaggcagcaagaggaggtcttcattctcagttaagcctgaatatccagaaaatggctccaaaaattctccagctctgccaagctacatggctgctacacaatctgcaaaggcgaaactgcgggggaattgttcaccaagacttagctctgattcagcagagaaaaacgggttcactcgtcgtcactcccttccgtcccctaacaatggtaagataatttcacattctccacgtacgcaaaggccaacccatgctggtggcaaggacggagcaaaaggcgacaaggctatgctgtcatcaagagatgcgagcgagagaccactgaaagctgagtggagacgctgaggtggcgaatcaaaaccccaaaccctccatttggttagtgcaactatttgggttggtggatggcgtctgcagtttgctccgattgttttgcttgtgatgtaaaaaagacgttatcatcatcatccgaggcgatgaacgggttcagctttgttgtgatgaatctgctgggagtcaacttatttacagggttttgggtcatgccttttgtgatgtatagctgaagtattttcccggtttgtttttgtttcccagacccccagactcccccctccccctcctgcttgctgagagggctgctgatgttagagagaacgagaacctgtatggattgagttgaacagaacaatcttagtcccgtttggtc

SEQ ID NO: 23905 - DNA, 844 bp, Zea mays
  Clone ID: LIB3607-053-F1_FLI
gctactactcactagcggtagctcacaatggcaggcacaaagctagtatcactggggctcattgttctcatgagcatggggttagcaaatgctgtgagggtggctagattctctactgctgatgggagtggacaaggagggggagggggtggcggttacgtgaatggtgcgggatcaggggtcgggtctggcaccggagtaggtgacagtagtccggagggtgtccatgcaagtgctggagggggtggcgcaggcggtggaactagccagtatggtggatctgcatatggtgtagggttagggtcaggttcggcgagtagcacgtacagtggtagtgatggagggtcttccagtgctggtggtgctggcgggggcggtggtggcggaaaagctggaggttcttgggactccagcgctcaagggtctggtagtggcgtcggttctggctctgcctattctaacaggtatccgtatgggccaagatatgcaggtgcaactgctaatggcaacggtggcggcacggggaacagccagaatggcggtgctggcggcggtaaaggttctggatctgggttcggcgatgccattccctgatttctgtatcgagtgaatctaaagctggagcccatcgccctttcttgttttggagtcacaggattactgtttttgttttgttttttttcttttctagctgtgttgtgcttttgttagaatttgaattaataaagggcccggctgttcaagtaacagtagcagtctagtgtaagcctgtaaaggtgcagcttatgcgaagatgtaagcctgccagtttatgaaagaaatcatactcctttgtcatttggtc

SEQ ID NO: 23906 - DNA, 727 bp, Zea mays
  Clone ID: LIB3606-015-F5_FLI
ctctcgtttttcatccgccttcgcctccaaccgcgtgcgctccacgcctcctccaggaaagcgagagcttctgcataagaacaacaaatcaaaagcgtgatcagctcggtgccaacaaaacctcaacaaccaagtttcatgtctgatctcgacgtccagcttccatctgcctttgatccgtttgctgaggcaaatgctgaggactctggtgctggtcctggaacgaaggattatgtgcatgtgcgcatccagcagcgcaacggcagaaagagtctgactacagtccagggtctgaagaaggagttcagctataacaagatcctcaaggatctgaagaaggaattctgctgcaatggtactgtagttcaggacccagagctaggccaggtcattcagctccaaggtgaccagcgcaagaatgttgctactttcctagttcaggctgggattgcgaagaaagagaacatcaagattcacgggttctaagggacctgtaaatgcttgtgccctatattgtgtgcctcaacatattggggagcttgaagcatcgacagttgctagtcattgcttacttatataagaacataagtagtatttgctattgtcaagtgtgccttgcttgatgcaagttgtgttttcgtctcattattattatgcacggccatcgtacgtgtatggcttgtatgggttattgccaacttaataaaagcacactctgtttgcctat

SEQ ID NO: 23907 - DNA, 1013 bp, Zea mays
  Clone ID: LIB3606-015-G11_FLI
cttacctgtttctcttccagcgcgctccttctccggcgcccgtgcgtctcccgttagcggcgcggtttctggctcctcgacgtcggaggagggccagcagctgcagtcggagctcatcttcctgggcacgggcaccagcgagggcatcccgcgcgtcagctgcctcacgcaccccaccaagatttgccccgtttgcaccaaggcggctgagccagggaacccgaacaggaggcgcaacacctctatccttctgcgccacgccaccccgtctggcaccacaaacatcgttgttgatgccggcaagttcttctatcactcggcactccagtggttccccacgtttggtttgaggacaatcgatggtgtcattattacccattctcatgctgatgccattggagggcttgattgtcttcgtgattggacgaacaatgttcagtcatcgatcccaatttatgtggcagaacgtgattatgaggtgatgaagatgacccactattatctcatcgacacaagtgtagttatacctggagccgcagtttcagcattgcaatttaacattataaaagaggaaccatttatggttcacaatcttgaggtgattcctttacctgtttggcacggtcagggttaccgctctcttggttttcgttttggtgatgtatgctatataagtgatgtcagtgatatacccgaagaaacatacaagcttctggaaaactgtgaacttcttataatggatgctctaagacctgatcgttcttcatcaacacacttcggactaccaagggctcttgaggaagttaggaaaatcaaaccaaagaaaacactgtttactggaatgatgcatttgatggaccatgagaaagtaaacagtgatcttgccaggctgattggaacagacggtcttgacatccagcttagctatgacggtctcaggatacctgtaaggctctagaattattattattttttggaaaaaatatttatgtattgggtgctgctaattgatg

SEQ ID NO: 23908 - DNA, 1232 bp, Zea mays
  Clone ID: LIB3606-016-E6_FLI
tcacctccactccaaacaaacaagggacggtgagcgaggaaccccaccccacgtcgccctccccccacctttctctctagtctctagtttctagtctctacccccaggccccagactcctgcctcttctctctctcgcccacccgccccggccccaatgtcgccgcccctcgagccccacgactacatcggcctctccgccgccgccgccgcggcgccgccgacaccgacctcctcctcgtcgtcctcgtcctcgccggcgccccgcctcaccctccgcctcggcctgccgggctccgagtcccccgaccgcgaccgcgaccgggaccgctgcgaggacgtcgccgccgcgctctccctcggcccgctgcctgctacccccaaggcgcccgctgccgtctccgccaagcgcgccttcccggaccccgcccagcgccccggcgctgccaaggctagcgacgacaagcaggcgtcccccgccgccccgccggccgccaaggcgcaggtggtgggatggccgcccgtgcggaactaccggaagaacaccctcgccgcgagcgcctccaggagcaaggcgccggcggcggaggacgccgcgtctgcggcccggcccatgtacgtgaaggtgagcatggatggcgcgccctacctcaggaaggtggacatcaagatgtactccagctacgaggacctctccgtggcgctccagaagatgttcagctgcttcatcgctggtcaaagtggcctgcataaatcatcgagcaaagacaggctgactaatggctcgaaggtggatgccctcaaagaccaggagtatgtacttacatatgaggataaggatgcagactggatgcttgtcggtgatcttccctgggattattttacctctatctgccggaagctcaaaatcatgaggggctctgatgctgttggaatagctccaagaaccatagagcagacaggtcagaacaaataagcttggtctttgcctgcacccacgcaagaaatctgagctagctggaaggccatgttgaaggcttaaatagttgctcggaattatcaaaagtcgtcaaatgttagtgtagtttccacgtgttcttgagacgtgtgtatttgtatgtctgtgatgtgatccgtcagatctgttcttgtgcccttcaaaggccaaatcagggagctctctgcttcctgtgtatgcttgctttttccagtattccctgttattctactatg

SEQ ID NO: 23909 - DNA, 681 bp, Zea mays
  Clone ID: LIB3606-017-A3_FLI
ctcctcgtccccgacaagccaatcgaagccgagatacggccatggactccaccggcaccggagcagggggtaaggggaagaagggagcggccgggcgcaaggtcggcgggccaaggaagaagtcggtgtcgaggtccgtgaaggccgggctccagttccccgtcggccgcatcgggcgctacttgaagaagggccgctacgcgcagcgtgtcggcaccggcgcccccgtctacctcgccgctgtcctcgaatacctcgccgctgaggttctggagctcgccggtaatgctgccagggacaacaagaagactcgcattattccgcgccacgtgcttctggcgatccggaacgacgaggagcttgggaagctgttgggcggcgtgactatcgctcacggcggtgtgctccccaatatcaaccctgttctgctgcccaagaagacggcggagaaggcgtccagtgtggggagcaaggaggcaaagtcgcccaagaaggccgccaagtcccccaagaaggcatagactgactgtctggagtgatctgatgtttagcaggaccttgataccagtatgcggtgatgcgtaggctgtagatgggtcgaatgtgcttgtgtgtgtatgtgccctgctgcaagttgccctttgttatttaaaatggaagaagaaatgccttgtttctctg

SEQ ID NO: 23910 - DNA, 1208 bp, Zea mays
  Clone ID: LIB3606-017-B9_FLI
cctctccctcccttcgttcgccatggcaaccgtgttcctccgttccctcgccatggccatggccgacaccgcgctcccgcccacccacaagctcctccctacggtttccctgccgctcctcccctcgtccacccgcgccgcgccgctcctcctctgcgccagccgccgcctgccgcccgcgcccctcgttgcctcctccgacgccgtcgagacgagcattgaatgggttgacgatgaggaggaggaggctggagaagccttcgacgaggagggtgaggatgttgaggaggaggtgctggcctcaggcgacgagggggaaggggagtacgccgcggtggagccgcccgaggaggcaaaggtctacgttgggaacctcccctacgacatcgaaagcgagggactcgcgcagctcttcgaccaggccggcgtcgtcgaggtcgccgaggttatttacaacaaagagactggccagagccgtgggtttggctttgttaccatgagcactattgaggaagctgataaagccattgagatgttcaaccgctatgacattagtgggaggcttctgaatgtaaacagggcatctcctaggggcactcgcatggaaaggcctccgagacaatttgcgcctgctttcagagcttatgttggcaacttgccatggcaagctgatgactctaggctggtgcaattgttcagcgagtacggagaagtcgttaatgctgcggttgtctatgatagagaaaccgggcgctcacgaggattcggttttgtaacgatggtgtcgaaggaggaactcgacgacgctatctctgccctggatggacaggaattggacggccgccctcttcgggtgaacgttgcagcagagcgaccacagaggggcttttgatgcggcggtacgagagagatggctgcttgtttgtgatgagagcacggagacacaacgcaggaggaacggtacaaattagcggaagctgatgctgtcacaagttgctagatccctcccttagcttcctgattttggttcttgtcgacatcatcatgagttaaattatccaagtaggcttctatgtttgatctatcccgattcccgatgccttatcaatttatcatcgtggcaaatgttttgttggtaaaaccataggagcaaacggagattatttatatctgacgtataaaaccgtacccagtgtgttgcatttaac

SEQ ID NO: 23911 - DNA, 762 bp, Zea mays
  Clone ID: LIB3606-017-E5_FLI
caacaagggctaccgcccaccggccaccaccccacgcgcgtctcacgccatgggcagcgcgtcgtccccgccatcgcacaggcggtggagctggggctcggcgctggcgggcgcggcgacgacggccgccgccacggccctagtgctgtgccggccgcgggacccgcggttcgagctcatctccatcagcctgtccgccttccacttccgcccgccggcggcgctggacatcgggctcaccctcaccgtgcacgccaccaaccccaacgtcgtgcccgtgcgctacgggccctccaccgtctccatcctctacggcggcgcgcacctcggcaccgcccgcctcgacgccggcgagcagcccgccacctcctgccgcctgctccacctcccggcgcgcctcgacggtgtcgagctcgcgcaccgcgcccgcgccctcctctccgacgtcgcgcgccgccacatggagctggatgcggccgtcgagatcgccggcgaggccgcggtgctgctctggtcccgccccttctccgtccgcatcgacagccacatcaccgtcgaccccgtcttcctagaggtcgtcgagcaggagaaccgctcggagatgcagctctacctcgcttgaattttttttaccaactagactagagtagatgcgatgcccaaatatcatatcaagtctagtcaaaaaccctatcgcttatcttgtgcagtgctcaaaatgcaaaaccttatcatttgttcgcacaatgcaatgcagcattc

SEQ ID NO: 23912 - DNA, 1346 bp, Zea mays
  Clone ID: LIB3606-017-F8_FLI
gtcgcacgccaccacccagaggccagagcgcaaaacccacgaccccacctcgcatcctccccgtcgccgtcgccgtcgcaatcgcaacccacgccgtcgcacgccacctctccctcggctccgacgatgtcggcgccatccgacgccgcggcggcatccgcagctcccgcgcccgcgccgacgactgccgccgcctcctctagcggcgggttcaccttcaagctccacccgctggtcattgtgaacgtctccgaccaccacacccgcgtcaaggcccaggccgcctgctctgcggacagctcctccccctcgtccgggccgggggccgggcagccgccgagggtgttcgggtgcgtgatcggggtgcagcgcgggcggaccgtggagatcttcaacagcttcgagctcgtgctcgacccagtctccggcaccctcgaccgcgccttcctcgagaagaagcaggagctctataagaaggtgttccctgacttctacgtgctcggttggtactccactggaagcgatgtgcacgacaccgacatgcaaatccacaaagccttgatggatgttaacgaaagccctgtttatcttctattaaatcctactatcaacctctcccagaaggatctccctgtgactatttatgagagtgagttgcatgtcatcgatgggtgtcctcagcttatctttgtcagatcaaattatacaattgagactgtagaggctgagaggatatctgtggaccatgttgcccatctcaaaccatctgatggtggttcagcagcaactcagttggctgctcatcttacaggaatacacagtgccatcaagatgctcaatagcagggtccgtgttatccatcagtatcttgttgccatgcaaaaaggtgacattccaatggacaattcgctgcttaggcaagtctcaagccttgtaagaaggctaccggctacggaatcacagaaattccaagatgactttttaatggaatacaacgacactctcctcatgacttacctggcaatgttcactaactgttcaagcacaatgaatgagttggtcgagaaaatcaacacaagctatgagagaccgactaccaggagaggaggccgaggtgctttcatgtagctcacctgccatgatcctgctgctgctttcatctgtgaggatttttcgggagtagcttatgtccctggtcatttttttgcatgcaatctatcatgcgcaatcggctatacggcagctcttgagtcacttcaaactttctaggcaaaactgatgatttgctggaattgtatcagatcccacctgtgctgaagttgatatgtaaagttcctcacccagtt

SEQ ID NO: 23913 - DNA, 1514 bp, Zea mays
  Clone ID: LIB3606-018-B12_FLI
tcatctccactgtcctgatgactgttggtattgctgtaatcagctggttggcccttccagctaagtttaccatcttcaactttggtactcagaaggatgtctccaactggggcttgttcttctgtgttgcaattggtctgtgggctggtctgattattggttttgtcacagaatactacactagcaatgcatacagtcctgtgcaagacgttgcagattcttgcagaactggtgctgccactaatgtcatttttggtcttgctcttggatacaagtcagttatcatcccgattttcgctatcgctgttagcatctatgtcagtttctccattgctgcaatgtacggcatcgcagttgccgctcttggtatgctgagcacaattgcaactggtcttgctattgatgcttatggtcccatcagtgacaatgctggtggtattgctgagatggctggaatgagtcacagaatccgtgagagaactgatgctcttgatgctgctggcaacaccactgccgctattggaaagggatttgccattggttcagctgctcttgtgtctctggcgctttttggtgccttcgtcagcagagctggagtgaaggttgtcgatgtcctctcccccaaggttttcattggtttgattgttggagccatgcttccctattggttctctgccatgaccatgaagagtgttggaagtgccgccctaaagatggtggaggaggtccgcagacagttcaacaccattcctgggttgatggagggaactgccaagcctgactatgcaacctgtgtgaagatctccactgatgcttccatcaaggagatgattcctcctggtgctctggtcatgctcactcccctcattgttggaaccctcttcggtgttgagactctctctggtgttcttgccggtgccctggtttctggagtgcagattgccatctctgcttccaacaccggtggtgcatgggacaatgctaagaagtacattgaggctggtgccagcgagcatgccaggaccctcggccccaagggatctgactgccacaaggctgctgtgataggtgacaccattggtgaccccctgaaggacacctcgggcccgtccctcaacatcctgatcaagctcatggcggtggagtcccttgtgtttgcccccttcttcgccacccacggtggcctgctgttcaagtacctgtaagggccacaccaatcatcacagcagaaatatacgaccgaccgaccgtggacatctcgaataactcctgccaaatcgccagttcatgtgtattgtgcgctagccgcctagctgcactgctgtttttttggtctcattgttcgtattttctccttggcccctccccctagaggcgttactgttagccttactcttactccctgtagctgcacgtagaagagaactgttgtcctgcaggtctggcaaattttcccagtctcttgatgatggcgatgatgttgaaatctttgaacaatgatacatgattgttgc

SEQ ID NO: 23914 - DNA, 1096 bp, Zea mays
  Clone ID: LIB3606-018-F12_FLI
ggtgccctctttctcggagcagcgctcgaagcgcccccgcagcgtcgccgtcccgtcatccgtggagcacctcaagaggccgacgcggctctggagcctccacgacgagatcgtcatcctgcggggcttggccacgtaccgcgccaagcgtggcgtcctccccggctccacgtacgacatttctaagctacacggccgcatccggagcgagctcagcgttaaggtaaccaccacgcagctcggtgacaaggtacggcgtctcaagcagaagtacaacctgcttgcgtcacgtggcaagagcgggcgggatccagacttgcccagccagcacgaacagagcgtctatgagattggcaagaaggtttggggaggaagtgctaacggtggaggaagtaccggtggtgatgggtacgagattggtggtgacagcgaagaggagcatgagtttcgagagagtgacgaggatgtggagaatggccgagatgaacgtgcccgcaagaacaggagggttatgccaatcgccatggcaaacgggaacggggctgggttgggggctgtgaatgccaatagcagagggaagtttgaaactgagaagggaaaggatgcttacccctacctttgggagactgtggaggatctgtcaaaggagcacccgaacggggtagcattcaagaaggccttcgagtcgatcgaaggccccaaagcgcgtgggatggaggaaaaactgcgaaagttcaggttgacagagatcagacaccagctgcgccgtatggaactgatgaaggagacggtgaagatggtgctcgatgcgctggagggttgaccgagactgaatggtcttctggtcttcttttgtttctagatagagtttttgtggctgagttacttaacttttatggacaaaggtgcacttgtctcagtaagaatataggtacagaaagaaagtgagactgatggtgtttcccttgttcctgtggatcatagtgttttgtgtgtcatacatgatacatgtgctaacttttgcgttatatggtatacagtctgtatgtttagtcaagtttggtttgatgcatcctcattatgaaggttttgttct

SEQ ID NO: 23915 - DNA, 738 bp, Zea mays
  Clone ID: LIB3606-018-G12_FLI
caagtccgtttgtgttgcgtggcgtgattcgtgtgaaacaccttcgagtcttcgatcttcttgggcgccgccaacgcgccggcgccctccgcccctgcgcctcagcctggtaccgtgcctgtgccgttctggtcctccgccctccgcatctgcctggtaccgtgctagtgccgccttcgcatccgtcctccgcctgggtctccgccctccgcggctccgccttgcgactttaccctgcacggcccgccgccggccggtcgcccgtccggagccactgacccgagtttccgtccagcactccagcgaccagcgcctgttcgtccagagtaccaacagatctcgtcaagaggtctgaaggatgaggaaaggactgcatcctcagatgcaatggatttcatatgtgacgcagagtggtaggctgatcaatatcatgatgaccaaggtgaatcatactggcaaagtgtaccacatgagggccaagcggcaaatggctcaaagcctcggccagattgcgaagttcaaacgtcgatatgagcaggaagcagagaaaagcaaagacaagtaggatggtgttgggaaggaggtgtagcctctgtggtcttagtcagttctgttgactgcgaagttttcagctaaggatcttcgattgaatgattttattttagatcacatcatcttttgctccacttcataattgtgttgtaccccatcttgagcaaacactttggcacttgttgc

SEQ ID NO: 23916 - DNA, 2033 bp, Zea mays
  Clone ID: LIB3606-019-A3_FLI
gctgcctggctctgctctccaacccggtcgccgcctcgccctcgccccgcggcctccgcttctccgccaaggacatcgcggcggtggaggccgcgctgccgcgacacggcagcagggcgtcgtcgtcgtccaagaccaccttcttcgaggtcgaccgcccgctccgcccgcccaggggcagctcggggccctgctccacgctgctgctctcgcactccttcgcgttcacgctcaccaagccgcccgtcaccgcggcctactcgccgccgccgtgcctgtccggctccgacgcgccgccggtctcgctcgccgtgctcgagtggcgcgccgagtgccgcggcgcgcagtacgaccgcaccttcggcgtgtggctcggcggcgccgagctcctgcgcggcagcaccgcggagccgcgccccggcggggtggtctggtcggtctccaaggacgtcacccgctacgcggccctcctcgcggccggcaacgccacgctcgctgtctacctcggcaacctcatcgacgacacctacgacggcgtctaccacgccaacctcacgctccacctctacttccgccgcggcgtgcggccgtccgccgccgccgccgccgccgatgccgtcgtcccggtctccaggagcctgccgctcaacgacgggctgtggttcgtcgtccagaacgacaccgacgtgcagtccgcgcgcgtgtcggtgccgcgcaacgcgtaccgcgccgtcctcgaggtctacgtctcgtcccacgacgccgacgagttctggtacatgaacacgcccgagcagaacgggccgttccgcgaggtcaccgtcctgctcgacggcgccgtggtgggcgccgtgtggccgttcccggtgatctacaccggcggcatcaacccgctcatctggcgccccatcaccagcatcggctccttcaacatgcccacctacgacatcgagctcacgcccttcctcggcagcctcctggacggcgaggagcacgagctcgggttcgcggtgaccaacgcgcagcggtcgtggtacgtggacgccaatctccacctgtggctggaccccaagagctccaggaccagcggcgggctcgtcgcgtaccacgcgccgaagctggcgggcagcatcgtgtcgcgctccgcggacggcgtcgacggggagtacgcggcgacggcgagccgcaatatcacggccacggggtgggtgagctcgtcgcgcggcaacgtcaccaccacgttcgcgcagcggctcagcttctccaacaccaacgtggtgagcgggcagggcggcgcgcaggcgatcaaccagacgaccgacgcgctgacggccgtcagcggcgggcccgcgcccgcgcaggtgcaccagagcttcccgctctacatcttcctgggcggcgacggcagcggcacgtcgtcgcagcggctgatgcggcgcgtggagatcgggttcgacgagacgcggtcccggggaggaggaggagcaggaggagagggcgccgcgtccacgaccacgagcacgctgcggaactcgcaggtggcggcggcggaggtgacgctccgggacgacgccgtggtgggcgcgtcgtggcggatgcaccagacgtacgagtacggcgccagcgacggcggctgctacctgaggaacgtcagcagcgtcggttacgacgtgcttttcgaccatcgcgacgcgtcctgcgccggtacgctgggccgctgacgcttgtcgccgacagcgagcgccttgtcggcgcctccgccgcgcgggccgctggataacggccggggaagcgacagggtgtaaatggaacgctgcaccggtggacaaaactgtactggcttggctcggcctggcccacgtccggtcttcaattattaaatataccacggtgacgggccattttcgtgggccaattagcttttcattaagaaaagatgtgacgtgacgtgacgtgatgcagctagtacacaggcagcactaaaatgtaaagaaaaccgctggctatgtttatttaacagtacctgttttatg

SEQ ID NO: 23917 - DNA, 870 bp, Zea mays
  Clone ID: LIB3606-019-A8_FLI
cgtcgtggaagaggtcgacccagtcccagttcagattccgcaaaacaggcagtcaggctcaggcaccaacaccaaccatggcctccgctgcgacacctgcgcctttgctccccgtgaccagcacggctgccggcggcggctccgcgccgtcctccgccacgggcctctccgacgcggcgctcgccacgccggccttccgcctcttcgtgagccggctggccgagacggcgcggcgctcgctcgcggaccggcgcccatggacggagctgctggaccgatcggctttctcccgccccgactccctctccgaggccacctcgcgcctgcgccgcaacctcggctacttccgcgtcaactacgccgccgtcgtcgccttctccctcgcggcctcgctcctggcgcaccctttctccctcctcgtcctcctcagcatcctcggcgccatcgtcgccgcgcacggcgcctgccgcattccagaggacctcttccttgatgatccgagcgctgcgtccagtggaaacaccaccagcaggctgatctccttccttgcgtcgcccggatctggggtttgatgcatcaaggaccggtaggaaattcttgtgctcggcgaattcagttgaagtcaaatagagatctgatccagaagctgtataaaccagctccttgctcatgtggtacctcacctgcgagtagcattgtataagtggatccgatttttctgttctactttgtgtggaattacgcaaggatctgcaattgctgtacttctcttgcacttcaccagatctggtgacaatgaccattaagcattgtcaaatgccaacatgtatcggtgtgatctttacattcatcattcatgtgtacaactct

SEQ ID NO: 23918 - DNA, 1330 bp, Zea mays
  Clone ID: LIB3606-019-A9_FLI
gaggactggaggcggtgggcgcggcgggtccagccaccgcgcggttcacggcgcgggcgaatgccggccgtttcaacggcgggcggatcggcctgttcccctggcgctgctggcccccctgggcggtgactgcgaggcccgatcctgaggcgggcggcgactccgagagggcggttggctggttttcttgccaagtgccagtcagtctctctcgtctcggcgacgccgcgcgaaggtcggaactcggaatcctcttcccggcgtcgtcatcccacccccgtcggttcccttctaactcctggctcctggggccgccgccgagccgaggagaggcgcacgcgcctcgggaatggagctggcgcctccgctccgcctacgggatccgagcctgggatggcttcctgcaacttgcgcaggactcaagtgtgatgaactgatggggactcttggactataactggtttcctcttattcttccagccaatcctgacaaatgtggcatctcaagctgatagctttaatttatggctctcttttctttatgcacattccatatgctagaggttctgacctaaacaccgataagcaggcccttcttgcatttgctgcatcactgcctcatggcagaaaggtcaactggacctccacaacccaagtctgcacgtcctgggttggcattacatgcacaccggacatgaagcgtgtgcgtgaagtcaggttacctgcaatagggctctttggtcctatcccatcaggcacacttagcaagctcgatgccttggaggtgttgagccttaggtcaaaccgtcttactattaatctccctcctgatgtaccatctattccctcacttcgctctctttatcttcaacacaataacctgtctggaatcataccaagttcactttcttccagtctaacattcttagacctgtcctataactcgttcaatggagaaataccatcgaaggtgcaagacatcactgaactgacagcattgcttctccagaacaactctctttctggacccatccctgaccttcgcctccccaagttgagacatttggatttgagcaacaataacctgagtggacctataccaccctccctgcagaagttcccagctacttcttttctgggaaatgcctttctgtgtggatttccattggaaccatgtccagggacaccacctgcttctccatcgtcgccatcgtcccaaaatgccaaaagaagcttctggaaaaagctcagccttggtatcataattgcaatagttgctggaggaggggttgtattcatattgatcctgatcctcttggtatgtatcttc

SEQ ID NO: 23919 - DNA, 627 bp, Zea mays
  Clone ID: LIB3606-019-B6_FLI
cttagatgtttacattgcctgattcctactgaattaaattgggccaaattggtgagatattccttgacttccattacaaatcagatcggggtcctcatgtttactggctgtcaaaaggaaccttggatgtgcgtcctgatcatatactcaatctgatacattatgaagatgcagcctctcttgtaatttccatcatgaaaaagagattacggagctgcatctttgtgggttgtgacaacgagcctctgtccaggctagagatcatggaccgtgtcaacagaagcaggaaatttgacacacagtttcatggcttcactgggactgatggtccgctggggaagaggatggacaactccaaaactcgggcaaagcttggatggcagcccaagtatccgagctttacagagttccttggtctcagcaatctctaactttcatgcgatgtcactaaatacctgttattaaagatgaatatactgatacataaaagagatgatgacagatttggaagtggaatgttgtttgcttataccgcagttttcgactatcttttgatttcttctgttagatcttgtaaagcattgcagcatggtgtggcatgtacctgtgttgccttctattcgcttc

SEQ ID NO: 23920 - DNA, 1347 bp, Zea mays
  Clone ID: LIB3606-019-H7_FLI
atcagccgccgccgtcaccaccaccaccttggtagccgccgccgaagcgcgccgcgggcgcgggcgcttaagcgatggctaaccgcacggaccccctcgcgaagagcatccatgggacgaacccacaaaacctggtggagaagatcgtgcgctccaagatctaccagagcacctactggaaggagcaatgcttcggcctcaccgcagagacgctagtcgacaaggccatggagctcgaccacaccggcggaacctacggcggcaaccgcaagcccacccctttcctctgcctcgcgctcaagatgctgcagatccaaccagacaaggacatcgtagtcgagttcatcaagaacgaggattacaagtatgttcgtgttctcggggccttctacctgcgcctcactggcacaattgctgacgtctaccagtatcttgagccgctctacaacgactaccgcaagatcagacacaagctcagcgatggacagttcacacttacccatgttgatgagttcattgatgagttgttgaccaaggattactcatgtgatacagccatgcctcgcatccagaaaagatgggttcttgaagcgtctggaactctagaaccgagaagaagtgcacttgaggacgattttgaggaagaagaggaagacaaggaggaacagcctatggaaattgatgaaccaaatggtcgtgaaaatgataatcatcgtggaaggagccttgccagggaacgggatagggactgggaccatgacaggaaacatgaaaggcataacagggacaaagattatgatagagatcgggattatgatagggactatgggagagggcgggaaagacaccgagatagagatcgtgaaagagacagaaaccgggatagggatagagaccgtcaccgcctgcgagatgatgattacaatcgcaacagggatagggacagggagagggatggtagggaaagggagcgccgagacagagaccgtggcaggcacaggagccgctcaaggagcagagatcgacgggacagagaccgtgaagatggagagtaccgcaggaggcgtggtcgtggcagtgtgagtcctcgtggacgtggtgaggatggtggcccaagagaggaaccgaagaggaagaaggaaaagaaagagaagggtgaaggaaatgctccggacccgaatgaccctgagatcatagaaatgaacaagctacgggcctcactggggttgaaaccactcaagtagtttacacgagtaatgttcaacttgacctgcatccaaccttttttgtgctggactttttcagcttgatgtaactaaacttttgtattgatgtggttatatattc

SEQ ID NO: 23921 - DNA, 682 bp, Zea mays
  Clone ID: LIB3606-020-A1_FLI
ggcacaagcagaagttgcggttgtactcttcctcctccgccgtcggctcagatctctgcgtgcgggctagcgatggcgtcgttctcggaggctccccctgggaacccgaaggcgggcgagaagatcttcaagaccaagtgcgcgcagtgccacacagtcgacaagggcgccggccacaagcaaggtccaaacttgaatggtctttttgggaggcagtcgggtaccaccgcaggctactcctattctgcgggaaacaaaaacaaggctgtggtctgggaggagaacactctgtatgactacctgcttaaccctaagaagtacattcctggaaccaagatggtcttccctgggctgaagaagccgcaggaacgtgctgatctcattgcgtacctgaaggaagcaactgcgtagtataatgacacgcctttgccatgaagagaaaattcgttttgcagtttaataataaacatttttagacaatttgggacactctggttggacagggtacacaatccacgtctcagtatttttgttcttatggtctcggtattgaatgcctaggtgagttttttttagctgtgcacaaaaaaacagttaaactcgatggtatttcaactgctggagaaatgctagtgccctatttttggctgtggaattgggaatctggaatgcatccattttg

SEQ ID NO: 23922 - DNA, 1118 bp, Zea mays
  Clone ID: LIB3606-020-D8_FLI
gggctcgcccctctcaaacctccgcgctcccgcccagctagggtttccccgatctcccctcctcctcaaccgccgccgtctccgagagcgccgccacgatgttggagctgcggcttgtgcaggggagcctcctcaagaaggtcctggaggcgatccgcgagctggtcaacgacgccaacttcgactgctccggcaccgggttctcgctgcaggccatggactcgagccacgtcgccctcgtcgcgctgctcctccgcgccgaggggttcgagcactaccgctgcgaccgcaacctctccatgggcatgaacctcaacaacatggccaagatgctccggtgcgccggtaacgacgacatcatcaccataaaggccgatgacggttctgacaccgtcacctttatgttcgagtcgcccaagcaagataagattgcggatttcgagatgaaactgatggatattgatagcgagcacctcggaatcccggattccgagtaccaggccatcgtccgcatgccttcttctgagtttatgaggatctgcaaggaccttagcagcatcggagacactgtcgttatctcggtaaccaaggagggcgtgaagttctccacatctggagaaattgggagtgcgaacattgtttgcaggcagaaccaaactattgacaagccagaagaggctaccattatagagatgcaagagccggtttccctgacctttgccctaaggtacatgaactcgttcaccaaggcgtcttcactgtccgaacaagtcacgatcagcctgtcgtccgagctaccagtggtggtcgagtacaagatcgctgagatgggttacattagattttacctggcgccaaagatcgaggacgatgaggagatgaagccatgattgccatcagtgctcgtgctgccgactttttctcgtcttccatccatggtttgcttattagctattatttgcacgcaaaggaaaaaaaagatgttatgttttatatcttaggccagactgctttagctacttatttgtgactgctgtgtgtccatggatttatagtgaatctagattagtgggcttgtgctttgtgcatgccgctgctgtctgcccatttttctattc

SEQ ID NO: 23923 - DNA, 515 bp, Zea mays
  Clone ID: LIB3606-020-G12_FLI
ccacgcgtcagggagcaggaggaggaggtggacgagctgctggcggcgctcgggtacaaggtgcgttcgtcggatatggcggacgtcgcgcagaagctagagcagctcgagatggccatggggatgggcggcgcctgccccaccgctgatgacgggttcgtctcgcacctcgccacggacaccgtgcactacaatccctccgacctgtcgtcctgggtcgagagcatgctgtccgagctcaacgcgcccccgccgccgctcccgcccgcgacgccggcaccaaggctcgcgtccacctcgtccaccgtcacaagtggcaccgccgccggtgccggctacttcgacctcccgcccgccgtcgactcgtccagcagtacctacgctctgaagccgatcccctcgccggcggtggcggcgtcggccgacccgtccccggactcggcgcgggagcccaagcggatgcgaactggcggcggcagcacgtcgtcgtcctcttcctcgtcgtcatccatgga

SEQ ID NO: 23924 - DNA, 1682 bp, Zea mays
  Clone ID: LIB3606-020-H8_FLI
gccaatgtatgctgtgctgtcgttcttttttttcgttgtatttaaccattttttgtcagtcctctgatttgttttcatttcatttagtcccttgatgcagctgtaggcgactttgctattgtgagaaacagaacaaagattgcagaattcacacagccttatattgagtcagggcttgtgatagtagcgccagtgaaacaagcaacttcaagtgcctgggctttcctcaaaccgttcacattggagatgtggtgtgtaactggtgctctttttatttttgtggggatagttgtctggattcttgaacatcggagtaatgaggagtttcgaggatctccacgacgacaacttataacaatattttggtatgctgctgttgctacttagggatgtattttatcttgggttaccaagtgccttgggtcgaaattcataattttattggcgattttttttaattgactgccatttctttattatgcttaatttcaggtttagtttctcaacaatgttcttttcacacagtaagtccactagatctatcacatgatattatgcttattttctccagcgtgctttccctatgtgaagggaaacatcttgacggcaaactcactgcaggacagaacactgtaagcgcgctagggcggtttgtgttgatcatatggctcttcgttgtgctgatcatcaattcaagttatactgccagcttgacgtcaatcctcacagtccaacagctcgcaacaggaataactgggatcgatagtttgatttcaagtggtttacctattggatatcaggctggaaaatttaccagaaattacctgattgaagagctcaatattcctgagtctcgattggtaccactaaatacaatccaggagtatgctgatgcccttaagcgtggaccaaaagatggtggtgttgttgcaattgttgatgagatgccctatgttgagatcttcctgtcataccactgcaatttcagaatagtgggacaggagttcaccaaggagggatggggttttgcattcaagagagacttcccccttgctgcggacttgtcgacagccatccttcaactctcagagagtggtcagcttcagagaattcacgacgagtggttcacccggcctagttgctcctctgatgacagcgaagtgggggcaaccaggcttggcctcggaagcttttggggccttttcctcgtgtgtgccctgatatgcctcttggctttgctggtgtttttcatacggatatgctggcagtataacaagtactccaattctgaggctgctggtgagcccagtgcagcagcagctgctgctgcagcagtagatgctgctgctgctgccgccgatgctgtcgaaagacagaggaggccatcacgtcttggcagcttcaaagatattatacagtttgtcgacaaaaaggaggaggaaattaagaagacgatgaaacgaagagtaagtgagaaagataataaccaagctgcaggatcctcagaagctcattcagtggcttcagcatagaacattctttccaactcctgtccttcacaaggcaaaacaaggaagcacatatacgataggaaaaagtcaaaattacttccctctactatgaacgatgtccatatagcccctaaaatattttttagtttaatttacatctccatatgtttg

SEQ ID NO: 23925 - DNA, 895 bp, Zea mays
  Clone ID: LIB3606-022-C12_FLI
gaaaaatctccaaaacaagttgtgaaagattcgctggaaggcgagcaactgccagcatctgcaccagaacaaaatggtgagaatagacagaatgcgagtagttcaagcaattcaagcagctccagcagtggctcaggatcatcttctagtggctcagacagtgatagctcctcttcagatggatctgatgctggcaattcatcttgagatataggccatacaacccctgatggtgtttagtttgccaccatctttctgtggagtaccagtgactgcggaggcttcatcaccacaccatgcgcaaaagtctgttcgattggctgctctaaatttgggtcttgggtttgcataaagtttgttgatgcacatgatgttcctcatcacgatcattgatggtccattgttatgttatggagtgatgaggaataggtggttgtgttgggcacgagcacgagagatgatgtgtagcagttcggacctttgggtgggtagcagtaggtagcctcccctcctttcccctggtctggtgatgatggtttgttggagatgtggctatatgtgcgtatgatatgccgtggctccttttgagctgtttgctggctggcgtcttccagcgatggataatacgtgaaggctgggctgcgacggcctccagcatgcagtcagttgaagtgaagtgtacgtgtggatgttccgtctgttgggtgtgccttcctttggcactgtacgtttggttcgtcagctcaggtgtctggtctacgaggagcaatgtagtaaaggcagcaggctgttcgtattggttatttggaagtagtagggtcagcataatggaggggatcgaaggggccaaaataacttaggctaaaacaacatagtacctctgttttaaaatagt

SEQ ID NO: 23926 - DNA, 764 bp, Zea mays
  Clone ID: LIB3606-022-H6_FLI
ctctccccacctcccctgagcttctcccgacctttggtcaggcaaaggaggcggccaacaaggacgagcgatggtgaccaaggtcatctgcttcctggtgctcgcatccgtgctcctcgccgtcgcttttcccgtgtctgctctgcggcagcaggtgaagaagggcggcggcggtgaaggcggaggcggaggcagtgttagcggaagcggaggcggcaacctgaatccctgggagtgctcgcccaagtgcgggtcgcggtgctccaagacgcagtacaggaaggcctgcctcaccttatgcaacaagtgctgcgccaagtgcctctgcgtgccaccggggttctacggcaacaagggcgcctgcccctgctacaacaactggaaaaccaaggaaggagggcccaagtgcccctagaagatccaccgcagctcccgtccgccattgtccccccttctccgaatctggaacgtgttgttcatcttcgaccaccccctaggcttggcattttattactagtataatgctagtgtccgcccgttgcttaatctggaatgctaccagccagatctccatgctctcctgtgagccactcggcagagtgaggattactaggtagggtggcatgtcatgtgctccaccctccactggtacgagtcaatcaactaaagctacccccggattgatgaggaacatcccgcgcgattagtggggcatgtcattacattcatcagcttctatatataaactagataaactttttatc

SEQ ID NO: 23927 - DNA, 763 bp, Zea mays
  Clone ID: LIB3606-023-G9_FLI
gcctggcgggtggcggctgctttggtgcgctgcgcagtgcgctccgtccgtcgaccggccggccgtcccctggcccctgctcgtcgtcttcctcgggcgctcgtcttcctccgaacgcgcgcgggccgccgacctgcttgttctcctggagaagcgcgcccggcgggcaggcgacgcagtccagcggcgggttgaggaagaaggcgagcgaccggcggatccccgtccagccgtcccctgctcgtcttcctcgggccgagcgctcgtcatccactcttcctccagccctccatcggatccccgtccgaccgtccccggctcgtcttcctggtgctcggctgctccagtgctcctggctgctccagtgctcggcccctgctgcagtgctgctcggtcgcgtcggcacctgctgcagatctgctcgacctcggctgcttggcttcctgttccttctgctacaaattcatagtcactgatggggaaggcaaagcgtgcctcgatcttcatcaggctggtttctgcagccggcactggattcttctacgtgaagcgcaagaatcctcgtcgcatcaccgagaagcttgagtttagaaagtatgatccccgtgtgaacaagcatgttctgtttaccgaagcgaagatgaagtgaggtcttgtttctccacaatgcagaactgtaataagttgtcaaccttttgcgaccagaaacctttatgccgttattagacagatgattaacgatcctatgtgtttttcctgctcc

SEQ ID NO: 23928 - DNA, 900 bp, Zea mays
  Clone ID: LIB3606-025-C11_FLI
ggggatgacgcggacaagttgctcgaggatttgctcaaacagcatggcgaggtggtctacagctccggtggacctccggatcccaccgttgaggccgacgacgatgccgagtgcctgtcctttgccgtctcgttggctaaagctgcaagtgagataaaggctactgatatccgtgtactttgtgtgaggcggcttgtctactggactaggttcttcatcatcctcactgccttctcaaatgctcagatagatgctatcagttccaaaatgagggatattggtgagaagcagtttagcaaagttgcatctggtgatacaaaaccgaattcttggacattactggattttggtgatgttgtggtccatatattccttccgcagcagcgagcattctacaacctggaagagttctacggcaacgctacacccatcgaactcccttttgacacccaacggcagtgatcgttgatcgttacatctgagccggcgctaggaagcatcccagtggaaagtgagatttttcgtgaagccagccagaagacattgttacggcaactcttgacatcgtcatctcactagccatcagatgtggtgagctgcccagagaaaagaaacctgcggtgcgaggtcgcaactgacaaaacgctgcctacaaccgaagcggcgctgctcgcagcctccgatgcagtgctgaaatggcaacttgatgcgaaaattctcggtttctgttgtgtcatgccatgctctgcataccctgtgtgaactatcgaataatgttggcaaccgcaccgcaccgcacttggcttcccatgaccgggaggatcattgtgtcgatccaggaattgttcactggctcctggctcgctgatattaacaccatctgacagcttgtaaaatttc

SEQ ID NO: 23929 - DNA, 1991 bp, Zea mays
  Clone ID: LIB3606-025-E7_FLI
tccatcatccctgctatcacgaaccgaatcaagagagatctgattcacaatccgctacatctaatcttttctgtggattttcttggagtaacaaaatcaactttatcatcacttagtaaaggatttgcagagctctctactgatgggcaatttcttcagctgagatcaaagcaggtttggtcaaggagaatcactggtgttggtgatgggctagttcaagggactgaagcatttgctcagggtttggctttcggggtttctggtgttttaagaaagccagttgagagtgccagacagtatggtgttataggtattgcacctggcattggccgtgcttttgtgggtttcattgtccaacctttaagtggggctctggattttttttcactgacggttgatggaatcagtgctagttttatgagatgtgttaacattttaagtaacaaatctgttccgcagaggataagagatcctcgtgctatacatcgtgatggtatagtaagagactatgacaaatttgaagctgctggccagatggccctttatctggcagaagctagcagatattttgcatgcacggatttatttcgagaaccttctaagtacgcatggtctgattactatgaagaccattttattttaccaagccagaggattgctttagtaactaataagcggttgatgctgcttcagtgcttggatctagataaaatggacaagaaaccttctaaaatactttgggatgttccttgggaagaagtactttcattggagctagcaaaagctgggtatcagaggccttcacatgtaatcatacatctgaagaattttaggaggtcagagaactttgtaaggcttattaagtgcaacattgacaacgaacgggaacctcaggctctttcactttgctgttcaattcggaaaatgtggagatctcaccaagcagcaatgaaagttataccattgaaggttccatcaggccagcgtcatgtgtattttgtgtcagatgatgataaaaaggaatcccacagtttatctaggcctttgctaagctcgggaggaacctctactgatgttgagcaacagttcataaacaatacagttcactttcagaaaatgtggagcagtgaaccagaaattcagagccgatgcaaactagttgccaagcagattgcggatgacggaagggtgttcagcatatggaggcctctctgccctaatgggtatgtctcaattggtgatattgcgcatgttggcatccatccaccgcattttgctgctgtatacaagaatatcaatgggaactttgcactgcctcttggctatgacctggtttggagaaattgtgctgaggattacaagagccctgtatcaatatggcttccaaggccaccggggggatacgtagctcttgggtgtgttgctgtcccttcattcaaggagcccactcttgactgtgctttctgtgtggatgagagactcgcggaggatgccgcgtatgaggagcaaatcatatgggcctcatcggatgcttacccatggggatgctatatctaccaagttcagagcgcctcaatgcagttcatggcacttcgtgtcccaaaagaacaatctgagctaaggcccaagaagatattggagtcatttctgcagcaagcatcagagactcaaacgtcccgtgcatgaagaagctgcacatgatgcttgtgcgtgcaagagaactcggctgggacaaagggcaagtctcgtgcaagaaagctcgaagaatgccacttctttcggatcactccatttctccgttgtcaaagcatacacagaggacagagccttgcatgccaacactcgggttgacggaagtgttgtatactagaatagtaggttaaaggttgtaaatgtaaagttttgtaacgtttgatatagtttttgtccagctacatttgttaaggcccatgtggacgtgggccatattagttgtggctacatattctact

SEQ ID NO: 23930 - DNA, 585 bp, Zea mays
  Clone ID: LIB3606-025-F9_FLI
gaagataatgctggagtgattgtgaatcccaagggtgagatgaaaggttccgctatcactggacctatcggcaaggagtgtgctgatctttggcctaggattgctagcgcagcaaacgccattgtttgagagcttgttggaatatgttcagacttctatatgatcatcttattatcagttgctagactgcaattgggcttatgtttgttcactcaattttgtagtaaacagaatttggtataccaaggggatctatataacaatgtatgccataaattttctgtctaccatttctcatgaaatgcttatattgtttatattgctttggtgacagcaaaatttttggtagtttgtttcccatcctttatgtttgttcactcaatttttatttgtttcccatccagcagaaatgttttaatgtcatcattcttcctcatttgcatgaacatgtacaagagagttttttgtgattagttgtatttccagctagtttacaagcatgtaaaatgttacatttcccggtagttacaagcatgtaaaataagcatgtaaaatattatattctatttttaaggatcgattttg

SEQ ID NO: 23931 - DNA, 1757 bp, Zea mays
  Clone ID: LIB3606-025-G7_FLI
gcagaaaaagtgcatctaattgagttgaggagggcaaataacacagagatcatgctgacaaaagttaaaatgccactctcggatttggtgagtgcagctctcgcgctagatcaatctaccttggatgttgatcaagtggagaatctcataaagttctgtcctacgaaagaagaaatggaacttctcaagaattacactggagacaaacagattcttgggaaatgtgaacagttcttcttagaattgatgaaagtgcctagaatggagtcgaaactgcgagtattctccttcaagatccagtttggttcacaagttgctgatctgagaagaaacttggatatcatagactcttcttgtaatgagatccgaacttctctcaagttgaaagaaataatgaagaaaatccttctccttggaaatactctgaaccagggaactgctagaggggctgcggttggcttccggttggacagtcttctaaaacttacagacacccgagcaacaaataataagatgacactaatgcactacctctgtaaggtacttgctgcaagatctccacagcttttaaacttctatgcggatcttgttagcttagatgctgcatcaaagatacaactaaaaatgttggctgaggaaatgcaagcagttagtaaagggctggaaaaggttcagcttgagtatgatgcttcagaaagggatggtccagtatccaaaaattttcgtgagaaactgaaagagttcaccgacaatgctggatctgatgtgcagtcgttatcttcattgttttctgaagtgggtaaaaaggctgacgcgttgatcaagtattttggcgaggatcctgtccgttgccccttcgaacaagtgatctccaccctcttaacttttgtaacaacatttcgaaaagcacatgaggagaacctaaagcaagctgagcttgagaagaaaaaagctgaaaaagaggcagaagcagagaaggccaaaatcgcacaattaactggcaaaaatcactctaaatcatcaaatccaagccgacaagctaagcaagccatagagaggacaagatctgtaagcagacgaggaagagatgctgggtgattatcccgaatggccggctattttggctgtgcttctgatctgcttgcgaggcaaatgaacgaccgcatgatgcatttctggcaaggggagtttcccggacggacactgtggtatccgtcgggtgcagcgcgatcgcatcaaagaaactttacatgacaccagctgtggactctcactggagaatgccggcttctttttttatccatatcggccatcagggtccagtgctaacttcttactgctgtaaagagcgaatgcgtcgtcacacccagcgtagccaattcatcagggatctggaggaggccagaaaggcgaagcggcggtggtgccgtgtcctacggtcctacctgtcagttgccgcggtgtcctcctgtcctgatccacgtcgccgccactgacagactcctctctcaccgtggcacgaattgatgagccacgaatagaggattgatcaaggtcttggcatcaacaaagctgccagcggtttttcagcttcattttagtttgtttatatagataggtgccttgatcgaggtaggatgattcctaggagtttcagtttcttgtacgccaaggactggatcttgaactgcgttcggtcggttgtaacattgcttttatggcttcaaagaggctaggaaaggagactttgaggcgct

SEQ ID NO: 23932 - DNA, 584 bp, Zea mays
  Clone ID: LIB3606-025-H1_FLI
caaacaccctcaagataatctatgatagagggctgataggcagcaatcatgactggtgtgaagccttctcgacctatcctcgaacatatgatcttctccacgcatgggcagtcttctccgacctcgataaaagaggctgcagtgctgaagacctgctcctcgaaatggaccgtatcctcaggcctaccgggtttgccatcgtgagggacaagggcactgtcatcgaattcatcaagaagtacctccacgcgctccactgggaagcagtagcggctgcagatgccgagcccagctcggaatcagaggagaacgagatgatcttggtgatccggaagaagttgtggctaccagaagcaggctcgcacacgtgattcccttcccggcgtctgcagctcagaagcgaggcgccagctgcaccagccatgatttatttctagccttaatgcacacatggagatagatttattatttacgaggatacggaaaatatgtggcaggcctggattaaaaaaaggctattttttctcattctcgacagatatgtgacttgatgtttgttctctagtttggttaggaaataaaca

SEQ ID NO: 23933 - DNA, 1073 bp, Zea mays
  Clone ID: LIB3606-025-H12_FLI
ggaggagggaggggtagtagtaaaaccaggtaggtgtggctggctcgtgcagcggcggtaggtggcagtgagagcgatgagcgcggcggcggcggcgagctcggtcaccaagttcatcaagtgcgtcacggtcggcgatggggccgtcgggaagacctgcatgctcatctgctacacctgcaacaagttccccacggattacatccccaccgtatttgacaacttcagcgccaatgtctccgtgggtgggagcatcgtcaacttgggcctctgggacacggcaggccaggaggattacagcaggttgaggcctctcagctacaggggtgctgatgtgttcatcctctccttctccctggtcagcagggcgagctatgagaacgtcctcaagaagtggatgccagagcttcgccgattttcacctactgttcctgtagttcttgttggaaccaaactagatctccgtgaagacagatcttaccttgctgaccattctgctgcttccatcatctctactgaacagggagaagagctcaggaagcagataggcgctgtggcgtacatagaatgcagctcaaagacacagaggaacgtaaaggctgtgttcgacactgcaattaaagtagtgctgcaaccaccgaggagaagagaagttaccaggaagaaaatgaaggcaaggtcgaatcagtctctgagaagatacctctgtggaagcggatgtttcacatcgtaaagcacaggctcttctgcgactgttgtactggactggctagatggttgcagctctatgaatgagtagtcccttccgcagccactgggaacttctggttctctgctaccttccgatagagtgctcttctgcgttcaccagctgtgcaaaatgaagtgaggtcctagtttctaaattccctacgaggtgtaccttctttagtatgaatggtaggctatttagcagttcagcaaagtgtgaagtgacccttctatgcatgttttgtttccaaaaactgatgtagctaaatctctaatgaatggttatggtcgcaccggaagaaaagaagttattgtagactatt

SEQ ID NO: 23934 - DNA, 1297 bp, Zea mays
  Clone ID: LIB3606-026-C11_FLI
cgacgtctccatcactacaccacaagtccacaagtccacaacaccaccaggcaccagcctcgtcacagccgcttcagcataccacaccgcacgcaaacccaccgcgcgctacgaccaccaccgtcaccatggccgccgcgcgctacgacgtggagaagggcgggaggaataacggggatgggaagccttcgccgccgccgccgggccacctgtacccgcagcgcgacggggagagggagtgggtgccgtggttggtgccgctcgtcgtggccgtcaacatcgtgctcttcgccgtggcgatgtacgtcaacaactgcccggcccacgccgcctcgtctcgccgcggtggcgccggatcatgcgtcgcccgcgggttcctccaccgcttctcgttccagccgctcagcgagaacccgctcctcgggccctcgtcggccacgctgcagaagctgggagcgcttgtatgggacaaagttgtgcgggagcaccaggggtggaggctcgtcacctgcatctggctgcacgccggtgttgcccaccttctggccaacatgatcagcctcgtgctcatcggactcagactggagcaacagtttggatacgtgagagttggcatcatctaccttgtctctggcgtcggaggcagcgtgctttcgtctctgttcatccggaacaacatctctgtcggcgcttccggagctctgttcgggctccttggggccatgctgtcggagctcttcaccaactggaccatctacgcaaacaaggctgcagccctggtgaccctgctggtcgtcatcgccatcaacctcgccatcggcatcctcccgcacgtcgacaacttcgcgcacatcggagggttcctcaccggcttcctcctcgggttcgtcttcctgatgcgcccgcactacggctggatgcagcgctacgccctgccctccgacgtcaagtacaccaccaagaagtacctggtctaccagtgggctctgctggccgtggcctcggtcctcgctgtcatcgggttcgccattgggctggggatgcttttcagaggagtgaacgcgaatgatcactgcggctggtgccactacctcagctgcgttccgacctccagatggagctgtgggaagtgaagatcggcgtgctgacaaaatggactgaagccaggagagagcccatggccgcccatggggccttttcgagcaagcatttccatgaatagatagatatatagctcgcacagtcttactgtacataatgtcaccaggatgtggtttatatatgacattattttgtt

SEQ ID NO: 23935 - DNA, 762 bp, Zea mays
  Clone ID: LIB3606-026-F3_FLI
tcaaaagctaccccctatccgatccaaccctctggctgctcctccgtccggccggcatcggcagtgcaggatggctctgaggatgtgggcgagctcagccgccaatgcgctcaagctctcggcgggcggcgccggagcccgggctgctgccttctctatctccaggttcttctccactgttcacgatgggttgaagtacactcagtctcacgaatgggtcaagacgacgggcgacgtcgccaccgttggcatcacggaccatgctcagggccacctgggagaggtggtgttcgtggagctgccggaacccggcacgaaggtggccgcgggaggatccttcggcaacgtggagagtgtcaaggccaccagcgacgtcaactccccgatctccggcgaggtcgtcgaggtcaatgccaaactgtcagagacgcccggcctgatcaacacgagcccgtacgaggacgggtggatgatcaaggtgaagccgagcagcccgggggaggcggacgccctgctggacgccgccaagtacaccaagcattgcgaggaggaagacgctcactagacccaggcccgcccagccagcaagcgtggatgcttaccacgacagtgcgcgtttggtggtgttgatccgctcagtctttctttattgttgcaaaaactccaccaagcagtccgccaatgccggcgtacctgatgccttccgttttctttgtgctggtaccttatttttttttataaagaaaagaagtggtgctgaat

SEQ ID NO: 23936 - DNA, 813 bp, Zea mays
  Clone ID: LIB3606-027-A9_FLI
gcgcggccccgcccccgccgccgccgcgcccacgggaggagcccgagacggagccgctccctcctcccgtgcagatgggggaggtctccgaggaggacctccgccagtacgacggctccgaccctaagaagccgctcctcatggccatcaagggccagatctacgacgtcacccagagcagaatgttctatggacctggcggaccttacgccctgttcgccggcaaagatgccagcagagctctagcgaagatgtcgtttgagccacaggacctcaccggcgacgtctcgggcctaggcccgtttgagctcgacgccctgcaggactgggagtacaagttcatgagcaagtacgtgaaggtcggcacggtcaagaagagcgtccctgtggaaggcggcagcaccgcgagcaccactgaggctgagaaggcgccgacaaccgaagagaagccaagcggggcggtggttgagaaggaagccgtggctaatgaaggtgcccaggaaaactagagcttttctgtgcatgcggcaataattcgacatggtcccatttgggtcttgtcagggccctgctatcctctcgtgtctcgtgtcgtatatcagcagcaatggcccgtgtgactggatacgtccatctgtgccagcgccgtggtgctctataattgctgttagtcccttgtggccttgtgtgttcgatcggataatcgagttattttctttgcagtaccctaaggtcatcaggttccttgtaatgtctcgcgcacgtggggatatgccatgaaattgtcgtggaagtcatgttattgtttactgc

SEQ ID NO: 23937 - DNA, 1211 bp, Zea mays
  Clone ID: LIB3606-028-C5_FLI
ccggagaatattggtgaagcaataacttgatatagggttctagaccaaagaagcaatggaaaaggaatcatctgccacatacgagccaaaaaggaacagtgaaataagggtttttgagagttcagatgagatttcaacggatcttgctgagtatatctcacaagtttcagaaatttctgtcaaagaaaggggatactttgccatcgccttatctggaggtcccctagtcagttttttggggaaactttgtgaagctccatacaacaagacactggattggtccaaatggtacatcttctggtctgatgaacgtgctgtggcaaaaaaaaccatgcagagagtaactataggttaacaaaagaaggattcctcgccaaggtacctattctgaatggccatgtctactccataaatgacaatgccacagtggaggatgcagcaacagactatgaattcatgatcaggcagctggttaaggtccgcacaataggagtctcagagagaaacgactgtcccaagttcgatctcatccttctcaccatgggctccgatgggcatgtggcctcgcttttcccgaaccaccctgccatggagctgaaagacgactgggtcacctacatcaccgactctccgcagcctcctcctgagaggatcaccttcactctcccagtgatcaactcagcatccaacatcgcaatagtgtccaccggtgatgacaaagcaaaggctgttcacatagcagtttctgacatggccgaaggtcttgatgctcctacatcgctgcctgctagaatggtccagccaacggacgggaagctggtatggtttctggacaaggcggcggcatcattccttgactccaagaacgacgatgacgacgcttgctacgagcgtcatgagtgactaactccgaggatccttggtcgttttgaagcgaatgaacggaggtgtgtgtaagtaggtggttgcgtatgatggaagacgcgctgttccccttttagctcgatgcatgggttaattttgttctgagggtttttagctccggaaatctgaaattgctcttggtccttttgcagtgaggtgatttaaagcgatgaaatgtgtatgcgatgttgagtcgtcaaagaacaccggaatttaactgtggtcgtataatattatgtgctacattctatgctatggcagtttgttttttttttttgttttgtatt

SEQ ID NO: 23938 - DNA, 1222 bp, Zea mays
  Clone ID: LIB3606-028-E11_FLI
ccaaaagcagagcacgcagcccagctccacgagattccgtgactgcgacggcgaggatgggcggcgaggcaaagaagctcccaaggatcgacttctccgaggtggacccgtctgcgccgggcggccaggcatggggcacggcgcgcggcgaggtgatggacgcgctggccaccttcggctgcttcgaggcgcactgcccggctctgacccctaggctccgcgccgagctcttcgacggagccgtgaggccgctcttcgcgctgcccgccgacgccaagcgccgcaactgttacggcgccgataggccgttccacggctacctcggcgacgtcccggggttccctggctacgagagcctggccatcgtggacggcaccaaggacgagtccgtccgcggcttcgcccgccttatgtggcccgacggcggtgacaacagcgacagtttctgcggtactgtcgttgaggcggcgcagcggatcttccagctggaggaggccgtgcggcggatggtgatggaagggctcggggtggccaagcaccacgacgcgctgagcgcgtccatgtggcacctgttccggatggcggagtacaaggcgcccaacgccgcggagaaggtggtcaggtacggggcgcatcaggacaccaactggctcagcgtcgtctgccagcacgaggtggccgggctggaggtgcagagcagggacggcgagtggatcgtcgtccagccgtcgcccacgtcgctggttttcatggtcggcaacgagctccgggcatggacgaacgaccgtctatatgctccatttcaccggatcaccgtcgctggggacgtccccagatactccgcgatgctgttctcggtccccagcttccaggttcaggtggcagacgagctcgtggacgacgaacaccctccccgtttcaagccccatgacaacaacgacttcgtctgcttctgcgtttccgaagaaggcgctctccatcaagataaactcaaggccttctgtggagtgtaacgagcagcagaacatatcagccgtccggcatctgtgttattatacttttacctcagccttgcatgcagcagaggccaggccacccctgtagactagtacgtacaatttttagaacacgcgtgagatgataactcgtctgcatttcttatattctgaacatgaacaacaaagcattctggtagccatgaaaagaacacgcgtgagaagat

SEQ ID NO: 23939 - DNA, 750 bp, Zea mays
  Clone ID: LIB3606-028-H3_FLI
tccagctcgctctctacctgcaccagcctcgcccgcccttcgctcgccgccgccatggggaggggaaagttcaagggaaagcccaccggccgccgcaacttctccacaccggaggagatcgctgctggtacttcaggtcgccctcgcacctttaagaagaaggaggaagaggaagaggaggaagaagaaagagaagagtcagaggaggaagaatctgaagacgagtctgatgacaaacctaaacataaaggtactgagggtattattcagattgaaaatccgaacttagtaaaagtgaagaatataaaggccaaggaagttgatcttggaaagacaactgaactctcaaggcgtgaaagggaggagcttgagaaacaaaaagctcatgaacgttatatgaaacttcaggagcaaggaaaaacagaacaagcacggaaagatttggaacgtcttgctttaataagacagcaaagggctgatgctgcaaagaaacgcgatgaggagaaagctgccaaggagcagaggaagtcggaagcacggaagtaactgcaatatcatggacgatgagaccacgaaagcatgatctgcgttagttggatatttatttctaatgcatcagttatcttgttataaacctggtccctattctgtatccccataaaatatgcattgacaaaattagtaacagtcttgtgggcgtgtcttcctgtaaacttgagcttgacaaaattagaaagtagtattaaggtc

SEQ ID NO: 23940 - DNA, 942 bp, Zea mays
  Clone ID: LIB3606-029-B9_FLI
ctcccatatcgggttctcccttcctcttcctgtttccgcgcgcgagatcgccgccccgggtgggctctagatcccgatggcctcgcgccgccgcaccctgctcaaggtcatcatcctcggcgacagcggggttgggaagacgtctttgatgaaccaatatgtgaacaagaagttcagcaaccagtacaaggctacgattggggcggatttcctcaccaaggaggtgcagttcgaggacaggctcttcactctgcaaatatgggacactgctggtcaggaaaggtttcagagtcttggcgttgcattctaccggggagcagattgttgtgtcctagtctatgatgttaattctatgaaatcgtttgataatcttcacaactggcgtgaagagtttctaattcaggcgagcccatcagatcctgacaatttcccttttgttctgttgggtaacaaagttgatgtagatggtgggaacagccgtgtggtgtcggagaaaaaggcaaaggcatggtgcgcctctaaagggaacatcccgtactttgagacgtctgctaaggatggaacgaacgtggaagatgccttccagtgtattgtaaagaatgctctgaagaatgaaccggaggaagaattgtatgtgccagataccgtggatgtggtaggtggcaaccgggcccagagatcatctggctgctgttaagacatgaggcatccacgaggcgtggtgatcatcatcggctatgcagtgatcaaacaatacctccttaacattgctgggcctccatggttatctacgtgtccgtattccatttgttacctttccagtctcctgctatgtacctttcccatgctgtcagtcaatccgtagacttcatttgtgcagttccatcagtagcgtcataccttgtgaatacagttggacaaaataagagcaagtctgaactg

SEQ ID NO: 23941 - DNA, 569 bp, Zea mays
  Clone ID: LIB3606-029-H5_FLI
ctcacccaactccgtccctctctcccggcccagatagatctttcccccgtcctccctcgccttcgccttcgccggcaggagatttccaccaccaccgccgaaccgccccgaccctcctcccctctcgcgctatggcccagactgttgtgctcaaggttggcatgtcctgtgagggctgtgttggagctgtcaagcgggtcctcggcaagatggaaggcgtcgagtcctacgacgtagacatcatggaacagaaggtcaccgtgaagggcaatgtgacacctgacgccgtcctgcaaactgtttccaagactggcaagaagacttcgttctgggaggctgaggccgtgacaagtgaatccgccacacctgccggtgccaccgcctgacaggttcgatgatctggaagtgcccggcaaggcggcaaagaaaaaaaatgtgaatgtatttagcttggatctgttacaaataattgcaaactgctagctcggtctgtacattttacagttgctattcgtgtactgtgatgttctcgtaagtttggggagatgataaaccaatatttgtatgat

SEQ ID NO: 23942 - DNA, 1868 bp, Zea mays
  Clone ID: LIB3606-030-B8_FLI
caaaaatgtcgggtcctaaaaatcaattttctcctcggggactccactcggttgccggccatggcggagaatttggcccccgagaagcgccacaccttcgtgcacaacggtgagccgcttcccctccctggtatcctccacagcctgccttccccgggcacccgacccctctgccttaggtttcgatctccatccccgccatgagcagggcagaaggtgttcgagtgggaccagacgctagaggaggtgaacatgtacatcgagctccccaagggcgtgcccaccaagctcttccactgcaccatccaggccagccacgtcgaggtcggcatccgcggcaacccgccatatctcaaccatgacctgatgcaccccgtgaagaccgactcgtcgttctggacaataggtgtggccgaactcatcgctcttgagcacctcatcattttttttcttctaaaccacaccttttctttttctgagcctgtactgtagatattgatttctgtagtatttctgacatcttcgtgagaagtgttcttgaaattgctgttcggttggtacaagctgtttgcgcttataattgttaaactggcacgatgcttttaccaattaatacaatggagagttgatgaaagcaattctcctgcttcgctgatgcaaataaactacttagcagccatactgataatcattggatagtattgggtggctttagtttttgccagggttagttgagagctagatagcagacattgttgatgagtacaactgtacagctgctcctgatttggtacccttttgtgttttactagtcactttagacaacaaaatatgtctccagcacacatctttgacctttatagtcttacttttgctgtatagttatcaacttatcataattataatgatatggatatatctttcatggcgaatgcgatattagttccattccgatgatcttatcaagttatcagtctgtatagtttattgtagaaacttgctagcatcaagtattcgttgttgttgactgtttttttatataatctgagttagtgcagaactagagcaaaagtaccaaacttagggctgtaggaaaatacgtagtttctgccaatctacagatcaagtgaatttgacaacatgctttgctagaatcaacaattaggatgcttctgaggtgtgatgattttttgaacagccagtaaaaacttagtgtgaggctgtgagctagtgataacatgagattatgcataagggcattctagcatgtgctactcacatgaaatttagtactatggatattgggatatgtctgtaacgatatctgagtcatatacatcttattcaactataatttttaacatgggcaatggtgatgacaatacagaggatgctgagatgcatataacactgcaaaaaagagagaaggggaaaacatggtcatccccaatacaagggcaagggattttggatccatatgctgcagatcaagagcaaaagcggcttatgctccaaaggtttcaggaagagaacccagggttcgacttttcgcaggctcagttcagtggaacctgccctgacccaagaaccttcatgggaggaatacgctctgagtgaagctccctacctgcccatgttggtgttgtattcccggttggtgtctatcatggaaataatcgtgatgtgtaaccattttgtgtgcaagctcattaattggctgtaaacccttttggcaacctttgcgtgctaaattctagttatagttgtgatcgtcattcagtgttcgtttttagatgtatattaataatatttaggaagagttgatggcaacctctgcatgctaaattctagttatagttgtgatcatc

SEQ ID NO: 23943 - DNA, 591 bp, Zea mays
  Clone ID: LIB3606-030-C7_FLI
gcggcctcaccgcccctccggcctccgccgcgtgctcgtcccaaccctgtcgccggcaagccatggcgtcgcgcttccgctccttcactcgcccggccgccgccgccttcctccggtccactgccagccgaagcccctccgcttcccttccccgcaccctcgctcctgtccctagggcttcggccacggggcggcgcatggctctggcgcggtctctgcaaccgctgcacagcgccgtctcggcggcccggctgacgtcgcggctgggggcggaggtggaccgggccgtgtcgcaggagacaggtctcagtgtccctcgataatgaaaggaactgctccagatggcagcaacatcagcagcagatagttgtaagacttggtcatcataataatcattcttgttaaacggttacgttgtttatttagtggccactttttgctatgcgctaacggcgcatgtttgacctcttaccataatacattcctggtaagggcttttcttttgaattctatgtgtggtcaaggttttaatgagcatagtcatgttcttgtacgcctgtctccatttatatatgtggagatatgggcatc

SEQ ID NO: 23944 - DNA, 620 bp, Zea mays
  Clone ID: LIB3606-030-D7_FLI
gtgtgtctgtgcaacagtgctgcatccaagctaagaccaagatcatcgtcattcgtcagagccttcctaccggcaaccaactccaacgaaagccgcctcaccaactcccagcggttgcgattggcagctgctgcaatggcttccggtggcgcgtcgtcactggccttggccgcgctgctcctcgtgagctgcgcctcggcggcggtggcgaccaagtacaccgtcggggacgcgtccggctggacgaccaccggcgactacgccacctgggccagcggcaagaagttcaaagtcggcgacagtctcgagttcaaatacgccggcggggcgcacacggtggacgaggtgagcgcggcggactacgccgcctgctcctccagcaacgcgctcagcaccgacagcgccggcgccacgaccgtgaccctcaagacggccggcaagcactacttcatctgcggcgtggcgggccattgcagcagcggcatgaagctcgcggtggacgtggccaaggcggtgaccgccccggcgccggccccagccgcggccccggccccggccgcggacacagccccagatgcccccgacaccacgccgtcgaccccgacgtccccctcgagctc

SEQ ID NO: 23945 - DNA, 1301 bp, Zea mays
  Clone ID: LIB3606-030-E10_FLI
gcccgaggcgctggccccgctcaggtcgggacctgccgccatttcagaactcctagcttcttctaggtcggggttgctgcgcaccttgcgtaccctgggttgagcatcattggagtggaagaaaggaatcatgttcaggagaaagcatgcttctcattccaactcaactgatgctgagcagcaagaagcaaagataaatgaattaaaatctgcacttggtcctttgtctgcccatggcgagaagtactgcagtgacacatgtttgagaagatatcttgaagcccggaactggaatgtcactaagtcgagaaaaatgcttgaagaaagtctcaaatggagggcaacttataagccagaggatattcgctggcctgatgtttctgttgaagcggaaacgggaaaaatgtacaaggcaaattttcgagatagagaggggagaactgtaatcattatgaggcctacaaaggagaattcaacgtcccatgacggtcagattcggtttcttgtgtatgttttggagaatgcgatcctggaccaacgtgaaggtcaagagaaaatggtatggctgatagacttcacaggatggacaatggcccatgccacacccataaagactgcaagagaatgtacaagcatcctgcaaaatcattaccctgagaggctggccattgcatttctgttgaatcccccaaaagtattcgaagccttttacagggctgtcaaatatttccttgacccaagatcgatcgagaaactgaacttcgtgtacctgaaggatgaggagagcatgaaggtcctgtacaagtgcattgatcccgtggtccttcctgtggagttcgggggaaagaacagtgttgtgtacaaccatgaggactactccaagttgatgctgcaagaagatatcgaaacatcaagcttctgggaggatgatgcgaaaactgttaaccatgctatcaatgggaccttggttcctgatgttgcatctcagctgtcacggattgctgctaaagccagttaatgagctactacgatgggagctattcagaatgctttaatggagtaactagaaagtcgagcgccaataaaatgttcatagtaaacagaaatagagcaaataacagatgagatatcacttgtccatagtcgaaatagttgcacttatcgaacactttattcagtacacgatgagttacaggagactatcgtaatgatgtaagaggtagaagtgctacctgcttaatgtacctcaaaagcccttaaggctttacttgttttagccgtggctacggagaagctaattc

SEQ ID NO: 23946 - DNA, 743 bp, Zea mays
  Clone ID: LIB3606-030-E12_FLI
ctctcgcgcaaacactcctctttccgcgccgcctcccctcccgccctcttgctccgccggcgcggccaccgccaccgccaccgcaacagctagtcagcagatcgtaaccatggcggattcgaaggccgctgcggcggtgacgctccgcacacgcaagttcatgaccaaccgtcttctctcccgcaagcagttcgtgctcgaggtcatccaccccggccgccccaacgtctccaaggcggagctcaaggagaggctggcgaagatctacgaggtgaaggacccaaactgcatcttcgtgttcaagttccgaaccaacttcggaggcggcaagtccaccggcttcggtctcatctacgacaaccttgaggccgccaagaagttcgagcccaagtaccgcctcatcaggaacggccttgctaccaaggtagagaagtcacgaaagcagatgaaggaacgtaagaacagggcgaagaaaatccgtggtgtgaagaagacaaaggctggagatgccaagaagaagtaagggaggaagttacttgccttgctctttctctcatcataggctttggtttgtttagggtggggctccttccggcaatgctgaatgtttagttagaagtagagaagattttgccaattacccatcatgttgagtttctcgtcgcaccttctgttcagttttgaggcactttgtcagacacaagaatatatatatacctggtcatcacggcttttgtcctgct

SEQ ID NO: 23947 - DNA, 853 bp, Zea mays
  Clone ID: LIB3606-030-H9_FLI
ggacggacgctttctatcgcaatcctatctatatatttatcccaaggcttcgtggtttttgttgttgttgctgctgctaggtgctagctcacgagtcacggccgccttccactcccacaagcttcaactagccttcttactcccgccgtcgcccccgatccgagagcgagcatggcgcactctctcgccgcctccttctcgccggccgccgcccggcgccagatgacaaatgtgattccaagctggagctcggtttccttccagagccacaggagggcttctgtgtccatccgctcaagaccaaattctcttgggtttaagatttgctgttcggctaagaaagagacagtggacaaggtttgcagtatagtgaaggagcagctggctcttcccgatgggaccgctatcactggcgaatcaaaattcgctgaacttggcgctgattcgctggatacggtcgagattgtgatggggctcgaggaggcgttcaacataacagtggacgaaacaagcgcacaagacatcgcaacggtgcaggacgctgcggaccttatcgagaagctcatgctggaggcacctccaaaggtcgtctagatccagcaaccttgcgatcgacgaccttgcgtttgatctatgttgtgtgttaatttgttcgtgttgccccatttgttttttcttgatgattcaagatgaggttttgtattggtgttgctgaggtgaattagatagccccaaaggccacatgaagcagatgaggacagttcattccactttgaatttgtatgttgtagtgctgctatagagaaaccaatggactgttatgaagagtcaatgcaactgttgcttttcgttt

SEQ ID NO: 23948 - DNA, 774 bp, Zea mays
  Clone ID: LIB3606-031-D12_FLI
gggcacagccagtcagccacatcactagctatctgtgcagaggcaatggcgtccaaggttgagctggtggtggaggtcaagtccccggctgacaagctgtgggcggcgctgcgtgactcgacggagctgttccccaagatcttccccgagcagtacaagagcatcgagaccgtcgagggcgacggcaagtcggccggcaccgtccgcctcctcaagtacaccgaggcggtgccgatgctgacgttcgccaaggagaagcttgagacggcggacgacgagaacaaggtggtgtcgtacagcgtggtggacggcgagctggcggacttctacaagaacttcaagatcacgctgaaggtgactccggccaaggcggagggcgagggcggcgccgtcgtcagctgggccatggagttcgacaaggccaacgaccaggtgcctgacccggacgtcatcaaggagaccgccaccaagacgttccacgacctcgacgactacctcctcaagaactagatggagcgacaactggagatggtccagtacagtacagttccagtccattcatcgacgcgtcacagtctactagtgcacgtcgctggtgtggtgtggtgctggtgcctgctggttccttaatttgcttgctagctagctacgtaccgcggtccgtgtccttgtctctggctgatgtttgctgcctgcggccgtcgtgcatccgacgacgtgtcgttgcgttgcgcactggtcctccgagtcaataaagctctcgtgttcatgcgc

SEQ ID NO: 23949 - DNA, 485 bp, Zea mays
  Clone ID: LIB3606-031-G10_FLI
tgcgggcaagaagaagaagaataataataataagaaggccggcgccaccgagatggacatggccaccgcgcacaggctcttctacggcaagcccggcgccgccgcgctcgccggggacaggacgaggcagccgcagcagcagtcgtacctcccctaccgccccggcatcgtcggcttcttcgccaccgcgcacgcgctcggccgctcgcacaacccctactagcttattaccttcattaattagtttagcttcccgccggcggcgcggcgatcacctccggagataagggcatgtacagtgggtgtcttaagttgtgtcttagagtgtgtctaggggggtgaatgtaaaaaatctcaagacacgtatcttgacgaagacacagtgtcttagctctatattcgagaaaggagactatctgattggtcactttaatttattgaatgttttgattggtacaatgaatatgataagacatgttttagac

SEQ ID NO: 23950 - DNA, 2577 bp, Zea mays
  Clone ID: LIB3606-031-H1_FLI
ccctcttcttcgtcttcgcgagcagcgaggcatcacacgcgcctgcacgatctcctcctgcgagcgagatctcaccaccgcagcggcgccgtggccatggcgggaaggtactaccagggccagggcggtggcgggggcacgtccatggaggtagtcagcacgccgaaccaggagctggccctcaccaactgtgcatacgtctgccccgcggacctccgtcgcttccccaacgcgctcgccgtcgtcgccgactcctgggtcttcaccctacgtgaacacaatgctgtcgcaagcgggcgcattgccttgaatgctattcaacgtcgtcaggcaaaggtttcagctggggattctgttactgttagcagttttgtcccccctgatgatttcaagttggctttgctcactttggagctagagtatgccaaggcaagagccaaccgaaatgacgagctggatgctgttgtgcttgcccaacaactccgtaagaggtttctggatcaggtcatgaccttggggcaaagggtgccatttgaatttcatggaacaaactatgtattcaccgtcaatcaagctttgctagagggtcaagagagttctacaccattggatagaggattcttgtcaagtgatacatacatcatatttgaggctgctcctaattcaggaattaaggtgatcaaccaaaaggaagctgctagcagcaaacttttcaaacataaagagtttaacctggaaaaattggggataggtgggttaagtgctgaattcactgacatatttcgtagggcattcgcttcaagagtctttcctcctcaagttgtcagtaagttgggcatcaaacatgtaaaaggtatactgctatatggacctcctggtactggcaagactcttatggcacgacaaattggaaaattattgaacggaaaagatcccaagattgtgaatggacctgaagttctgagcaagtttgttggagaaaccgagaagaatgtgagagatttgtttgctgatgctgaaaatgagcagaggacacgaggtgatcagagtgacctccatgtaattatatttgatgaaattgatgccatctgcaagtctagaggatctacccgcgatggtacaggtgtacatgatagcattgtaaaccagctccttacaaagatagatggcgttgaggcgttgaataacgtattgcttattggaatgaccaatcgtaaagatttgcttgacgaagctttattgagacctggacgattggaagttcacatcgagataaacctgcctgatgaaaatggtcgtttccaaattcttcagattcatacaaataagatgaaagagaattctttcctatctccagatattaatcttcttgagctagccgcaaggacaaagaactacagtggagcagagttggaaggtgttgtcaaaagtgctgtctcgtatgctttgaaccggcagataaccatggatgacctcactaaacctttggatgaggaaagcattaaggttactatggatgactttgtgaatgcacttcatgaaattactcctgcatttggtgcttccaccgatgatctcgaaagatgcagattgcgaggtattgttgactgtggtaaggcacataagcacatttaccagagagctatgctccttgtagagcaagttaaagttagcaaaggtagtccacttgtgacttgcctgttggaaggtcctgctggaagtggtaaaacagctatggcagcaagtgttggcattgacagtgattttgcatatgtgaaaattatatcagcagaaacaatgattggtttcagtgaaagcagtaaatgtgcacagatttgcaaggtttttgaagatgcatacaagtctcagttcagcatcatagttcttgatgatatcgaaaggttactggagtatgtagccattggaccacgtttttcaaacttgatctctcaaactcttctggtcctcctcaagagggttcctcctaagggaaaaaacctgcttgtgattggaacaacaagcgaggttggcttcctagaatctgttggaatgtgtgacgtgttctctgtgacataccatgtccccaagctgaaaaaggaggatgcgaaaaaggtattgcatcatcttgatgtgttcgatgacggggaccttgatgcagcagcagaagcactggatgatatgccaatcaagaagctgtacacgcttgttgagatggctgcacaggggccaaccggaggaagtgcagaagcaatttatgccggagaagacaagatagatatcaaccatttcttcagcatcttaagtgatattatccgttactgagcccgcatggatcctaggtatccagtgggaggttatttgcacctgtgcttcatcacccccttgtggcatccttacagcgtgttaagagtggtttgatgtgttgtttttgtttggtgcgcctactagagctgttggatttgaccagaggcgaattccacgatatagcgttttttgtattgtatgacgatgtttctacagttgataataggatccagctatagacctccgaaaagaaatgaatttcattctcctttt

SEQ ID NO: 23951 - DNA, 1170 bp, Zea mays
  Clone ID: LIB3606-032-A1_FLI
gaccagagacgcggcacgcgacgcggaaggaccagcagcggcggcgcggcgacatcgcgaggccagggcagaggcgaccgccgagagtccctgccaccatggacaccttcttcctatcgcacggctcgcccacgctctccatcgacgacagtatcccggcgcggcacttcttcaagtcatgggtgccggcgaaggtcgcgggcgaccagcccccgcgcgccatcctcgtcgtctcgggacactgggagacggccacgccggcggtcaacgtcatccgcggcagcaacgacaccatctacgacttctatggctttcccaagcccatgtaccagctcaagtaccccgctccgggcgctccggacttggccctgcggaccgtagagctcctggagcaagccgggttcggccccgtgaagcaggaccacagccgcgggctcgaccacggcgcctgggtgccgctgatgctcatgtacccggacgccagcatccccgtgtgccagctctcggtgcagaccgaccgcgacggcacgtaccactacaacctcggcaaggcgctggcgcccctgcgggaggaaggcatcctcatcctcggctccggtagcgccacgcacaacctgcgcaagattagcccgtccgacgcgcccgtgccgcagtgggccgccgagttcgacacctggctcaaggactcgctcctcaacggaaggtacgaggacgtgaagcggtacgaggagaaggcgccgcacgcgagggtggcgcacccgtggccggaccacttctacccgctgcacgtcgcgctcggcgccgccggggacggggcgaaggcggagcagatccaccagtgctggtccaacggcacgctctcctacgcgtcctacaggttcaccaccaacacctgacgcgctgcttgtggtgtcggtggaataccacccggccagctgctgaattcgcggggaagcatccatcgacgggtgtggcactggcagcattgcacatactgtatttctaataaacccccgtgtgcctgccgttccgttcgcggtagatatgcgtttgttgatgttttgcgttgtttggtgcagcagcttaggctgattgattgcctgcatggtggtgccgggatctcgctggcctagctgaatcatgcattctatcgagaaacatttgtttgtt

SEQ ID NO: 23952 - DNA, 998 bp, Zea mays
  Clone ID: LIB3606-032-F10_FLI
cgcctaccaggccaccaccaccaccaccacccacaaatccccaatggcgaggcgcatcgccgtggcggcagcgttcctggcgctggccgtggtggctcccgccgcgctggcgcaggctcccgggcccgcggcgacgcctagcgggccgccgaacgtgacggcgatcctggagaagggcgggcagttcaccatgttcatgcggctgatgaaggagacgcagcaggacacgcagctgaacagccagctgaacagctcgtacgccagcagcggcggcgggtacacggtgttcgcgcccaccgacaacgccttcaacaacctcaagcccggcacgctcaactcgctgacgcagcagcagcaggtggcgctggtgcagggccacgtcctgccccagttctacagcatggactccttccagaccgccagcaaccccgtccgcacccaggcctccggccgcgacgggccctacacgctcaacatcaccgccaccgccaacaaccaggtcaacgtctcctcgggcgtcgccgaggtcaccatcaacaacgcgctcagcgccgtcaagcccctcgccgtctactccgtcgacaaggtgctcctgcccctggagctgttcggggccaaggcgcccgccgccgcgcccgccgcgtcccaggggaagcccaagaagggcgggtcctcggacgctccctccgggtcggccggttccgacgacgccgcgcccacgggcgccgccggcgccagggtcgtcggctggagcttcgccggcctcgccgccgtccttggctgtctgttgtgagagtgagaccgtgcgtcgtttctagggacggacggacgacaagctagttgaagatgagaatgctatgcccgggttcccttccccttctttctctctgtttatttaaacttctttcatctcgctagtttctttaatttgtactattggtggtttgtaagattggcttatgtgattcaatttatgcgcctgccgctgttgatactgc

SEQ ID NO: 23953 - DNA, 680 bp, Zea mays
  Clone ID: LIB3606-033-F12_FLI
gtccccgctcaagtgaggttcggagctcagagccttgcgatctctcggctgcgcgcgcgcaagatggctgacccagaattggaagctatcaggaagagaaggatggaagaactaatggcaaaacacggtggcggtggggcaaatcaacaaaatgcaagccaacaaaaagctcaggaagacgcgaaacaggaagctgaggaacgccgacagatgatgcttgctcagatattatcttctgaagccagagaaaggatctcccgcatagctttggtcaaacctgacaaagcaagaggggtggaggatgttctgctgagagctgctcaaactggtggaatatctgaaaaggtgtccgaagaaagacttatctcccttctagagcaaattaacacccacacaagcaagcaaaccaaagttacgattcagaggcgtcgaagtgtccttgacgacgacgattagacgcgacctgcaagctttgcctctgagtgtgtgatgatgggctggtgattgattgattataagcggtaccgaacttgtttgcttaaagacaatgatctgatgcgactgcaaacagccatcaaaacttggttgtatatgatccgatgtcttgttggtgtaccccccgttgaggacagtcgatgtattggctgtgattatccctgaaacactgttcttccttgagt

SEQ ID NO: 23954 - DNA, 953 bp, Zea mays
  Clone ID: LIB3606-034-F9_FLI
ctcttctccggcgaagaacccccagtcgcccaccagatcacttgttaaactttgttgaggggtgatggcggtttctttcgcaaacctcaactccgaggcagggcttaaaaagcttgatgagtaccttctcactcgcagctacatcactggctaccaagcttccaaggatgacttggctgtctacacttcgttttcggctgctccctcgtccaagtatatcaacgtagcaaggtggtttaaccacattgatgcgctcgtgaggctgagcggaattactgcagagggccaaggtgtgaaggttgaatcctcagcagttccttcagccccaactccagatgttgctgaagcacaggccccagttgctgaggaggacgacgacgatgatgttgacctttttggtgaggagaccgaagatgagaagaaggctgctgaagagcgtgctgcagctgccaaggcttctggcaagaagaaagaatctgggaagtcatcagttttacttgatgtgaagccatgggacgatgagactgacatggccaagctcgaggaagctgttaggagtgtccagatggaagggctgctctggggcgcatccaagcttgtcccagttggatatggtatcaagaagctgcaaatcatgatgaccatcgtcgacgaccttgtctctgtcgacactctcattgaggactatctgtgcgctgagccagtgaacgagtacgtgcagagctgcgacatagttgccttcaacaagatctaggcgtgacttccgatcagtccttctcctggggtgctggcgatggtggtggctgggcaatgcaccagcctaatttatccatagctatatgtctgctttgtgtggccagtgatattgccgtgagtatttttggatcctattcgagtcgaatgtaccagtaccagagttaatttgctttaattcgaaacaccgttccagttgg

SEQ ID NO: 23955 - DNA, 778 bp, Zea mays
  Clone ID: LIB3606-035-A10_FLI
cttttccaagaaacctagctagctagctagtaagaggcacagcaggcaccatgtcgcaccaccattcccaccacaattctcattctcacaaccgtacccaccaccactctcactctcactccggaggaggtggaggcggcggcggcggtggcggtgccggtggaggcggaggcggagtggctaaatgccactgtgattgctcacaccatgatcattcaccgccaaggcaaccgttcttcccgccaccgcagcttccaccaccacaaatctttcttcctgcaggaccaccgctccctccgcctgggccgctcccatttccgccaccgatattcttcggacctccgccgccacccccgcccccgcctccgttcatgtgcccacgaccgccaccatgcatgtaccggaggtggtaatggagataaaagttgatatacacggtgtgcatgtggttgtgccaaagcttctcgtacgtggtgttcgtgtttctgtcaccccaaataagaaccgagcttctccggagatagaactatcttcacagggttccctgttcaaggatggcacgcatcatctcagaagggaagccctcggggagtcttctccatgtatgggtggagttttgaaagaagtcattatttctagttcttgttcaagttccctacgtactagatgttctcgttgatgcgtggatttatatgtgtacttgttctcttgtgcttttcaccggccctgatgtcgtcccgttgtaaccgatgtttgtgtttcaatgtgtctttggttt

SEQ ID NO: 23956 - DNA, 1217 bp, Zea mays
  Clone ID: LIB3606-035-A2_FLI
caaccacactcgcattgcattgcattccttcagttcagtagtgtgctctgacagtgagatggcgagcgtgaaggttttcgggtcacccacctcggcggaggtcgcccgcgtgctcatgtgcctcttcgagaaggaggtggagttccagctgatccgcgtcgacgcctaccgcggcaccaagcgcatgccccagtacctcaagctgcagccgcaaggcgaggcgctcaccttcgaggacgagagcctcaccctctccgactccagggggatcctccgccacatctcccacaagtacgcgaagcagggcaacccgtacctgattggcacgggcgcgctggagcgggcgtccatcgagcagtggctgcagacggaggcgcagagcttcgacgcgcccagcgccgagatggtctacagcctcgccttcctgccgcccaccctgcccaggcagaacgacaacggcaacggcggcgcgttcaacgccagggaagccaccgtgggcagtaacgccgacgcgtccagcagcaagcgcggtgtggccgggtcacagccggcggcaagccagaccaaggtgagcgcgcagaaggaggaggagatgctgaagctgttcgagcagaggaagaaggacctggagaagctgctggacatctacgagcagcgcctggaggaggccacgttcctggccggcgacaacttcaccatcgccgacctgtcgcacctgccctacgcggaccacctcgtctccgacccgcgctcccgccgcatgttcgagtcccgcaagaacgtcagcaggtggtggcacgacgtctccggccgcgacacctggaagtacgtcaagaccctgcagcgcccgccgtccacgtccaccgacgccatcgccaagaacggccagctgggccagcagcagcacctgccgtcgtccaccgacggccacggcgtgaagagccaacggctggtccagaacgagcggcacttctagccgttgccgtcccttcccgccgacgaataaactacctgcgccgccgccaccgccgccgtccatcaacatgctgctgttcgtgtcgttttcatgcgtcatacgtgtcttgctgcttttgaagctccgttcccgggtgcagggacctacgagtccattccgccgtttgctgattctgtttgtcgtgtaataaaatgaaaaccccaccccgttttgaatgaaattcaattctcagtgtcgtgtg

SEQ ID NO: 23957 - DNA, 923 bp, Zea mays
  Clone ID: LIB3606-035-B12_FLI
ctagcatttagcagttcatcaacgcgctcaacctagcacgacgtacggcgatgaggcgccgcggcagcaactcctcgccgcttgcggctgctgccctgcccctcctactcctcctcgtcgccggctgcttccactgcgcggcaacggcagctcgccacctgccttctcctggcgccccagtccaagcgctggatcaccaaggtacgcagcacgacgatacgacttcgctcgcctcgaccgtaccgtaccgttcgtacgttgcctttgttggacttgcttgctttgctaattgctgctcgacttaattaacgtccctgaatggaactctctctccctccgcagccgagaacggtgccaaggctgcatcagctggtgcagacggcgccggcggccttgtgctccaggaaggtggcacgggcaacaacggcgacgagctctcctccaacaccaccctcctcgagacgacgacgacgatgggagcggaggcgtgcgacgacgggaacggcaaggacgagtgcgtgctgaggcggctgctcgtcgacgcgcacctcgactacatctacacgcagcacaagggcaagccgtgaccgtcagcgacgaggacggtgccgcggctgcagctgcagaaagcgaggagcgagaaattgaccacctcattcctcaaactaaacatcttataaattcataccaagggcgatggtaatctcatctgctgctactagctactagtacatgcatcgatccaccttctgcgtgtgctgtatatttctgccacgctgcctatatattagcatgcatcatcatctaggtctaggactgtctgatggtttcccgtatttgtaaacactgatgaacagtacctctctctctctctgcttcctgtaaccaccaagcttacttggtccaagagaacgtaacaacgc

SEQ ID NO: 23958 - DNA, 844 bp, Zea mays
  Clone ID: LIB3606-035-B8_FLI
gcagcaacctcatccgccacgtgatgaacagcaccggcacgccgaagcaccccggggtggccgtgccgacctacgtctacgagctgtacgacgaggacacccggccgggctccacgtcggagaagtactggggcctgttcgacatgaacggcgtccctgcctacaccctgcacctgacgggctccggcgtcctgctggccaacgacacgacgaaccagacctactgcgtggcgcgggagggcgcggaccccaagatgctgcaggcggcgctggactgggcgtgcggccccgggaaggtggactgctccgtgctgatgcagggccagccgtgctacgacccggacaccgtggacgcgcacgccacgtacgccttcaacgcctactaccacggcatgggaatgggctccgggacgtgctacttcagcggcgtcgcggtggtcacgacgaccgacccgagtcacggatcttgtgtttatgctgggaagaacgggacgtcgttgatgaacggcacctccctggcgccgtcgtccaactccacggagggaggctccggcgcgcaccgggcgttcggcgacgtctcgtcactcgtccgcatcgtctccaccgcgctgctcttcagcgtcgtcctcctcctgttgtaggcagtagttagtaatagaggtagaaagcacattggaaccatgcagtctttgcagaattaggcattcgtgagggagagggagggatgattctttttgctgtcaagtggcgggccgggaatgttctgatgctctattctcccgtctggtattggtatggtatggaacaaaaattggtttgcatcccagcagttgctccgttgtgc

SEQ ID NO: 23959 - DNA, 1225 bp, Zea mays
  Clone ID: LIB3606-035-C4_FLI
gcagcatcatggcgctcaccacgagcactaacaaccaagccttgcttgacgctcagctagagctctggcacacatcctttgctttcatcaagtccatggctctcaagtctgcagtggaccttggcatagccgacgccatccacagccacggtagcaacgccaccctgccccagatagtttccagggccgcgctccacccgtccaagatcccctgcctgcgtcgcctcatgcgggtgctcacagccgccggcatcttcagcgccgcccaccgctcgccggacgacggcggcggcgagctcgtctatggactcacaccggcgtctcagctcttggttggcggctcttcaagcctggctcccttcatgtccctggtgttacaccaggtctacgtgtcgcctttccttggcctcggcacatggttacagcacgagcgctcagacccgaccctgtttgagatgacgcatgggttcactgcctgggacctgaatgaccacaagccagccttcggcgagctcttcaaccaaggtatggtctgcgacagcagcttcgtcatggacattgtcgtcaaggagtgcggcgacgtcttccggggtctgagctcccttgtcgacgtcgccggagggcttggcgcggcggccgtggctatctcgaccgcgttcccgcatgtccagtgcagtgtgctggatctcccgcatgtcgccgccaatgctcccgctaacaccagtgtcaagtatattgctggcgacatgtttgagagcattccaccggcagacgccgtcttccttaagtgggttttgcatgactggggcgatgctgattgtatcaagatactcaagaactgtaagaaagctataccttccagggatgcaggaggaaaggtgataatcgttgatatggttgttggaggccagtcgtcaaacattaagcacaaagagactcaggtcttgtttgatctcttcatcatgacgatcaatggcgccgagcgagacgaacatgagtggaaaaagataatttccgaagctggatttagcgactacaaaatcatacccgttctaggtgttcgatccatcatcgaggtctacccatgattatttggcgaatacgtgtttcgtttttttctgaataagttgtttggttaactagcatgggacgagtgtccatgagatcatgtgtgatgaaaactatgtttgtggtgaagtaagcactttgcaatgatattagtacc

SEQ ID NO: 23960 - DNA, 1009 bp, Zea mays
  Clone ID: LIB3606-036-B4_FLI
gtctcatctttgccggcaagcagttggaggatgggaggacccttgctgactacaacatccagaaggagagcaccctccacttggtgctgcgtcttaggggtggcatgcagatctttgtgaaaacccttactggcaagaccatcactcttgaggtggagtcttcagataccattgacaatgtcaaggccaagatccaggacaaggagggcatcccgccggaccagcagcgtcttatctttgccggcaagcagctggaggatggacgcacccttgcggattacaacattcagaaggagagcaccctccacctggtgctgcgcctcaggggaggaatgcagatcttcgtgaagacattgacaggcaagaccatcaccttggaggttgagagctccgacaccattgataatgtgaaggccaaaatccaggacaaggagggtatccccccggaccagcagcggctgatcttcgccggcaagcagctggaggatggtcgcaccttggctgactacaacatccagaaggagagcaccctccatctggtgctccgcctgaggggtggtatgcagatctttgtgaagaccttgactggcaagaccataaccctggaggttgagagctctgacaccatcgacaacgtgaaggctaagatccaggacaaggaggggattcccccagaccagcagcgtctgatcttcgccggcaagcagctggaggatggtcgcacccttgcagactacaatatccagaaggagagcaccctccacctggtgctccgtcttcgcggtggttattaagccatcagtcgttgaagctgctgctgtatctgggttatccagtgtctctgccattgcccatggatggtactgtctttcaaagtatttgtatggtttgtgtcgtgagtcgtgactgagctggtttcatggaccagttgtgttctcgttacccaaaactatcgtgcggcagcatatggcttaatcatgaataaatgtggtgtttgaatttaaaatac

SEQ ID NO: 23961 - DNA, 666 bp, Zea mays
  Clone ID: LIB3606-037-A10_FLI
cgcccccgctcgcttcacttctctaggtgcgcaccgatcagaaggtgcctgcctcctcctcgtcggcgaaaagatggcggtgccgctgctgacgaagaagatcgtgaagaagcgggtcaagcagttcaagaggccccacctcgaccgctacaagtgccttaagccaagctggcgcaggccaaagggtattgattcccgtgtcaggaggaagttcaagggatgcaccttgatgcccaacattggttatggttctgacaagtcgaccaggcactacctccccagcaagttcaagaagtttgtggtccacaacgtttctgagctggagttgctcatgatgcacaacaggacctactgcgctgaaattgctcacaacgtgtccaccaagaagcgcaaggagatcgtggagcgtgctgcacagctcgacattgtggtcaccaacaagcttgctaggctccgcagccaggaggacgagtagtctggtttcttgtcttaacgacgaactggatgttgccattcctttctgtagggaactactttgcttgtgtcttgttagtactgaaaaccagaggcactcctccctttttgcaatcagtagccactaaaatgtggcagattccactgtttaccttgcatctatctaaattatatgcgtttcatggtttcacc

SEQ ID NO: 23962 - DNA, 2020 bp, Zea mays
  Clone ID: LIB3606-037-C11_FLI
ttcacgagttcgtctctcgatttattgtctgccacacctcccttcagctagctatcttcccctagctagctaggtaccagtagtgtgtgtatatatagatagatttatagatatagacacacacaacaagtgcaagatcaggcgaaagctactagccgcccttgcagtcttggactccattcgtcgtcgtccttgggttctcctcctcacctagctactatgttccaccatcagcaggagctcttgcaggcagaagctgcagcggcagatcgggagagcagcatgtccaacctcacctcctccacgttcggcggccccaacgcggcgcctgctgctgctgctgctgccccgccggcgcccgcggcctccggcaacaacaagcggaaacggagcctcccaggcaaccccgaccccgaggcggaggtcgtggctctctccccggcgacgctgatggcgacgaaccgtttcgtgtgcgagatctgcgggaaggggttccagcgggaccagaacctgcagctgcaccggcgcggccacaacctgccgtggaagctgaagcagcgcggcacgggcaaggaggcgcagcggaggaaggtgtacgtgtgccccgaggcgtcgtgcgtgcaccacgaccccgcccgcgcgctgggcgacctcaccggcatcaagaagcacttcttccgcaagcacggcgagaagaagtggaagtgcgacaagtgctccaagaagtacgccgtccactccgactggaaggcgcactccaagatctgcggcaccagggagtacaagtgcgactgcggcaccatcttctccaggcgggacagcttcatcacgcaccgcgccttctgcgacgcgctcaccgaggagagcgccaaggccatcggcctcaacgccatggcggccgtgccggcgcagcaccaccaccacccgatgctcttctcgccgccgcccacgcacgtcatgcagcaggacgtcgccctcctccaggagcaccaccaccaggaggtcatgcagcaggagcactgcaactacgccatgaagacggagatgccgccgtggccggggatgacctacgaccacccgctgctgcagccgctctgcaacgccgccgcaccgcagagctcggccacgtccacgccgccgccgccgacgacgatgcagcttcccgctgcctacgcgcacctatcggccacggcgctgttgcagaaggcggcgcagatgggcgccaccgtcgccggcgcgggctacacccagatggcgggggccgcgacaagcgccaccttcggcctcggcctcccggacctgcagaatacccagcagcagcagcatcaggacggcgagatcatggccgggctcgcgaggacagcctcccacggccgcggcggcgaggaaggcggcggcggcggaggcgacggcatgaccagggatttcctaggcctgcgcgccttctcccaccgcgacatcctcggcctcgccggcttggactcctcgtgcatgggcgccatcatcagtgccagcgccagcatgaactgctacgacgagccacagcagcgtgcacaggctcaggcagagcagcagcagcaaagcagcaacgagcaatggcacagcatgggcagccatcaaagctaggtcgataaaagctactttcttcttcctctcgccagccgtcatcggtacgtcgccatcgctgcatctcatcgctgccgtcgctgtgcagaggcaaagctagctagggccggccgctcggtgcaccgtgccttttgctcatcttttgcttctgttcaggatatcatctcatgcatgtggtaaccacgcaagcgatcaaaccgttccgatcaaactctagcccggtccaaggatggtgatgacagattggtgatacagaggtacgcagggagttgtataatttttttttttgggttggcgaagagatcggccaacatgtaagctaagctccaatcaagggaagaaaaccatagctatatgtgacagtaataatacatgcatgcattcatcatctttt

SEQ ID NO: 23963 - DNA, 836 bp, Zea mays
  Clone ID: LIB3606-037-D3_FLI
gggcaccgtccagtccatcactgccctttgttctctcctccacagtcgcagacaaagctggtccgtctcgcggagaggggaaggtggataggcggcacccacccatcacccatggctgggttgcaaagatcggcgaccacgttcagacggtccggctcgtcgggcctggtctgggacgagcgtttcctgaccgaggccgaggccgacgctgacgccgaggcgaaggccggcgccgcggaggatgccgagcagccggagctccggcactcgaggagcgtcggcatgctgcgccgtgcgggcggcggtggagacagccgcagcaagaagggcaaggagagtaggcagaagcaggcggagtcggcgcggcgcagcaaccagcaggtgttccggaccaaggacgtggccccggacatggatcccccctcgccgagggtgtccggctgcgccttctgcgccgtcttccgcgggggctctggcggtactggccgcagggcacaggcacgccgccggtccaagcccaggaagaagtgacggcgtagcaacacgtacgtacgtgcggtacgttgttgtttgtgccatctgtaaagtccgggccatggttgttcgtgcgtgtacatgtttactatactaaatactagggtcatatatagatgagcttgctactcggtaatcggtatacgtacgccattatttagttcaggatagttcctccttttttgggtcggtcggttggtttcttaatccagatccatgcttttgaggtttgggcgacggttagatgttacttgtctactatatatgcagcagctatttatgagatctggggctgttgttct

SEQ ID NO: 23964 - DNA, 441 bp, Zea mays
  Clone ID: LIB3606-037-E11_FLI
gcagcggcggcggcggcgaagatgatcataccggtgcgctgcttcacctgcggcaaggtgattgggaacaagtgggacctctacctcgacctcctccaggccgactactcggaaggggatgctctggatgctttggaattgttccgctactgctgcaggcgaatgctcatgacccatgttgacctcattgagaagttgctcaactacaacacactggagaagactgagacaagttaagtgagcaagcatatcatgctctgaaagcactactgtttcgcagtatcatatatattgtaggcggtatgttgtttcttctctatcaggagaggattgttgtgagtgtgaacttgcttttgctctcgagcattcaaggactgacaagggcatgttgcatctatgttacgatgttggagattttaatcgatataacggctaactaat

SEQ ID NO: 23965 - DNA, 985 bp, Zea mays
  Clone ID: LIB3606-037-E8_FLI
agcagcgccgcgagccacagctagcaccaccaccttgcaccgcacccgcaccgagacgaacagatctatcgatcgatagctagatccatggctgccggcggcgacgacaccaccatcgcgcaggtccacagcggcatcgacagcagcaacaagacgctgctcaagagcgaggccctctacaagtacgtgctggacacgtcggtgctgccgcacgagccggagagcatgcgtgagctgcggctggtgaccgacaagcacgagtgggggttcatgcagtcgtccccggacgaggcgtcgctgctgcggatgctgatcaagctgagcggcgcgcggcggacgctggaggtgggcgtgttcacgggctactcgctgctggcgacggcgctggcgctgcccgccgacggcaaggtcatcgcattcgacgtgagccgcgagtactacgacatcggccgccccttcatcgagcgcgccggggtggcgggcaaggtggacttccgggagggcccggcgctggagcagctggacgagctcctcgccgacccggccaaccacggcgccttcgacttcgcgttcgtcgacgccgacaagcctaactacgtccggtaccacgagcagctgccccgacgcgccgctcagcgacctcgaccgcaggttctccgccgccatcagggaactcaacgtccggctttctcaggatccccgcgtcgaggtctgccagctcgccatcgccgacggcgtcaccatctgccgccgcgtcgtctgatgtgatgatgatccgacgaccaagatcgtatatcattcgctcgtcgtctctgtcatctttcaactgcctgcccgctgccgtcgtcaactaataatgcatggttctgctggttctttttttttattttcttttgtgcttgcattgtgtgtgttgagttgaacatcccccgcgatgtactgcaacaactggaatgcaatgcaacatcatgcgtgcagctagctt

SEQ ID NO: 23966 - DNA, 863 bp, Zea mays
  Clone ID: LIB3606-039-B9_FLI
cgtctggtacccggtacttttttttctctagatttggcgtcgcgactcgcgagactcctcgcgcttttcgccgagagaaaactagggttttgctcctggaatctcctcccccgcagccaccgcccgaccgtgcgccaacgatacatccttctccctcctccgatccggcctttttgatccccggatcccgtacaatatgcttcccctctcgctcctcaagaccgcccaggggcaccccatgctcgtggagctgaagaatggtgagacatacaacgggcatctggtcaattgcgacacgtggatgaacatccatcttagggaggttatttgcacctcaaaggacggtgacaagttttggaggatgccagagtgttacattcgcgggaacaccattaagtatcttcgagttcctgatgaggtgattgacaaggttcaggaggaaacttctaaaagccgatcagataggaagccaccaggtgttggccgtggaagaggaaggggggacgtcggttctaaacctggaagcagaggcattggacgcggccaagatgatggaggtagaggcagtggtggccgtggaaggggtggagttggtgccaaaggtggtaacaaaggtgggggccgtggtcgtggctgaagctggtcgacacaagggagaatgccgctttttgaggcctgtaattgtgttgcatagattgcttaggacaccatgaatgaaccgagttggctggttgtatgggggcacaaaccagaatggttcctgtgatctagacaccgaggatgcggcggtagccaggcttgttgctgttccccaaaactgtttggttgatatcatgagtatgatccaatctgttcagttgctt

SEQ ID NO: 23967 - DNA, 2000 bp, Zea mays
  Clone ID: LIB3606-040-G10_FLI
ggtcgagaccatgtacagggtgtgcgtgggaggcggcaagatcgagaggaaggaggacgacccgcgcctgtggaggaggtgggattccgacgagcgctacatcttctccatgaacgccgctcacagcatccggaacacgtccagcatcagctacgtgtcgcgcgacggcgccgactcggtccccgcgccgctgcggctgtacgagacggccagggtgacggaggagaccttcgtggtggacaggaagttcaacgtgtcctggcggttcggcgtggaccccggcttcgagtacctggtcaggctgcacttctgcgagctggagtacgggagcgcggagcagcgcaggttcaagatctacatcaacggcaagaccgccgcggagaactacgacgtggtcgccaaggccgggggcaagaacaaggcgttccacgaggacttccttgacgacgacgacgccgcccccgcgtcggagaccgacacgctctgggttcagctgggctccgagtcctccgcgaccagctccgcggctagcgacgcgctcctgaacggcatggagatcttcaaggtcagccggaacggaaaccttgggcatccgacggttaggatcgggggcgtgagtggtggcctggaggacgacagacgaaagcggagccccaggtgggtgctggtcggcgctgctgcgggtgtggtgatcttcgtctcggtcgctgctgctgtttacctctgtttctatctgcaccggaagaaaaacacaaacacttcagctgctaataagaaaacgaagacgaagacgaaggacgacaaccttccggctacgacgacggcccccggtcttcgcgcagctggaacatttggcagctgcaggatgggccggcggttcagcatcgcggagatcaaagcggccaccatggacttcgacgagtccctggtgatcggagtcggaggcttcggcaaggtgtacaggggcgagacggacacgggcactccggtggcggtgaagcgggggcacgcagagtctcagcagggggcgaaggagttcgagacggagatcgagatgctgtcgaggctgcggcaccggcacctcgtctccctgatcgggtactgcgacgagcaggacgagatgatcctggtctacgagcacatggcgaacggcacgctgcgaagccacctctacgggagcgagagcgagagcgaccacctccccgctctgacgtggaggcagaggctggagatctgcatcggcgcggcgcgggggctgcactacctccacacggggctggaccggggcggcgtcatccacagggacgtgaagaccaccaacatcctgctggacggcagcctcgtggcgaaggtggcggacttcggcatctcgaagcacggcccgccgctggaccgcacccacgtcagcaccgccgtgaagggcagcttcgggtacctggacccggagtacttcatgaggcagcagctgacgcagagctccgacgtgtactcgttcggcgtcgtcctgctggaggtcctctgcgcccggcccgtcatcaacccggccctgccgagggaccaggtcaacctccccgagtgggctctggagcggaagaggcggggcctgctcgagaccgtggtcgaccgtcggctggacggaggctactacctggagtccgtcaggcagttggctgaggtcgccgagaagtgcgtcgcggatgagggacgggaccggccttccatcggtcaggtcctgtggcacctcgagaccgctctgcagctgcaccaagcgcatctgcagagctcatcagcctcagctgctgcgggtgatctggagccctctgatggcgcgtctgctagcaacagcatcaggcgcgccgaagaggcagcagaaaccgctggtgtgacctatggagatggacatggagatggggaagcggtggaactcagagttgaggtactgtaaacgctgtgtgtgtgtggttgccccagcaaatatactgaaatccttttggttcttc

SEQ ID NO: 23968 - DNA, 600 bp, Zea mays
  Clone ID: LIB3606-040-G3_FLI
gatcagggtaaatctgagttgtaacatatttctgatgataacaagaggtgctatgatacaactcagatttaccctgatctcaagagtgagagagaggggaagggatcgagagcgcggcggaggcgatggcgagcggagggaagggactcaacgcgactggggagttcttccggcggagggacgagtggaggaggcaccctatggcggggaaccagctgcgccacgccacacccgggctcggcatcgccatcgtcgccttcgggatctacctcgtcggcgaggccgcctacaaccgcctctaccgcccctccggcgacaaccaccactagatcgccggcaggatccgtgactcggtcaagaagctggagccaactttaccaagcactggtgctgttgatgtttttacagttttgagctcataaggtcagccatgaccatattgtaatctgtgaccaggtagacttgcccactggtccgtccaactattgtcttgggaccctgtgttaatccttgctatatggatctgacagtgctcatgtaattcaagaatcctggactatcttttatgtgcttatttgagtttgcaagtgcgtttccgtt

SEQ ID NO: 23969 - DNA, 541 bp, Zea mays
  Clone ID: LIB3606-042-A9_FLI
tgtccagcacaagagagagaagaggagtggaggaggtgggagcagcaagaatggcgtgctccaccaatctctgcttctcggcgttgattcctcctcttccagcctcttcttcttctggctcctcccccttcctcacgatgaagcgtgtgtcctctgttccgtcgttgtccaggtggacaatccgatacaagcaattgggacatgcattatatcagagaagccacgttctggcctttgctagtgcagatgcatcacaaggcaaaagaagctcaggtgagaatgttgtgatggttgatccactggaagctaagcgtctagctgctaaacaaatgcaagaaattagggccaaagaaaagctgaaggtgcattgctgctgtattggagtgtatcattccttagattaaatcaatcttatatgctaaaggaagaaaacttcatgataaggaaaggaggaaaacatctatcttttttttttgtttggaccaatagttggtgatgaatcattgtttcagataactggagacagaactaggcttttacc

SEQ ID NO: 23970 - DNA, 834 bp, Zea mays
  Clone ID: LIB3606-042-F10_FLI
accccaacgcctcacgcacccctcaaccctaccgcagctgcgcaggcacacgacctccgtgtgcagcgcatcgccgccatgacgggtcccttacactccagctccggccacaacgccgccgccggcggcgggggcaagaccatcgaggaaatgtaccagaagaagacgcagctggagcacatcctgctgcgccctgacacctacattggctcggtggagaagcatacccagacgctctgggtctacgaggacggcgccatggtgaaccgctccgtcacctacgtccctggactctacaagatcttcgacgagatcctcgtcaacgccgccgacaacaagcagcgggatcccaagatggacgcgctccgcgtcgagatcgacgtcgacggctgctccatctccgtatacaacaacggcgacgggatacccgtcgaggtccaccaggaggagggcgtctacgtgccagagatgattttcggccacctcctcaccagtagcaactacaacgacaacgagaagaagacaaccggcgggaggaacggatacggcgccaaactcactaacatcttctccacggagttcgtcatcgagaccgctgatggacgtcgccaaaagaagtacaagcaggtgacatgttttggctgtatcttgcccttttgatttgccatatttccgctgtggatttgtttcgaaatggagtagatctggcaaaacatattagctacttgtttttgtactcgagattctatagttgatatgattattagaagtaagtgccttctgttatcagtttaaaatctggtggataaagcattcgagtgcacaatttttttc

SEQ ID NO: 23971 - DNA, 1014 bp, Zea mays
  Clone ID: LIB3606-042-F6_FLI
gctctgaagcaaactccacgactcggtctcctcttcctagcaccatccggcccatccagccgccgccgccttgcatcctccacctccccggatcccgccgcgatggaggaagacgacgagttcggcgacctctacacggacatcctcatccccactcatacccccgcatccacctccgcgctatccaaccctgttctagtcgaaaccctacaccgcccgcctccacaccctaatcctacccccgtggcggcagcagcagaggaggtcgacgatgactggctcctaggagggagcgaacccatacccggggtcgacccgaccggcgattgggccgacgaggacgacgatggaggggagcccgcacctcccgcgaagcggtccacctctgcggatgatatcgatccgctcatggggggtggtgcgggggattccgggccggtcatccctgggctctcgtcatcatcggcagctggtgcggccgggagcgacgaatgggacagcgatagcgaggacgacatccagatcgtgctcaacgagaccgatggccgcccggggcttgtggaggatgaaggagacgacgaagacggtgaggacctcgtcatcgtcgccgacggaccagcgatggaggagcaggattggggagaggacccagcagcggcaggggcagaaggagagcgaaaggacggaggtgagcctggtaagacggtggcagcaccgaccggaaggatcgggtacagtggcggcggcccagggttccatcagcagcaccattccatgttcaaggtcagttatttgtgccaagaagccgtacgatgcgctctggctacccctgcagagggagacggcataaaactagctgcaactcacatcctttatgttgtaatgtgttagtctgtggaaatttcttgtgaagttagtttctgttttacaatcctttgcgaaccattccacaatgtaactgtaaatgcattattagcatggtctataaaggaagaaaagaagaaaggttcaatg

SEQ ID NO: 23972 - DNA, 860 bp, Zea mays
  Clone ID: LIB3606-043-D1_FLI
catcctcatcctcctcttcctcgtccggatctgactcctcctcctcctcctctgacgacgactcttcctccccctccggttcgggttcgggttcgtgaggttctccggggttcggtttcgtgggtgagcggatcgagatggcggcgtcggatgttgagtaccgctgcttcgtcggcggcctcgcctgggccacggacgaccactccctccacaacgccttcagcacctacggcgaggtcctcgagtccaagatcatcctcgatcgggagacgcagaggtcccgcggcttcggcttcgtcaccttctccacggaggaggcgatgcggaacgccatcgagggcatgaacggcaaggagctggacggccgcaacatcaccgtcaacgaggcccagtcccgcggcggccgtggaggcggcggcggcggcgggtacggtggtggccgtggaggcggcggctacggcggtggcgggcgccgtgatggcgccgccgccgccgccgctgctctgctcctcaacaggatgctctgatctggtctggtctggtctgctctgcgtatgtagtcacgtcacgtggctccagatcttgcttgggcgctgatgagctacactacactacactagtttttttcttctgcttttagtttttttccccctcaccacttgagattggggaggcatcttctgcttctagcttgcttgctgcttcttgaattgcgtgactgttattggttggttcttgcttccattattttgcctttttctttctttctttcttgcttccagcttgttgttgatgcagtttttttttcaagagacaagattagtataatgtcaagtgtgaatgaagagctctatttattt

SEQ ID NO: 23973 - DNA, 883 bp, Zea mays
  Clone ID: LIB3606-043-E11_FLI
gggcgagttactcggggaagcttcggtggcaaaggagaatggtggtggttgtagtccatttctcgcgattgttgggaatgattcactggagatggctgcattgtcgttcacctgcactgaagggggctatgtggacaagaagagaaggccgaggaagcagaacaatcacaagtctgtagggtccgatcatctggttgttcctaagtgtgtgtttggtttcacagacaagccagtctgctcacttctggggcatgctgccgatgttcttgatctgtcatggtccaaatctcaggtgcgaattcatcatctccgtctcaatttcaactgcctaaatgcattttgggggtatttttggtattaattctgaaacatctcattcaataactgcacagctcaatgttcttcagacagaaaagaaacacttaatgtctgttgtgatgatttctagtgataaccttgagagctccagtttcctcatatgatgaactcatattcatattggtttaattgttatagagaagaagcttcagtacaaaagtcagatagatttaagaattaggaaaaagaagtcaggccagaagaagataactggcttccagtttgctcctggaagctcctcggaagttctgattacttctgcggattcgagaatacgagttgttaacggcgatgaatttgtccaccgccgccgcaaaggaaggaaagagagctagaagaaggagaagcacaaaagtcaccctccaagattgttgctgatagtctcagccagatcagtcgatcatccaccttccttccaaacattggtgtctgtttgaatgctttgtatgtttgaacctctgttgtggaagaactagtgtgctggaattgtgtatgacttgtgatg

SEQ ID NO: 23974 - DNA, 683 bp, Zea mays
  Clone ID: LIB3606-043-H3_FLI
cgacggtgcatcactacaagtttagcccacccagtcccaccagggaatgaggccccctctcgcattcaacatgatgaacttgttggaaaggatgtaatattatatgccattattggacctgagcaacctgtggctaagggaacaattgtttcaactaatcctaacaccttgctgggaggtgtgcctcttgggaaagaatattgtgaagttattgtgaacactgtattgaaaagggatgccattttgccttgtccttatggttatgtagagacgatggctgatgctcatcaaatgtcagttgcttggctttataagaggatgaagattagcaaggcatcaggatcaccccaaggtattggaggtggctggcactagaggcaagctgcagggttggagaaacaagagaccgacagggcattttgtagacaatgagtcctaatttgtagttaaatatgtaatggcatgtcaagctatatgtgggattttttgtttgaaactcagagatgaatcattttgtagactgagtcctgattttggtgtagctaaaacatgtaatttctgctaccatgaatcctattttttggtgtagctaaacatatataatggctgctataatataatggctgctataatgtaatggctgctatgttgatatgttcaaagaaaactatgttgttcttcca

SEQ ID NO: 23975 - DNA, 1448 bp, Zea mays
  Clone ID: LIB3606-044-E2_FLI
ggcagtgggaaaataccgcaccgcacgcaccaatggagaacgccaacgcctcctcttgccgcaacggcgacggcacccagacgccaccgccgcacgtggcgatgcttgcgacgcccgggatgggccacctgatcccgctggcggagctggcgaagcgcctggcccagcgccacggcgtcacgtccacgctcatcacgttcgcgtccacggcgtccgccacgcagcgcgcgttcctcgcctcgatgccgcccgccgtcgcgtccatggcgctgccgccggtggacatgtccgacctcccgcgcgacgccgccatcgagacgctcatgtccgaagagtgcgtgcgcgccgtgccggcgctcaccgaggcgctcctgagcctcaagcagcggcccaccacgaccggccgtctcgtggcgttcgtcaccgacctcttcggcgcggacgcgttcgacgcggcgcgcgcggcgggggtccagcggaggtacctcttcttcccgaccaatctaaccgcgctcacgctgatgctccacctgccggagctcgacgcctcgatccccggcgagttccgggacctcgccgagccgctccgcctgcccgggtgcgtgccgctgccgggcaccgagaccatgaagccgctgcaggacaagtccaaccccagctacagatggatggtgcaccacggcgccaagttccgcgaggcaaccgccatcctcgtcaactccttcgacgccgtcgagccggggcccgccgaggtcctgcgccagccggagcccgggcgaccgccggtgcgcaccatcggcccgctcgtgcgcgcagaggacggtggaggcagcaaggacgacgcgccgtgcccgtgcgtggagtggctggaccggcagccggccaagtcggtcatcttcgtgtccttcggctccggcggcacgctgcccgccgaggagatgcgggagctcgcactagggctggagctcagcgggcagcggttcctgtgggtagtgcggagccccagcgagggcggcgtcggcaacgacaactactacgactcggcgagcaagaaggaccccttctcctacctgccccaagggttcctggagcggaccaaggacgtcggcctcgtggtgccgtcgtgggcgccgcagcccaaggtgctggcgcaccagtccaccggcggcttcctcacgcactgcggctggaactcgacgctggagagcctggtgcacggcgtgcccatgctggcgtggccgctgttcgccgaccagaggcagaacgcggtgctgctgtgcgacggggtaggggccgcgctacgagtgcccggggccaaggggagggaagacatcgccgcggtggtgcgggagctgatgaccgcggagggcaagggcgccgcggtgcgggccaaggtggaggagctgcagaaggccgcggccgagggccttcgcgacggcggcgccacc

SEQ ID NO: 23976 - DNA, 1689 bp, Zea mays
  Clone ID: LIB3606-044-F1_FLI
aaatgaatccgatagccaccgccgcccccacgccatcctcatttttcgcctcaaaccgcctcttcgcccctcgcctccgctccgtcctccccgccgctgccatgtcttacgccgccgtatccgcctccgccccaagccccagctccggcactggggaacaggcgaaggcggccccgctcccgcactcgaccctcgagatcgcgggcgcccgccggggcctcctctcaggcttcgccagcctccgcgccccgtaccgtgccttccccgtactcgcgtcgaaccgacacgtcgagaccatcttcgctgcgctcacgcgatcgctccccgccgttaagctgcggcgcgagtgcctccgcgcccctgacgacggagccgtcgcgctcgactgggtctctggcgacgaccgcgtgcttccgaatgatgctccggtgcttatactcttgcctggtcttacaggtggaagtgatgatacatatgtaaggcatatgcttatgagagctagaagcaagggatggcgtgttgtggtgtttaatagccgtggatgtgcagatagtcctgtgactacacccaagttctattctgcttcatttacaggggatctccgccaagttattggtcatattttaggacgttatcctcagtccaatgtctatgctaccggttggtctcttggagcgaatattcttgtgcgctaccttggcgaggaaactgataaatgccctttatctggcgcggtctctttgtgcaatccttttaatttggtaattgcagatgaagatttccacaaaggatttaacaacgtttatgataaagcattggctagggctttgacgactatatttaagaagcatgctctccttttcgaagggctggagggtgaatatgatgtacacaaggcagcgaatgcaagaactgttagagattttgatgaggggttaacccgagtttcatttggtttcaagtcagtggatgattattactccaattcaagcagctcggattctatcaaggatgtttgcatacccttactctgcatacaggctgataatgacccaattgcaccatccaggggaattcctagagatgatatcaaggcaaataagaactgtctacttatagtaacaccacagggtggccatcttggatgggtagcaggcgacgaagctccattcggatttccttggacagacccaatagtgatggaatatctagaacatctcgagaatgagaaggactctagtaccaaaaataacacatcctatgagggtgtttcagaggcatcagtatcccatctaactgtgcatggccaaagataataatatctctcttctcatatttctcattcgccacatatgttttatatggaaatagtttagtagagttcatttagccgtgttgtctgctggtgcctgctggtttgggtacatggctcttcgtctacaggtctacacatgtgcgagaagatttctgtgtcaaataagatgtctggttctgagatcaaaatagaacatgcgttgtccaattgttcgttcttaggggtttcactttcatccggtgtttgaaagggattctctgtaaatgcatgagctgttacggaattggcctttgtatccttcttctgcaacgcgtgaagttgatggcgatgagaacagcagtgcatcatgtaaatttgacaatgtcattgagggc

SEQ ID NO: 23977 - DNA, 1304 bp, Zea mays
  Clone ID: LIB3606-044-H11_FLI
caagcacacacaagcaggcaaagctctcgaccatcgctctgagggattaatggcggcgggaggaggcggcagcatcgccgacgagaaggcccccgttgctgaggctttcggcgggcacctggaggcggccgagatgacggaggcggaggaggaacacagcggcggcgtcaagtcccggctgtcgggtctgctgtggcacggcgggtcggcgtacgacgcgtggttcagctgcgcgtcgaaccaggtggcgcaggtgctgctgacgctgccctactcgttcgcgcagctggggatgctgagcggcgtgctgttccagctcttctacggcctgctgggcagctggacggcgtacctgatcagcatcctgtacctggagtaccgcacctgtcgggagcgcgagaaggccgcggacttccggaaccacgtgatccagtggttcgaggtgctggacgggctgctgggccggcactggcgcaacgccgggctggccttcaactgcaccttcctcctcttcggctccgtcatccagctcatcggctgcgccagcaacatctactacgtcaacgaccggctggacaagcggacgtggacctacgtcttcggcgcctgctgcgccaccaccgtcttcatcccctccttccacaactaccgcgtctggtccttcctgggcctcgtcatgaccacctacaccgcctggtacatggccgtcgcctcgctcgtccacggacaggtcgagggcgtccagcattcgggccccacaaggatcgtactctacttcaccggggcgaccaacatactctacacgttcgggggacacgcggtcacagtggagatcatgcacgcgatgtggcgtcctcagaagttcaaggccatctacctgctggcgacgctgtacgtgctgacgctgaccctcccttccgccgccgcctcctactgggcgttcggcgacgagctgctgacgcactccaacgcgctggcgctgctcccgcggacgcccttccgcgacgccgccgtggtgctcatgctcatccaccagttcatcaccttcggcttcgcctgcaccccgctctacttcgtctgggagaagctcatcggcctccacgactgccgcagcctctgcaagcgcgccgccgccaggctccccgtcgtcgtccccatctggttcctcgccatcatcttccccttcttcgggcccatcaactccgccgtcggctcgctcctcgtcagcttcacagtctacatcatcccggcgctcgcgcacatggtcaccttcaggtcgccgcagtcgagggagaacgccgtgg

SEQ ID NO: 23978 - DNA, 1535 bp, Zea mays
  Clone ID: LIB3606-045-E7_FLI
caccttttttctctctcaacccgccagcgccaccagcaacttccctcagatcccatccacccctcgctattaaagcagcccaggccgccgcccgccgccgctcacccaccaatccacagcgacacccgaccccgccgtcgtgatgaggccggcgctgctcaagtccacggccgagctcctccgccgcagccgcggctacgcctcctcggccaacccggagcggaaggtggccatcctgggcgctgcgggcggcatcgggcagccgctctccctcctcatgaagctcaacccgctcgtctcctccctctccctctatgatatcgccgggacccccggcgtcgcggccgacgtctcccacatcaactcccccgccctggtgaaggggttcatgggggacgaccagctcggggaggcgctcgagggctccgacgtcgtcatcatccccgccggggtgcccaggaagcccggcatgactagggacgacctcttcaacatcaacgccggcatcgttaaggggctctgcactgccatcgccaagcactgccccaacgctcttgtcaatatgatcagcaaccctgttaactccactgtcccgattgcggcggaggttttcaagaaggctggtacttatgatgcgaagaagctgtttggtgtgactactcttgatgttgttcgtgctaaaactttttatgctggaaaagcgggtgtgccagttactgaggtgaacgtacctgttgttggaggccatgcgggtattactattctgccactcttctcgcaggccactcctgcaagcaattcgttgtcccaagaagacattgaggccctcaccaagaggacacaagatggtgggacagaggtggttgaagcaaaggcgggaaaaggctctgcaacgttgtccatggcatatgctggtgctgtttttgcagatgcatgtttgaagggtctgaatggagttccagacattgtagagtgctcttttgtgcaatcaactgtgacagagttgccattctttgcctccaaggttcggctcggcaagaatggagtggaggaagtgcttggtctgggtgagctcaacgagttcgagaagaagggtctggaaaacctcaagggcgagctcaagtcttccatcgacaagggtatcaagtttgcccacgggaactaggcaccttgcccggcttctaacaattgatgccccttgcatttttgtttgactgcctatttttcctgccccccgtatggttggggcaatgaggcgtagtggtcgataataaaacccagcggaacaaagaaaacgtgtaccagaaactgtttgcaaacaccggtgccttttttttgtgttgaaccaccattagttgagccgtgagggaatggtgaacaagctttccacttgctcatttccgagcgcttctctttgattgtatccatggtttggactcatgactgtacgtcttggcagttggcttggcacccaggaatctaatcactggagttgctgctgttatcgagactttgcagcgttgcattctgatcgg

SEQ ID NO: 23979 - DNA, 1070 bp, Zea mays
  Clone ID: LIB3606-046-C8_FLI
cggacgcttccacgcgaccaagcagccacgcggcgctggtctggccggccatgtcctgcctcgcggcgccgccggctgcaccgccaaaggcgggggagcgcatgctccgcgccgccgctcctttgcgctcgccttcgccgtgccggggcctgcattacgcggtgcgggggactgtagggcgagaagccgggtgcggccggcggcagctggcgctgctgcggtgctccccagctggcgagtccagggcgtccggggacggcggcctttccagcttctgtataattgaaggtccagagacgatcgaggactttgctcaaatgcaatcgcaggagattgaagacaacatcatgagccgacgcaacaaaattttccttctgatggaagaggttagacggttgcgagtgcagcagcgtatccgaacttctgaaagcaaagatgccaacactgaaggaaatgaaatgcctgagattccatcaactattccatttatgcctgatgcgtcaccaaagactatgaagcaactctatatgacatcgttctctgtcatatctgggataatcatttttggaggcttgatagccccagtacttgaactgaaactagggctgggtggcacatcttatgaagattttataaggaccttgcacttacctcttcaattgagtcaggtagatcctatagtggcatcattttcaggtggcgcagttggtgttatctcagctttaatgttggtcgaagtgagaaatgtcaggcagcaagagaagaaaagatgcacatattgccatgggactgggtacttgccatgtgctcgctgttctgctagtgggatgttattgaacacaaagcagttttcattattggggcataatatgtggtcaatgaaaggaaggtgtcagaattgttctggagctggaaaggtgatgtgtccgacgtgcttgtgcacaggaatggcgatggcaagtgagcatgatccacggattgacccttttgattagtttgatatgacaatacgctttttgtctgtttcgtggaaaatatgttgccgataacagcaataaactcatgtttgt

SEQ ID NO: 23980 - DNA, 1520 bp, Zea mays
  Clone ID: LIB3606-046-D3_FLI
cattttccttcagccatgggcaaggagaagactcacatcaacattgtggtcattggacatgtcgactctggcaagtcgaccaccactggccacctgatctacaagctcggcggtattgacaagcgtgtgattgagaggttcgagaaagaggccgcggagatgaacaagcggtcattcaagtatgcctgggtgcttgacaagctcaaggccgagcgtgagagaggtatcacaattgatattgctctgtggaagttcgagaccaccaagtactactgcactgtcattgatgcccctggacaccgtgacttcatcaagaatatgattactggcacttcccaagctgactgcgctgttcttatcattgactccaccactggtggttttgaggctggtatctccaaggatggacagacccgtgagcatgctctccttgctttcacgcttggagtgaagcagatgatttgctgttgcaacaagatggatgccaccacacccaagtactccaaggcccgttatgatgagattgtgaaggaagtctcttcctacctgaagaaggttggatacaaccctgacaagatccacttcgttcccatctctggtttcgaaggtgacaacatgattgagaggtccaccaaccttgactggtacaagggcccaaccctacttgaggctttggacttgatcaatgagccgaagaggccttcagacaagcccctgcgtctccccctacaggatgtgtacaagattggtggtattggaactgttcctgttgggcgtgttgagactggtatcatcaagcctggtatggttgttacctttggtcctagtggccttactactgaggtgaagtctgttgaaatgcaccatgaggctctccaggaggcccttcctggtgacaatgttggcttcaatgttaagaatgttgctgtgaaggatctgaagcgtgggtatgtggcctccaactctaaggatgaccctgccaaggaggctgctagcttcacatcccaggtcatcatcatgaaccaccctgggcagattggcaacggctatgccccagtgctggactgccacacctcgcacattgctgtcaagtttgcggagctcattaccaagattgataggcggtctggcaaggagcttgagaaggagcccaaatttctcaagaatggtgatgctggtatggtgaagatggttcccactaagcccatggtagtggagaccttttctgaatatcctcctcttggtcgctttgctgtccgtgacatgaggcaaacggtggctgtcggagtcatcaagagtgtggagaagaaggacccaactggagccaaggtgaccaaggctgccgcaaagaagaaatgatgtgtctggctggttctgtgtttgcttgagggatacctagtggaaacataaaatatctcgtcttgttcacgtcattgtctgaactatgctcgcaacgtttgcctggtcgatttagaactgttattttcgttaaaaccagagtgttatttaagacttaaccg

SEQ ID NO: 23981 - DNA, 391 bp, Zea mays
  Clone ID: LIB3606-047-A12_FLI
tccagtctccttgcgccgcgccatcccccgccccgtcggctggaggcccagacggccccgccgcctccagtcccggagccggtgcaggtgggcgagataacggaggaggaactacggcagtacgacgggtccgaccccgagaaaccgctgctgatggccatcaaggggcagatctatgacgtctcagagagcaggttgcttcctttgaatccttgattgcttcagtcctaacctttaattattcatccatttcgtcccaatcgcaactcgcagagctgctgtgctctgttgtactagtcactagtcaatcgtggtgaaccagtagctttttcttcttctcttcacttgtacaaccgatgctctccaaaacaaggcggagttctgttgtgct

SEQ ID NO: 23982 - DNA, 593 bp, Zea mays
  Clone ID: LIB3606-047-D4_FLI
tgcccgccgccgcccgtagggcctcctccccttcctccgcctcattgagcttcgccacgtcgcagctcgccggcctctccctctccctctccccaagaggcagcagctccagcccactgtcgcgcggcgtgtgtgcccgttcacggacaagaagacgaaccgggcgaacaaggtgtcgttttccaaccacaagacgaagaagcagcagttcgtgaacctgcagtacaagaagctgtggtgggaggccggcaagcgcttcgtcaagctgcgcctttccaccaaggccctcaagaccatcgagaagcacggcctcgacgccgtcgcgcgcaaggccggcatcgacctcaacaagaagtgagcaagaagtgagcccatccgatgagcagccaaactagtgtggggtggcactagcttagcattcacgttcgcagggtcgtctcgtctgtctgtctgcctgcctgcctcctgctgttctttcgcaatcaaatcatatcattatatttcctccccgttttgatttgtgtaccataccaatcagtgtaggcagatcgaggttgcacatatacgtttttggtcccttgttgggtcctctg

SEQ ID NO: 23983 - DNA, 1676 bp, Zea mays
  Clone ID: LIB3606-048-B11_FLI
actcgaacttaaaccctagagccgcagccccggtcgctccaccgaccccaaatctcaaatcagcgggagggaactcgcacgcgaaggcaagtacgctttagatcccccattgcttctggctactaggccagcgcgcctcgattttcttctccgttttggtctaattcgtgaggaatttgggttttctcggtggagcttggttccgctccgccttggagtggatttcggtgacttctttgttcagattgtttcgctcttgcaggctgaactcatggctcgcgtctacgttgggaacctggatccgcgtgtcacggcgcgggagatcgaggacgagttccggacgtttggggttctgaggagtgtatgggttgctaggaaaccaccagggtttgccttcattgactttgatgaccgcagggatgcacaagatgccattcgtgaattggatggtaagaatggttggagggttgagctgtcaactaaagttggtggtggccgtggccgagaccgtaacggttctgatatgaagtgctatgagtgtggtgaagctggccactttgcacgtgaatgccgcttacggattggttcaggaggcttgggtagtggaaggcgtcgcagccgaagtcctagatatcgcagccgaagccgcagccgcagccgcagcccaagatatcgaaggagcccaagctatagcagaaggtaatttgctaatgacaccaattcaccacatgtattcatccagtagttttaattaagggttgggaaacacgacctagaaatcctaaaacttttgagaacgaagcaaaatttcagagataacacgttccctttaaccaagtgagtatccactatccagtatggtctcagatttgttggatagtatttaaccaaacattcgactatgcattttgactttttgagtgttgttctttatcttgcattggtactatataatacaatgcattctacaccccctcccacctgttatagctttgttagcgttggcctaatatttcaggggaacatgttgagagacttcataaaatacagatcaatgtcttcttgcctaactagcagccttttcaatgcgttattttatgttcatcctgaaaacaaatgttcggtttttccggagctacagcccgcgaggtcgttctcctaggaggcgaagttacagcaggtcgccactgggatctcctgcacggagtctcagcaggtcaccgccgctgccgccgcctcctcccagaaataacagcaggtcaccacctggagcccgagaagtgagcaggtcgccgccgccacctcctcccagaaataacagcaggtcaccaccggcagcccgagacgtgagcaggtcaccaccggcagcccgagacgtgagcaggtcgccaccaccacctcctgatgccagaagaagctatagtggatccccaggacagcagccacaacgcgacgagtccccatatgccaatgacgcctgagattctcttagctgccccaagatgctggaaaatgctaggggcccccagcatgttttgcctgtccggtcggcacaactgtaattctgtaggatcgagtctgagattttgttccagtgttttgggtttcccttgacacatcgctgctgatacaattgtggaggcaggagcacaacgtttctgttttaagtattgact

SEQ ID NO: 23984 - DNA, 1620 bp, Zea mays
  Clone ID: LIB3606-048-E7_FLI
ggagagattggagggaggcccctgcccaaggcaagagaaaccgcggcgcgcggagagggaggaagggcagacgcagacgggcgaacaagatgagggagatcatcagcatccacatcggccaggccgggatccaggtcggcaacgcctgctgggagctctactgcctcgagcacggcatcgagcacgatggcaccatgcccagtgattcctcggttggcgtcgcacatgatgccttcaacacgttcttcagcgagactggttccggcaagcatgtgcccagggccatcttcgtcgaccttgagcccactgtcatcgacgaggttcgcactggctcgtaccgccagctcttccacccagagcagctcatctcggggaaggaggacgcagctaacaactttgcccgtggccactacacggttgggaaggagattgtcgatctatgcctggaccgtgtgcgcaagcttgcagacaactgcactgggctgcagggattcttggtgttcaatgctgttggtggtggtactggctctggacttggttcactgctgttggagcgcctttcagttgattatggcaagaagtctaagcttggtttcaccatttatccttccccacaggtgtcaacagctgttgtagagccatacaacagtgtcctctcgacccactccttgctcgagcacactgatgttgcagtcctcctggacaacgaggctatctatgacatatgcaggaggtcccttgacatcgaaaggccaacctataccaacttgaacaggctgatctcacagatcatatcatcacttaccacctccctgaggtttgatggggctatcaatgtggatgttactgagttccagaccaaccttgttccatacccacgtattcatttcatgctttcctcatatgcccctgtaatatctgctgagaaggcctaccatgagcagctctctgtgcctgaaatcaccaatgctgtatttgagccctcaagcatgatggccaagtgtgacccaaggcacggaaagtacatggcttgctgcttgatgtaccgcggtgatgttgttcctaaggatgtcaacgctgcagttgcaaccatcaagaccaagagaactgtccagtttgtggactggtgccccactggattcaagtgtggcatcaactatcagccaccctctgttgtccctggaggtgacctggcaaaggtccagcgtgccgtgtgcatgatcagcaacaacaccgccgttgccgaggtgttctcacgcatcgaccacaagtttgaccttatgtacgccaagcgcgcattcgttcactggtatgtcggtgagggtatggaagagggtgagttctcagaagcccgtgaggacttggctgctcttgagaaggactatgaggaagtcggtgcagagggtgccgatgatgagggtgacgagggagacgactattgagtagctggctaataagtagttctctggtggttaatggttgggttattttgagtatatactctatggttccactccattggatactgctgctgtgtgtgtttccattttgtactatgtagtaaattgttcgtagccccctattggccatgattgttcatatcatccttctttggtttgc

SEQ ID NO: 23985 - DNA, 845 bp, Zea mays
  Clone ID: LIB3606-048-G1_FLI
catgcagacgcgccacgccaaccgtctctgccgagccgccgtcgacttcctgcctcagatagaaggttgatccttgcgtgcgtgccgctgatacgactcccgaccgggtccatttcggcggcacgccccgccgcgttccccaccgcgctatattgcgtgccgctgatacgagtccacatcgctatcgcgtcccacacgttcacagtcacagcatggcacgccaccctctcgcggctgctgtcctcttcctctgcctgctgtcggtctgccgcgcggccggcgccggcgccgctggcaaaggtaaaccgagcgccgtgttgctgccggtgagcaaggacggcgccacgcagcagtacgtgacggggttccggcagcgcacgccactggtgccggtgaaggccgtgctggacctggcgggagccacgctctgggtggactgcgaggccgggtacgcgtccgccacctacagccgcgtgccgtgcgggtccagcctctgccgcctctcgcggtcggcggcctgcgccaccagctgctccggcgccccgagcccgtcctgcctcaacgacacctgcggggggttccccgagaacacggtcacgcaggtcagcaccagcggcaacgtcatcaccgacgtgctggcgctgcccaccacgttccgcccggccccgggcccgctcgccacggcgccggcgttcctcttcacctgcggggccacgttcctgacgcagggcctggcggcgggcgccgcggggatggcgtcgctcagccgctcccacttcgcgctgcccacgcagctcgcctccacgttccgcttctcccggaagttcgcgctctgcctgccgccc

SEQ ID NO: 23986 - DNA, 939 bp, Zea mays
  Clone ID: LIB3606-049-C3_FLI
caaggccaatccgaaatctcgagctttcgcgccggcgaccacagcaaagaggaggccacagcacgacagcgccccagggttcctactctcgtcgcagcggcagcagtgaggggaagatgtcgtcggtgttcagcggcgatgagaccgcccccttcttcggcttccttggcgccgccgccgctctcgttttctcatgcatgggggcggcgtacgggacggccaagagtggcgtcggcgtggcgtccatgggtgtcatgcgcccagagctcgtcatgaagtccatcgtgcccgtggtcatggctggtgtgctcggtatctacggcctcatcatcgccgtcatcatcagcactgggatcaaccccaaggccaagccatactacctctttgacggctatgcccacctgtcgtccggccttgcctgtggtcttgctgggcttgctgcaggcatggccattggcatcgttggtgatgctggtgtcagggcgaacgcccagcagccaaagctgtttgtgggcatgatcctcatcctgattttcgccgaagcgctcgccctatacggtctcatcgtcggcatcatcctttcatcccgcgccggccagtctcgtgcggactaggcacgttccacatgtctccgtcacctggtcgtaaccggggtcgtgttttgtatccgtgatgagccgacaagctggagcacttaatttttttatgctgtctagttttttgaacttgcgttgagtcgagaaaacaaaatagaacttgtgtagccgaggggtgacctttttcccttgtgccattcttttccctgtcgtggtgggtggtgggctgtggctgatgcttctttctgcacacttttttttttgcttgggctgggggcgttggtgtaatctggtgaataagcgagtgcgtccagtgcaatgggagctcaggactcctttgttc

SEQ ID NO: 23987 - DNA, 1563 bp, Zea mays
  Clone ID: LIB3606-049-E3_FLI
ggagagagcgatagttctgttctactgcaggaagagcagggagcaagatggggtccggatctttcctcaaggtgctggccaataacttcgatgtccttgccgggtatgatttttttcccattccttctgttttcgccgacaggcgattcattgattttcttgcatatgtagcgttttcccgcggtgttttttcctagggttcgacgtagattctttacgagcgagcgagcgaggttgatctcggttatttctgcaccaagcggcatggggaaagtgtgcgcgacgggaatctttcttccgttgcgggctgttgggttgctatggatgaacgcgtttaggttccctcttctcggggatctcggtgctgccatgaaactgtccgatgggtagtgtggctaaatacttgattttgtgatgggattttagtgcctcggtcaattgattggcaggcttcaggctgggttttaccgcaaaatcataccaacaaccgtggaaggaaactcactactaaaggtttcctttttcttctgtagatgatatatcagtaaccaatagggatggtaaaactgtttgtatagtggtattggaatccaaacccttcaaaattagttcaaaagttcaaccccaatacaccagatatttcaaggtttcaatgctgggtcttgaacttccatttgtgttactggccactcatatcacttgcttatcctctatatgcttctgttagagctatagagacaaaaaatcctgtagatgatcagcagtggctcacttactgggtgttgtactcatttatcactttgtttgagctaacttttgctccaattatcgagtggcttccattttggtcgtatgcaaagctgttctttaactgctggttggtcttgccttggttcaatggtgctgcctatgtttacgaccattttgtgcggccaatgtttgtgaaccgccaaatagtgaacatatggtatattccaagaaatgagaagctaggtaaatctgatgatgttctgtcagctgcagagagatatattgaacaaaacggaccagaagcatttgagaagctcatcagcaagtctacgaagtcttcgaagtcaaggaacacaaagcggttgaacttggaggatggagaggctgaaaatcgagctaaagccgagagagaatcgtggggcgaaaatcccttctacgacaaaaactacagatactaaaccagttcaaaatccactcagcagtttgaagatgaccttgctcacgagcctcatgcaagctttagttgcgtcggaccgaagacgacattcccatatttctgactctgaatattgtaccttgttacatccactgctactacataatgatgagttctagagcaattgtggactgtgtaaatggaggtagatgctagcgttaatcgtttatgtgctttttggatggtgtccttatcacccgttttactacatctttagcaaggagcgagccttgattttcagtttggctttcgtatttttgtaattgaatgctacttttagataactgaaatatgagggagttcgagcttctaggaag

SEQ ID NO: 23988 - DNA, 2090 bp, Zea mays
  Clone ID: LIB3606-049-H8_FLI
tacaaatatttcgtccaaagtttgaaactctggtgtctctggcatatgggagctgcaacaatgagcagaactccaagtggcaacctgtagaggctaccctgttttgtatacaagcaattgctagatcagtctcaattgaggagcgagaaattttaccacagattatgtcactgcttccctgccttcctcaacatgagcagttgctacaaacagtttgtttgaccattggagcattttcaaaatggattgatgctgcaccagctgaattatctattctaccacctctagttgatattctcaataagggtatgagtacatcagaggatacagctgcggctgcttctatggcctttaagtacatatgtgaagattgtaggacgaagttctcagggtccctggatggcctcttccagatataccatattgcaatcagtggagttggtggttataaagtttcttcagaggactcgttgcatttggttgaagccctaagtgtgattatcacaacgcttccaccagaatctgctagtagagccctggagttaatctgccagccagtaatcaatcccttgcaagaatttatccagcagggtgatcaagttcttcaacgagtccctgctcggcatttaactgtacatatagaccgactatcaagcattttcagtaatgtgaaacaaccagaagttgttgctgaagctgtatatagatattggccgacactcaagagtatctttgatcaacgagcatgggatacccgtaccatggagtcaatatgccgatcttgcaaatttgctgtaaggacatgtggaaggttcatgggaatgacgattggtgcaatgcttgaagaaatccaaactctctaccaacaacacaaacagtcttgcttcctttacttgtccagtgaagttatcaagatttttggatctgatccatcttgtgcgggctatcttactagcttgatacaaatacttttcagccatacagtgcagcttctcagaacgattcaagattttacagccagaccagatatagctgatgattgctatttgttagcatcaagatgtattcgttactgtcctgatctgtttatacctacagaaacgtttcaaagattggttgactgcgcaatggctggtataactatacatcacagggaagcctgtaaatcgatcttgtcttttctatctgatgtcattgatcttccaaactcatctggcgggggacagtaccgtgaagttattaacacaatcatacttcagcgtggtacaacccttactagaataatgattgctgccttaacaggggcgctaccatctggtcgtctggaggaggtttcatatgttctgctgtcacttagcagagcctttggtgaggatatgctgaactgggcaagggaaagcattaatcttataccaccacaagccttaacggatgctgaacgtttgcgattcttcaacatcatatctgatgctacttccgggtctagtcttcataacataacagatagattcggagaaatctcagatatctgtagacgaaacaaaacagtgcaagacctagttcaaagtgccttgcggcctcaggatttgaccgtcacggtggttcgacaacagatgtgataactggatgtctctgcaaggcaagtttagaaagccagtgagtcagtgttgattgaagactcacgtcatcttgggaattttttcttagttcatacaggtttgagttgcggcggcatacagttcagatttgttcagagcatagataggccagttagcattgtaattctctcgtgtttcccctttgtacatgtgccacaaattgtgtatttggggagggagataagttgtgttgtattatctcaaaaaacagtgttatacttggtataactggcagatcatgaggtatggtgatctaccgtgggcctgattttgcgttggccgttcagcttctttttgtaaagtagggtggccatcgattttattatgtaagcttataccggttgttaaagaaaattctagtctgtgttcccttatggtcaccaaatgtaatggccctaaaggtaattcaagtttgatgattagaacttgtgc

SEQ ID NO: 23989 - DNA, 1423 bp, Zea mays
  Clone ID: LIB3606-049-H9_FLI
ctgcggagagatctggcagcggtggctatgccattgggcgacgacgcggcggcggacttcgcgctgccggacgagctcctggcggcgctgccgcgggacccctacgagcagctggatctggcgcgccgcatcaccgcgctggcggtggcggggcgggtgtccgggctggagcgggaggcggggcgcctgcgcgcggaggccgcggggaaggaccgcgagagcgccgagctccgggagcgggtggcgctgctcgacgccgcgcttcaggagaccaacgccaggctccgcgccgcgctcgaggacaatattaagctcagcaaggagcgggactcgctggcgcagacgtccaagaagctggcacgcgacctgcacaagctggagtcattcaagaggcatctgatgcagtcattgcgtgatgatagttcatcaacacaggaaacagttgacattacaacgtgtgatcagccagtagcatcaaaagcatcatccagtgcagatggtggatctgtcagcaaccctgcaacgaatatatttactgagtcattggatgtgggaagcacaaaccgagatggtgctgcagcaaggcctccgatccagaaatactctctcacaacacacatcactccccgccttaccccagaggccactcctaaagtaatgtccacttctgcttctccaaggcgaatgtctaccacaggaacacccaagttgatgtctggttctacatcaccgtcaaaaactcgaatcgaatctcacatgtcaatgacaccatggtatccatcaagcaagcaatcctcggcggcaaactcgcctccacgaggacgttcaaacccaggtcgcactcctcgaatcgatggaaaggagttctttcgtcaggccaggagtcgtctatcctacgagcaatttggagcattcttagccaacatcaaagagctcaatgcccataagcagtcacgtgaggaaactctcaagaaagctgaagagatctttggtccagacaataaagatctgtacctgtctttccaaggcctgctgaaccgtagcatggtggcataaggcttcacaggtcgcttcgcaagtccaatggagttccctcttccgcaacgctaataggatacgcaagttgttgctggctttgcagagataatgaggttgctgcattggcaacttatctagctgtggatctgaaggcccagctgcaagttttggccccgtaataatccatatcggtggaacgagcggatctctctgaacgactgagtgtgcaaaccagcagtgtcgcttctgtaaaagtggtgtgtgtacttgccgaaagcggatgacaaattcattgcctaaatcagggtgcagtctgtcatgaagcgcgtccttgtaaaaccgtgaaaaaggtaaccatgagagtaacaaacttcatttcgtcgcc

SEQ ID NO: 23990 - DNA, 1281 bp, Zea mays
  Clone ID: LIB3606-050-A3_FLI
gaaggacttcagtagtgatgatagcagtgatgaacgaatggaaagtatagcgaaagaatttgggataaaaagatataactggcttgtttacatggataaaaaaaacaaagaacaggagaagaggcagaaagaaattgttaaaggcgacccatctataaaaaaaatgagccgtagagaaagaaggaaggcttctcagattgagcgggaaaaggagcgggaggcagcacgttctgttggaagggtatcttatcgtgatccttatagggaacaaaggagaagcccatcatatgaagcatattcaaggggcagaagatcaagatcgagatcaagatctcgttcaccatcccattctaggcgtcatggccgtgggatacatgctgaaagcaattattggagcaagcaaaaggctcctagggttgaatatattactgaatttggaggttccgatgataccagtgaaccaaaagtttcagggatctctccgccttcgtctccaatacgaattgacatacctaaccggttgtctggtggtcaaattcttgaggcacttcacagtgatcctgcctcttctttgtctgtggaacaggaaagaactgcaaaacttttgaaaccttcccccagtacatcatcagcattagctaaactaagcaaggttgcttctgggggaactggtaaaactccccagactgaaaagaaagaaacaccacaagaaagacttaagaggataatgagcaaacagcttaacaagcaaattaaaaaggacacggctgctgagattgccaagaaacgagaacaggaacgacaaaggcaggaaaaacttgctgaagttggtcgatacaagcgtcgtagccgcagtagaagtcttagccgttccccaccaagaaggcggcgatatagcagaagccgtagtaggagcagaagcccaagaaggtaccgatcccgctcgctctccagttcccggtcgccctctcgctctccaaggtaccgaagcaggtcaagacactgaaaatatccaggcagccactaacaaagtgccttgccatgttgtagttaatttattttatagactttttcattcctgcagcgatgtgtactcatgagaagcctccgtttttgttttcttagtcctattatcgacagtgtgtgttccttgtgtttcagaaggtttattctctgttcctcatggcttgcccctttcaagcaagcgtaattttagggcatgtttggccagaccagcttccaggccgaatttagtagtattgccaagcagttcttttattc

SEQ ID NO: 23991 - DNA, 1097 bp, Zea mays
  Clone ID: LIB3606-050-A7_FLI
cgggcacaccccccgagctcagcttagctccactccagctccaatcacagtcgtgaccagagcgcgagagctagctagagggccgtgaaaatgccgatcaataggatcgccctggggagccaccaggaggtgtaccacccgggcgccctcaaggcggcgttcgctgagttcatctccaccctcatcttcgtcttcgccggccagggctccggcatggccttcagcaagctgaccggcggcggccctacgaccccggcgggcctgatcgcggcggcggtggcgcacgcgttcgcgctgttcgtggcggtgtcggtgggcgcgaacatctccggcgggcacgtgaacccggccgtgaccttcggcgccttcgtgggcggcaacatcaccctgttccgagggctcctgtactgggtggcgcagctgctggggtccaccgtggcgtgcttcctgctccgcttctcgacgggcgggcaggccacgggcaccttcgggctgacgggcgtgtcggtgtgggaggcgctggtgctggagatcgtgatgaccttcgggctggtgtacacggtgtacgcgacggcggtggacccgaagaagggcagcctgggcaccatcgcccccattgccatcggcttcatcgtgggggccaacatcctggtgggcggcgccttcgacggcgcgtccatgaaccccgccgtgtccttcggccccgccctcgtcagctgggagtggggctaccagtgggtgtactgggtcggccccctcatcggcggcggcctcgccggcgtcatctacgagctgctcttcatctcccacacccacgagcagctcccctccaccgactactaaaagccgaagccgaccgacccaggggtgcgcagcgcagcgcagctagcatccagcgctctctccccgctcgccgccgtttagtttctctcgtgcacgtgcatgcatcgtagactgtctcaggccgccgctgcgccggcgccgctcgcatcgtttgcttccttggaccagcagtcgtcgccgtcaggctgaactgcttgtaaccgtgaattccggacccgtttgcttctgtaagatttgtgcatttgcctgagtac

SEQ ID NO: 23992 - DNA, 1369 bp, Zea mays
  Clone ID: LIB3606-051-B10_FLI
caacattctcggcgaatcctccgtcccagctcgctccagcctccatccaagctcccgcgcgcgcgcgtggtggtctcgatcgctaccatgctgtcttcgcaccacgaggccatgctgccgtacgcgccgccgccgccgccgccgtcgctgctggtggaccgtcggtacaggcagctgcaacaagccggagaggcggcgcccagctgcccgcgctgcgactcgcccaacaccaagttctgctactacaacaactacagcctcacccagccgcgctacttctgcaagggctgccgccggtactggaccaggggcggctccctccgcaacgtgcccgtcggcggcgggtgccggaggaaccgccgggccaagtcgtccttgcggtcggcggtcggcggcggcggcggcggccaccggttcccgggccccgtcgtccggcccgacctggtcctggaaggcatggtgtcgaacccagcccaggagatgcccggcgtgcccgccgctgccgacggctccaccattgatctcgcgatgctgtacgccaagtttctcgatcaccaccctccggcggaggaaggcctcggtagtgccgtgacgccggagctggcggtggcactggctgggccagggcgggtcgacgaggcattattcgacacgttcagcgacctgagcccaccagctggcgttctggcggcgccgccggtgcagttcgatccgccgtgcggccacgacgacgggttcgacgactggtcatccggcgcgccagtgcgcagcgccgggccctcgagtacggccagtactgccaccgcaaccaccaccatgccgccgtgcgccgacgtgagcgtgcacgctgcgttcggcgaggagttcaacttcgccaaggaccagagctgcctattattcgactcgctagggctgcccacggacgacgtcggcgacctctcttcgtcgtcgtggcgttcgatcgtgccgggcttgtcgacgctggaggacaccgagtatgacctgctggactcgtcgttccctgacgacgccctcagccttcacgagggcatggttagcgggactgatcatgactgctggagcgtggtggattgccaaggattggaggctctctaatccgccggtggtgttcttgtgatgattggtttcctacatttatttttctccttttcttttctttcattcaattcggtttggaagaaatatatatagagatacgtatgttttggaagagaggtactacgtgagggacaagtcgctcatgtaattaaattaaggaattcggtatacctgtgagatagatcgaggcaatacaataatgaaagcttgggaatactagtcgctataagtatctcatgcatgagacatg

SEQ ID NO: 23993 - DNA, 153 bp, Zea mays
  Clone ID: LIB3606-051-E11_FLI
tttcttgctttgttcgcggcttgtcagtctgttaaactgtttattttatttggcatagcctgaaggagtgaaatcaacagttgtcgtagttgtaactgttttttcttcttgccatgtcatataatacagtatgtttcaataaaatctcttaag

SEQ ID NO: 23994 - DNA, 1162 bp, Zea mays
  Clone ID: LIB3606-051-H10_FLI
gtttgggccgaatcacaggtgcctttggagcccggaaacgggagtctggagcatttccgagttgtctccaccgcgcaagcgacgagaaggcggcgcgccaccaccgctgctggcctgccgccacgactcgccggcagactaggctcctatggcgcgccgccgcgtgctgctcttcctcaagcccttcgacgtataccctccccgcccgtacgtcggagctgcggcctcttctcccacctctgcgccctcgtcactgccgcaaccgcgcgccgccaaccccaaggtcttgagctatctggatgataggtgcagagttcacaaggacactattgatctctgccagagtgtcttacagcgcaagtcccttgactggattgctgtgcagcgcaatcatttgtgtcagccaatacgtgatgtggatcttgtggttgctgtcggcggcgatggcacccttctccgggctagccattttttggatgattcagttcctatattgggtgttaattcagatcctacttgtactaaggaggttgaggagctatctgatgaatttgatgcaaggaggagcacagggtatctttgtgcagctactgcaggaaactttgagcagatacttgatgtgacgcttgatggcagtaggcgccctttggagctgtcaaggatatcggtgaaactaaatggaattcagctgccgacttatgctctgaatgatatattggtgtcacacccttgtccagcaagtgtgtcgcgcttctcatttaggaaaaggaacaatacaggagagaactcgcgtttaattaattgtagatcaagcggtctgagggtctcaacagctgctggatcaactgctgccatgctatcagctggaggatttacgatgccattatcaagccgtgagcttcagtatatgataagggagcccatttctccaatggatgccgacaaagcaatgctccatgatgttcttaagcaagaacaacacatgcatgtcgtgtggtacaatcaagagggtgctgtttatgttgatggttcacacgtagtgcattcaattcagcatggggactcacttgagatatcctcaggtgctccgaccttaaaagttgttttgccagaacatttgctaaagatgggacctgaatggtgaaataacaatatttttgtg

SEQ ID NO: 23995 - DNA, 2301 bp, Zea mays
  Clone ID: LIB3606-052-A8_FLI
cttcgtctccccccatccttgggtccttcccctcccactccctcttcgcctcgtccgcggcagtaggctcaagcttaggaactcgctaccgagaattagttggaggcttcgtgatggcgggcgcgaaggcggatgtagacgcagaaacaggagatggcagcggggtcggcagtggcggcggcggcctctttagcgagcagatgctgattgataagctcaacaggctcaacaactcagccactagcattgagacactttcacaatggtgcatttttcaccgcaagagggccaaaagggttgtagatacatgggaaaaacagtttactagttcaagggaggagaagaaaataccattcctctatctatcaaatgatatcctgcaaaacagtaaacgcaagggggcagactatgtggatgagttctggagggttctacctagatccctgaagcatgtttatgaaaatgggggagaggaagggaggaagcaggtggcgagattgatattaatctgggaccaacgtaaagtttttgggactcgtattggaagtatgaaaaatagcattcttggtgacaaccctcctatattggataacaatgtgaatagtttaaatcctagctctaatcccacttcaaattccaaagctgcacggaaggattctggtacagtagtaaaaaaactcactgttggcgggatgcctgaaaagattgtgtctgcataccaatcagtgtttgatcaacattttgatgaagacacagctctaaacaaatgtaagagtactgtgggccttttggagagaataaataaagatattaacgatgctagcatcaacggtaatcagccagcatcatcattgatctctgaccttcaagagcaggaaatgaccttaaaacagtgcatcgaacaacttgaaagtgcaggtagggtgaggatatccctgatcaatcaattgaaagaagctctcagcgaacaggagtcgaagtcaataattctccgtgatcaattgcaagtcgctcgagcagaggctgaacatgccattcaacttagacaacaactgggtcgtgttcttgtcacgaacgatacacaatctacttctagtccgctcatgattactccaccagatcaaacagcagctatgatgcacggttcgggagtaagatcgacacctccccattcacaaccactgaaccctgcagtgtcacttccccctacagtcagtgcagtgggtgatgagtccaagagaacggcagcagctatggcagataagcttgcatctttgtcagctcctgtgcaggtgctgacctccattctctcatcttttgccgctgagcaagctgcttccataaacggcggatcaccttctggagaactctctggagtaccaccaggtttccatattgataagaggcctaggctggagaaaacagggcaggccgaggcgggcgctcctcccttttttgggcaagcgtcacaggtgcaacaacaggttggagcagtgcctacttcttttggaggcacacatccaccaactccaggcccattcccaccccctccaccgccattgccacctctattgccaccgctcatgcaacagtttggtcaaaatactggaggaatgatgggaatgcgaggacctttcgggatgatggctggctctatgccacctccgcctccattgtccaacattctgccggcaggttttccgggactaagtggaccacctcctccacctccacttccaccagctcagagccagccccagcagcagcagacctctcaggcgccacagcaatcaccaacatcagctggattctttcaatcatcaggcatggggttctttcctcctgtgcaggtgcagcaatctcagcctgcccaacgacagtgattcaactgtgtctatttgcactcatgggcttaaaggcagcaccttgcattaactttgtgcattaaacaatatctcaccgagtattgagcctaaacgttggctggtcctgcaagcgaggcacggccaatgacgacggattagaaagattgtagaataggcatgcacgttgtagaactatccccttttttgtccgagtagttttaactcttcctggttatgtgaagttgctagacttcgtttgtttttgatccagtctgcattgatcacccgaagcaaaagaaaacgactttggaaaactggggctgaaattgggacttcgccaactgacaggacagttttatggctgaaacagttgtagaacttactggtcttagtctcatagatatgatgtgaactgcatatttggcatgctgtttag

SEQ ID NO: 23996 - DNA, 866 bp, Zea mays
  Clone ID: LIB3606-052-F10_FLI
ctaaaaaagagagactaaagtttagtctcttggaaccaaacatgccttgagcctcatattcaaccttagtcttgcctctgtttgcatggttttggcactacacgcgttgatgagaaaggaaagtttaattcatgctactttattgtgtaggctcccacgtggtttgtgctcaagattacgtttttgctccttgcattgtgttttacggctatgcttgctctagcattttcgtcgaagaactttgtaatcgttgcacatgttcttctgctggtgactattggaaccgtgctatttgtgctgcttaacaggtttctggctgaagttgggctcgtgcctgttgaacagcagatgaaggagatgggcatccacaaaacagaagccacagatgaagacaagagaaattaatcagtgacacctttttttttgatatggaaggcagtttaacattcaatggacagagtgacattatctctcatgatagaatcagcactcacttcagagacatgaagttcagacaccacaattttgcacagatgaccatacatctttgtacgtacttccaaatggaaacccaggtcgaaatctgtagtgaaaagggatgtagctgcaagcagagcacatcaagcctgctttccctcttccttgggcttgctcttttttttttacttggtgtagcagaagcatgagcaccagggaaactgaaacaagaactccattgccagagaaatcaccaatacttttgtttggagaagtgtgcccaagggatttgcatgcaatgcaacccttacatatacgacatggatgccgtttatcagtggacattaggatttatggtctttgtgcaatatatatggtcgtgtcagact

SEQ ID NO: 23997 - DNA, 898 bp, Zea mays
  Clone ID: LIB3606-052-H5_FLI
cagaagagcggcggcgcgggcggacaaggagcaggcggaggaggagttgtgccaagccacaatgggtatctcgcgtgactcgatgcacaagcgccgagccaccggtggaaagcagaaggcctggaggaagaagcgaaagtatgagcttggtcgccagccagccaacaccaagttgtcaagcaataagacggtgaggagggtccgtgttcggggaggtaatgtgaaatggagggctcttcgccttgatactggtaactactcatggggaagtgaagctgttacccgcaagacccgtatcctcgacgtggtctacaatgcatcaaacaatgagcttgtgaggacacaaacccttgtgaagagtgccattgtgcaagttgatgctgccccattcaagcagtggtacctcactcactatggagttgacattggtaggaagaagaaaacccctgctgcaaagaaggataatgctgagggacaagaggttgaggcagcagctgaggaaacgaaaaagagcaaccatgtcacgaggaagcttgagaagcgcaaggagggacgtacccttgacccacacattgaggagcaatttggcagtggacggttgctggcatgcatttcttcccgtcctggacagtgtggccgagctgatgggtacatccttgagggtaaagagcttgaattctacatgaagaagctacagaggaagaagggcaagagcgctgtagcttagagcattctcatggattgtcttgcaccgaaatgtgtgtcctgatgagtacacttttttggttagtcgtctcaagttcagagcgttatgccatattttcagacctgatttgtacactgttttctaaaagcgattgagctctagtccaatttgagcagggtatgattatttgtt

SEQ ID NO: 23998 - DNA, 999 bp, Zea mays
  Clone ID: LIB3606-053-B1_FLI
actcccatccagccgccaccaggtgcagagtctttcgtcatctcttctccggcgaagaacccccagtcgcccaccagatcacttgttaaactttgttgaggggtgatggcggtttctttcgcaaacctcaactccgaggcagggcttaaaaagcttgatgagtaccttctcactcgcagctacatcactggctaccaagcttccaaggatgacttggctgtctacacttcgttttcggctgctccctcgtccaagtatatcaacgtagcaaggtggtttaaccacattgatgcgctcgtgaggctgagcggaattactgcagagggccaaggtgtgaaggttgaatcctcagcagttccttcagccccaactccagatgttgctgaagcacaggccccagttgctgaggaggacgacgacgatgatgttgacctttttggtgaggagaccgaagatgagaagaaggctgctgaagagcgtgctgcagctgccaaggcttctggcaagaagaaagaatctgggaagtcatcagttttacttgatgtgaagccatgggacgatgagactgacatggccaagctcgaggaagctgttaggagtgtccagatggaagggctgctctggggcgcatccaagcttgtcccagttggatatggtatcaagaagctgcaaatcatgatgaccatcgtcgacgaccttgtctctgtcgacactctcattgaggactatctgtgcgctgagccagtgaacgagtacgtgcagagctgcgacatagttgccttcaacaagatctaggcgtgacttccgatcagtccttctcctggggtgctggcgatggtggtggctgggcaatgcaccagcctaatttatccatagctatatgtctgctttgtgtggccagtgatattgccgtgagtatttttggatcctattcgagtcgaatgtaccagtaccagagttaatttgctttaattcgaaacaccgttccagttggaattc

SEQ ID NO: 23999 - DNA, 1414 bp, Zea mays
  Clone ID: LIB3606-053-G5_FLI
gttgaattcccaaaaagatccaaaagagttccttcctttccttaagagtcttgaatgccttcctcctgctatcatgaggtatacgattgatttaagacttggaagatacgagagtgctctcagaaacattgtttctgctggcgacgcgtaccatgaggattgcatgaaactcctcaatgataatcctcagctgttcccactgggcctccagttatttaatgaaccagataaaaggaatcaaattcttgaggcatggggtgaccatctctctggagagaaatgctttgaagacgccgctttgacttatcagtgctgttcatcatatcagaagtcactgagagcttaccgtgcctgtggagactggagaggtgtttttaccgttgcaggtcttctggagttaaaaagggaagaaatcgttcaactcgcacacgagttatgtgatgagttccaggcacttggcaagccaggagatgctgctagagtagcactggagtactgttcagatgctgaaagaggtgtaagctactatatcatggcaagggaatgggaagaggctcttagagtcgcttacatgcttagcacgcatgatctggttgaagctgtcagagacgcagcttcagaatgcgccgcatcactgatagccgagtaccaggaaggactgttgaagatcggtaaatatgcagcacgctatttggccgtacggcagaggagattgtcgctcgctgccaaactccggtcggaagatcggtttatggatgttgaagatgacagcgtttcagaaacgagcactagcttcagtgaaatgagcgcatataccacaagggagtcgagcgcttcggtcatgtccagcaacgccagcaaatcacgggcggcaaggcggcaaaagaagggcggcaaaatacgagctggaagccccggggaggaaatggccctcgtggagcatctcagggggatggcgttgacaggcggtgcccaaaacgagctgaagagcctgctcgtggctctaatacagctggggaaagcggagacggcccgtcgggtgcaggaggctgcagacagcttcgaagtgtcccagagggccgcagtgaagctggccgagtacacggtgtccagcgaccgcgtagaggagagagcgcacaccctcgagcgttacgtgaggatgctgagggatcgggagtctggccatggcgaggctggtggtacgtggcggatcaatgcgttgtctccccccgtgacagggtgagagggtttttttttttactggttagcagtttagcattgtttaaatcgggacgaagagtgctgtgttctttcttgtgggtggcatcgtggcgtgcgtcaggctttgaccttgtcgattaactgctgtagcatcagttggaattcttggtgcctggtggggctgttgtattgg

SEQ ID NO: 24000 - DNA, 2278 bp, Zea mays
  Clone ID: LIB3606-054-E12_FLI
cggtgagctgccactgccagcttccccgtgcgcgagctgtgctgctgctcggcggcgcgcccactccccggccgctctctcgtcaccccgcctgccggtaatcggtctctatatatataggtggttcgaggtgatcggcagaaccacacaggcaaagatggcgagcgtgcacaaggccaccacccttgttctcatgttctgcctgctagcgctggggagagcggagtacctcaagtacaaggacccgaagcagcccgtcgctgttcgcatcaaggacctgctgggtcggatgactctcgctgaaaagatcggccagatgacgcagatcgagagggaaaacgccacggccgacgcgctggccaaatacttcataggtagcgtgctgagcggcggaggcagcgtgcctgctcctcaggcgtctgctcaggcttgggccgccatggtgaccgagatgcagaagggcgctctttctacgcgtctgggtataccgatcatctacggtatcgatgcagtgcatgggcacaacaacgtctacaaagctactattttccctcacaacgtcgggcttggagctaccagggaccctgacctcgttaagagaattggagaagcaactgctcttgaagttagagctactggaattccttacgcctttgctccctgtatagcggtttgtagagatccaagatggggacgctgctatgagagctacagtgaggatccaaaggttgtccagtcactgacttcactcatctctggcctgcaaggtgacgctcctgcagattccgcgggaaggccgtatgttgggggaagtaagaaggtcgctgcgtgcgcgaagcactatgtcggtgatggtggaacgcataacggaatcaacgagaacaacacgatcatcgacacacacgggctgctgagcatccatatgcctccttactacaactctatcatccgaggtgtctccacggtcatggtctcctactccagctggaacggagtgaagatgcacgcgaaccatttcctagtcacggattttctcaagaacaagctcaagtttaggggttttgtgatttccgactgggagggcattgatcggatcactactcctcctcacgccaactactcttactcaattgaggctggtgttggtgctggaattgacatgatcatggttccattcaggtacacagaattcatcgacgacctgacgacacaagttcagaacaaggtcatccccatgagcagaatcgacgacgccgtctacaggatccttcgtgtcaagttcaccatgggcctgttcgagaacccttaccccgactctagcctcgccggcgagctcgggaagcaagaacaccgggaactggcgcgcgaagccgtcaggaaatccctggttctcctgaagaacggcaagtcctcctacgctccgttgctgcctctcccgaagaaggccggcaagatcctggtcgccggcagccacgccaacgacctgggcaaccagtgcggggggtggacgatcacgtggcaaggaagcagcggcaacaccactgccggcacgacgatcctctccgggatcgaggccaccgtggaccccagcacgcaggtggtgtactcggagagcccggacagcggcgtgctggccgacaagtacgactacgcgatcgtggtggtcggtgagccgccatacgcggagacgttcggcgacaacctgaacctgacgatcccggcgcccgggccgagcgtgatccagtcggtgtgcggagccgccaagtgcgtggtggtcctcatctccggcaggccgctggtggtggagccgtacctgggcgacatggacgcgctggtggcggcgtggctgccagggtcggaggggcagggcgtggcggacgtgctgttcggcgactacgggttcacggggaagctgccgcggacgtggttcaagtcggtggaccagctgcccatgaacgtgggcgacgcgcactacgacccgctcttcccgttcggcttcgggctcaccaccaagggcacgaagtgagtgagtttgaggcgctctgatgggatgtggatgtggcctgtgagtgagctgtgtattcgtgggcgggcgtgaggctttggctttcgaattggttgggggtgacgggcgagtcgtgtacgccgcacacattgcgcagcgtacgttgggttgggatgtttgcgtctgggtaataacagtgatgcattcttgagatggttgctgttagtgtgggttgtttggaatgaacaataagatgaggcgcgttacattggc

SEQ ID NO: 24001 - DNA, 1620 bp, Zea mays
  Clone ID: LIB3606-054-E2_FLI
cgttcaaggtctcaatctcgcggtaatggcgaggccacacgtcgtggttgtgccgtacccaggctccggcaacatcaacccagcgctgcagatcgccaggctgctccaccgccacggcgtctacgtcaccttcgtcaacaccgagcacaaccaccggcgcgtgcaggccaccgagggcgccggagccgtgcgcggcggggaggggttccgcttcgaggccatcccggacggcctgtccgaggccgagcggggcaagcaggactacgggcgcagcctggccgtgtccacgagcacgcgctgcgctgcgccgctcagggacctcatcgcgcggctcaacggcacgccgggcgtgccgccggtcacctgcgtgctgcccaccatgctgatgagcttcgcgctgggcgtggcgcgggagctcgggatcccgaccatgtcgttctggacggccagcgcggcctcgctgatgacgcacatgaggctccgcgagctgcaggaaagagggtacgtgccactcaaggacgagagtttcctgacgaacggctacctcgagacgacggtcatcgactggatccccggggtgccgccgatccgcctcggcgacttctcgagcttcctccgcaccaccgacccggacgacttcggtctgcgcttcaacgagtcggaggcgaacagctgcgccaaggccggcgccctcatcctcaacaccttcgacggcctcgaggccgacgtgctcgccgcgctgcgcgccgagtacccgcgcgtgtacaccgtcgggcccctgggcctgctcctccgccaggacgacgaccgagacagcagcgcctccgccagcggcagcaccgagtcgaccggcctgagcctgtggaagcaggacgccgagtgcctcgcttggctggacgcgcaagagcggggctccgtcgtgtacgtcaacttcggcagccacacggtggtgacgccggagcagctgaacgagttcgcgtggggcctcgcggcgagcggccaccggttcctctggtccatgagggacaacctcgtccgcggcggcggcggcggcggcggcgccggcctggacgcgatgccctcgaccttcaaggctgagacggcggggcggtgccacgtgaccgcgtggtgtccccaggagcaggtgctgcggcacccggccgtcggctgcttcctgacccacagcgggtggaactcgacgtgcgagagtctggccgccggcgtgcccatggtgtgctggccgggcttctcggaccagtacaccaactgcaagtacagctgcgaggtctggggtgtcggcgtccggctggaggcaacggtggagagggagcaggtcgccatgcacgtcaggaatgtgatggcaagcgaggagatgcggaagagcgcggccaagtggaaggaggaggcggaggctgcgggcggccccggcggttcgtcacgcgagaacctgctgagcatggtgagagcgctcagctccgcacccaactcaccagatgcttaagagcccaaagatcagtagtcacactagaacggaatctagaatcatgaagcaatactgttcatgatcgacgccagcaaagttttagtctcctaataatagttggcatatttcagttgatt

SEQ ID NO: 24002 - DNA, 2813 bp, Zea mays
  Clone ID: LIB3606-054-H7_FLI
gataaacaattttcccgttcgagcgtctcgcttctcccgttcccgatcccgatccctgagtcctttcgcttatcccgttgatccggcgtgcgttcgtgcgatctcctgtggcgacaactgggcgatcgacgccgccgctgctgtcgccgccgtatacgagaggtgcgcaggcgttcgttggtcccttcgccaggcttttgtctacccttcgccgacgacgagcacaatttatttgcaggccagatttctttgtctgacttgtggaagcctcttacaactattgtacaaggctgctgtattgaagatgtctgagttccttgacctagagctacaagatgggataaggatgccctggaatgttattccaggcacaaaacaggagactgtgaactgtgtgattcctgtttccgctatctacacacctttgaaaccaatttctgatatccctgttctcccatattcacctcttcgctgtcgcatgtgtcgttccatcctcaaccctttctccattgttgactatgttgctaagatttgggtctgttcattctgctttcaacgcaaccagttccctcaacactactcgtcgatctcagaaaataatctccctgcggaactcttccctcagtataccaccgtcgagtacatatcttcaactgaaactggtcctatagttccaccagttttcatttttgttgtagatacttgcatgattgaagaagaaattggttatttgaagtctgcactggcacaagctgttgagctattgccagataattctcttgttggattcattacgttcgggacgtatgtgcaggttcatgaattgggttttggcttattgccaaaatcatatgtattcaaaggaacaaaggaggtcaccaaggagcaaatattggaacaaatgtgcttttttgcagggaagaaaatgcctaccacaggcgtgattgctggtaccagagatggcctttcatctgagagcatctctagatttctgctgcctgcttctgaatgcgagtttgtattgaactcagttatagaagaaatacaaaaggacccttggcctgttccagctgatcagcgtgcgtctaggtgcactggagctgccttaagtgttgcagccaatctccttggggtttgtgttcctggatcaggtgctaggataatggcatttgttggtggtccatctacggagggccctggtcctattgtatccaaatccttatcagagcccattcgctcacacaaagatcttgataaagactcggcaccactctatgataaagctgttaagttttatgatcaaattgcaaagcagcttgtgcaccaagggcatgtgctggatttgtttgcttgtgcagttgaccaggttggagtcgctgaaatgaaggttgcgattgagaagactggaggaattgttgtgcttgctgaaagttttggtcattctgttttcaaagactcacttctccgcatctttcagtcaacagatgacaaccttggtttatcattcaatggtattcttgagattaactgttcaaaggatgtaaaggttcaaggcatcattggaccctgttcttccctggagaagaaaagtcctttgtcttccgacactgttattggtcaaggaaacactagcgcttggaagatgtgcggccttgacaggaagacatcactttgcttggtatatgatattgcaaaaaaagatggcccagattcaattgctcaatcagcaaacaatcagttttacttccagttcttaacctactatcagcataatgagggtcagatgagattaagatcgaccacaatctccagaagatgggtctctggtgacaaccatgtggaggagctagtagctggctttgatcaagaagctgcagctgcagtcatggcacgcttggtgtcatttaagatggaaactgaggttgattttgacccagtaaggtggcttgatcgagctttgatacgtttatgctcaaaatttggagattatcagaaggagacaccctcatcgttcagtttatccccacgactatcaatatttccccaatttatatttaatttgaggcgttctcagtttgttcaggtttttaataacagtcctgatgaaactgcgtattttaggatgatgttggacagagagaatgtaaccaatacagttgtgatgattcaaccttcacttatatcctattcatttcaatcagggccagagccagttctcttggatgcaactgcaattgcttctgacaagatccttttattggactcttattttactgttgtcatattccatggggtaaccattgcgcagtggcgaaatgctggctaccaagatcaagaaggtcatgaggtgtttgctcagttgttaaaagctccacatgaggaagctaatttaataataaaggagcgatttcctgtaccccgtttggtagtctgtgatcaatatggatctcaggctcgatttttactggcgaagctaaatccatcggtgacatataactcggacaacccctcccctggtggagacgtcatattcacagatgatgtgagcttccaggttttcatggaccatcttcagcgactagcagtccaataggatatgaatctgtagatcagtgcatagagcaattttatactaccaatgatatcttctgtagagtgataatatttttgttttgtatgtcttacaaattcgttgtagctggttttaaattatataagtttcttttagaggcaatcaaattttgcaacttgataaattatgataataaatgacctgtagaatgaagaattgcattttctttcacaaggacgat

SEQ ID NO: 24003 - DNA, 919 bp, Zea mays
  Clone ID: LIB3606-055-G3_FLI
ctcgcgcgctgttcaacagaggtggcatcaaggggcaccgatggcggcaacacgctgtcgcagcgtgtggcggagagacagtgtaggtcagacctggcaaacaggataggggagacggacatgatctccatgcaggagaacatgtctgccaggacactcacgctctctagctccgcgcagcggacaattgtgcggtttgttaagctgccattggttgacaagatccctccgcacaccgcttggatctccctggaaaagttactggtattcttgtgttcatatgttttgcaattggctaaccatgggcattattttgtgatattcatggtcattctaaggagattggactttatgcgtcatgggttgtgcaagtacacttgcgtttatttgcttgattaattcgtgatattgatgaagaaattccagatccagaggaatagaaacactttttcacaaagggagaagatcatttggtatggtagtatcttcattgaaaataatatgaaaaaaataaaaaattaaacagattattcgttgaggcaaacctatgatcaatcatacatcataggttggtcttctcctttgtagcgctacagtgcgacgacgcccagggccaaggtgctgaaggaggtgaggaacgtcgcagtaatgatctccatggagaagggtgcgatggccagaggtagtgggcatcaccagcacggcagccacaggcacgatggctagcagcaacaacaattgctgcttcaacgacaagcgtgcgcgagctctgagcagactcaagcgatcctatcatgtagttcattgtatttcaccattcatttttctttttttacgtccatgtgagatgaggttgtttgttcggcgagtggagcggtgggaaagccacagaggtatacgagatttatgttaatccccc

SEQ ID NO: 24004 - DNA, 1714 bp, Zea mays
  Clone ID: LIB3606-055-G8_FLI
tccgcattccgcaggccgcagcggaagccgccctcctcctcggccgccccgcacgctagctcaccatgctgctccatctcgtcacctcctcccccctaaccccggcatgcccctcgcctaagcggcgtacgtgtgtcgttgcggcggcagttctagtgactgtgagatgtgcggcctcctcctcgtcgagcaccccgtcgtcatctgcatcggaggctgctgctgccgggcagcgggtggcgaaggtgcacagctacgggacggtggattacgagcgtcgatctccactgcgttggggcaccctgtaccggcgcatcgctgtggggcacggcgggcggcccgtggggcgcacgctgggggcgtgggacgagggggagcgccgcctcgacaagtgggagctctgccgcatcgccaaggagctccggaagttcaggaggttcaacctcgcgctccaggtttacgattggatgacagagcgcagagatagatttcctctctcatcgagtgacatggcaatccagttggatctgattgccaaagtacgtggtgttccacatgctgagaaatactttgacgagctccctgatgcgatgaaggacaagcggacgtacggttcccttctgaatgtttacgcccaagctatgatgaaagagaaaacagaagaaacatttgagcaaatgaggaagaaaggatttgcgtctgatacattaccttgtaatgtgctgatgaatttctatgtggattctggagaacctgatgaagtgctggcaattattgatgagatgaaggaaagaaatgtttcttttgatgtctgcacttacaacatttggataaaaagttgtgcggctaaacaagatgctgaagaaatggagcaagtctttagccaaatgattgctgatgagtctgtcgttgccaattggactacttataccactctggctagcatgtatcttaagctaggaaactctgagaaggcagaagaatgcttgaaagatgctgaaaagagaacaacaggccgggagaaaaagtgttttcactatctcatgacgctgtatagccatcttgggaagaaggaagaagtttaccgaatttggaactggtataaggcaactttccctatgattcataacctgggttaccaggagttactgtctgctcttataagaataggagatatcgagggagccgagcttctatatgaggaatgggcatccaaaagctatagttttgatcctaagaccatgaacattttattagcatggtatgctaaagaaggtctgattacaaaggctgagcaaactgtgaatcgatttgttgagaaaggtggaaatcccaagccaaacacctgggaaatccttgccacagcctacatgaatgatgataaaatatctgaagctctgtcatgcatggaaaaagccacggcagttaaaagtgcaagtaaatggaaaccgagacccaccaacgttgagactctcctagcaagtttcaaggagaagaatgacgcagagggtgcagacaggttagtgagtgtccttacaagtagaggatgtgctgaggacgaagaatacaagtcactgattgacacctatgcttttgcgggcacatagcatggagacggtgcatgatatcattgaatcaatgatatgatgagtatgacgcactgaacaatcacattacttgcccataatgtttctaaaatagtaccatgagaacc

SEQ ID NO: 24005 - DNA, 875 bp, Zea mays
  Clone ID: LIB3606-057-A4_FLI
gcgtccccggtccctcgcgaaccctagagccgcagcagcacactcccgcagtagcagcagccgccgccgccgccgcccagccgcaggaaacaggaggaagatgccggcggggcacgggcttcggtcgcggacccgcgacctgttcgcgcggccgttccgcaagaagggttacatcccgctcaccacgtacctgcgcacctacaagatcggcgactacgtcgacgtcaaggtgaacggcgccgtgcacaagggcatgccgcacaagttctaccacggccgcaccggtcgcgtctggaacgtcaccaagcgcgccatcggcgttgagatcaacaagcaggttaatggccgcatcatcaggaagcgtatccatgtccgtgtggagcatgtgcagccctcccgttgcacagaggagttccgcttgaggaaagccaagaacgatcagctcaaggttgatgccaaggaccgtggcgaggtgatcagcaccaagaggcagcctgtgggacccaaacctggcttcatggttgagggtgctacacttgagaccgttactcctattccctatgatgtggtaaatgatctcaaggggggttactagagagaattatgtatcttgagcagttcaagcgagctggcataaatacctatctgaatctttttgacaactgtctagttcttttgttctagaagggcaggcatggtacattggtgatatttgtctcaggcattcgaaccagactccacatttctaggggcggtttgtcccttcttgagtatcgtcttgagagcctcgtgcactgggtcggcctctctggttctttttgttctggtgttataaacctatgtggctattgctagttaatgctaaagattttgcc

SEQ ID NO: 24006 - DNA, 1974 bp, Zea mays
  Clone ID: LIB3606-058-A10_FLI
gtttttactgctctgtagtagtaggctgtagactctgtactctctagtctctactcccccctctccgccttctctctctccgcaggcggtatcctcccttcctcggttcctctcctctcccccaccaccccaccccagcgccccaaatgccgctccaaccctagcctcccgccacgcctttcgatctcgggcggccatgggcaactgctgccgctcgccggccgccgtcgcgcgggaggacgtcagctcctcgcacttccccgcatccaacgcgaagaagaagccgcaccaagcgcgcaacggcggcgccggcggcgggcagaagcggctctcggttctgggcgacgaggggtgcgaggtcgtcgggatcgacgacaagtacgtcctggacagggagctcggccgcggggagttcggggtcacgtacctgtgtatggatcgggacaccaaggagctgctcgcctgcaagtccatctccaagcgcaagctgcggacggccgtggacgtggaggacgtgcgccgggaggtggccatcatgcgccacctgcccaagagccccagcgtcgtgtccctgcgggaggcgtgcgaggacgacggcgccgtccacctcgtcatggagctctgcgagggcggcgagctcttcgaccgcatcgtcgcgcggggccactacaccgagcgcgccgccgccagtgtcacccgcaccatcctcgaggtcgtccagctctgccaccgccacggcgtcatccaccgcgacctcaagccggagaacttcctcttcgccaataagaaggagaactcgccgctcaaggccatcgacttcggtctctccatcttcttcaagcctggtgaaaagttttcagaaattgtgggaagcccctattacatggctcctgaagtattgaagagaaactatgggccagaaatagacatatggagtgcgggagttatcctgtatattttattatgtggagtccctccattttgggctgagactgaacaaggggtggcgcaggctattcttcgtggaaatatcgattttaagcgggaaccctggcctaatgtttcggaaaatgcaaaagatttagttcgacacatgttggagcctgatccaaagctcaggctaactgcaaagcaggttcttgaacatcattggcttcaaaatgcgaagaaggctcctaatgtccctcttggagatattgtaaagtcaaggctcaaacaattttctaggatgaatagattcaaaagaagggctctaagggtcattgctgatcatttgtctgctgaggaagttgaggatataaaggatatgttcaagactatggatactgacaatgatggaattgtatcttatgaagaactgaagactggaatagcaaagcttggttctcatcttgcggaatcagaagtacagatgctcattgaagctgtggacacaaacggtaggggggcactagactacggggaatttctggccgtctcgctccacctgcagaggatggcgaacgacgagcatctccggcgggccttcctgttcttcgacaaggacggcaacggtttcatcgagcccgaggagcttcgagaggctctggtggacgacggggcggccgacagcatggaggaagtggcgaacgacatactgcaagaagtcgacaccgacaaggacggcaagatcagctacgaggagtttgtggcgatgatgaagaccggcacggactggagaaaggcgtcccggcactactcgagagggaggttcaacagcctcagcatgaagcttataaaggacgggtcggtaaagctgggtgtcgagtgaaaaccgcaccgacgctcgttcatgtgtgtgtgtagttttaggcccttgggccactaagcagaagaactctaggccttcttcttctttttttttttgtcccctcgtgactgtcttgcgtggaaattttagataggtggaagtggcggaaccctccgatttgtctt

SEQ ID NO: 24007 - DNA, 1626 bp, Zea mays
  Clone ID: LIB3606-058-B11_FLI
agcgttcccccttctcccattcttctctcatttctcaccaccgccgccgctaccccctttcgacaacaccatgagggagtgcatctcgatccacatcggccaggccggtatccaggtcggaaacgcgtgctgggagctgtactgcctcgagcatggcattcaggctgatggtcagatgcccggtgacaagaccattgggggaggtgatgatgctttcaacaccttcttcagtgagactggcgctgggaagcacgtcccccgtgctgtttttgttgaccttgagcccactgtcatcgatgaggtgaggactggcacctatcgccagctcttccatcctgagcagctcatcagtggcaaggaggatgcagccaacaacttcgctcgtggtcactacaccattggcaaggagattgttgacctgtgccttgaccgcatcaggaagcttgcagataattgcactggtctccagggcttcctcgtcttcaacgctgttggtggaggaacgggctctgggcttggttctctcctcctggagcgcctgtctgttgactatggcaagaagtccaagctcggtttcaccgtgtacccatccccccaggtgtccacatccgtggttgagccatacaacagtgtcctgtccacccactctctcctcgagcacactgatgttgctgtcctgctcgacaatgaggccatctatgacatctgccgccgctcccttgacattgagcgcccaacctacaccaacctcaacaggcttgtgtcccaggtcatctcatccctgactgcttccctgaggttcgatggtgctctgaacgttgatgtgaacgagttccagaccaacctggtgccctaccctaggatccacttcatgctttcgtcctacgctccagtcatttctgctgagaaggcctaccacgagcagctgtccgtggccgaaatcaccaacagcgccttcgagccatcctccatgatggccaagtgcgacccccgccatggcaagtacatggcatgctgcctcatgtaccgtggtgatgtggttcccaaggacgtgaacgctgctgtggccacaatcaagaccaagcgcaccatccagttcgtggactggtgcccgactggcttcaagtgcggaatcaactaccagcctcccagcgtcgtccccggcggtgacctggccaaggtgcagcgtgccgtgtgcatgatctccaactccaccagtgttgtggaggtcttctcccgcattgaccacaagttcgacctcatgtacgccaagcgcgccttcgtgcactggtacgtcggtgagggtatggaggagggcgagttctccgaggctcgtgaggatctggctgcgctcgagaaggactacgaggaggtcggtgctgagtttgacgagggtgaggacggcgacgagggtgacgagtactagacgctctactggcgcggcgtcgtcgggcttgtgtgccactgctatcctgtgatctgccctgagtggctcctatcgtgttatgtttctgtcggttcttatctatctgtcgttgtgtggtttacaacttacgttgtaagactttattcccccgctttgctactgggttattaagtttggcgttattgttttcttgatctctg

SEQ ID NO: 24008 - DNA, 911 bp, Zea mays
  Clone ID: LIB3606-058-C12_FLI
gtcgtcttcctcgggcgctcgtcttcctccgaacgcgcgcgggccgccgacctgcttgttctcctggaggagcgcgcccggcgggcaggcgacgcagtccagcggcgggttgaggaagaaggcgagcgaccggtggatccccgtccagccgtcccctgctcctcttcctcgggtcgggcgctcgtcatccactcttcctccagccctccatctgatccccgtacgaccgtcccctgctcgtcttcctggtgctcggctgctccagtgctcggcccctgctgcagtgctgctcggtcgcgtcggcacctgctgcagatctgctcgacctcggctgctcggcttcctggtaacctggttcctgctgaagtgctgattctagagtctgctgcgtacgtttagtagtatcagttccttctgctacaaattcatagtcactgatggggaaggcaaagcgtgcctcgatcttcatcaggctggtttctgcagccggcactggattcttctacgtgaagcgcaagaatcctcgtcgcatcaccgagaagcttgagtttagaaagtatgatccccgtgtgaacaagcatgttctgtttaccgaagcgaagatgaagtgagatcttgtttctccacaatgcagaactgtaataagttgtcaaccttttgcgaccagaaacctttatgccgttattagacagatgattaacgatcctatgtgtttttcctgctccaatgagctgcaagcagcagatggctagtgttttgtcattttgtgtgggaaactacaaatgaaatctggactcccatctttttctttcacaccgccatgttttgtgaaacgatgccatgttttcctctgagccggcggcgaaccgtcgagatgctcaactaaaaaccaaacgaagctgttggctctg

SEQ ID NO: 24009 - DNA, 742 bp, Zea mays
  Clone ID: LIB3606-058-F1_FLI
ctgccgctgtctgttataagagcctcctgttataaaggcacagctcttctgtctccacgagattgttgaattcatctctgccctagcaccagccatggcgaagccgcagcttcttctctgtttcctactcgccgcctccgcgccgctaatcgtcgccacggccaagaaatccggggacgtgtcggagctccagatcggcgtcaagtacaagccggaatcatgcagcattcaagctcacaaaggtgacaaggttaaagttcactaccgtggaaaacttactgatggaacggtttttgattcaagctatgaaagaggtgacccgattgaatttgaattgggcactggacaagtgatcaaaggatgggatcagggtctcctgggaatgtgcgttggtgaaaagcggaagttgaagatcccatcaaagcttggctatgggcctcaaggctcgccacctactattcctggtggagcaaccctcatatttgacacggagcttgtcgctgtcaatggagaaccaaccaaccaatctgacgagctttagattcatcaaacaaatgaatccattcacctttttactcggaactcagcagatgtaatactttccaagaaatgagccttcattccctgccactttcatagtttctttcgctgttccacactgacatctatgatttttggagcaaactctgatctgttttgactagtttacacgtttgtgtgtggaatctgaagagctgttctg

SEQ ID NO: 24010 - DNA, 972 bp, Zea mays
  Clone ID: LIB3606-058-F4_FLI
gcccaatgaactagacgaattgctcactgctgtgccgtctgtggaccgcggaaggcggcaagccggcagtagagcagactcggcgctcgacgctcgggggcggcagaaacggagagacgagcggatttctatacgtcagctcgtttcggccccgcttgggggcttctcctcggcgtcgtcgctccctccgccgcctcttcctcttcgtgtcgagcgctacagagaaagctcgtggacgggcaacgaaccaacggcgtttccatacgcggaaccatcctcttcgttttcggattgcagtacgtgctacaatatcacatatctcgggtttatccgaagagctcacccatcgacctcatcagtggtgtgattgattcacgttacaacatcttctgcacggtgggctgttacccagagaatgtttttggagtgggttgttttccatagtacggaaaaatcatcaacacatcctcatacaagcttctgactgtattgtccacttctttctttggagacatatcaagttgtttggtgataatggatccaaagcattcggctgaagtgtccaagcatttagacaagcaaaatcaagcactaatggaaacatatcgagcaatgtcccatgagttgcataaactgcaggtagaagaagagacaatcatgcgcaagttgtatgaactgatgtccgcggaagggcttcttccaaagcgcaagaaagaaaagcaacatggggaaaatatcgtgggttcaactgagagcaaagaacaggaaccataaattcttatgcgacgagtaatgtgatatgacatcaatgccattttatctggagagttggtgcttgttaacttctgtatagcagttctctatcatcacaactctgcgaccactacatttaacttcacagtttaaaatttaacctgagtattagttccgtgaggaattacttacagacaaacataatcattccttttgctc

SEQ ID NO: 24011 - DNA, 1193 bp, Zea mays
  Clone ID: LIB3606-060-D3_FLI
ctctctctctcactcccaaaccaagctaccttccgcccatgggcccaccgccgcgccgccgccaactcctgctgtctctcgcgctgctcgccaccgcggccgcctgctgcgcggcgggggcggcgcccaggctgtcgcccaactactaccgccgcagctgcccgcgcgtggagcggatcgtgtcggacgccgtcgccgccaagcagcgcgccaacccgtccacggctgcgggcacgctgcggctcttcttccacgactgcttcgtcaacggctgcgacgcctcggtgctggtctcgccgctctcctcctccggcgccgcgccggagcgcgccgcggagatcaacctgtccctgcccggggacgccttcgacgccgtggcccgcgccaaggcggcgctggaggccgcgtgcccgggcgtcgtctcctgcgccgacgcgctggcgctagcggcgcgcgacctcgtggccgccctgggcgggccccggttccccgtcgcgctgggccgccgcgactcccgccgctccgacgcgcgcgacgtcgagggcaacctgccccgcaccaacatgtcggcgcgagccatggtgcgcctcttcgcccgcaagggcctcgcgccccgggagatggtggcgctggccggcgcccacaccgtcggcttctcccactgcgccgagttcgcgccccgcatctacggctaccggggcgccagccacgacccgcggctcaacccggagttcgcgcgcgcgctgcagcgctcctgcgcgggataccgcaccgaccccaccgtctccatcttcaacgacatcgtcacgccccgggacttcgacgagacctactacaagaacctgccccacggcctcggcctgctcgcctccgacgccgccatctgggagtacccgcccaccagggtcttcgcccagcgctacgccgccaaccgcaccgccttcttcgaggacttcgccgccgcgatgcagaggctcggcgccgtcggcgtcaagacggggcgccagggcgtcgtcaggcgccgctgcgacgcgctcgactgagtgtcgcgatgcttgttgtgccattgggtcggtcgatcgttgtaaggcttcgaattcgattacgggatatgagaggctcttctttctctgtacttggaaaatggggcgtgagtggtaactaaagtgatgaactgagggcaagctaattct

SEQ ID NO: 24012 - DNA, 1786 bp, Zea mays
  Clone ID: LIB3606-060-G1_FLI
gccctgcatcttccgttgtcttgggaatgtgtggaaggagccttccttaaattgtggcccaagacttcctagtcatcttgcggaatctcataggttctcgaagatggtttcctctgagatgacctctgtcacagtgacgcgtgcacagggctccaagctttttagagggaagatccttctgccagggggatcctcagatgttgtgccttctgaaaatgttgagttcgatttttctgatgtttttgggcctagtgctgtccatacacacacagaagtgagtgttctcactctgggcagtccagcacctgtggctgagtccaacgatgaggtttacaatgaccctgatgtcattgtcaaacgatcccattcccttgttggtccatcatctcttgttagtcaatctttgccatttagcaagcttacattacacaagaaagacagctcattggaaatttcagagtgcctttccaaagaaaaacaaatcaaccaagggtcctttagtgatgatgagtttgatgatgtaaaaaaggagaatgagggtgttggacttgacgacttcgaagttctgaagctcgttggccgaggggcatttggcaaagtatatcaggtgagaaagaaaggtacttctgaaatatatgcaatgaaagttatgaggaaggacaaggttgtggagaagaatcacactgagtacatgaaagctgagagagatatactgacaaaggttgaccatcctttcgtcgtgcagctgaggtactcctttcagacaaagtaccgactttaccttgtcctggacttcataaacgggggtcatctcttcttccagctttaccaccagggtttatttaggtagttagtttcatctactttgtgcctatcaagattttactggttttagttttattaagttaccacttatcttgtagggaggagcttgcacgcatctacgctgctgaaattgtatctgccgtagcccacctccatgccaatggtattatgcatagagatttgaagcctgagaacatcttactggatgctgatggtcatgctatgctgaccgactttggcatggcaaaagaatttgatgaaaacactagatcaaactcaatgtgtggtactgttgagtacatggccccagaaatttttcagggccgaggtcatgataaggctgcagactggtggagtgtgggaatccttctttttgaaatgcttacgggaaagccaccgtttgttggtggaaacagatgcaagattcaacagaagatagtaaaggagaagataaagctgccaacttatttatctagtgaagttcactctctgttgaaaggattactgcacaaagaagctggcaggcggctgggaagcggaccaggcggcagtgatgaaatccagaagcacaagtggttcaagtctgtaaactggaagagactcgaggcccggcagatcgagccaagcttccggccgaatgttgctggcaagacctgcatcgcaaactttgacaagtgctggacgaacatgtccgtgcttgactctccagtggccagccctgttgcagccaacagcaactttgtggggtacagttatgtgaggcccgcaccgttcctccaaaagccgagcccacttggctgaggaactgcttccgtggtctgagatctgccccggagttcaaatatttatctttttgactccgaatcctatgtatttcatcaagacactagtgttggagatctaaccttattgaggacaacaacttggttggtgattcccaaaaagttcctattgaagtgcc

SEQ ID NO: 24013 - DNA, 1727 bp, Zea mays
  Clone ID: LIB3606-060-G12_FLI
ttattcgaggcggctttatggtcggacggatcacccccagcaaggagccgccacccgccactccgccagagcattgcagcgccagccacctcgccccctctcgctgtcccgcaccacccgctccgagggaaggagaggtaaccggtggcgggcgcggcggcgagcggagatcccgggaactccgatcgagcgcaagcggcgggacctgcgggggcagagagcgtgcagggaggacaagtgagtagcgtggttcgatggtaagggagacgggatactacgacgtgctggaagtgagcccgacggcctccgaggccgagatcaagaaggcatattacgtcaaggcgaggcaggtccatccggacaagaacccagatgatccgcttgcggcggcgaggttccaggaattgggggaggcataccaagtgctcagtaatcccaagcagcgtgaagactatgacttacatgggaaacctggtatttcaacggaagcgataattgatcctgcagcaatttttgcgatgctgttcggtagcgagctttttgaggactacattggtcagctggcgatggcatccatggcttcacttgatggttttactgaaaacgaacagatcgatccaagaaggttgcaagagcaaatgcgagttgtacaaaaagaaagagaggagaaacttgcagaggcactaaaagataggttgcatctttatgttcaaggaaacaaagaggaatttatccagtatgctgatgctgaggttactagactctctaatgccgcatacggtgttgatatgttgagtactattggttatgtgtattcgagacaagcttctaaggagcttggaaagcaagctaaatatcttggtgttccatttattgctgaatggttcagaaacaaagggcattctattaaatcccaaataactgctgcaacaggtgcattagctcttatgcagctgcaggaagactggagaaagcatctcagtgatgagtgccactacaatgaagaggaactggaggcttacatgctgacacataagagtgttatggtggactcgttatggaagcttaatgttgctgatatagaggaaaccctgtcacatgtgtgtcaaatggtgcttcatgacagcagtgccaggaaagaggaactgcgagttcgagctaaaggattgaaaactttaggcaaaatattccatcaagccaagcttagcactgctgagggagatccagcaacaatgaataatacaataaataacttggatgagaatgatgatagttcaccggagtcatctccaagatctcccagggaccaaatgttcgatacaaacccaccttattcccagagtccatacgtggaggcccctgagttgggcgggtatttttccttcgacttcccaatgcctatcgctccgcctggcgcgcagagggaccctattccgtgaccgccgtgagtgcggcggctctgttttgtgtggatcgtcattttgtacaatattgcctgtgtaaatcatttttatttgtaacattagtagcagtagtgtgagacagcagcttggcacccattgcatcgtttcttttctttttcatcgtgtaatcaatcaatcaagcatgcgacgacggcagccttgtcttgttcgtagggcttggtctgcttctggccacgtgtcagccattggtgtacatgaactaccacctctttgtttcttgtgtttatcagtttatgggtgcat

SEQ ID NO: 24014 - DNA, 1760 bp, Zea mays
  Clone ID: LIB3606-060-G4_FLI
atataagaagagatgataaacaggtgttcttgttttatacagtgtgtatatatagagagagacaaagagcaagtgaatttgtaggaacaacgcccacggagaacgaacgcaagcctatttcctcatcacaaggaacggaggcatacataggtctcatgtgtgagcactgagcaccgctggttccggatcatcctcatgccttccaccatgggtcctcgccggtcctgaagtcggtctccacccacgggacgaagaggaccttgccgtcgtcgacgtcggcgtgaaccagggccagcgacagaggcgccggtccacggaccaccttgccctggttgttgtactgggatccgtggcaggggcagatgaacttgttctcagcgccgttccacggcacgacgcagccgaggtgagtgcacacggcgttgatcccgtaggtggccagcgtcttgtcctgcctgcttcgtgctcagaccgagcgggagatcctgcagtccctggaccatccatttctaccaaccctgtatactcactttgagacagacaagttttcatgcttggttatggaattctgccctggaggggatcttcacacccttcgccaaaggcagcctggaaaatatttttcagagcaagccgcaaagttctatgtagctgaggtgctccttgcattggaatacctgcatatgcttgggattatataccgtgatcttaaaccagagaatgtcctcgttcgggaagatggccacatcatgctgtcggacttcgatctatctcttcgctgttcagtgagcctaacggtgatcaagtccgcaaatcctggcctagatgcaatgcagaggaacaatgcagcgtactgtgcccagcctgcttgcatcgaaccatcctgcattcagccctcctgtgtagctccaaccacttgctttggcccccggttcttctccaaatccaagtccaagtctaagtccaagtccaagaaggagaagtcgaagcctgatggtccaaaccaagagaacctcttcccggagctgattgctgagccaactgatgctcgctcgatgtcctttgttggcactcatgagtacttggccccagaaataataaaaggggagggccatggaagtgctgtggattggtggatctttggcatattcttgtacgagctgttgttcggcaagacccctttcaaaggttccggcaaccgggctacactcttcaacgtcgtgggccagcccctgaggttcccggagtccccgatagtgagcttctctgcgagggacatgataaggggattgctcgtcaaggacccgcagcaccggctcgggtacaagcgtggtgctaccgagataaagcagcaccctttcttcgagggcgtgaactgggctctcataaggtgcgcgagccctccggacataccaaagcccctcgagctcgagtgtcgcccaaagcaagtgccatcagcaaacggaaaggtggcgccggtcgctaaccaaaagggcccagataattatctagagttcgaattcttctagttttttgttttttgtttttgtgattttctgaactgaaagagtgcgtctgggctgatgctgtgaaagaaagtgaaagatgataacctactctaggcatgcgcttggctggattttttttcttcttctgccattagactgtactacgctcgtttcaggatatccgagttatttttttgtttctctgttgaactgcttaactctaaggtgtactcaatccatcatgtatgttgc

SEQ ID NO: 24015 - DNA, 595 bp, Zea mays
  Clone ID: LIB3606-060-G5_FLI
attgtgactgactgacccaccggcgccgttccattccagccatggagctgctcgccctgctcaccgtgctgctgctcgcgcacaccgcggcatacctggcgtggcaggccgtgtcacgccgccgccgcgcgcgctgctacctgctggactacgcgtgccacaagccctccgacgaccgcaaggtgaccaccgagacggcgggcgccgtcatcgagcgcaacaagcggctgggcctctccgagtaccgcttcctcctcaaggtgatcgtcaactccggcatcggcgagcacacctactgcccgcgcaacgtgctgcagggccgggaggagagccccacccacggcgacgcgctggaggagatggacgagttcttcgccgacgccgtggcggcggtgctcgccaggacgggcgtgcgcgcgcgcgacgtcgacctggtggtcctcaacgtgggctccttctccccggcgccgtccctggtgtccaggctcgtgcgccgcttcggcatgcgggacgacgtgatggcgtacaacctctccgggatgggctgcagcgcggggctcgtcgccgtggacctcgcgcgcggcgtgatgctgac

SEQ ID NO: 24016 - DNA, 802 bp, Zea mays
  Clone ID: LIB3606-060-H12_FLI
ttgatatgcgctgtagctttggccccttcttgccctgcggcctgcgtcgttgatagaaaacgaaattctaccaaggattccgttgccttgtacgcggtgcaatgctataagtgctacaaatggagtacggttccaaaagaagaatttgagacgcttcgtgagaacttcactaaggatccatggttctgcagcagacgaccagacagctcttgtgaagacgatgctgacattgagtacgacagcagccgcatctgggttttggacaagcccaacataccaaagcctccaccagagacggagaggctagtggttatgaggggcgactacagcaaaatggacacatattatgtcatgcccaatgggaagcgtgcaaggtgtgctggtgatgtggataagtttctggaggcaaatccggagtacaaagaccgcatatctgcttcggatttcagctttgcgccacccaaggttgttgaggagactgtttctcacaaccctgcctggcaagctgccaaggccaagaagcaggagaaggcagaggcacaaaagtgaatgatactcccaacggtgcttgtgtcatgtttaggtgatagtccgctcaagatcatgccccatcctatctagtgtacttgtctatctcgactgaagtcaatgtttaggtctttttagctgatttggctctgcatgctttgttgcaacggagcccccctgcgtgtcaattcctggggaataaatgagatgttgaataagtgctgtagagtgtagacctgctcttttataattaggcctcaagtcaagcttcctt

SEQ ID NO: 24017 - DNA, 515 bp, Zea mays
  Clone ID: LIB3606-061-A3_FLI
gcggtggtggtgctgttcaccacgatccggatgctgcgcagcatcctcgaagtgttgatggagagcacgccccgcgagatcgacgccaccaggctggagagcgggctctgcgggatggagggcgtggtggccgtccacgagctgcacatctgggccatcacggtgggcaaggtgctgctggcgtgccatgtgaccatcgccagggatgcggacgctgatgagatccttgacaaggtgatcgggtacatcaagacggagtacaacatcagccatgtgaccatccaggtcgagcgcgagtagggagctctgtctttggctgctgtcttgggcataaatggctggcgccattcgagctctggtgtgctcggtggtgttgtctattgctagtctattaggcaggccgggggaattatttgcgtggtggtcgtcagtcagtcagtcggtgcataaacaaggatgaaattttcggtaatgctattgacagcatcgtggttcatcgaactgcatattctagt

SEQ ID NO: 24018 - DNA, 1219 bp, Zea mays
  Clone ID: LIB3606-061-F7_FLI
ttttcatcagtttccaaggagacggagtttgacttctggggcttcatttttgtgacgcttgctgctgttatgtcaggattccggtggtccatgactcagattctgttgcagaaagacagttacggcctgaagaatccaattaccttgatgagccatgttacaccagtgatggccatcgccactatgatactatctctattactggatccttggagtgaatttcaaaagaattcatattttgataacccttggcatgtcatgcgcagttgcttacttatgcttatcggaggatccttagcttttttcatggtgttaacagaatatatacttatttcagcaacaagtgccataaccgtgacgatagctggggtagtaaaagaagctgtaaccattttggttgcggtattttatttccatgatgaatttacttggttgaaagggtttggtcttttcaccattatggttggtgttagcttgttcaattggtacaagtatgagagattcaaaaggggtcagataaatgaggatgacgtcagctctccatttactggtgacgtcaagtacattattatagacgacttggaatatcagtgaatttgaggaagatacataattctgtaatacagtgaattctaactgccactggcttgttcatgcctgaacctattgaaatagtagttacttatcgaggttttctccggaaaacatgcatgaagaacacagctaaggctaggtgtgattatactatgcacaccaaaatctgatgtgagctatgtttgtcacgatgatgttcaattctcgtcttggttgaacagccaggctgactacactgtcaagcaaagagctaactccatcggatcagaattcccattttgagaagactagcagtgggttgcatattgatatacatgcttagcgggaactgctgagaatgctccggcatctgtatatttgttgttctcttcgcgttagtgcgctgggcgcatattcattcttgaacctccacatttttagtgacgaggtgtattcattctctatataggtctgttttgtaaatgtgatcagaggataccatacatgtgctgttttcccttgaaacctagggagcggcatttgattttttctgtagactgtttcggggtaccgaatatgttgtggatatttgattgaagaattaagaacagcagggtagattggctaacttgccttttgaggtgtt

SEQ ID NO: 24019 - DNA, 1746 bp, Zea mays
  Clone ID: LIB3606-061-G4_FLI
atggtgaggaccatgtccacgacggccgcgggcacgcccccagtgtcggtcgccaccatcaaccccaaggtcttgaagtgtgaatatgcagttcgaggagagattgttacacatgctcagaacttacaacaagaattgcagaaaaatccagaatcacttcctttcgacgagatactctactgtaatattggaaatccccaatcacttgggcaacaaccagttacctatttcagagaagttctctctctatgtgatcatccagctctcctggacaaaagtgaaactcatgctttgtacagttcagatgctatagagagagcatggcaaattctagagaagataccaggtagagcgacaggagcatatagccatagtcagggtataaaaggtttacgtgatgaaattgctgctggaattgctgcccgtgatgggtttcatgcaagcggagataacatctttctaacagatggagcaagcccagcagtgcacatgatgatgcagttgttaataagttctgagagcgatggcattctctgccctattccacagtacccactgtactctgcatcgattgctcttcacggtggttcccttgttccttatttccttaatgaagagacagggtggggactcgatgttgatgagctgaagaaacaactggaggaggctcgatctaagggcatcactgtcagggcgcttgtggtcataaatccaggaaatccaacaggacaggttcttgttgaggaaaaccaaaagaaaattgtcgaattctgcaagaatgaaggacttgttcttctcgcagatgaggtttaccaggaaaatatatatgttgaagataagccattccactcattcaaaaaaattgcacggtcactgggatacactgatgatgatcttcctttggtatcattccagtcagtttctaaaggctactacggagaatgtggaaaacgaggcggttatatggagataactggattcagtcctgatgtacgggaacaaatttacaaggtggcatcagtaaacctgtgctccaatgtttcggggcaaattcttgctagccttgtaatgaacccaccaaaggctggggatgaatcctttgaatccttcatgtcagagagggatggtatcctttcatcgttggctcggcgtgcaaaggctttggaagaagcattcaacagtttagaaggaattacatgcaacaaagccgaaggtgcaatgtatctgttcccacgccttcatttaccccagaaggcaattggagctgcccaagcagtcggcactgcgccagatgcatactacgcaaaacgcctactggaagccactggaatcgtcgtcgtccccggttctgggtttggacaggtccctggaacgtggcacttcaggtgcacgatactgccgcaggaggacaagatacctgcgatagtatccaggctcaaggagttccacgagaagttcatggatgaattccgtgattgagctgagtatccatcgccctggcgtgatttttatctgttcaaaataataatgctgccaattggttgcccccgctccctcgtcgtcccatggatgctacagccaaacaccatcccaaattgtgttacaggcagatccctatcgaaaaacctacagaatctcgggcactgcaatgccatggttctgtttgccttgtgagaagtgtatcaggctaggctctgagccctgatgtgtacaaacatacccgaactttgaggccaagttgagttg

SEQ ID NO: 24020 - DNA, 1052 bp, Zea mays
  Clone ID: LIB3607-002-B10_FLI
gggccgccatcctgcccgtcatggagcgcgacgacgcggcctacgacggcttcgtcaagggttgcgccgacctctgccgctcccagggcgtcctcgtcaacacgttccgcctgctggagcagcgcgccgtcgagaccgtggccgcgggccactgcacgccccccggcctcccgaccccgcccatctactgcatcgggccgctcatcaaatcggaggaagtgctgggcaagggcggcgaggagtgcctggcgtggctggacgcgcagcccagggccagcgtggtgttcctctgcttcggcagcatcggccggttcagcgccgagcagataagggaggtggcggccggcctggaagccagccggcagcgcttcctgtgggtggtccgggcgccgcccagcgacgatccggccaagaagttcgagaagccgccggagccggacctggacgcgctcctcccggagggtttcttggccaggaccaaggacaggggcctcgtcgtcaagtcgtgggcaccgcagcgggacgtgctagcgcacgcgtccgttggcggcttcgtcacgcactgcggctggaactcggtcctggaggcgatcatggcgggcgtgccgatggtggcgtggccgctctacgcggagcagcggctcaatcgggtgttcctggagaaggagatgcagctggccgtggccgtggcagggtacgacagcgacaagggcctcgtgccggccgaggaggttgctgcgaaggtgcgttggatcatggactccgaaggcgggaggatgctccgggagcgcactctggcggccatgcggcaggccaaggacgcgctgcgcgagggcggtgaatcggaggccacactggccgggctggtggacaactggaaacgtacttgacgtggttgctgtggattatgttggaagggggtgggggttacgcgacactattcgccatttgtggactttacatcggaacgagaccttctagatgatcaattatgtcctgataccagaaactgttctagatgattaattattatataaattaaactattattc

SEQ ID NO: 24021 - DNA, 473 bp, Zea mays
  Clone ID: LIB3607-002-F8_FLI
taattaattattgccctttcagttcgccatcggcagccgagcaccatgagctccacaggcggcgacgatggcgccaagaagtcttggccggaagtggtcgggctcagcctggaagaagccaagagggtgatcctgtgcgacaagcccgacgccgacatcgtcgtgctgcccgtcggcacgccggtgaccatggatttccgccccaaccgcgttcgcatcttcgtcgacaccgtcgcggaggcaccccacatcggctgagaatcaaatctataaaatgaataactcggacatgtcatgcgtgcatgtccgtcgccgaataatggatgtgtgtgcttcgttccaataaattgctagtaaaaataatggcatcgtcggtatgcatgaataaaatgtatcagaatgttcatcctttcacgattggatatatgaaaatgtgctcagttgtttggttatccgccgtcttgtcttaggcc

SEQ ID NO: 24022 - DNA, 1861 bp, Zea mays
  Clone ID: LIB3607-002-H2_FLI
gcgaacttgagccagagagagaatctcgcaccgcagcaggaggggaccgagagagaagcgaactcgagaaagggattcaaggaggctgttgccgatggccatggcggcgcggctgctgcgagcaaccgaggtggcatctcgatttctatctgcttcccatggtttcgtccagcgagctgcatacacagctggtgggatagtcgatgttggccaaccaacaccccagtctcatccagagttattagctgatggagagatcacaccaggcatcacaaacgaggaatacatctctagaagaaaaaaacttttagaggtgctaccagagaagagcttggccattattgcttctgctgatcagcagatgatgactgatgtagtgccatatccattcagacagaatggtgattacctgtatattacaggttgtacacaacccggtggagtagcagttttgagtgaagaaacagggttctgcatgttcatgccagatacaaataaggaggatttagtttggcaaggtgaaactgctggagttgaggctgctgtggatttctttaaagcagataaagcatttccacttagtcagatgcaaaagatccttcctgaactgattgagcaatcaaaaggggtgtatcacaatgtgaatacaacatcttcttataagaacttggatgcctttcgtagggcatcactcaacaataaagtaaaagatcttacaaattacactgatgaattacggtgggtcaagtcgaaatcagaaattaagttgatgagggaatcagcatctattgtttctcagtctcttttacaaacaatgttgatgtcgaggacccacagagaggaaagccagttggcagctaagattgaatacgagtgcaaaatgagaggtgcccaaagaatggcgttccatcccgtagttggtggaggagcaaatggcagcattatacattattcaagaaacgatagaaaaatcaggacaggtgatcttctgctcatggatgttggctgcgagtatcatggctaccttagcgatctgactcgaacatggccaccctgtggcaggttttcacctgctcaggaagagctgtacagcctaatactggagacaaataaggagtgcataaagctctgtaaacccggcacaagcattaacgagatacacaatcattcggtaaagctgttgataaagggattccaagaactgaggatcctggagaaggggaaatccatccaatacaactacttgaacccaaccgcaataggccactcgttaggcatggatattcatgactccatgacactccccaaggacaagcccttggagcctggcgtcgtaataacgatcgagcccggggtgtacatcccggcggccccggtcctgaacgagcgcgcgccgagcaggtaccgcggtatggggatccggatcgaggacgaggtcctcatcaccgacgacggccacgaggtgctgacggcgtcggtgcccaaggaggtctcgcacctgaccaccctgatgaacatgggcaggggcggctcggctgcggacgcccatggccatgagctgcgagccgcctgcagctagctgaggcggctgcgtgcgtgaggtcatgcccgtggcggcggccggacctagtagacctggcacgacgtcgtggagcagaatctacgtgctctgcgaatacccgttgcatccattgattggactgttgtaatcacgggaacagatagcgaattgggcaggtgttttttttaaggtaatgggaggtgttatattctggacccttaccatggcgcgtcattgtatttgcatgcgcagttgtgttgtggccgcattcagcttctttatattgttttgtcgccgttc

SEQ ID NO: 24023 - DNA, 1438 bp, Zea mays
  Clone ID: LIB3607-003-A8_FLI
gcacggtgtcggccggtgccgccgtgcttggccgtaaggcaggagggtcatctccggcgacgacgcacgagggtacgaatccagccggcacgggcatgggcacgggcacggcacagtacgcggtcattttcgacggcggcagcacggggagccgcgtgcacgtcttcaagttcgacaagcagttggacctcgtcaagatcggcgacgagatccagttcttcgcgcaggtaaagccggggctcagcgagtacgctggcgaaccacaagaggctgccaggtccatcgcccccctcctggagaaagctcaaggcgccgtccctgcgtcgctgcagagcacaactccccttaaactcggcgccactgccgggctacggctgattggagatgagaaatcggaagagattcttgaagcgatccgtgatcttgtgaagagcaagagcgaattcgaatacaacccaaactggatcactgtgcttgaggggtctcaggagggatcttacctatgggtcgccctgaactacctgctgggcaagctaggtggggactactcagacacggtaggcgtggtggacctcggaggtgggtcggtgcagatggcctatgccatctctgacgacgcgtccgcgaacgctcctgcggtgccggagggacaggacccttacgttaccaaggaacacctcaaagggaaacactacaatctctacgtgcacagctacttgcactacgggcttctagccgctcgcgcagagattctgaaggcgaacaacgggccattcagtccctgcattctgcgtgggttcagtggtacgtacacctacaacggcgaggaatacgaggcggcggcggcaccagaaggcgcgtcctacgaaaagtgcagggacggcgcggtggcggcgctgaacctgggcgcgcgctgcgaggcgaaaaactgcaccttcaacggcgtgtggaacggcggcggcggcgccggccaggccgacctctacgtggcgtcctacttctacgacagggcctcgcaggtcgggatcatcggcggcgacgcgcccaacgggaggagcaccccggccgcgttcgcggacgccgctctcaaggtctgctcgctgagcgttgctgatgccgaggccgcgttccccgatgcctgggacgccgagtacctctgcatggaccttgtgtacgagtacacgctgctcgtcgacggcttcggtttggagccaaccaaggagttcacgctggtgacaaaggtgaagtacggagaatactacgtcgacgcagcatggccgctaggcgatgcgatagaaaccttgtcgtcccagaagctgaaccaaatcgcgtgaccagtaataataatgcttaatggagtggtaaaaaataatggtgtttagaagacgtgctacagttgatgtaatggcgtaataaatggatgtatatatctctgtcc

SEQ ID NO: 24024 - DNA, 1229 bp, Zea mays
  Clone ID: LIB3607-003-B11_FLI
cttcccttgctcgggaagccgttcctccgctccgcctcctacctcaaggaggccctcctcctcgcgctcgccgaaggccaccacggcggctgccacctcacatcgcccctcgacgttgccctcaagctcgcggcgtacaagactttctctgaccactcgcccgtgctccagttcaccaacttcaccgcgacacaggcacttatcgacgaaattgcccgcagcacatcgtcctgcatccatgtcatcgattttgatcttggtgttggaggccaatgggcttctttcttgcaggagctcgcacaccgccgtggcgcaggcggtgcggctctgccgtccgtgaaactcactgcctttgtatcagctgcttcccaccatccactggagctgcgtctcacgcgtgacaacattgcacagtttgctgcagaccttgggattccctttgagttcagtgctatcagcgctgatacgatcaaccctgcagagctcgtttctgccaccgctgatgaagttgtagctgttgtcctcccggttggttgctctgctcgtgcaccaccgctgccagcgatccttcggttggtgaaacagctggctcctaagattgtgatagccatagaccatggcgctgatcgtgctgaccttcccttctcgcagcacttcttgaattgcttccagtcctgcatgttcctccttgattcgcttgatgctgctggcattgatgctgattctacctgcaagattgagaagttcctgattcagccaagaattgaggatgcggtgcttgggcggggcaaggtggacaagccaattgcatggagaagtgcatttgcagctgctgggttcgcacctgttccacccagcaaattggcggaggcacaggccgactgcctcctgaagcgggtgcaggtccgcggtttccacgtggagaaatgcggggtcgggctcacactatactggcagtgtggcgagcttgtcactgtatcagcatggcggtgctgatcagcgatccacgcctgtgcgcaccatgttccaccaacatttgctggcatcttcaaccccagtaatgtgtattttgtcttgcaattaaatgctgctaaggaaactgatatattgctgttgaaccctccatgttcttcatctttgcaacttacgagctagaactagtggatttttagcaatgttggtgccaatatctctagtgtaatgatgttggactaagattttaccctgct

SEQ ID NO: 24025 - DNA, 680 bp, Zea mays
  Clone ID: LIB3607-003-C6_FLI
gccaactacccgtggggtcccgtggaagagaagagagcatcgccggagttggggtcggcgcgccgacgaggaacaaaagaagacggcggtggggcggagatggggagtcctctgggcgggtggccgtcttacaacccgcacaacttcagccagctcgtcccggccgacccatccgcacagccctcgaatgtcacaccagccacttatgttgcgacccacaggactgatccgccacccaatcaagtgataacaacggagtcgaggaacatcctgctgaggcacttctaccagaaatccgagaagctgaggcccaagagacctgccccggacaacctcgctccggagaacaacaacagcaacaacaagcagcccaggggaccggtcggcgacgtcggtgggcagtcgtcgagcgcgagaagctgaagccacagctggtggccgtccactcctccccctgcctgcttgtttctcatctctgggtttcgtcatgcagaggcagaggcagatgcagccctgtgttgtcctcttcgctcctcacgtctgtacgtacgacccaaagagctactaacctaatctgaagttagggttacatacatggatatcggatagatgggtgtacataagcacctgagagcagtgttgtgttatcctaaatgctaaacggtaaacagtcgttcaac

SEQ ID NO: 24026 - DNA, 941 bp, Zea mays
  Clone ID: LIB3607-003-C7_FLI
ggttagtcaacgtggccttcctcccgacgttcggcaggggccagacgccggcgctgaacctggcgggccactgcgacccggcgagcggcgggtgcacgggcgtgggcgcggacgtcaaggcgtgccagcgcatgggcgtcaaggtcctgctctccatcggagggggcgtcggcagctacgggctctcgtcccgggccgacgcccggagcgtcgcggcgtacctctgggacaactacctcggcggcggcggcggggggtccgagtccaggcccctcggcgacgccgtcctcgacggcgtcgacttcgacatcgagagcggcgggggcatgtactgggacgacctggcccggttcctcaagtcctactcccggcgcgggcgcgcgcggaggcccgtgtacctgtcggctgcgccgcagtgcccgttcccggacgcgtcgctgggcaccgcgctcgccacggggctgttcgactacgtgtgggtgcagttctacaacaacccgccgtgccagtacagcgcgagcgctggcgtgggcagcctggcgcaagcgtgggcgcagtggacgtccatcagggcggggcgggtgttcctcggcctccccgccgcgccccaggccgctggcagcgggttcgtgccggcgagcgacctcgttgcgcaggtgctgccggtggtcaagaactccaccaagtacgggggcatcatgctctggtcgaggtactacgacgggctcacggggtacagcgacgcggtcaagtcctacgtgtgagctagccagcctcgtgcgtccatgtgcgtgcacgtgcggggcgttatcatacctactagtgatgttcgcgcgctttgcgcgcatagtagacattttcgaaattaagtgctaaaaatattacagtacatctttgtaagcaagtaattcttatataattggcaaagaaatcttatcgat

SEQ ID NO: 24027 - DNA, 1047 bp, Zea mays
  Clone ID: LIB3607-003-D12_FLI
gccaaacacacgcgaagaaaaggagatagagtacaggttacagagaggcagagagcaaagatgtgtggtggtgcgatcctcgccgagctcatcccgactacgccggcccgccgcggcggcgcggcgtggcccgccggcaagtgcaagcggcggaaggcggacgacttcgaggccgcgttccgggagttcgacgaggactccgaggaggaggaggaggaggacgagggggtggtggagagcaagcccgccttcgtcgtccgcgcctcgtccgcggcgacgcagcccagggcgcgccaggagcagcggagccggcgccgggcgcccgaccagcagtacaggggcgtccggcgccgcccgtggggcaagtgggccgccgagatccgcgaccccgtcaagggcgtccgcgtctggctcggcaccttcccctccgccgaggccgccgcgcgcgcctacgaccacgccgcgcgccacatccgcgggcccagggccaagctcaacttcccctcctcctccgcctccgccgccggggcccccgccagccgcaagcgcgcccgcgccgccgacgccgtcatcgacctcgaggaacaagagcagcgcccggccgcggcggccctgaagcacgaggccgccgagtgctccggatccgacgcgctcccggacttctcgtggcagggcgtgtcggcggcctacgacgagccccccgcgccgcgcccggccttcgacttcgaggcgcggccggagagcgccgcggacgaggcgtcgccccgggcctccgactccgagtcggacgcgctgttcgactcgctcctcttcggcgaccagttcgccttcttcgacgccggcgcgtacgagtcgctggacagcctgttcagcgccgacgccgtgcagagcaacgccgccgcggcggcggaccaggacatgccgctgtggagcttcgacgacggctgcctcgtcgaggacaacctctcgttttaagcttcggcgactgctgctgtgtcttgagttttgtaaattacgacctgttttttttttagtttctgcttatgt

SEQ ID NO: 24028 - DNA, 1337 bp, Zea mays
  Clone ID: LIB3607-003-E1_FLI
cttttttactttctcacctttcttccttcccccagtctcccacaccccaactccaacacagagtcaccgcaccgccgcgtctaggtcaccgccatggccggggactggcaggagctgggccaagcggcggccatcggcctcctcttcgccttcctggtcgccaagctcatctccaccgtgatcgccttcaaggaggacaacctccgcatcacgcgctcccctccgacctcccccactgccgccgccgcagccgcgcctcccgtcccctcccactacggctccaccgacggaggcagcggcagcgacagcgactgggagggcgtggagagcaccgagctcgatgaggagttcagcgccgcctccgccttcatcgcggcctccgccgcctccggcaccagcgtccccgaggaagcgcagctgcgcctctacggcctctacaagatcgccaccgaggggccctgcaccgcgccccagccgtccgcgctcaagctcaaggcccgtgccaaatggaatgcttggcataagctgggtgctatgcctacagaagaagctatgcaagggtacatcacaattgttcaggagctattccctaactgggatgcaggtgcaagtgcgaaaaggaaagatgaagatagcattgcttccgcatcagcttcaaaggggcccatgggacctgtgtttagcagtttaatgtatgaggaagacgaaggaaatgaatcagaacttggtgacatccatgtttcagcaagggaaggggcgactgatgacatagtgaagcttctggcagctggtgttgaggtcaacgtgagagataccgaaggtagaagtccgttgcactgggctgttgatcgtggccatcttagtgctgtcgaggttcttgcaaatgcaaatgcagatctgaatgctaaggacaatgaagggcaaacggcactccactatgctgctgtttgtgaaagagaagacattgcagagttgcttgtcaagcatcatgctgatcttcggatcaaggacgaggacgggaacacggcacatgacttgtgcccttcgagctggtcttttatgaaccaggcaaactgataacacgaatatacggatatgcttgaaggtgtcatctgccaagaaacatgctagctgtatcctaaagcccatacggcacatatggtgtatcttagtgtcatgtgtgacgtgtgggaaatcaggcaggttgtttgcgtacgtggtgccctctctgaaatcagatgagttgttttatcgtcctcatcgaaccagttgtcaaaggatagtattagtgttgggaagatacatgtattgctttaatcaaaagaatcatgctggac

SEQ ID NO: 24029 - DNA, 1028 bp, Zea mays
  Clone ID: LIB3607-003-G4_FLI
atcaaagagttgaattcctatgtcaccttgaggaaaacgtaagttgaagtccttgaaacggaaagttctctgcttttcttaatatcaattacaaagatgcatactactaaaattaataaacttctaatttgaactgttatacctcctccatatttgttccacttggtacctattgtaagtttgaaggctgattcaaaaagttttttgcagataccaaagtagccttggtaacaacaataagagggttgagctctttgatatgggtgctggaagtagtgagcctgctgctgaggacaatattcaaatggcatcagccatgacaaatcaacaactcattgatacgggaaggaaccaaatggaccaaacagatcaagctattgaacgttcaaaaatggttacttcccttactatacacccttgtcctgtttgccatggcaaaatttacaagacattcttgtaggtcgtagcacaaactgttgagactggagctcaaactgctgcgacattaacacagcaaacagagcaaatgaagagaattggtaatgagctagatactgtccacttctcactgaagaaagctagccaactagtgaaggagattggtcgccaggttgcgactgacaaatgtatcatggcattcctcttcctgatcgttttgggtgtgattgctatcattgttgtcaagatcgtccatccgaataacaaaaacattcgagacattccagggctggccccgcctgctcaaaactatcagattcacaacaggagattgttgtgggcagaagcttccataggcatgtgatggctctgaatgtaggcttcatgtggacgcactgcctgcgaagcagcagctatccatagggcgaaagatacatagtaacaattctttgtgcctgtatatctattttgtcttgttaactccgagccctaggtctgtattcctgcgtctggtgtttgtacaccgctggccgtttggctgtgtatatggtacagagatgagatcttaaaaccaaaccagtaattatgac

SEQ ID NO: 24030 - DNA, 691 bp, Zea mays
  Clone ID: LIB3607-004-C8_FLI
tgtcgcctcgggagatggagatgccggcgcgcacgttcctcaactggtaccggcgcgccgactacacggcgtacgcgttcaacacgaggcccctggcgcgcagcccgtgccagaagcccgccgtgtactacctgtcgtcggcgcggcgtgcggccttgcgtggcggggtgaccacggagacgcggtacgaccggtggcgccacccgaacgagacgcggcccgcgtgccggtgggacataaccgacccggacgcgcatctcgatcacatcgtcgtgctcaagaagcctgaccccgggctctgggacaggtctccaaggcgaaattgctgccgagtggtgtcttcgcccaaggatggcaagaacggggagaagacgatgaccatcgatgtaggcgtatgcagagaaggcgagttcagccaagtagccggagcgtgaactttcatatagagatagatgaagataggaagcttcaaattcttttcttttcttgcgcgaatccattcttcttgtagggcatgaactagtcgaaacacctctctttgcgcctcacgggcgtctagctgtaactgcagttcacaaaacgccagaaggccaggactagaagttttggccgggcgttccggcatggtgacggcagtcaacccgccgccctacgcgcaactagcgacggctacggtgcctagattttgggt

SEQ ID NO: 24031 - DNA, 1657 bp, Zea mays
  Clone ID: LIB3607-004-E11_FLI
cgtcttcgtactcgcctatctccgcgactcaaagctttccccaattcccccccttctcccatttctcaccaccgccgccgctccccccgttcaacaacaccatgagggagtgcatctcgatccacatcggccaggctggtatccaggtcggaaacgcgtgctgggagctgtactgcctcgagcatggcattcaggctgatggccagatgcccggtgacaagaccattgggggaggtgatgatgctttcaacaccttcttcagtgagactggcgctgggaagcacgtcccccgtgctgtttttgttgaccttgagcccactgtcatcgatgaggtgaggactggcacctaccgccagctcttccatcctgagcagctcatcagtggcaaggaggatgcagccaacaacttcgctcgtggtcactacaccattggcaaggagattgttgacctgtgccttgaccgcatcaggaagcttgcagataattgcactggtctccagggcttcctcgtcttcaacgctgttggtggaggaacgggctctgggcttggttctctcctcctggagcgcctgtctgttgactatggcaagaagcccaagctcggtttcaccgtgtacccatccccccaggtgtccacatccgtggttgagccatacaacagtgtcctgtccacccactctctcctcgagcacactgatgttgctgtcctgctcgacaatgaggccatctatgacatctgccgccgctcccttgacattgagcgcccaacctacaccaacctcaacaggcttgtctcccaggtcatctcatccctgacggcttccctgaggttcgatggtgctctgaacgttgatgtgaacgagttccagaccaacctggtgccctacccgaggatccacttcatgctttcgtcctacgctccagtcatttctgctgagaaggcctaccacgagcagctgtccgtggccgaaatcaccaacagcgccttcgagccatcctccatgatggccaagtgcgacccccgccatggcaagtacatggcatgctgcctcatgtaccgtggtgatgtggttcccaaggacgtgaacgctgctgtggccacaatcaagaccaagcgcaccatccagttcgtggactggtgcccgactggcttcaagtgcggaatcaactaccagcctcccagcgtcgtccccggcggtgacctggccaaggtgcagcgtgccgtgtgcatgatctccaactccaccagtgttgtggaggtcttctcccgcattgaccacaagttcgacctcatgtacgccaagcgcgccttcgtgcactggtacgtcggtgagggtatggaggagggcgagttctccgaggctcgtgaggatctggctgcgctcgagaaggactacgaggaggtcggtgctgagtttgacgagggtgaggacggcgacgagggtgacgagtactagacgctctactggcgcggcgtcgtcgggcttgtgtgccactgctatcctgtgatctgccctgagtggctcctatcgtgttatgtttctgtcggttcttatctatctgtcgttgtgtggtttacaacttacgttgtaagactttattcccccgctttgctactgggttattaagtttggcgttattgttttcttgatctctg

SEQ ID NO: 24032 - DNA, 463 bp, Zea mays
  Clone ID: LIB3607-004-F6_FLI
aaccctagttcgaacgcgccgccgtcaccgtcgtcgctcgcgctctccgcccggatcggagcgagagtaggggcgtgtcggcggtgaaagcgactgcgtcagccatggcggacgaggagcattcggagaggagagaggaggcctccgagcttgcccccttcgacccgaccaagaagaagaaaaagaagaaggttgtcatccaagaaccttctgatgaagtggacaagcttgcagagaagacagaaacactggcagtcgcagaacccgctgaacttaacttcactggaatgaagaagaaaaagaagaagccggtggatcttgattcaactcttgatgagcttggagatggggaggacactcaagatgatcaagctgcagaggacaagagtggtgtgcaaaaagccgggttcattgtgattagctacgaagaataaactagagtcatcggaattccattcgattc

SEQ ID NO: 24033 - DNA, 882 bp, Zea mays
  Clone ID: LIB3607-004-G3_FLI
ccctaagcagggagttgatttatccgctgcagccatgagtaagttgcagtctgagtctgtcaaggatgccatctcccagattgttggggatgccaaggagaagaataggaagttcactgagactgtggaacttcagattggtctgaagaattatgatccacagaaggacaagcgtttcagtggctctgttaagttgccccatatccctcgtcccaagatgaaggtgtgcatgcttggtgatgcccagcatgttgaggaggccgagaagatgggacttgactacatggatgttgaggctctcaagaaaatgaacaagaacaagaagcttgttaagaggcttgccaagaagtaccatgctttcttggcatcagaggccatcatcaagcagattccccgtctccttggtcctggtctcaacaaggcaggcaagttcccgaccctggttactcaccaggaatccctcgagtccaaggtgaacgagactaaggcaaccgtcaagttccagctcaagaaggtcctttgcatgggtgtcgccgtcggcaacttggcgatggaggagaagcagatccagcagaacatccagatgagcgtcaacttccttgtttcccttctgaagaagaactggcagaatgtgagatgcctgtacgtcaagagcaccatggggaagccatacagggtgttctaagtatgctcttttgtgaagtctgctaggttctggcagcgaggttttattgaattaaactcttgttaaggatatgtttttggacgatcctatatttcgtcctggcgctactatgtttcagaatggtggtactactataagtatcctagcgctataagtattgcttgaaaggatcaatataatttgcgtgtcatacccgc

SEQ ID NO: 24034 - DNA, 1334 bp, Zea mays
  Clone ID: LIB3607-005-B4_FLI
aaaaagatgaacatgacaggacctcgtcgctaaaaccctagcgcagcggcgcgggagcggatgcaccttgccctgatcatctcccgcattcgcctcttgccgaccgccatgcccagcacccgctccgcctccgcctccaggctgctggtccgcgctgacaacagcccagttgcacgagaaatcaaacgtgaatcgagaacttgaagtaaatgggcagcatcataagaagcaggtccctgacattgaggattttatatatgaaaaggccaaaacattgacatcgtcaagtaaggcaacaacatctttggtcaaggtggagaaaaaggtcggagtttcttcagttataaaagttggagctccagataactgggaggcagttcttggaggcattaaaagcatgaggttatctggtgaagcccccgtagatacgaagggctgtgaaaaagctggttctctccttccacccaaggaaagaagatttgcagttctgatatcaactatgatgtcaagccagacaaaagatgaagttacacatgctgctgtggaacgcctctctgaaaacggtttacttgatccggatgctatagtgaggactgatgagaccacgcttgcgaatcttatcaaacctgtcggattctatcagcgaaaggcgcagttcataaaagaagcttctaaaatttgccttgagcgctttggaggggatattccggattctctgaatgaactgcttgctctgaggggagttggccctaaaatggctcatttggtgatgagcattgcttggaagaatactcaaggaatctgtgttgacactcatgtgcatcgcatttctaaccgacttgggtgggtttttcgggaagggacaagacagaaaactacgacaccagaacagacaagaatttctctagagaaatggctacccaaggatgagtgggaacctataaatccattactgttggatttgggcaaactatctgtactccactgaggcccaaatgcgataagtgtggcatcaacaacctttgcccttctgcttttaaggaatcatcaagcccaattccaaagcaaaagaaaacaaggtctccatagaactctgactgtgacttgtctggcaccgacgtgagatgatattttgggttgtccgtcggtggtaaatattatggggtttccttttggtcagttattgttggatcaccttggtgccgtaccattggcatttggcaagtcatgtatatcattttgtataccggtaaattgttcaagacggtatgaagacacgcttatctaccagttactgtaaaaagtactggtaacaagcgaaattttcatgtgcc

SEQ ID NO: 24035 - DNA, 1152 bp, Zea mays
  Clone ID: LIB3607-005-C2_FLI
tttgttgctgtttttattcgtttgtcacataagcagtggtggtcggtcggccggcgacaatgagcggccgtgtgttcgtcctggccgctgccttcggcgtgctgctcgccgcagccgccgtgtcctcgaggcccgtcctgactccgctgggtactagccgccctgctgccggcgacctgtccgtgtacttccacgcggactcgtgcccgcagctggagacgatcgtgcggtccagcgtggacgcggcgctccagcagaacgtccgtctgacggcgggtctcctccgcctcttgttccacgactgcttcccgcagggctgcgacgcgtccatcctcctggacaacggcgagcgcggcctcccgcccaacgtggggctgcagcaggaggccgtgcagctggtggaggacatccgcgggaaggtgcacgcggcgtgcgggcccaccgtgtcgtgcgccgacatcacggtgctggccacccgcgacgccgtgagcctgtccggcgggccttccttcacggtgccgctggggcggctggacagcgcggcgccggcgtccagcaacgacgtgttcacgctgccgccgccgacggcgacggtggacgagctgctgacggcgttcgggagcaagaacctgtcggacccggcggacctggtggcgctgtcgggcgcgcacacggtggggaaggcgcggtgcagctcgtttggcgacgtggcgggcccggccaccgacgacgtgacgcggtgcgtgacggcgacgtgctcggcccccgggagcggcgacacgctgcgggacctggacttcctgacgcccgccgtgttcgacaacctctacttcgtggagctgacgctgaggaagaacaagggggtgatgctgccgtcggaccaggggctggtgagcgacccgcgcacgagctggctcgtccagggcttcgccgacaaccactggtggttcttcgaccagttcaggacctccatgatcaagatgagccagctcaggggaccccaggggaacgtcggcgagatccgccgtaactgcttccgcccaaacaccaacggcatcgccgcctctgcttgagttgactgaccaggcaccgatccattacttcactttcactgtgtgtaataattaataataataaaacaaaaacaacgcc

SEQ ID NO: 24036 - DNA, 1381 bp, Zea mays
  Clone ID: LIB3607-005-D11_FLI
ctcgattctctagctagctaggatctagcaacacaaacccgtctgtccatatattatgggttggtaacaattaattagactgaagaagatcatctaacgaggatggacgcaaagaaaccatacatgctggctattactacagtagcaatctacaccggcatgtacgtggtctcaaaggctgccttcaaccagggaatgaacagcttcgtcttcgtcttctaccgccaggctgctgcatcgcttctcctcctgcccatcgcacttgttctagaaagtgcttattatatattaccgaattcgttcctcccaatcatccggcgcggccaggaaaaatgtgcgatccatgtcctctgggttgatcctgaagttgttcttgcttgccctaatctggaacacgttaggcatgaatctgtgcaatgcaagtgtgacgctcacgtcagcaaccgtggcgtcggcaacaggaaactctactcccgttatcaccttctgcctggcactgctactgaggatggaggtggtgaagttaaggagcgtctctggcatagccaaggtcaccggcgtagcactgtgcctggccggagcgttggtcatcgccctgtacacggggccgtcgctcagcccagtcaaccgccatcaccgtgcctctggcggcgcccatggcttcaaagctccaacccgtggggggacatgggttacaggcacgttcctgatgcttctgtccaacgtcacatggtccctgtggacggttctgcagggcgcgctgctaaaggaataccccaacaagctcctcgtcacgacctcccagtgcttgttcagcaccgcgcagtcgttcgtcgtcgcagcggtggccgagagggacttctcgaaatgggcgctcaagcttgacgtcagcttgatcgctgttgcttacaccgggtttctcgtaactggcgtatcctactacctgcaagcttggtgtgtgcagataaaaggacctgtcttccttgctgtctggaacccactctgctttgtgctaaccatattctgttcctccttcttcctcggcgagaatgttcacctcggcagcattgtgggtggaatcctcttggtctgtggcctttatagcgtgttatggggtaaaaccttggaggttcatcagactgtggaatctggtgataatacggtcggtgaagtgcaaaatggacaagaagagaagaatcatcaacagaaggtgctggagaagggacgccaagaggaagcatcaatgacagcacccggtgtagtgtgatcgattgcttgattccataaagctagcaatctatggttcatttatgtcatgtctgtggttcttgtacaaattgcctgtgagtcacaataattgtttcaagatctttaaattgtt

SEQ ID NO: 24037 - DNA, 2584 bp, Zea mays
  Clone ID: LIB3607-006-D5_FLI
aggaggaggagaagcgccaagacgaggacaggcgggttgcggcgtcattcgcggaacgatggcggcctgccgcgccggcggttaggcccctccgctccgctccgctcctccgagattgttgccctcttgttcctgtgaccgagacaaattcaatagaattttctcctaagctatttaaaggacaactatggctacaattcaagatataggactctctgcggctatcaacataatgggtgctgtagtgttcctagttgcatttgctttccttcgactgcagccaatcaatgatagggtttacttcccaaaatggtacctcaaaggtgcaagagagagtccaagtcatgggggtacatttgtccggaagtttgtcaatttggacatgcgttcatacttaaaatttttaagttgggtgcctgctgctctcaaaatgcctgaggatgagttgattagccatgccggtctggattcagctgtgtatctgaggatttacttggtcggacttaaaatatttgctccaatctcagttctagctttcattgttcttgtccctgttaattggaccaatgatactctgcaattctcgaagttagagcacagcaatgttgataagctttcaatatcaaacataccagttggatcaaaaaggtttatagcccacttggcaatggcgtatgttttcacattttggacctgctatgtactattacgtgagtatgaagtagttgcaaagatgagactgcgatttctttcatcagagaaacgcagaccagatcagttcacggtccttgtgcggaatataccgcctgatccagatgaatcaattagtgagcttgtggaacatttctttcttgtgaatcatcctggtcactatctgacacatcaggtggtttacaatgcaaataaacttgctaaattggtgaaagagaaagcaaagatgcataattggcttgactactatcagctgagatttgaaaggaatgcatctaaaaggcctactactaagactggttttcttggttgttttggtacgaaggtggatgccattgaatactacacatcagaaattgagaggatagaaaatgaagaagcagaagagcgtgaaaaaattgtaaaggatcccaaatccattgtaccagcagcatttgtttccttccgatcacgttggggtgcagcagtttgtgctcagacacagcaaaccagtaacccaactgtttggttgacagaatgggctccagaacctcgtgatgtgtactgggataatttgtctattccatttgtctcccttacagttcgaaggctgataattgcagtggcattcttcttcctgaacttcttttatgtgttcccaatagcatttgttcagtctcttgcaaatcttgaagggattgagaaggcagcgccgtttctgaagcctctgattgaagagcatactattaaatcattcatccaaggtttccttccgggaattgctctgaagatcttccttatattgctcccaagcatattaatgtttatgtctaaggttgaaggattgacctcaatatcttcactggagagaagatctgcatcaaagtattatattttcatattcttcaatgtgtttctggcaagcattattgcaggatctgctttagagcagctaaaaagctatattcatcagtcagcaaatgaaataccaaggacgattggtgaagcaattccaatgaaggcaaccttttttataacatatacaatggttgatggttgggctggggtagctggtgagatattgagattgaagccactagtgatcttccacctgaaaaactttttcttggtcaagactgagaaagacagggaagaggcaatggaccctggaagtattggttttgactcaagcgaacctcaaattcagctgtatttcttacttggtcttgtctatgcggcagtgacaccatttatgctcccttttgtattggtattctttgggtttgcgtacgttgtataccgccaccagataataaatgtgtataatcaagaatacgagagtgcagcagcattttggccaagtgttcatggacgcataatcacagcgttgattgtatcacagctgcttctccttgggttacttagcacaaaaggcgctggccagtcaacacctgtgctccttgttcttcctgtagtgaccttctatttccacaagtactgcaacaaccgctacaaaccgacttttgtgaaatgcccattgcaggaggcgatgaagaaggataccctggaacgtgccagagagccaggatttgacctcaaaggatacctaatgaatgcctacatccacccggtgttcaaaggtgatggggacgacgacaagttctcagtcgctgatgaaccagaagccgagcaagtcctggtggcaaccaagcggcagtccaggcggaacacccccgtgcccagtaaatacaacgggtcggaatcaccttcgcttcctgaaattgtaaatgagcaacggctataaagatgtctacagttttcctatgtatattaaggatacaataatgcttttgaatgcctccagttaatactagtaaaagcagtgatggccaac

SEQ ID NO: 24038 - DNA, 672 bp, Zea mays
  Clone ID: LIB3607-006-G11_FLI
cttgggagggcttcagcgacgcctccgacgccgaccttatcgccgagcacgagatctgggccgccgtggatccgttcgccaagaacgaggccttcaattgcagcaacggggatctcttcaagtggaagcagctgtggccgatactcgccgaccatttcggcctggaatgggctggctacgaaggtgaggagaacaggttcaagctcgaagaggtcatggccgggaaggaagctgtctgggcggagattgtcagggagaacgaccttatagccacggagcttgacgagatcacgaattggtggttcgtcgatgccatgtttgctgtggagacccagcttctggacagcatgaacaaaagcaaggagcatggcttcctcggcttcaggaacactgtcagctctttcaacacatggatcgagaagctgaaggtcttcaagattgttccctaataataattcatccttgctattcacttctatactgttgttctgcatccttattatcctgctcatttatcagcaccagttctcctgtaattcaaacatcttgctatctgtgccaggtttgcatgttatatactagggaccaataaagatcaacacattgcaaaataggttattcttgtccagcatgggtttgattgaaattgtttgtgtattgaattactagctg

SEQ ID NO: 24039 - DNA, 1672 bp, Zea mays
  Clone ID: LIB3607-006-H2_FLI
tttcggacggtggtggcatcgccaattcaactccgcatctgaatcggcactcggcagcgcgccagctccatagtgtaggaggagatggcgctcacaagaatcggtcttgctggccttgcggtcatggggcagaaccttgccctcaacattgcagagaaagggttccccatctctgtgtacaacaggacaacctccaaggtggacgagaccgtgcagcgtgccaaggcagaaggaaaccttcccgtctacggcttccatgaccccgcgtcctttgtgaagtccattcagaagccacgggtggtgatcatgctcgtcaaggccggcgcgccagttgaccagaccatcgcgacgctcgcagctcacttggagcagggcgactgcatcatcgatggggggaacgagtggtacgagaacacggagaggagggagaaggccatggaggagcgcggcctcctgtatcttggcatgggtgtctctggaggagaggagggtgcccgcaacggcccgtccttgatgcccggaggctcgttcgaggcttacaagtacgtcgaagacattgtcctcaaggtggctgctcaggtccctgacagtggcccgtgtgtcacgtacattggcaaaggtggatcgggcaactttgtcaagatggttcacaacggaatcgagtatggcgatatgcagctgatttccgaggcatacgacgttctcaagtcggtcggtaagctcaccaacagtgagctgcaccaggtgttctccgagtggaacaagggcgagctcctgagcttcttgatcgagatcacggccgacatctttggcatcaaggacgagcatggcgatggctacctggtggacaaggtccttgacaagaccgggatgaaagggacagggaagtggacggtgcagcaggccgccgagctgtcggtggccgctcctacgatcgaggcgtccttggactcgaggttcctgagcgggctgaaggacgagcgggtggaggcctccaagatcttccagggtgactactactccaccggctcgccggtggacaaggcgcagctggtggaggacgtgaggcaggccctgtacgcgtccaagatctgcagctacgcgcagggcatgaacatcatcaaggccaagagcgcggagaaaggctgggggctcaacctcggcgagctggccaggatctggaagggcgggtgcatcatccgcgccatcttcctggaccgcatcaagaaggcctacgacaggaacccgggcctcgccagcctgctcgtagaccccgagttcgcgcaggagatcatggacaggcaggcggcgtggcgcagggtggtgtgcctcgccatcaacaacggcgtcagcaccccgggaatgtccgctagcctggcctacttcgactcctaccgcagggacaggctgcctgccaacctggtgcaggcccagagggactacttcggggctcacacctacgagagggtcgacatgcctggctctttccacaccgagtggttcaagattgcgcgcaacatctccaacaactgatgagctgctcaacggatggcatgcccggtgttgactactccagtcggtaatgagatttcctgcaggaacttgtctattgatctttgtaagttaattatttatatgaataaaataagagcagacatgcttgtgtttgggc

SEQ ID NO: 24040 - DNA, 570 bp, Zea mays
  Clone ID: LIB3607-007-A4_FLI
ggacgggctgcagaggtcggcgcagacattcaggaggtcgggctcgtcggggctggtctgggacgagcgcttcatcaccgagggcgccggcgcggcggcgccacgccagcagccggagctgcggcactcgaggagcgtcggcggcagcgtcgccatgctgctgctcggcggcgaggcagatcgcgacgacaagaggaagctgacgctggccaagccgaacctgaagggccaccacaagaagcaggaggagctggtgcctggcaggaaggcgtttcggaccaaggacgtagctccggccgccgagccaccgtcgccgagggtgctcgccatctgctgcgcgccctgctccatcttccgggatgccggcgccggtggctcgtcgtctctggcgcggcgggccaagaagcggtaggataggaaaatcaatatgtttattttttcgggttcacggtatgcttgagacgaagtgtaaccgtacgggggatcgtgaccaagtggctcgcgcgtacgtacgatttgaggctcataaaatctctctgattctgaataaatttgtactacatgatggat

SEQ ID NO: 24041 - DNA, 1210 bp, Zea mays
  Clone ID: LIB3607-007-A8_FLI
cacctcgcggtcctgaagaccgccgcgaacccgcgcggggacgcggagcagaggctggtggccatgatggcgggcgccctgtcgtctcgcatccgacgcccacccgcgtctcaccagcacctcgcgggcctatgcggcgccgagcagcgcgcggaatggcagctgctgcagcacgtctccccctgcttcggcctcgccctccacggcgccaacctcgccatcctcgacgccgtggccgaccagcgcgccatccacctgatcgacttcgacgtcagcgtcgcgcagcacaccgccctcatcgactccctcgccagccgccgcgtggccggcacgtgcctcaaggtcacggccgtcaccgacccgacgtcgccgttcacgccggctctggcgcaggcgctggcggccacgggccagcggctcaaggagcacgcccggcaggcaggggtggagttccggttcagagcggtcagctgcgtcgccggagaggtcgaggcgtccaggtcgaggctcgggtgcgacgagacaggggaggcgctggtggtgaacctggcgttcgccctctcgcgcgtcccggacgagagcgtgtccccggccaacccgcgcgacgcgctcctccggggcgtgcgcggcctgcgcccgcgcgtggtgacgctggtggagcaggagctcggcgcgaacacggcgcctctggcggcgcggttcgccgacgcgtgcgcgcactacggcgcggtgctggagtcgctggacgcgaccctggggcgcgacagcgcgcagagggcccgcgccgaggcggccctggcgagcaaggcggccaacgccgtggcgcgtgagggccccgaccgggtggagcggtgcgaggtgttcggcaagtggcgcgcccggttcggcatggccgggctgcggcccgtggcgatcggccagggcgtcgccgaccgcgtaaagggacggctaggtcccgcagcacgtccgggattcgacgtgaagctggacagcggccggctcgcgatcgggtggatggggcgcgtggtcaccgtcgcctccgcctggcgttagccgtacgtagcacccctagtgatgagctaatcatcagctcccggttatcgacgcctatcattcagagtacctcaggaacagccgttgtgcaaccacgaacgaatgcctagtagttgtaacaataatctctctaattttttacggcaactggtcgttg

SEQ ID NO: 24042 - DNA, 1106 bp, Zea mays
  Clone ID: LIB3607-007-F7_FLI
cccacaccccccgagctcagcttagctccactccagctccaatcacagtcgtgaccagagcgcgagagctagctagagggccgtgaaaatgccgatcaataggatcgccctggggagccaccaggaggtgtaccacccgggcgccctcaaggcggcgttcgctgagttcatctccaccctcatcttcgtcttcgccggccagggctccggcatggccttcagcaagctgaccggcggcggcccgacgaccccggcgggcctgatcgcggcggcggtggcgcacgcgttcgcgctgttcgtggcggtgtctgtgggcgcgaacatctccggcgggcacgtgaaccctgccgtgaccttcggcgccttcgtgggcggcaacatcaccctgttccgggggctcctgtactgggtggcgcagctgctggggtccaccgtggcgtgcttcctgctccgcttctcgacgggcgggcaggccacgggcaccttcgggctgacgggcgtgtcggtgtgggaggcgctggtgctggagatcgtgatgaccttcgggctggtgtacacggtgtacgccacggcggtggacccgaagaagggcagcctgggcaccatcgcccccattgccatcggcttcatcgtgggggccaacatcctggtgggcggcgccttcgacggcgcgtccatgaaccccgccgtgtccttcggccccgccccctcagctgggagtggggctaccagtgggtgtactgggtcgggcccctcatcggcggcggcctcgccggcgtcatctacgagctgctcttcatctcccacacccacgagcagctcccctccaccgactactaaaagccgaagccgaccgacctaggggtgcgcagcgcagctagcgcatccagctctctctccccgctcgccgccgtttagtttctctcgtgcacgtgcatgcatcgtcgactgtctcaggccgccgctgcgccggcgccgctcgcatcgtttgcttccttggaccagcagtcgtcgccgtcaggctgaactgcttgtaaccgtgaattccggacccgtttgcttctgtaagatttgtgcatttgcctgagtacacctcgatctgcagc

SEQ ID NO: 24043 - DNA, 630 bp, Zea mays
  Clone ID: LIB3607-007-G4_FLI
gtactcgtgaaattcgcggcgcagcgcaagcgcgcgggagccagcgtgccggcgaggcggaccgatgggctcctcggcggcgggctccaccccgacggcgcggcagcagcgcggcgcgggcgcgggcgctggcgcgagcgcggcgccgtcgtcgtcgagccccgtcttcctcaacgtgtacgacgtcacccccgccaacggctacgcccggtggctcggcctcggcgtctaccactccggcgtgcaagttcacggtgtggagtacgcgtacggcgcgcacgacggcgcgagcagcgggatcttcgaggtggtgccgcggcggtgccccgggtacgcgttccgggagtcggtggccgtgggcgcgacggagctgagccgcggcgaggtgcgcgcgctgatggcggagctggccgccgagttccccggggacgcctacaacctggtgtcccgcaactgcaaccacttctgcgacgccgcgtgccggcgcctcgtcgcgcgcgcccgcatcccgcgctgggtcaaccgcctcgccaagatcggggtcgccttcacctgcgtcatcccgggcaacggccgcgccgcgcgcccgccctccgccgcgagccggagccggagccggtccgcgccgcc

SEQ ID NO: 24044 - DNA, 1649 bp, Zea mays
  Clone ID: LIB3607-007-H9_FLI
cttcgtactcgcctacctccgcggctcaaacctttcccccttctcccaattccctccgtcggccgccgctccatcccgtacgacgacaccatgagggagtgcatttcgatccacatcggccaggccggtatccaggtcggaaacgcgtgctgggagctgtactgccttgagcatggcattcaggctgacggtcagatgcccggtgacaagaccattgggggaggtgatgatgctttcaacaccttcttcagtgagactggtgctgggaagcacgtgccccgtgctgtttttgttgaccttgaacccactgtcatcgatgaggtgaggactggcacctaccgccagctcttccaccctgagcagctcatcagtgggaaggaggatgccgccaacaactttgcccgtggtcactacaccattggcaaggagattgttgacctgtgccttgatcgcatcaggaagcttgccgacaactgcactggtctccagggcttcctcgtcttcaacgctgttggtggaggaacgggctctggccttggttccctcctcctagagcgcctgtctgttgactacggcaagaagtccaagcttgggttcactgtgtacccttccccccaagtttctacttcggtagttgagccatacaacagtgtactgtccacccactccctcctcgagcacactgatgtggctatactgctggacaatgaggccatctacgacatttgccgccgatcccttgacattgagcgcccaacctacaccaacctcaacaggcttgtgtcccaggttatctcatcccttactgcctccctgaggttcgatggtgctctgaacgtggatgttaacgagttccagaccaacctggtaccctacccgaggatccacttcatgctttcttcgtacgctccagtcatctctgctgagaaggcctaccacgagcagctctctgtggctgagatcaccaacagcgccttcgagccatcttccatgatggccaagtgcgacccacgccatggcaagtacatggcctgctgcctcatgtaccgtggtgatgtggtccccaaggatgtgaatgctgctgtggccaccatcaagaccaaacgcaccatccagttcgtggattggtgcccgactggcttcaagtgcggcatcaactaccagcctcctagcgttgtgcctggtggcgacctggccaaggtgcagcgtgccgtgtgcatgatctccaactccaccagtgtcgtggaggtgttctcccgcatcgaccacaagttcgacctcatgtacgccaagcgtgccttcgtgcactggtacgtcggtgagggtatggaggaaggtgagttctctgaggcccgtgaggacctggcggcgctcgagaaggactacgaggaggtcggcgctgagttcgatgagggcgaggatggcgacgagggtgacgagtactagagaagtttgctgatgacgcagcatcaggccagtgtgctgcccttatcccgtgatctgccgtgagttgctcctgctatcgtgttatgtgtgtctgttatgaagtattgtgtggtttacaacacctgatgttgtaagagtcgttaattcccctgcattgctaccgggttattgagaataattatggctgtttacgttgttgcttc

SEQ ID NO: 24045 - DNA, 1175 bp, Zea mays
  Clone ID: LIB3607-008-C8_FLI
ggaaaaatacacagggcacaatgtgcggaggcgccatcctcgcggagctgatcccgccgacgcggcgcgtggcgtcgaagccggtgacagaaggccacctctggtcggcgagctccaagaaagccggcagcggcagggacaagaggcaccagcacgaatacgccgacgatgacttcgaggccgccttcgaggacttcgacgacgactttgacgtgcatgaagacgacgaggacggccacttcgtattctcgtccaaatccgccttgtccccagccctgcacgacgggcgcgcggcgagccagaagaagcagcgcgggcgccagttccgcggcatccggcagcggccctggggcaagtgggcggcggagatccgcgacccgcacaagggcacccgcgtctggctcggcaccttcagcaccgccgaggacgccgcccgggcctacgacgtggaggcgcgccgcctccgcggcagcaaggccaaggtcaacttccccgcagccagcggtcgcgctcgcggtcgcgcgcgcccacgccgcggcgacgacggcaacccacgaaccgcgccggaaacgcagcacccagcacagcccgctctgctgcctcgaggagagagagagacgcagaggaaggaagggatcgccgccgtgaagccagaagctacggagtcgttcgacgtgggcggcggtctcttcttcgacatggccttccccaccttcccagcctcgccgccgccgcaggccgtggatacgtccttcgccggcagcaccgccacgtcggagaccgggagccccgcgaagaggccgagatgcgacgaagactcgtccgagggcggcagcggctccgcgctggagctcgctgacgagctggcgttcgacccgtttgtgctgctgcagatgccctactcgggtgggtacgacgacgactcactggacggccttttcgccgcagatgaggccgtgcagcaggacgtgggcaacggcatggacggcgtccgcctgtggagcttcgacgagttccccgccgtcgacggttctgttttctgacgtttgcttactacgtactactactattttctgcctggtggaatcatatgtgatagtgctgcatgtgtctgcctgatcgtcagattgtactccactctggatatttgtgctacgtactcgtctggtatttcc

SEQ ID NO: 24046 - DNA, 1655 bp, Zea mays
  Clone ID: LIB3607-008-E10_FLI
cgccgtctcctccacccctcacctccttctctcaaccagaacaaccaagtgaaaccgcgcaaacccttgctccgatccccctctcctcggtctcctcgacggaagtagtagagcaggggccgaggccatgtggcccggctgcggtgggcggttctactgggcgccggaatcggcgccgccggggcaagcgaggggtgtcgcggtcttgttcgcgtgggtgtggagcgacgaggcgcagctgcggccgttcgttgagctgtactcctcgctcgggtggcgctgcctcgtctgccaccccgacctcgtcgcgctatatctctctgagaaagcaacatctctggcaactggtgttattagtgagctggttaaggaactgagagtaaaacctgtgccaactgttcttgcttccttttctggtggctcaaaagggtgcatgtacaaggttattcagttactagctggaatatgtgaaggagatgcaaccatgaaggattatcggttagtgagaaactgtatctgcgggcaaatttatgactctagccctgtagattttgtcagtgatgtgggcacccagtttctccaaaagcctgctgttggaaatttatctcagtcaactatattacgttcatggatggcaaaggttctagcttctggcatggatactctcttcccaagcaggattgaagctcagcgtgcagagtactggcacacactatactcagcagcaggattgggtcctgttcttatattttgctcagaagatgataatcttgctccatgccatattatctgtggctttgcaaggcgattgattgaactaggcacagatgttaaacttatgaaatggagcgactcccaacatgtcggccattacaattcacatgaaattgaatacaggaaagctgtagatgatacgttgaagaaggctcttgttaccttctgccaccgaagccaactatatgactcaaatatggctggtgaccaggagtataagatagcgcactcagtgtgcagtctacacaatgctgcagccaattcaaatgagagcttaagaagggttgctaacagtcctagtgatcacttcttcttgccaagttcgaaggaccatgatgaatctcgggaacccagttctctaattgaggatcagaggcgccacatctcacatccaccctgcatggagcctaaaggagtccttggccaaatcctgtttgatgtttgtgttccaaataatgttgaaggatgggacattaagccgacagtgtccccgaatggacggccaacgtttgcttctgcccggcaacttggtccattcaatcccataaggtacttccggcgctcaagactgtagttttctgcaggagttgaggtttttgtatatatataaccgaggcaaggtggctagtagcaactctgagcaagattttacctatgtaagttccctgtaattgtttctgtttctgcttttgcaccgcttggcgagagaatgcacatatgctttgtatatcatatgagtgtgtgtactagaagggagatcctggacatatagtttctaggcgggttgcaaggtgcacgctaacattgtagccaaggggaatggattattatgttcctgtagtttcctctatatttcatgtttgtgaaatataattattggg

SEQ ID NO: 24047 - DNA, 721 bp, Zea mays
  Clone ID: LIB3607-008-F5_FLI
gctagatccgttcatcctggtggttttgtgaggtcgaaagcggcgagcgaattagaagatgctggacaagctgtgggacgacgtggtggccgggcctcgcccggagacgggcctcgagaagctccgcaaggccaccaccgcccgtccgctcgtcatcaacaaagacgcggacggcggcagctacaagcgggcgcagtcgatgccgtcgaccccgacgacgccggtgacgccgtcgtcgtcgtcgtcgtcgacgacgccgcgcggcgccggcaacgtgtggcgcagcgtcttccacccggggagcaacctggccaccaagggcatgggcgccaacctcttcgaccggccgcagcccaactcccccaccgtctacgactggctctacagcgacgagaccaggagcaaccaccgctagatcgggcgagatggatggacagtgaagaggccatgtttgctggtccttgtggttatctaaaacgcacgcatgctctattatagctagtcatcactatatatatacttgtgtttgtgtattgttgttcttgttctgctggtgtctccgccgtttaatttgacctatgttatggagtgagtgatatatgtgccgtcactcctagtatatagtagtgagtgactagttggtatgtgtagtactgtactatcttttctccatatgcatgttttgccagcgcgtaatgaatgtaatgtcagtactgctact

SEQ ID NO: 24048 - DNA, 1265 bp, Zea mays
  Clone ID: LIB3607-008-G2_FLI
ccacaccgcctccccagccggccaggtaacacacggcggctcttccctgctgggcttcggagctgccagtctgccacgccgccgccccagcagagaggcgagcaaccccgccggcgcctcggagctttgaattggctgggcgcgcgaccggcctctgccgccgggccgcgagcagcagcaacccccctcgccggccatgacctccgctcactccaagctctactccgatgacgtcagcctcgtcgtggtcgtcgtcgacacgaaccccttcttctgggccgccgcggcgctccccttcgccgacttcttcgcgcacctgatccacttcgtgaactccctcctgctgctgaaccacctcaaccgtgtggtcgtcatcgcggcaggagtcagctcgtgtgcctacatcctggattccagcgatgccagcccctccggtggtgtggccgtctcggacaccttcgacaaggcaagccgcaaggcggaggagttcattgcacaagatgcgcgcgccactgcaggcaacggttccgttgcttctgccaatgccgcgtcgctgctctctggggcgctgtccatctctttgtgctatatacagaggattttccggtctgggtctcggcatccacaacctcggattttgtgcctgcagggatctccagacggacctgaacaatatgtggcagtgatgaattcaatattttctgctcaacgttccatggtaccaattgactcttgtattgtgggaacccaggattctgctttcttgcagcaggcttcgtacataacaggaggagtttatttgaagccacaagaactaaatggcctatttcaataccttgccgctgtatttgcaactgatttacactctagagcttttctgcgccttccaaaaactcttggagtggacttccgtgcttcgtgtttctgccataagaagactattgacatgggatatgtctgttcaatttgtttgtcaatattctgcaagaatcagaagaagtgttcaacctgcgggtcagaattcagtcgtgccatgcctgatttgaactccgtgccggatcaaagcaagtagtgtccagtgcgaagttaacccatcaacagacaatgcttttctctgtgcgtctcacaggttcctttcggactagcaccttcacgtgtgcagtgtgtacgagacgtttctttggtcgatatgtgaatcaatttccatgtctgaatattatcggggttttttttaaaaaaaaactgaaactgcagaattattttcc

SEQ ID NO: 24049 - DNA, 859 bp, Zea mays
  Clone ID: LIB3607-008-H7_FLI
agtaccgcctcgccgacgtcgaccgctcggcgcgcaagaagaacagcctcaggttggatgactgggtcctgtgccgcatctacaacaagaagggcggcgggctggagaaggcggcggcgccggcggccggcggcgaccacaagcctgtgttcgccacggcggcggtgagctccccgccggagcagaagccgttcgtggcggcggcgggcgggctgcccccggcgttcccggagctggcggcgtactacgaccggccgtcggactcgatgccgcggctgcacgcggactactccagctgctcggagcaggtgctgtccccggagcagctggcgtgcgaccgggaggtgcagagccagcccaagatcagcgagtgggagcggaccttcgcctccgaccccgtgaaccccgcgggctccatgctcgaccccgtcgtcggccacgccggcggcgacccgctgctgcaggacatcctcatgtactggggcaagccgttctagacgacaccgcccatcatgtcctgaggggaggtgggggtggcgaagcatcctcggctgcggttggttggttgattgatctgtcttgggcagcgcaatgcaatgcaaccgcacggtgtgggcttgagtcaggcgagccgccattgttgacttgcaaggaggatataatatgaaactatagctggattacatggagaggcggcaatgagaccgtctggccccgccgcggaagtgagacggagacggagacggatggcgcagtgcatcgggtgtggtggatcgtgcgcggcatgtgtgtgtgtggctgtacatatacatactgtacatgattggttcagtgcagggtttctgttccttcattgatt

SEQ ID NO: 24050 - DNA, 691 bp, Zea mays
  Clone ID: LIB3607-009-C1_FLI
cagaggtgggttggcttctcctcccccaccggttcgtgttcaggttctggttcgtgggcgagagggaagagatggcggcgtcggacgttgagtaccgttgcttcgttggcggcctcgcctgggccaccgacgaccactccctcaacaacgccttcagcacctacggcgaggtcctcgagtcgaagatcatcctggatcgggagacgcagaggtcccgcggcttcggcttcgtcaccttctccacggaggacgcgatgcgcagcgccatcgagggcatgaacggcaaggagctcgacggccgcaacatcaccgttaacgaggcccagtcccgcggcggccgtggaggcggcggtggcggatacggtggcgggcgccgtgatggaggcggctacggcggtggcggtggaggctacggcggtggtcgtggaggctacggcggcggtgggggatacggtggtgcaaaccgcggcggcggctacggcaacaacgacgggaactggaggaactgagcggtggggtccgctgaggcctagttatcttgttcgcttctgctaccgtgttcaccctagtctagagggggtttatcttcgtctgtggtcgtctcgtgtccgtatgtttcgtttcgtgttcgttgttgttgttgcccatctgtgtttttgaccgcaagctcgctcctctgatgttgttagtg

SEQ ID NO: 24051 - DNA, 1595 bp, Zea mays
  Clone ID: LIB3607-009-D10_FLI
tgccaactcttgatccaacgatcgctccgtttccgcttccttccctcctccccgcgattgattgggccggtgtgctgacggtgccgtcgctgcttgcttcctccgcagccagtacttggccgagcttctcgcggagcatcagaagctggggcccttcatgcaggtgctgccgatatgcagccggctgctcaatcaagaaatcatgcgggtatcaagcatggttcatgaccatggatttagtgatcttgacaggcgccggtttagaagtcctagccctatgtcctcaccaattgtccggcctaatctacatggcaatggatttggtccttggaatgggatgcaccaagagagattgggctttcctcctcctggaacaagtatggactggcaaggagcaccaccaagccctggctcttatattgtcaagaagatcgttcgcttggaagttcccgtcgactcttaccctaatttcaactttgtggggcgcattctagggccaaggggtaattctctaaagcgagttgaagcatcaactggctgccgtgtttttattagagggaagggttccatcaaagacacagaaaaggaggagaagcttaaaggaaaacctggctatgaacatctgaatgagccactgcatatattgatcgaggctgaattaccagcgaatatcgttgacacaagactgagacaggcacaagaagtcatggaagaattgctaaagccagtggacgagtcacaagatttctacaagaggcaacagctgagggaactggctatgctgaactcaaccctgagagaagacagtcctcatcctggaagcgtatcccccttcagtaacggcagcatgaagcgcgcgaagccaagccagtagagggaagcttctggctctcctccaacccttgagtcgtccacggcgcggcaccgacaaggtggtgcccttggaactcgcgctgtccgtgtctgtctcgtgggtgcttgtgtaatagaaggtatgcatctgctgctagacaggatagtctgggtaccaggtgcgtcgtcgtctcaaggagacgagggatcggtggccgatgaactgcctttgatcttggtgggtggatccggccgtgctgttgttgtaactgcttgtaagggtgatggacattattcgttttattcgttgttggctgttaaccctgagtagattatggtgctgaggagatagtggtttcagtgggagactagttaaaccctgatagtagtgtgagctgttcgtttaggtgtttaattagcttgtactattctcgaatatttgtcgtccgctagttcattttttgaactaagccgcgacaaataaaaaagaactcagggatagtattattattcgcgttacattgtgtggagttgcaacactagagatgatgacacaccccgctctatgatagtttgatgacgacagctttggatgaaccatgtggatctatctattagaatgttagtgaatcgattgggcgttgacatgatgcgcacatgatccatctgtgtacatatgtatgtgtaaattaaatctgggtcttggatctttcgttcaataatcaatggctagcatattttat

SEQ ID NO: 24052 - DNA, 854 bp, Zea mays
  Clone ID: LIB3607-009-E5_FLI
gaaaactagggttttgctcttggaatctctctccccgctgccgccgccgccggacagtgcaccgacgatacgacctcctccttcctccgatctggcctttttaatccgcggatcccgtacaagatgcttcccctctcgctcctcaagaccgcccaggggcacccaatgctcgtggagctgaagaatggtgagacgtacaacgggcatctggtcaattgcgacacgtggatgaacatccaccttagggaggttatttgcacctcaaaggatggtgacaagttttggaggatgccagagtgttacattcgtgggaacaccattaagtatcttcgagttcctgatgaggtgattgacaaggttcaggaggaaacttccaaaagccggtcagataggaagccaccaggtgttggccgcggaagaggaaggggggacgttggtgctaaacctggaggcagaggcatcggacgtggccaagatgatggaggtagaggcagtggtggccgaggaaggggtggagttggtgccaaaggtggtaacaaaggtgggggccgtggccgtggctaaatctggtggacacatgggagaatgccgctttttaaggcctgtaattgtgttgcatagattgcttaggacatgatgaatgaaccgagttggctggtcggtttgggggcaaaaaccagaatggttcctgtcttctggacattgaggaagcggcggcagtcaggcttgtcgctgttctcaaaaacggtttggttgatatcttatccaatctgttcagactgttcgttgttcgtagttgttccccctaaattttccactctatatgctattatacaccctctctttcttcctgc

SEQ ID NO: 24053 - DNA, 2017 bp, Zea mays
  Clone ID: LIB3607-009-H2_FLI
gtttgcacaggcagccacgccacgcggacacctgccttacattgccggcgcgcttgcgtgactgggcgcggcgagatgacggcgccgggcgggtcgaacctggcggtgctggacgcgctggactcggcgcgcacccagatgtaccacatgaaggccatagtcatcgccggcatgggcttcttcaccgacgcctacgacctcttctgcatctccaccgtgtccaagctgctcggccgcatctactacccggacgacaacctgtacatagacaagcccaagcccggcactctgcccgtgtccgtcaacaacatggtgacaggcgtcgcgctcgtcggcacgctcatgggccagctcgtcttcggctacttcggcgacaagctcgggcggaagcgcgtgtacggcatcacgctcgtgctgatggccgcctgcgccatcggctcgggcctctcgttcggcagctcggcgcacgccgtcatcggcacgctctgcttcttccgcttctggctcggcttcggcatcggcggggactacccgctgtccgcgaccatcatgtccgagtactccaacaagaagacgcggggcgcgttcatcgccgcggtgttcgcgatgcagggcgtcggcatcatcttcgcggggctcgtgtccatgatcgtctcgggcatcctcctgcactaccacccggcgccggcgtggaaggagaaccacgaccggtcgtggcaggaccagatgccggcggcggactacatgtggcgcatcgtcctgatgatcggcgcgttcccggcgctggccacgttctactggcggatgaagatgcccgagacggcaaggtacaccgcgctcatcgagggcaacgccaagcaggcggccaacgacatgcagaaggtgatggacgtcgagatccaggccgagcaggacaagctcgcgaggtacaaggcggcgaacgactacccgctgctgtcgagggagttcgcccggcgccacggcctgcacctcatcggcacggccaccacgtggttccttctcgacatagccttctacagccagaacctgacccagaaagacatcttcccggcgatcaaactgacgagccccgtcgacgacataaacgccctcaaggaggtgttcgagatttccaaggccatgttcctcgtcgcactcctcggcaccttccccggctactgggtcaccgtcgcgctcatcgacaaaatgggcaggtacctgatccagctcatcggtttcttcatgatgtctgtcttcatgctactgatgggcgtcatgtacaacgacctcaagaacaaacacaccacgctcttcgccctcttctacgcgctcaccttcttcttcgccaacttcggccccaacagcaccaccttcgtgctgccggccgagctattcccgacgcgcgtgcgctccacctgccacgccatcagcgccgcgtcaggcaaggccggcgccatcgtcgcggccttcggggtgcagagcctcacgctcaagggagacgtgggccacatcaagaaggcgctcatcatcctctccgtcaccaacatcctcggcttcttcttcaccttcctcgtcccggagaccatgggccgctcgctcgaggagatctccggggaggacggcaacgtcgaaaacggtcccggtgctcccgccggcgtggccatgggcgtcgcggacgtgagcaaggatgacaagatgcctgtttccagtactgagtggcagagctccatgcatgcgtgatcgagtaagcagataccaaaactacagtactacacagggggtgtggaatccatgtgatcacgcctcgaacgatctatttaatctactagggtttcaatatatatatattttagcctaagcataataaagatatgtaaagacatatggattatgtctcgggccatacaccgtatgcatggtctgagactagtatctataacaataatgttgccggtttgaacaggcccggtcctgatatttggtgacatggaacgagagtaaaaatatatgtgttgct

SEQ ID NO: 24054 - DNA, 934 bp, Zea mays
  Clone ID: LIB3607-010-A1_FLI
ctatagtagctcccttgagaagcatttgagggaggagccatgtctgaggagaagcaccaccaccacctgtttcaccaccgcaagccagaggaggagggcgcctccggcgaggtcgactacgagaagaaggagaagcaccacaagcacatggagaagctcggcgagctcggcgccatcgccgccggcgcgtacgccctgcacgagaagcacaaggccaagaaggacccagagaacgagcacgggcaccgggtcaaggaggaggtggccgccgtcgccgccgtgggctccgccggcttcgctttccacgagcaccacgagaagaaggacgccaagaagcacgcccacaactgatccgtcgcggttgctgttccatctgttcttccagcctcgtcttcgtctactgtgtgccggccaggccttgatttgggctaccgatatttgcatggacgtaggaactgtgttggtcggtcctcggcgttcttgtatcaagatcaaatcaggccttgaataagtgtgtgtgcatatatcttttttttaatttttatctctttttttttgtatcgagagatgtcctgaataatgtgaatttacgtgtgtttaaaaaaaaaaaaaaaaggctcatctatgctggtaagcagcttgctgatgacaagaccgcaaaggactacaacatcgagggtggatctgtcctccatcttgtccttgctctgaggggtggttactagtctaaacctgatgaactagcagtcagataaactgttgtgttggctgcgaaatgtgcaggcctgatgttgaacttgcaaggagataataacaaattatcagctttgcgcctgtgcccagtggaaggggctgtcttccaagttattgtctgatatggaattgttccagattatcatgtctcggcgtttacccattattattatttgatttg

SEQ ID NO: 24055 - DNA, 907 bp, Zea mays
  Clone ID: LIB3607-010-A3_FLI
attttagccgccgccgctgctcatctcacatccctcgagaagacgcctgctcctcgccgatcgatacgatggccgtcttctccgacctccacaccgccgacggcctcaagtccctcgaggctcacctcgccggcaaaacctatgtgtctggtgactccattactaaggatgacattaaggtcttcgccgcggtgccgtcgaagcctggcgctgagtttcctaatgccgcccgctggtacgagaccgtctctgcggctgtagcctcaagattccctggtaaggctgttggtgtaaatctgcctgcgggatcagctcctgcggcagctgctcctgcggatgaggctgaggatgatgatgaccttgatctttttggtgatgaaactgaggaggacaagaaggcagctgatgagcgtgctgccgctgccaaggcctcttctaaaaagaaagaaagtggtaaatcctccgtccttatggatgtaaaaccatgggacgatgagactgatatgaagaagctggaggaggctgtccgcagtgtccagatggagggtctgacttggggagcatcaaagcttgtgcctgttggatacggcatcaagaagatgactatcatgttgacaattgtcgacgatcttgtgtccatcgacactctaattgaggaccaccttacgcaagagcccatcaatgagtacgtccagagttgcgacattgtggctttcaacaagatctagagttcagtttctgagtttgggcaacggcagcggctcagctcgtcaagtttgtgctgggatgccagtttatcccttctagtctattacagaaacgttgttcggagctgagtctattataaacatcttggtctgagtttattgttgagtggtgccagtttttttcaatatacatttatctt

SEQ ID NO: 24056 - DNA, 1295 bp, Zea mays
  Clone ID: LIB3607-010-B12_FLI
ttcatagttgaagacaggcacagggcgagaccgccgtcatggacactgagaccgaggggaaggcggcggcggtcgaggagatgagggagtggtgcgtcgctctccccaaggtggagctccacgcccacctcaacggctccgtccgcaactccaccctcctagaacttgcaaaacatctaggcgacaaaggagtcattgtttttgaagatgttaaggatgtgatcatgaagagtgatagatctcttccagagtgtttcaagctttttgatctgtttcatatacttacaactgatcatgatacagtaacaaggattgctaaggaggttgtagaagattttgctgcagagaatgttgtatatttggaaataagaacaacacctaagaacaatgaggcaaaggggatgaccaagaggtcttacatggatgctgttattaaaggtctgaaagcagttgaagatgttgatgtcgaattatttggttctaatttcagaacaaatgaaacactaagttctaagcttttggatggtgtcacaaagaaaaagaagatatatgttaggctccttcttagtattgatcgccgcgagacaacttcggctgcattggataccgttaatctagccgtggaaatgatggaccaaggtgtcataggcattgacctttctggcaatccagtcgtgggggaatgggaaacatacctgcctgccctacaacatgctaaaaatatgggaatccccgttacaatccactgtggagaggtggcgaaccggaaggaaatccaagcagtgctggacttttgccctcagaggctgggtcatgtatgctgtctgaatgatgtagaatggaagaagctcaagtctctgatgattccggtagagatatgtttaacctcgaatgttatgacaggaggtgctccttccctagagcttcaccactttgctgacctctacaatgcgaagcaccctttgtccctgtgcacggatgattccggcctgttttcgacaagcctctcaaatgagtattacctcgttgcaacaactttcggcctcagcaagttcgagctgttccagctggcccaggatgcagtgcagtttgtttttgctgatgatgtggtgaagaagtctctgaaggaggtgttcaagcatgctgaaaagaggctgctcatgtgggatgaacttgctgcaccaagctagtgtacgtacccgttatgagatcagtatgtatcaacccaattgtatgatttatatatggttgtgtaacttttcgtttatgcacctattatatgtgtaccgtttttc

SEQ ID NO: 24057 - DNA, 1068 bp, Zea mays
  Clone ID: LIB3607-011-A11_FLI
atcaagacctccgacgatccgaacgaacgaatcgagatcgctgttaagcagttgaatcgtaaaggacttcagggaagagacgacgacatggatgtagatgattatgtccaagacaccacacctagggatgacgcatggaatatatgaggccttggagttgagggatggaggatctgattatcttggcaagggtgtttatcttagacctcaaagctcaatctagcatgctcttcgctctgttttactttccatgattcattgagtatctatgcagtttctgcacaattactatgaattacgaactgaacttaaatcaaatacttcagtattggtctctagagaggaagctctgccaaccattactaataactgagaagggagacggtgttggaggaggcacattggggcatggagctgcgtgagcactaccgccatatagttgataacgatgaccgacactgtagattccattctaaatgtgtacaccaaggtgctcaaaccattagttgggatgaggaacacggagcagcaacaacaatatcataaggagagtgcagacgttggacaaatggtatgccatatcttcagttctcttatgatgcttcagcgctgcatcttcagttttctcggctaaaaagagatcatagtcaatagtatacctatgtgtgaaagcaccatgacttatcagttttgtgaacaaccctaacttatgtggtcctggcaccacaaaaccttgtcctaatgctcctcccttttctccacctcctccatacaaccctacaaccccgatgcaatcaccaggaagtagctcttccactactggagcaattgctggtggagtggctgctggcgcagccttgatatttgttgttcctgctaccagttttgcctattggcggcacaggaaaccacaagagcattttttcaatgtatcttgcttcaaagttagtctttgattattatctttctcgcaacataagggcaaacaacgtttatatgtagcaaacaaatacagtttgcaaacgttttaggaacatgtttttacaataaagatatacttatagtttc

SEQ ID NO: 24058 - DNA, 748 bp, Zea mays
  Clone ID: LIB3607-011-C8_FLI
aacaggcccatgaactcgctaaagcgcaggaggcccggctctgttctgatatatcgctccgccgctagggttttcagggatcccgcctcacaccgccgcaaggactcgcgacggacggagcaacggaggaagcaactacgcggcagccatggtgaacgttccgaaaaccaagaagacctactgtaagaacaaggaatgcaggaagcacaccctgcacaaggttacccagtacaagaaaggtaaggatagcctttcagctcaagggaagcgacgttatgaccgcaaacagtctggatatggtggtcagacaaagcctgttttccacaagaaggcaaaaacaacaaagaagattgtgctgaagctgcagtgccagagctgcaagcactactctcaacacccgatcaagaggtgcaagcactttgagatcggtggtgacaagaaaggcaagggaacctctctgttctaagcgtatcataaacttgctcagggtctcaagtatctgtcagaatttaccattacaaacaccctgtgcttagcttctgcatatgttcttttgtcacatctttttggtacgttgtagtttgtatgagaccaagctattgtttcgtgttattattatatttcatgaaattgtcaacatgaccgtttgcttgactgtaaacatagttctgagctttgggcaaacagtagtttaatttatcgtatccatcttgagactgttgtttgttcgaaatataatggtggaatg

SEQ ID NO: 24059 - DNA, 1688 bp, Zea mays
  Clone ID: LIB3607-011-D11_FLI
ccgaatactagctcatcttagagatatggataatgaggtgaagagctttctcctcctcaatatgtaccttcaagtagcttggtgccttcatgcaattgatggtgaaaacccatctgaaacatgtattgatgaacttttatcaaagcaaagctcactttttgatcaactctattattatttagtggtactgcccacttatcagaaagaggggaggagcaccactgtactttcatgcagagtctgcatcattactgcagaaatgtggtgcttgtttaagaagtcaaaatattcttcgacaagactagagagtttgggttatttcccacagccagatatggttcagaagttctggaaactatgtgaacaacagctcaacatatcagatgaaacagaagatgaagatgcaaatgaagaacatattgaagacacaaacagggatgctgtcatgattgcagctgcaaagctagtgcttgctgatacagtatcaaaggattatcttggtccagagattgtttctcactatgtatctcatggggcaagtacgacagagataatcaaacatctaattacttctctaaagaaaaatgcaaactttgacatgggaactctattttttgaggccttgaaaagggcatatgaacgttacatggcccatgttcacgacggagaaaaccaaatcttgactggcaagtcttattcagaatgtcaagatcttgctagtcgtcttgcaggatcctatgttggggctgctcgcattaaaaataagtcagatatcctgaagattatccgagatggtgtttcttttgcttttgttgagcttccaaaccaattgttgttcctcgaggctgctcttctgccatttgtttctaaacttcaagcatcagatattccagatatcttggcagatgtagagaagaggattcaacatatcaatacgactggagatcaaagtgtttggcgcccattttttatgttcgtagagcacctacgtgacaaacatgcaaagaatgaggttttgcatgaggaagaggaaaaacctgtgaggaaacggggccgtccaagaaaagttagagaggtaccagatgtaccagatctacgcggtgctcggcatgtacgtgggaagaaactttttagagatgatgggcacaactctagtgtgaggaatctattggtgcatctgaccatcaggatcacggtgaagatgacgacagcaacggcgatgcagatcagcccttgatcaacacgatcaggtcttccgccgccaagctacggtccttgaagatctctcaacagggaccaagcagccaaaaaggggtccctggcccatccggaagcaatagctgagaggatgcatgcagtgcccctcatcgttggtgatgatttccagacattgactgaccgattcaagcagcacagggggctggcactaacatcagtttgacgaggacaccattccacgcggagctgcagtcatccgctgtttagctgcttgttctaattgtgtaagcgctgtatatgatttgcacttgggttctgtgactccctttgtatgcgggccctccccctctccctccctatgttctcagtgtatattaccaaatcatcttcatgtgtaataatatttacatgagtaggttgatggattcatgggactggctatcgtgtgttatcttgacatggctgagggc

SEQ ID NO: 24060 - DNA, 1262 bp, Zea mays
  Clone ID: LIB3607-011-E10_FLI
aagtagccgctgcgcggtgctgccacctgacctgactgccgtcccggtccccggtccatccgaacgccgttacggggccgcccaccgcgacggaacggaaaggggcagcttgtagtggctgtttcttttgcatatgcgctttctattgttgttgtcatttcaaaggaggccatagtctcctggattttgtatgccttgttatctggaattggtgaccatagatgtcatttcgtagcatagtccgtgatgttagggatggcttcggcagcttgtcaaggagaagctttgaggtgaccctcgcaagcatttatggccttactgggcatcacaaagggaagacccagagctcatcacatgtgctcgacgactcaccttccataattcgtgaaagtcgatgggcgaatctacctcctgaactcatccgtgatatcatacggagactggaggctgatgagagcacctggccagcgcggaagcacgtcgtttgcttcgcagctgtttgtaggacatggagagaaatgtgtaaagagattgtgttgagcccggagttttgtggcaagctcaccttccctgtgtctctaaaacagcctggtcctcgagatggaaatacaatggtccagtgttttataaagaggaataagtcaaaatccacttaccatctctacctgtgccttagcaatgttgttacttcagaaagtgggaaattcctcttatcagctaaacgacaccgcaaaaccacatgcaccgagtacactatatcaatggattctggcaacatctcaagatcaaaaagaacctacattggaaaaataaggtctaacttccttggcacaagatttttaatttatgatacacaaccgccctataatggggctgtagttcctcctgccggaaggacaagcaggaggttcaactccacaaaagtctctccaaagctgccttcagtcagttacaacatcgcacaggtatcgtatgagttaaatgtccttggcacgagaggtcctaggcggatgcgttgcatcatgcactccatacctgcatcatcagtggagccaggtggcacagtgcctggacagccagagcagattgtacctcgagccctggaggattcattccgcagcacggcttccttctcgcagtcgttccgtagcactgcctcattctccaagtccatcatggactcatccatggatttcaatagcgctcgcttctctgacatcgctggcagcagcgctcgcttcacgggcgttcctggtagcagc

SEQ ID NO: 24061 - DNA, 1689 bp, Zea mays
  Clone ID: LIB3607-011-E12_FLI
cacccaggtggtgaagatctgttgctgcttgccaatcagggtctcgaagacgttctgttctttcatgtcggtggtgccaacgtcgttgcagtctatgccgcagtgggggttgctctccttgacttgttgagcttttaccgcagttaaggtatcaattggtgacaaaccactgttttcggccaacgctagtggaacagcatctaatgcatcagcgaatgacctgatagcatactgctcaactcccgggtgcctatctgcagcagtttcaacagcaattgagcaagatatctcggctgagccgccaccgtacacaattgagttattccggatcagattccttgccacgcaaagacctgcatgacaactctatcctcaaagattgttaaccgttgcaagcgggcgttggcagagattgctgtcaaagcagtacttgcggttgcagatttggagaggaaggatgttaacttggatctaattaaagtagaaggcaaggttggtgggaagctggaggacactgaacttgtatatggaattattgttgacaaagatatgagccatccacaaatgccaaagagaattgaggatgctaagattgccatcttgacatgcccatttgagcctccgaagccaaagacaaagcataaggttgacattgacactgttgagaaattccagacactgcgtgagcaagagcagaaatactttgatgaaatggttcagaagtgcaaggatgctggtgcaaccctggttatttgccagtggggttttgatgatgaagccaatcatttattgatgcacagaaatctgccagcagttagatgggttggtggtgttgaattggaattgattgccattgctacaggagggcggattgttccgagattccaagagttgagtcctgaaaagcttggaaaggctggattagtcagagagaaatcattcggaacaacaaaggaccggatgctttacattgagaagtgtgccaattctagagctgtaaccattttcatccgtggtggaaacaaaatgatgattgaggagaccaagcgcagtcttcatgatgctctttgcgtggcaaggaatctgatccggaataactcaattgtgtacggtggcggctcagccgagatatcttgctcaattgctgttgaaactgctgcagataggcacccgggagttgagcagtatgctatcaggtcattcgctgatgcattagatgctgttccactagcgttggccgaaaacagtggtttgtcaccaattgataccttaactgcggtaaaagctcaacaagtcaaggagagcaacccccactgcggcatagactgcaacgacgttggcaccaccgacatgaaagaacagaacgtcttcgagaccctgattggcaagcagcaacagatcttgcttgccacccaggtggtgaagatgatcctgaagatcgacgacgtcatctcaccgtccgagtactgatggaaagaaggaacgggatggctatgctggatatgcgtaggcggcattgctgatgtgttgattggtgtacctccttatccaggcttgctgcctaccactcactccctgtgtgacgttttgccgaaattggtttgtattgtgcacgataatatctggaaatagactctagacagtccttagttatctttttattataaaaaaagtcagtgccttctcgtc

SEQ ID NO: 24062 - DNA, 715 bp, Zea mays
  Clone ID: LIB3607-012-A3_FLI
tccgcgtggccgccatcagcggctccattcgcaaggcctcctggcacagcgggctcatccgcgccgccgcggaggtgtgcgaggactgcatcccggggctgcgcgtcgaccacctcgacgtcgccgacctgccgatgctcaacaccgacctcgagacgaacggtggtacgggcttcccgcccgccgtcgaggcgttccgcgccaaggtccgccatgccgactgcttcctcttcgcctcgcccgaatacaactactccatcaccagcccactgaagaacgcgcttgactgggcttctagaggagtgaactgctgggcagacaagccggccgccatcgtcagcgcgggaggcaacttcggcggcggcaggtccagctaccatctgcgccaggtcggggtgttcttggacatccatttcatcaacaagccggaactgttcgtattcgccttcttcgagccggccaagtttttcgacagcgacgggaacctcatcgacgccgacaccagggagcgcctcaagcaggtgctcctgtcccttgaggccttcacgcgcaggctccagaacaacaaggactgaagcagcagctcccgggatcgccgtgctaataataataatctctacttccttccttcagcaattagtaattcgtggtcgtcttattacaaaccaaagtatatgtgctcgaacctataataaaatacatggagaacttcgct

SEQ ID NO: 24063 - DNA, 715 bp, Zea mays
  Clone ID: LIB3607-012-C3_FLI
tccgcgtggccgccatcagcggctccattcgcaaggcctcctggcacagcgggctcatccgcgccgccgcggaggtgtgcgaggactgcatcccggggctgcgcgtcgaccacctcgacgtcgccgacctgccgatgctcaacaccgacctcgagacgaacggtggtacgggcttcccgcccgccgtcgaggcgttccgcgccaaggtccgccatgccgactgcttcctcttcgcctcgcccgaatacaactactccatcaccagcccactgaagaacgcgcttgactgggcttctagaggagtgaactgctgggcagacaagccggtcgccatcgtcagcgcgggaggcaacttcggcggcggcaggtccagctaccatctgcgccaggtcggggtgttcttggacatccatttcatcaacaagccggaactgttcgtattcgccttcttcgagccggccaagtttttcgacagcgacgggaacctcatcgacgccgacaccagggagcgcctcaagcaggtgctcctgtcccttgaggccttcacgcgcaggctccagaacaacaaggactgaagcagcagctcccgggatcgccgtgctaataataataatctctacttccttccttcagcaattagtaattcgtggtcgtcttattacaaaccaaagtatatgtgctcgaacctataataaaatacatggagaacttcgct

SEQ ID NO: 24064 - DNA, 726 bp, Zea mays
  Clone ID: LIB3607-012-D8_FLI
ctcctccccctcttaccaagtcctcctcgggttagggttccttagggttttgtggaggggcgatggcggcggctgatgtggagtaccgttgcttcgtcggcgggcttgcctgggccaccagcaacgagtcgctggagaatgccttcgcctcctacggcgagatcctcgactccaaggtcatcaccgaccgggagacggggaggtctcgcggcttcggcttcgttaccttctcctccgagaactccatgctcgacgctatcgagaacatgaacggcaaggagctcgacggccgtaacatcaccgttaaccaggcccagtcccgtggcggtggcggtggcggcggtggctacggcggcggtcgcggcggcggcggctatggtggcgggcgccgtgacggcggttatggcggcggtggcggctacggcggtcggcgcgagggtggtggcggcggctacggaggcggtggcggctacggcggtcggcgcgagggtggtggtggcggctacggcggcggcggcggcggctggagggactgatgtgtgggcccatcctggcttcggccgagttatcttatctatctatagtatcgtgttaccgttcgcttctgtcaccgtgttagtgtccgttctacctttggattaggtgttggtacccctgttgttccctttgtttgctcccgctatgaaacgagacgagagaagaatgagcaaggtttttgttcgcagc

SEQ ID NO: 24065 - DNA, 1252 bp, Zea mays
  Clone ID: LIB3607-013-B9_FLI
gctttccccaccccgcatcgtcggacaccctccaaagtccaaaccctctccccgccgcatcgccgccgccggaagcgcctccctcgatccagatccaggagatatgcctcgcaatgatgatcgctatgggaatacacgcttgtatgttggaagattgtctccccgcacccgttctcgtgacctagaataccttttcagcaaatatgggagaattcgagaagtggagttgaagcgtgactatgcattcattgaattcagtgacccccgtgatgctgatgatgcacagtacaacctagatggcagggacgtcgatggaagccgcattattgttgaatttgctaaaggggttcctcgtggttctggtggttcacgtgattacaacggaagaggacctccaccaggaacaggccgttgttttaactgtggagttgatggtcactgggcaagagactgtcaggctggtgactggaagaacaaatgctaccgttgtggcgaaaggggccatatagaaagaaattgccagaacagtccaaggaacctcaggcgtgagagaagctattcacggtctccatccccacgccgaggacggggccgcagccggagctacagcagaagccggagctatagccgatccagatccccgtctggatctcctaggggtggacgccgagaccgtgatgagaggagatcaaggagtcttagctacagcaggagcgcaagccctaggcgttctgtgtcacctgtaaaggaaaaggagcgcagccgcacacctgatggcagtaggagccccagcccaagggacaaggtgagcccaccaccaaaggataatggtgcccacaatggctcggaccgtgaagacagccctgggggcagggagatgagcaagaggagtcggagctcgtctgatggctaccgtagccctgtgggcaatgggcgcagcccgagccgtagcccaagccccaaggtcaacaatggtgatgacccaagccccaagggcaacaatggtgacgacccaagccccaagggcaacaatggtgatgacgagcaccgcggttcaccaagaggaagtcagtccccctgaactgaaaaactccccgtgcaatttggggagcagtgtgcctgatttgagaaaacaaactgtattttgccatttctcagacttgtgatctttttgagcaagaaaactcggtgtaagaatttgttgccctcgggtgtaagacagatttgtggtatttgagcttttcatcctgcc

SEQ ID NO: 24066 - DNA, 1439 bp, Zea mays
  Clone ID: LIB3607-013-C3_FLI
agactgagagaggcaggtaatacatacctgcgactgcgacgagtgagtaaagcttcatcttcttcctccttcctccggcctcttcctgagtgctgcacgcagtgcgtaggaaggaactcgcgtacgtacgtgtgctagctagctagctcgaccacgcgcagcacgcaggcgcgtagtagctcgatcgatcgaccgccggccggaaatgtcgaccaactcgaggtccaactccagggccaacttcaacaacgagatccatgacatcggcacggcgcagaactccagcatgccccccacgtactacgaccggtcgctggcggacatcttccctccgcacctcctcaagaaggtggtctcggaggtggtgtccacgttcctgctggtgttcgtcacgtgcggggcggcggggatctacggcagcgacaaggaccgcatctcgcagctggggcagtcggtcgccggcgggctcatcgtcaccgtcatgatctacgccgtcggccacatctcgggcgcgcacatgaaccccgccgtcaccctcgcgttcgccgtgttccgccatttcccctggatccaggtcccgttctactgggcggcgcagttcaccggcagcatctgcgcgtcgttcgtgctcaaggccgtgctgcaccccatcgccgtgctgggcaccaccacgccgacggggccgcactggcactcgctcgtcatcgagatcatcgtcaccttcaacatgatgttcgtcaccctcgccgtcgccacggacacgagagcggtgggtgagttggcggggttggcagttggttccgcggtttgcattacgtccatcttcgcaggggcagtgtcgggcggatcgatgaacccggcgaggacgctggggccggcgctggcgagcaacctctacaccggcctctggatctacttcctgggccccgtcctcggcacgctctccggggcctggacctacacctacatccgcttcgaggaggcgcccagccacaaggacatgtcgcagaagctctcctccttcaagctccgccgcctgcagagccagtccgtcgcggtcgacgacgacgagctcgaccagatccaagtgtgattcatgctcgatcgatcagagagtgcgcacttgtttactcctcagtcctctcactctatgtatcggcaacactccctaggatatactagtggtccgtagtcatggtctatgtctatgtgtcgctcttctctcgatccatgcacgtccgtggcgcggtgtggatgggctcgctctgtcaaatgtgccaatgagctggagcttaattttgggacgaacactgtgccgtgtgctgtgtgcagccagtcgtactcgtacctctcctgctatcacttgttccaaaagctcttggtgcttacataaagatcatctgtgccttgcacgataaaaatctctattcttgcactcc

SEQ ID NO: 24067 - DNA, 844 bp, Zea mays
  Clone ID: LIB3607-013-F11_FLI
gttcctcccgggtctataataaaatccccatccatcgccagcgacactcgaccaactccacaaacaatcagccagccctcgcatcctgacctgctgacggccgacgcccacaaagcattgaagagaagaagagaagggacgccgccgcgcgagttcacgtggacgatggagagcgccgctcccgttatcgccaggccgtcgctgcccaagaagccctcgccgtcgttccgcctccggaacggcagcctcaacgttctgcgcctgcgccgcgtgttcgacctcttcgaccgcaatggcgacggcgagatcaccctcgacgagatggccgcggcgctcgacgcgctcggcctcggcgccgaccgccccggcctgcaggccgcggtgggcgcgtacatcccggccggcgccgcggggctccgcttcgacgacttccagtccctccaccgcgcgctcggggacgcgctgttcggccccatcccggagacggtgcctgaggaggacgtcgagggggacatggaggaggcgttccgcgtgttcgacgaggacggtgacggcttcatctcggccgccgagctgcaggccgtgctcaggaagctcggcctgtccgaggctcggaacctggccactgtgcaggagatgatctgcagcgtcgacagcaactgcgacggccgcgttgacttccgcgaattcaagaacatgatgatgcagggggtcaccgtatggggcgcttagctgcagcgcacctgccttgtcgttccctcagctcagctgcctttgtgtgtacttaagggtgttaatgaactctgaattttacgctataaaatttaatggtcggaacttcttt

SEQ ID NO: 24068 - DNA, 665 bp, Zea mays
  Clone ID: LIB3607-013-G3_FLI
gttcgttcctcatgcgacccagctagctaaaactggcatgcatggacatgctacgctgctgcgtcaatccatctcaccagcagtgctagctagctagatctggcctgattcgccgatcgagcggtcgccggtcagagactcagagttcatgagacggagtgcttcagctcaaagactgctagtggtagctaggtagctgcgtgcactgcatgcgcggcgccttggacttgaagaaaccgagcgctccgatagtccgatccggaaacgatgagtgccgggccggaggacacccagcagctgatcaacagtgccgccgctagccccaaccgcagcgcaccgtccgccgcgcccagcgatatggagaggggcagcggaaccgccgcgtcctcgtcgcgcgctccgacgacgtcccactcccaccagagggccacccacagggtggtggaggaggaggaggaggagcctagtagcagccgtggcgccggcagcctctgctccgggtacctgtcgcttccggctctgctgctcgtcggcgtcaccgcgtcgctggtgatcctcccgctcgtcctgcccccgctgccgccgccgccgtcgttgctgatgctggtccccgtggcaatgctgctcctgctgctcgtgctggcgttcatgcccacgtcgtccac

SEQ ID NO: 24069 - DNA, 2243 bp, Zea mays
  Clone ID: LIB3607-013-G5_FLI
ggccacgtagagtcgacccgccgccccgttgtgagcccccgttgtagccccggtcccacctcgcacgccctcaggcctcgacatccactgccttccgttcgtctcaatcccccgtcgcattccgcaacacctgctcctcgcccccttctctcagaggcgacgcctcgggcgctcctaccctgccccgtctccggtccccccgcgccgtcggcgaggcagccggccgtcacagaagcccgatccggaccccgcgagaaatccttgttatacctgatggctatgattgatgagcctctttatccaattgctgtactgattgacgagctcaagaatgaagacatccagttgcgtctaaactccattagaagactttcaacaattgcacgggctcttggagaagaaagaaccaggaaggagctgattccttttcttagtgaaaacaacgatgatgaagacgaggtgcttcttgcaatggctgaggaattgggtgtgttcattccgtatgttggtggtgtagaacatgctcatgttttgctcccacctttggagacattgtgtacagtggaggaaacttgtgtccgtgataaagcagttgaatctctgtgccgtattggtgcacaaatgaaggaaactgacattgtcgactggttcattccagtagtaaagaggctagcagctggagagtggtttacagctcgcgtatcgtcctgtggtcttttccacatagcctatccaagtgcgtcggaccaattgaaaacagaattgaggactatctatggtcagctatgtcaggatgacatgcctatggtcagaagagcagcagcatcaaatcttggaaagtttgcagctacagttgaacagaatcatttgaagacagaaataatgtcaatatttgatgatttaacccaagatgatcaagattcagtgcgtctgttggctgttgaaggctgtgctgcccttggtaaattgttggaaccacaagattgcgtagcacacattcttccagtcattgtcaatttctcccaggataaatcatggcgtgttcgttatatggtcgccaatcaattatatgagctctgtgaggctgttggccctgagcctacaagagctgatttggtgcctgcctatgttcgcctccttcgtgataatgaggctgaagtgcggatagcagctgctggaaaagtaactaagttttgccgcatattaaatcctcagctctcagtccaacatattcttccatgcgttaaggaattgtcatcagattcatcccagcatgttcgttcagctttagcctcagtgattatgggaatggctcctgtactgggaaaggatgctaccattgaacagcttgttccaattttcctctctttgttgaaagacgaatttcctgatgttcgacttaacataatcagcaaacttgatcaagttaatcaggttattggaattgacttgctatctcaatcactgctaccagcaattgtagaacttgcagaggataggcactggagagtccggcttgcaataattgagtacatcccattgttggcgagtcaattaggtgttgggtttttcgatgacaagctgggggcgctctgcatgcaatggttggaagacaaggtcttttcaatcagagatgctgccgctaacaacttgaagcgccttgcagaagagtttggtccagagtgggcaatgcagcatataatccctcaggtgctggagaagatcaacaacccacactatttataccgcatgacgattctgcaggcaatctccttgctagctcctgtcatgggtgcagagatcacctgtcaaaagctgcttccagtcgtcattaattcttcgaaggacagggttcccaacatcaagttcaatgttgcgaaagtactacagtcacttgtaccgatcctcgaccaatctaccgtgaaaccgtgcctcgttgagctcagcgaggaccctgacgtcgacgtaaggtactacgcaaaccaggcactgcaggcgtgcgaccagatgatggtgtcaagctaactagcctttgtgtcaagtatttagagagttcgatcgatgctccatagtccaattttggattacctgtaatttggcctttagatttgaagagttgtttgtgtccagcctcggtaacagataaaaacggacggtcctgatccccttgttcgtttgtgttaattaatgttgtaattgagcaggacacaacgcgttgctgtgtgtgtttgcgtttacatggc

SEQ ID NO: 24070 - DNA, 1780 bp, Zea mays
  Clone ID: LIB3607-014-C8_FLI
gttgagatttgttgtagatgaacttgcaaaagagtatgacaccaccagagatcagctaaacaacgcaatcccatcaattcgtatctcaaggagaaaatgtttagtaggtgacgagggtgttaaaagttcatcatgctgtatcgctgtcgtagcacatgctgaacgcaactccatctctcagttggacactatcaagacaagggtgattccaagcatactggatacactgctgaaaggttttttggaatttaaggatgttgagatccagtgtccacatgatggtgaacttcttgttaaagtttgtatgtctgagcattgtaaaggggggaggttctggcctactctacaaaatgcttgcattccagtaatggagttgattgactgggagctgagtcaaccaagcaatgtatctgatattttctgttcatatggcatagactcagcatggaaatactttgttgaatccttgaaatcagcgactactgatactgggaggaacattcgccgggagctcttgctggttattgcagatagcttgtctgtaactgggcagttccatgcattaagcagtcaaggtttaaagcagcagcgcactcggttatcgatctcgtctccattttctgaagcatgtttttctaggcctgcacaaagttttataaatgctgcaaagcaatgttcagtggacaatctgtgtggaagtctcgatgcagttgcttggggcaaagagcctttcaatgggacgtcagggccttttgaaattatgcactcaggaaagccacatgaaccagaacaaaatgagagcatctatgatttcctatgcagctctaaagttcggaattttgaaaagaatcatttggatacccgtagacaaagtactgaaaatgcttcgatatgtagattagcatgcaagtcttctaaaggcagtacgaccgtcaatggtgttgctataactatcgaccaggactttcttcatgctaaagtcagtatatgggataacattatcgatatgcgtacttccttacaaaacatgctaagagagtacccgttaaatggatatgtggcggagccagataaatcacagttaatcgaggccctgaaatttcattccagaggtgctgaaaagatcggtgtgggagtaagagaaattaagatcgggttgaatcctagtcacccaggtacaaggtgcttcattttgctgagaaacgatgataccactgaagacttttcttaccacaagtgtgttcagggtgctgcagactctatctcaccccagctcggaagttatttgaagaaactatattacagagcataagcttatgcaacactcccactagttcatttttttaactaaaacgtggcaaataaaaaagaacggatggagtaggattttggaaagtgttcctggcaacatcttgttctgatcagaccatattaccaatttctgataaggaaactacgtgtcgcattttaaggatgaggtgaaaactgaaagggtctggcgctcagaaggtcttctggactggaggtgtatgtcaactcaactcaatgggactatgtaaggtgggcctgagtcatgactgcggtttcatgcctgcaattctctagtcagtagtataaatactagtctgcgtgttttctaatatgaagatccatctattttattacttaaccatagcgtagatgattggtaacagatagatacattttatttactgattaaaatgcagcagcgactccccgaacttaaaacaggtaaacgggtgtggaaacttagtggctc

SEQ ID NO: 24071 - DNA, 912 bp, Zea mays
  Clone ID: LIB3607-014-F12_FLI
cgaagatggcggcgccgccggcgagggcccgggccgactacgactacctcatcaagctgctcctcatcggcgatagcggtgttgggaaaagttgtctccttttgcggttctcagatggctctttcaccactagctttatcaccaccattggatatgggatactgctggtcaagagcggtttcgaactattacaaccggtatgcaatacttgtttctgtcagttgcagtaatgttggcccctcaattttttatgggttaattcttctgaatctgctaataattttgactatgcagcctactacaggggtgcaatgggaattttgcttgtctatgatgttactgatgagtcatctttcaataatataagaaactggattaggaacatagagcaacatgcttccgacaatgtgaataaaattttggtaggcaacaaagctgacatggatgaaagcaaacgggctgtgccaacttcaagagggcaggctcttgctgatgagtatggcatcaaattttttgaaacgagtgcgaagacgaacctgaatgtggagcaggttttcttctccatagcaagagatatcaagcaaaggcttgctgaatctgattcaaagccagaggatcgcacgatcagtatcaacagacctgagggtggtgaggcttcagcgtcacaaaaatcagcttgctgcggatcgtgacggggttacattgtcacaaggaagataaatagtgcgataccatactttgtaatttacccttctacgtaccttttatctggctgtcatcgttctcgtctagcttttaaatgcaattgcttggattcaggtttctgtgttgtaatgtgaacaattttagttgtacccctggtagaaatgcatgtgctcataagtcattgcaccttgttttgatggaaaaaac

SEQ ID NO: 24072 - DNA, 1441 bp, Zea mays
  Clone ID: LIB3607-015-B8_FLI
ctaagctgagagcaaagatgtcttggcggcgaaaccagctacgtgcgtttctcgttctcgccgtcatcctcctcatcaccgcagctacctaccgagccaatgcgcagccggcgcctccagcagacccaacgccagccgctgacacctgcgccgaccccagcgtggaaggggcgtgccgcaacgtcccgaaggcgctgcgcctgaagctgatcgccatcccgacgatcctcgtctccagcgtgatcggcgtgtgcctgccgctcttgtcccgctctgtgcccgcgctccgccccgaccgcaacctcttcgtcatcgtcaaggccttcgcctcaggcgtcatcctcgcgacgggctacatgcacgtgctcccggactccttcagcaacctcacctcgccgtgcctgccgcggaagcccttctacaaccggaggaagggtggcaacacctccggccgacgcactagcggcgcggtcgccgaccacgagagcccggcgcatgagcaccactggcacagccacggccatggacatggacatggacatgctgggggcatcgtggtggctgacaagcccgaggacgatgaggccagccaggtgcagctccgccggaaccgcgttgtcgttcaggtcctggagatgggcatcgtcgtgcactcggtggtgatcgggctgggcatgggagcgtcgcagaacgtgtgcaccatccggccgctggtgacggcgatgtgcttccaccagctcttcgagggcatgggactcggcggctgcatcctgcaggcggagtacggcgcgaagatgaaggcggggctggtgttcttcttctccacgacgacgccgttcgggatcgcgctggggctggcgctcaccaaggtgtacagggagaacagccccacggcgctcatcgtggtgggcctgctcaacgcggcctcggcggggctgctccactacatggcgctcgtggagctcctggccgccgacttcatggggcccaagctgcagagcagcgtcaggctccagctcctctgcttcctcgccgtcctcctcggcgccggcggcatgtccatcatggccaagtgggcgtgatcgtattcgtatctgagacgacatgacacagtactgttacaccaacactgcctgcagtctatctatctgcaagactgcatcgctgcatgcatgttcctcctatagctggctgttgtatcatttcgcgtgcttcgttgctccgtgcgcttccgtgtcgccatcaggaagctaggtatatattagacgcagatagcgttgttgtcatgactattcaacgtccacggtacaatacaaaagtagtactctatctatgtattaactatgttcttaaatatttgtcgtggtaaataaaaaaacaatataaatagtactctacctatgtactatctcagttttcaaatatttgtcaacgctagttc

SEQ ID NO: 24073 - DNA, 604 bp, Zea mays
  Clone ID: LIB3607-015-C6_FLI
agctagctagctagtagagaggtcaatcaccaatggcgaggcagctcgttgtgcttgctctgcttttcgtgatcgccggtgtggcgcatggcgcgggggagtgcgggagagcctccgccgacagggtggcgctaaggatggcgccatgcatctcggctgccgacgacccgcagtccacgccgaccagcagctgctgctccgctgtgcacaccatcgggcagagccccagctgcctgtgcgccgtcatgctgtccggcaccgccagggctgccgggatcaagccggaggtcgccattaccatccccaagcgctgcaacatggccgaccgccccgtcggctacaagtgcggagattacacgctgccctagctgatgaagacgtcgtcaacgagaccgtgcgagtgaaccagtgcatgaacgaatgccattatgccatgcaactatgttgcgttgcgttgttggaataataatcgaatccgctagaataaatatgtacgtgcacgacggcctcttgcttgtatcactggactttgcttgtgtgttatacgtcaaatatgttccgtttctctcatataagaaaattatgcaatgcttgttattaacct

SEQ ID NO: 24074 - DNA, 1111 bp, Zea mays
  Clone ID: LIB3607-015-D1_FLI
agttctgaacgacgtgaagccgtacctggccatggtcctgctgcaggtaggcttcgccgggatgtacatcgtggccgtggcctcgctcaagcgcgggatgagccacttcgtcctcgtcgtgtaccgtaacctctgcgccaccgccgtcatggcgccattcgcgctctggttcgagaggaacgcgaggccaaggatgaccatcaccatcttcctcaagataatggggctcgccatgctcgaaccggtgctggaccagaacctctactacatgggggcgaacctgacctcggccggcttcgcgtcggcgctcataaacatcctcccggccgtcacgttcgtcatggccctggtcctgcgcatggagaaggtgcggctgcggagcgtgcacagccaggccaagatcgcgggcacggtcctcacggtcgccggcgcggtgctcatggtcctgtaccacggccccgtggtgcagttcccgtggtccaaggggcagcaccaccacgacagcgccggcggccagggagccaacagtgccgccggtggcggcggcttcctcacgggaatcatcaccatcgtaatcgcctgcgtctgctggtccgccttcttcgtgctccaggccaacacgctcaagagctaccccgcggagctgtcgctgacggcgctcatctgcctcatggggtcgctcatgagcggctccgtcgcgctcgtcgccgagcgccgcaacacccaggcctgggtcatcggcttcgacacgcgcctcttcaccgccgtctacgccggcatagtgtgctccggcgtggcatactacgtgcaaggcatcgtgtccaggcaacgaggcccggtgttcgtcacggccttcaaccctctctgcatgatcatcaccgccgtcatgggctccatcatactcaaagaagagatcactctcggaagcgtgattggcgctgcgatcatcgtgttaggcctgtacgcgctcatctggggcaagagcaaggacagcgtggccgacgtctcagcatcaggcggctccaagggcgcatcagcggctgccgccgtcgagctgcccatcaccttggcgcagcccaacggcaacggcaactgcaagcacgaggtcggc

SEQ ID NO: 24075 - DNA, 1700 bp, Zea mays
  Clone ID: LIB3607-015-E12_FLI
ccaggagttccatccatcgccgctcactcccacgatcagcgtcgtcgcttatccgcaaatatctctcttcctctttgcagtcggcaccatgggttccgacttcaaatcgatccccttgatcgatatcggcccgcttgtcgaaaagattgatgatccaagcatggccaacgataaggatttactgcaggttgtccggttactggatgatgcttgcaaggaggccggattcttctatgtgaaaggccatggtattgatgagtcactgatgagggaagtcaggaatgtaacccgtgaattctttcagcttccttatgaggaaaaattaaaaattaagatgacacctcaaagtggatataggataggggaaaatattaccaagggtaagcctgatatgcatgaagcaatcgattgttatactcctattagacctggcaaatatggagatctcgctaaaccaatggaaggatctaacttatggccaaaatacccatcaaattttgaagtactgctggaaaattatatcaaattatgtagagacatttcaagaaagataatgcgaggtatagccttggctttgggaggggcaattgatgcttttgaaggggatacagctggagatcctttctgggtgttaaggttgattggttatcccgtagatattccagaagagcagcgcactgatactggctgtggagctcatacagattatggttagtagatctctccaaagaatttctattgagaaaaaaaaattccatatgtgaaactgtggatgacggacttctaacactggttaaccaggatgatgacatatgtgcccttgaggtgcaaaatcgttctggtgagtggatatatgcaacgccgattcccggaacctttgtttgtaacatcggtgacatgctgaaggtttggacaaatggaatatatcagcccacccttcacagagttgtcaacaattcccagcattaccgtgtatctgttgcattcttctacgagtccaacttcgatgctgcagtagagcctgttgagttctgccgggagaaaaccggcggtgctgctaagtacgaaaaggttgtgtacggggagcatttggttcagaaagtattgacgaacttcgtcatgtaaatttgctaagtacgacaaataaatctgcattgcagcatcagaactccagacctatttggtgtgtagtgctgtaccagaaaggtagtaacggactaaagcatgcgcccgtctctgaaatttgaccttaacaagagtcgcagacttgcagtgcaggtgatatcacaaggaaatcggggggagatttgttctctctgctgcacggagttgtcgacaaccctgtcgctgaaatctgaatttagcatcagacaactggagatgctacgagtccgtctctgaaatctgaatttagcatcaggcgcgaaattgcctccatttcttcgccaaaccatctaatgatggaagctttgtagctggcaaggccatctcgtgtgacgccgcagccagacgatgccagcgtagcaagttacctaccattagcactggttaactagctagccatactagtgaattactctattccgatcaaatgttggagaattcttttctcatagatactttgatgaaaagaattggtaccaggaaggctatgttcggttctaccacaattcatatgtatcgagcgagtttcaatccct

SEQ ID NO: 24076 - DNA, 1461 bp, Zea mays
  Clone ID: LIB3607-015-E6_FLI
ctccctctggtctcctcctccacttgctcctgctcctccagacctccactccacccctccaaaaggtctagtaaaatagaaggaagccgccccccaatcgttcctagcccggcgcacggcgcacgaaggggttcgatcggatcggcgccggcgggggcgagatgtgggagtcggtggcgctgacgctggcgggcaccgccggcaataacatcggcaaggtcctgcagaagaagggcaccctcatcctccctccactctccctcaagctcaaggtggtcaaggcgtacgcgtcgaaccagctctggatcagcggtttccttatggacatgtgcggtgccgcgctcatgctcaccgcgctctctcaggcgccggtctccgtcgttcagcccattgctggttgcggtctcgcaatactctgcgttttctcccatttttacctcaaggaggttatgaacggcctcgattggattgccatcacgctagctggtctcggcaccataggtgtaggtgttggaggtgaggaacagaaagttgaccagatacctcttttaaatataccctggctagtgctctccattgtcatcttgtttgtactgctcaacacttggcttcatatgtataaaaagcaaaggcgtgagcaagagttgactggacctgaagtgattgaggagatcatatatggcttagaatcaggcattttgtttgggatttcttcagtgatctctaagatgggatttgtgatgtccgagatgggttttccaaagattgttgtgcctgctgccatatcttgtagtgtttgctgcagtgcagtgggatttgtgtatcagactcgaggcctcaagcatgggagggcaattgttgtatctacatgtacatcagtggcatctatagtgtccggtgttgttgctggcatgattgcacttgatgaacatctgcctaaagctcccacagctcggtttttcctcttactgggatggttcttcatcatcacaggagtaatactgcttgttagttcaacccgattgattgcgcgtctacctaggtctgttcagaagtatttgaagagcaacatagagcgcacccacagcatcaggaggcctggttcagcacgagggaaggatcccatcccaacaacaacgatccatacgtcgtcactacacttgcttgcttctccaacaaaggagaaggcctagaaaaatgttggcactagagcaacttcgtttgggcacctcacgtttgccatgttattgattgattgaatggttccgtgaacgtagtctagagtagcatcttaaaagcttgggttggttattcaccatactgccctttataggtctaacagaaacttggggaaaattgctgagtttttatcaggtctcgttttttgtttggttgctgagtgcaaaatctgaagttgttactctccgacccttaactctcgttatggaaagtatgttggtc

SEQ ID NO: 24077 - DNA, 1427 bp, Zea mays
  Clone ID: LIB3607-015-G4_FLI
cccagacaagagcacgcaacgcaagcaactgcgacgtctcccgcccccgccgcgccccggaccttttccgcagatattttttttatccccccacgcccccggttcgttcccttccattccaccacctctcgccagacaacgagatgtgcgaggcaccgcggctcggcaaccgcgccggcgccggcgacccggccgccgccgacgtcgacgtcgtcacgacgggcgggcgccggaggatccccgcgcattcctctgtcctggcctcggcgtcgccggtgctcggcagcatcctggagcgtcgcctgcggaaggacagggagagcggcaagcccgggcggtccgtcgtccggatccgcggcgtcaccgacgacgccgccgcggccttcgtccgcctcctctacgccggcaggtgcggcgaggatgaggatgacgacatggaggagcacgcggtgcaggtgctggtgctggcgcacgcgtaccaggtgccgtggctgaagcgggcgtgcgagggcgccatcggcgcgcgcctcaccgcggactcggtggtggacgtgctgcagctggccggcctctgcgacgcgccgcgcctgcacctgcgctgcgccaggctgctggccaaggagttcgcggccgtggagcgcaccgaggcctggcgcttcctgcaggagaacgacccctggcaggagctccacgtcctgcagcgcctgcacgaggccgacatgcggcggcgcaagtggcggcggaagcgcgcggagcagcgcgtgtacatggagctgagcgaggccatggactgcctggaccacatctgcacggagggatgcacggaggtcggcccggcggggcgggcgccggcgccggcgccgtgcgcgcgctacgccacgtgccggggcctgcagctgctcatccgccacttctcccagtgccaccgcaagagctgcgcgcggtgccagcgcatgtggcagctgctccgcctccactccgcgctctgcgaccgtaccgaccgctgcaacaccccgctctgcatgaggtttaagcagcaggagcaggataaggcggctgccaagggcggcgatgatggcgacaaatgggggcttctggtgaagaaggtgaagactgccagggtcttctcttctctggccaacaggaagcagatgagcaccaccaccacccagtgctgaggagcagcctgggatgcttaggggtcaaagttagattagtgagagagaatgaagcgagcagtttttttttgggtctgttttgagatgtcagatctcttttgagatatgtacatgtacatgcctactttgtcaccctacgttggtatagctcttttatcgaggtgggagttggtcagccggaagtctatgtaaaaagtgcgcatgtatcattatataataatagggaaatatgagaagtattttagtctt

SEQ ID NO: 24078 - DNA, 1081 bp, Zea mays
  Clone ID: LIB3607-015-H2_FLI
tcgccgtcgccattggcgcggtgcgtgtgcgagcccgagccgtgcgaagcaggtgaggcgaggggacagacgggacacgggagcgaagcaaagcgaaggaaggagtttccagtgagcgcggatcgcggaggcggtttatatagccggagggcgcgcgctccggtccgctaacgtcctgcagggagggaagggcaggattaggcagggcagcgccgcgccggccggaccgcccgcccgcccgcccgtccacgagccacggactttcggccatgggggacgctggcgctgacgcctcctcctcgccgccgccgccgtccgggtccttctcctacttcgccgtcttccgcaactaccccctcgtcgccgccctgctcggcttcgccgtcgcccagtccatcaagttcttcgtcacacggtacaaggagaacagatgggatcccaagcggcttatcggctcgggtggcatgccgtcatcacattccgccacggttacagcactagcagtagcaattggattccaggatggctttagctgctccctctttgcaacagcaactatatttgcaagcgtggtaatgtatgatgcttctggtatcagactgcatgctggaaagcaagcagaggtattgaatcaaatagtttgtgaacttccttctgaacaccccttgtctgagacaagaccactgcgagaacttttaggccatacaccaactcaggtggttgctggtgcattgcttgggtgtacaatagccacagcaggacaattattcctttgaactacgaaggtgcggcagaaatgttgtagcatttgtatcgcagggacttgagaagaagtttctccagtgttctgctactttaggtattggtaagatttgcatgttggtgctgtagtgttgttgaatgttgtatgttctgatggaatgtggttatatgtcaaaaaggtgacgttcacaggattgctgtacagaacattgttcatggttatgattgatgaaatctaaaatgtgattgaaacagctgcagaactaagggagtgtttggtttgatggacagcaaaaaaaaatgtctgtcgtgtttatcc

SEQ ID NO: 24079 - DNA, 1472 bp, Zea mays
  Clone ID: LIB3607-015-H6_FLI
ggggaaagatgtacgtggtgaaggatattggcggcgccatcgggctgatggcggtggcgctggtgctcctgggcacctggccggttgtcctggcggtgctggagcggcggggccggctgccgcagcacacgttccttgacttctccgccaccaacttcatggcggccgtgctgatcgccctcaccttcggccagatcggccccgccagcagcacgcccaacttcctgacgcagctcactcagaacaactgggcttcggtcttgtttgccatggcgggcggcgtcaccctgagcctgggcacattggccacgcagtacggctgggcgttcgtcgggctctccgtcactgaagtcatggcctctagcctcaaggtcgtcatagggacaacggtcaactatttcctggacggccggatgaacaaggcggagatcctctttcctggcgtcggctgcttcctgattgcggccatccttgggtcacttgtccacgcttccaatgccgccgacaaccaggagaagctggctaataataacgcttccaatgcagctgcagctgcagatgaggagaaggatctcaccaaacacctcctagagctagagataccatcccaagaagcagagccggatgcaggaacggcagggttcctggttggtctggaggagaagaggtcgattaaagtgctgggatcccacacgctgctgggccttggcatcgtggtgttcgcgggcatcttctacgcgctcttcgcgccagcgttcaacctggccactaacgaccagtggcacacgctccccgccggcgtgccgcacctggcggtgtacacggcctacttctacttctccctcgcatgcctcgccgtcagcgccgccctcaacgtgtggctcctctaccggcccatggtcggcgtgccaagctccaccctggcggcctacgtcctcgacggcgacggcaggggcctcgcgatgctggccgggatgctgtgcgggctcgggaacgctctcacgttcatggcagggcaggccgccggttacgccgccgccgactccgtgcaggcgctgccgctggtcagcacgttctgggccgtcgccctcttcggcgagtaccgccggtcgtcgcggcgcacgtacacgctgctggcgagcatgctactcatgttcacagtcgccatggtcctcctcatggcttcctcaggaagccgctccatcattcactgagctggccacgtggatggatatgcgatgcgatgcgatgaggagaatggacaccgggatagctcttgtcttgtgctggaatggaatggaaccaacccactagctgtacagagcgatcatgctacgtccacccactcgtccatgaattgatttgtctctgtatttttttttaaaaaagcgtgcgctgtcacccgcgggccgcggtagcatgcagcccgtctccagcggtctacataaagtttacttaaaaaactgttttat

SEQ ID NO: 24080 - DNA, 1654 bp, Zea mays
  Clone ID: LIB3607-016-A3_FLI
cagagataggcgtcttcgtactcgcctacctccgcggctcaaacctttcccccttctcccaattccctccgtcggccgccgctccatcccgtacgacgacaccatgagggagtgcatttcgatccacatcggccaggccggtatccaggtcggaaacgcgtgctgggagctgtactgccttgagcatggcattcaggctgacggtcagatgcccggtgacaagaccattgggggaggtgatgatgctttcaacaccttcttcagtgagactggtgctgggaagcacgtgccccgtgctgtttttgttgaccttgaacccactgtcatcgatgaggtgaggactggcacctaccgccagctcttccaccctgagcagctcatcagtgggaaggaggatgcagccaacaactttgcccgtggtcactacaccattggcaaggagattgttgacctatgccttgatcgcatcaggaagcttgccgacaactgcactggtctccagggcttcctcgtcttcaacgctgttggtggaggaacgggctctggccttggttccctcctcctagagcgcctgtctgttgactacggcaagaagtccaagcttgggttcactgtgtacccttccccccaagtttctacttcggtagttgagccatacaacagtgtactgtccacccactccctcctcgagcacactgatgtggctatactgctggacaatgaggccatctacgacatttgccgccgatcccttgacattgagcgcccaacctacaccaacctcaacaggcttgtgtcccaggttatctcatcccttactgcctccctgaggttcgatggtgctctgaacgtggatgttaacgagttccagaccaacctggtaccctacccgaggatccacttcatgctttcttcgtacgctccagtcatctctgctgagaaggcctaccacgagcagctctctgtggctgagatcaccaacagcgccttcgagccatcttccatgatggccaagtgcgacccacgacatggcaagtacatggcctgctgcctcatgtaccgtggtgatgtggtccccaaggatgtgaatgctgctgtggccaccatcaagaccaaacgcaccatccagttcgtggattggtgcccgactggcttcaagtgcggcatcaactaccagcctcctagcgttgtgcctggtggcgacctggccaaggtgcagcgtgctgtgtgcatgatctccaactccaccagtgttgtggaggtgttctcccgcatcgaccacaagttcgacctcatgtacgccaagcgtgccttcgtgcactggtacgtcggtgagggtatggaggaaggtgagttctctgaggcccgtgaggacctggcggcgctcgagaaggactacgaggaggtcggcgctgagttcgatgagggcgaggatggcgacgagggtgacgagtactagagaagtttgctgatgacgcagcatcaggccagtgtgctgcccttatcccgtgatctgccgtgagttgctcctgctatcgtgttatgtgtgtctgttctgaagtattgtgtggtttacaacacctgatgttgtaagagttgttaattcccctgcattgctaccgggttattgagaataattatggctgtttacgtt

SEQ ID NO: 24081 - DNA, 1319 bp, Zea mays
  Clone ID: LIB3607-016-C5_FLI
gctcctgagattacttgcaaaacattcttggtgtttgctctagctagctgctgcaccatatatagaactatcgatctgagccattatattgttggcatttgtgctcgatcgatcgtcgtcgtcgtcccatggcgactaataagccttttgcagttaataagctgctgccagttgtggccctcctgctcctcctcgcagcatgtagctcaccggtggtggtggctcagctggtggccggctactacagcaaaacatgcccggacgtcgaggagatcgtccgcgacgagatggagaagatcatctcggctgcacccagccttgctggcccgctcctcaggctgcatttccacgactgcttcgtcaggggctgtgacgcctctgtgctgctcaactctacggagggcaacctggcggagagggacgcgaagccgaacaagagcctctggggattcggttccgtagagagggtgaaggccaggctggaggccgcctgccccggcaccgtttcctgcgcggacgtcctcaccctcatggcccgcgacgccgtcgtgcttgccaaggggccattctggccagtcgcgctggggaggagagacggccgtgcgtccagcgccacggaggcggccgaccatctgcctccagcttacggagacgtgcccctgctcaccaggatcttctcttccaagggcctcgccgtcaaggacctcgccgtcctctccggcgcccacacgctaggcacggcgcactgcccctcctacgccgaccgcttctacaacttcagcagcgcctacgactcggacccgtccctcgacaccgcgtacgccgaccggctcaggtcgcgctgcaagagcgtccaccacgacgacaaggcactgctgtccgagatggatcccggcagctacaagaccttcgacaccagctactaccgccacgtcgccaagcgccgggggctcttccagtccgacgccgcgctcctcgccgacgccaccactagggagtacgtccaccgtattgccaccggcaagtttgacgacgtgttcttcaaggacttcgccgagtccatgaccaagatggccaacgtcgccgtgctcaccggtgccgagggggagatcaggaagaaatgctacatcgtcaactaaagtatatatgtattatcagctagtagctaaatcattgttgttttaatgagtttaactccgtccactagatgatagggcgtgtgtctgcttgttattaatcaatgtaatgtatgtactcctattttgctgtaaattcattcttatcaatatgatcgtggcaatggtggcaaataaactcat

SEQ ID NO: 24082 - DNA, 900 bp, Zea mays
  Clone ID: LIB3607-016-E1_FLI
gaccccgattcgtccgcccgcgaccgggattccctccgccaagcgcggatctgaacgctgcgctccgtgtcgccgctcgaatccgccatgaagggggccaaatccaagggcgccgccaaggccgatgccaagctggcggtgaagagcaagggggcggagaagcccgccaagggcaggaaagggaaggccggcaaggaccccaacaagcctaagagggctcccagcgctttcttcgtgttcatggaggaatttcgcaaggagttcaaggagaagaaccctaagaacaagtctgtcgctgcggtggggaaagctgctggcgacaggtggaaatccctgagcgagtcggacaaggctccctatgtagccaaggctaacaagctcaagctcgagtacaacaaggccatcgctgcctacaacaagggcgagagcactgcagctaagaaggctcctgccaaggaggaagaggaggaagatgaagaggagtctgacaagtccaagtcggaggtcaatgacgaggatgatgaagagggtagtgaggaggatgaagatgatgacgagtgatggagctcctcgagacaatggaccgtgcttcatccaacaatggagcggctacacaaggccccgtggcgatcacaaaaaaggagcctatatccatgtactagaattattcagtttcactccacatcgtgatgttttatttttacttttgtcgtgctataacggatagcgctcctcgttggcgccactggcgggtggttctgcctctggtctggtgtgtttgtgtgtggtcacacttgccagccagcagaggcgcctgcttgtacctagattactgtttccattgtcgtcatcatcggctaacattgtcataatgtcagtttgggtaatgttagattaagt

SEQ ID NO: 24083 - DNA, 1878 bp, Zea mays
  Clone ID: LIB3607-017-B4_FLI
ggcagaagcaaaaagagaaaggtcttgttgccgatggggagctcagggttctcgtggacgcttccggaccaccccaagctccccaaggggaaaccggtggctgtcgtcgtgctggacggatggggcgaggccaaccccgaccagtacaactgcatccatgtcgctcagactcctgtcatggactcgctaaagaatggcgctcctgagaaatggagactagtgaaggctcatggaacagctgtgggcctcccatctgatgatgacatgggcaacagtgaagttggtcacaatgcacttggtgctggtcgaattttcgcccaaggtgctaagcttgtcgatcaagctcttgcctccggaaagatttatgatggagatgggttcaactacatcaaagaatcttttgaaagtggtactcttcaccttattgggttgttgagtgatggtggtgtccactcccgtcttgatcaactgcagttacttctgaaaggtgtcagtgagagaggggcgaaaaaaatccgtgtgcacatccttactgatggacgtgatgttttggatggaagcagtattggtttcgtggagaccctagagaatgatcttttggagcttagagcgaagggtgttgatgcacaaattgcatctggtggtggaaggatgtatgttacgatggaccgttatgagaatgactgggatgtggttaaacgtggttgggatgcccaagtgcttggagaagcaccctacaaattcaaaagtgcacttgaggctgtgaaaacactgagagcacagcccaaagccaatgatcagtacttgcccccatttgtgatagttgatgacagtggcaatgctgttgggcctgtattagatggtgatgcagttgtcactatcaacttccgagctgatcgcatggttatgcttgcgaaagcactagagtatgcagattttgacaactttgaccgtgttcgtgtccccaaaatccgatatgctgggatgcttcagtatgatggtgagttgaagcttccaagccgttaccttgtttccccaccagagatagatagaacatctggggagtacttggtgaagaatggcatccgcacctttgcttgcagtgagacagttaaatttggccatgtcacatttttctggaacggtaaccgttcgggatactttgatgcaactaaggaggagtatgtagaagtacctagtgacagtggtattacattcaatgttgcacccaatatgaaggcgcttgaaattgctgagaaagccagggatgctctcctaagtggaaagtttgaccaggtacgtgtcaacctgccaaatggtgacatggttggtcacactggtgatattgaggccaccgtagttgcttgcaaggcagctgatgaagctgttaagattattttggatgctgtcgagcaagttggtggtatttaccttgttaccgccgatcatggcaatgctgaggatatggtgaaaaggaacaagtctggcaagccgttgctcgacaagaatgaccgtatccagattcttacctcgcatacccttcagccggtcccggttgccattggaggccctggccttcaccctggagtgaaattccggaacgacatccaaacccctgggctcgccaacgtagccgcaaccgtgatgaacctccacggatttgaggctcctgctgactacgagcaaaccctcattgaagtggctgacaactaaacactggccacctgtgtccaattttggttatatgtagttctgagaatggacattcaataatttatgtttgcaagcacgttgctcaaactcaccaaaacatcgagggatgccttttgactttggcatttacagcattttcgtttggctttaatccttatcggtttc

SEQ ID NO: 24084 - DNA, 1215 bp, Zea mays
  Clone ID: LIB3607-017-F4_FLI
cagccacagccacacacaacgactgacctaccccatgctatctctgcatatttgcgttcttgatcgcgctcttattactcctcaccgtcgacatcacgcgcacgcatcgaactttgtatagcagctagagcaccagagccaggagcggcgcggcacgggacatggtgaagggcgcgcatttccaggacgcggcggtcgacggcggcgccggcggcaatgcggaggcggcgatgcagggcggcgccaagcggcagtacaagggcgtgcggatgcggagctggggctcgtgggtgtcggaggtccgggcgcccagccagaagacgcggatatggctcggctcctactccaccgccgaggccgccgcgcgcgcctacgacgccgccctgctctgcctcaagggctccgccgccgccgacctcaacttccccgtgcacctccccttccacgtccccgccgccgccgccatgtcgcccaagtccatccagcgcgtcgccgccgccgccgccgccgccagtggcggcgccacatgcagcccgccggcgccactcctccgtgcagctacggcgacgcgtcgtcgtcgtctggcgttagctccccggagaccggccggaacgctggcctgtgctacggcacgacgcactacgacgacatggacatggacttggcgggcgacgccgacgcggacctcgccgcgctcgcggacatcgaggccttcttccagtcgcctaagtgcatggagtacgccatgatggacccgtgcagcacgttcttcgcaccggcgcccgtggctacggacgcggccagcgagtgggcggaggaaggcgagatcgacctctggagcttctcgtccctcaactgatccaaccatcgtcagctcctccacagacatcagtttagaggtgaagcaaaagcaagcctcacgtgatcatcgtccatccactcaacacttagcgattaattacagctgcaacctacgtgatcaagaattggtcacggtataaataagcattaaggattaattgattcatactagtattagttagttattttactatactactagtgtctcatggagctacatgttttaaggcagctttccatggagtcaacgacctcccctcagttgcattgcatggcatgctatgggtaggggtaggaagctgtgtgtttctgcaagtgcaagtaatggattataaattatgatgatgtactcct

SEQ ID NO: 24085 - DNA, 943 bp, Zea mays
  Clone ID: LIB3607-018-C9_FLI
gcctccgacaagcaggacctgatgaggctttcagcggcggcgctcctgctggcgctggccgcggctggcagcgtctgctcggcgcagcagctccgtcgcaactactacgcgagcgtgtgcccgaacgtggagtccatcgtgcgcgacgcggtggcgaagaagtaccgggagacgttcatcacggtgggcgcgacggtgcacctcttcttccacgactgcttcgtggagggctgcgacgcctccgtggtggtggcgtccacgccaaacgccaccgcggagaaggaccaccccatcaacctgtccctggcgggcgatggcttcgacaccgtgatccgggccaaggccgccgtggacgccgtgccgcggtgccggaacagggtgtcctgcgccgacatcctggccatggccacccgggacgccatcgcgctggccggcgggcccgcgtacgcggtggagctgggccgcctggacgggctgtcctccacggcgaccagcgtgaacgggaagctggcgccgccgtcgtttggcctggaccagctcaccgcgctgttcgcgcgcaacgggctctcgcaggccgacatggtggcgctatcggcggggcacacggtggggttcgcgcactgcggaaccttctccgggcgggtccgcgcggcggacccgacgctgaaccggagcctggcggagaagctggcggcgtggtgccccgacggcgtggacccgcgggtggcggtgaccatggacgtggtcacgcccagggtgttcgacaaccagtacttccggaacctgcagagcgggatgggcctcctggcgtcggaccaggtgctgttaggggtggtaatggatcgtgatccaaatagttcttcacaaaatgtcaaagccctaaataaattatagttcaaaaatgactataaatagagcccgatcctaacccgcttcgatcctt

SEQ ID NO: 24086 - DNA, 1000 bp, Zea mays
  Clone ID: LIB3607-018-H1_FLI
gtctggttgggaaagtaaaagcaggttcgttctcgggttttgattgggattgggttctgctgttggtcgaattccatccatttcttccgttgcatcggcccctcccttccttctctagttcccttcccttatagtattaactacgacgatggtggtggatgctggtgttggtgttggcggcggcggcggcgccgggacatgtgccgtcggaggattcgcagtctgggacgtgctgctgtggcgccggggccgcgccgacgtgagcgcctgcctgctggcgggcaccgtctcctcctggctgctcttgtacggcggctacaccttggtgtccctcgcctccaacgtgctgctcctgctcctcaccgtgctcttcctgtgggccaaagcggcgcgcctcctgaacaggccgcagcctcccgtcccggagctgcgcgttccgcagcaggccgtggacgaggcggcggcgctgctgcgctctgctctggacgccgcctcggacgccttccgggacatcgcgctgggcagggactcgctgctcttctacagagtcttcctctgcctgtggagcgtgtccatcgtcggcagcgttacagatttcccgaccgcctgctacgcaagtgtggtggctgctctgaccatcccggcgctgtaccacaggcaccaagagtgcatcgccacctacatgagcttcgcctacatgaacctccggatgtacgagatggcgtacgagaggctgtccatgaaatgcttcctcaaggtcagggactggacaatggagctactcaaggatccatgatcccttggttgtttgcgagtgagtgcttcaggtatagagttgattgattggtagatagaatagtggtggttttgattgatgctgactcttgttgtttgatcgatcagtgtgctctggtagatatagtagtggttttgattgtttggttctgcccttggctcgtttcattcctgagctactttagcatgcaaacattaaacattc

SEQ ID NO: 24087 - DNA, 1897 bp, Zea mays
  Clone ID: LIB3607-019-D6_FLI
gcacggttctcgcctcctcgcattctaaacatcgccatgattcggcggttctgaatgcatctcctgtaaccaccgggcccggagcttctcccaagcccgcgtcgccgtcgagggctgttaacctggcaacactctcaccaaccaacaaacaaacgcgcggggtcgctgtaatggccgccgccgtgaatgggagcctagacgtgcatgagaggaaggcgcagaagagctactgggaggagcactccggggagctcaacctcgaggccattatgctcgactcccgtgccgccgaactcgacaaggaggagcgccccgaggttctgtctttacttccttcatatgaagggaaatctatactggagctgggagctggaataggccgctttactggtgaactggctaaaacatctgggcatgtttttgcagtggatttcgttgaaagtgtgattaaaaagaatggaagtataaatgatcactatggcaacacatcctttatgtgtgctgatgttacatccccggacctgatgattgaagcaaactccattgatctgatattttcaaactggttgctgatgtatctttcagatgaggagattgacaagttggtagaaagaatggtaaaatggttgaaggtcggtggttatatcttctttagggaatcttgcttccatcaatccggagatacagaaaggaaatttaatccaacacactatcgagaaccaaggttttataccaaggtatttaaagaatgccaaacctttaatcaggatggcacttccttcaaactttctttgattacattcaaatgcattggagcttatgtaaacatcaagaaagatcaaaaccagatatgttggctatggaaaaaagtaaactcatcagaagatgggggatttcaaagttttttggacaatgtgcagtacaaagccactggaatactacgctatgaacgtatctttggagatggctacgtgagtactggtggagctgagactacaaaagaatttgtggagaaactgaatcttaagcctgggcagaaggtgcttgatgttggatgtggattgggggaggtgacttttatatggctgagaagtatggtacacatgttgttggtattgacctttccattaacatgataatgtttgcccttgagcgttccattgggtgtaagtgcttagttgagtttgaagttgctgattgcaccacaaagacatacccagaccacatgtttgatgtcatctacagtcgtgacactatccttcatatacaagataaaccctccttgtttaaaagtttcttcaaatggctgaaacctgggggaaaggttctaatcagtgattactgcaagagtcctggaaaaccatcagaagagtttgcaacatacattaagcagaggggttatgatctccatgatgtggaggcttatggacagatgctcaagaatgctggtttcagtcatgtcattgctgaagaccgaactgaccagttcctcagtgttttacagaaggagctagacaaatttgagaagaacaaagatgatttcctgtctgagtttgcccaggaggattatgacgatatcgtgaatggatggaaggcaaaactgcagaggagctctgctggtgagcagaggtgggggctgttcgtcgccaccaagtgatgcgcgtgcgtatggctttattacaaataaatttggagctctgctggtgagcagaggtgggctgttcgtcgccaccaagtgatgcgcgtgcgtgtggctttattacaaataaatttgcttctgcaattcaccgatgggattcgcttcataacgtgattttacataactgaactctgagagtctatcctattgctttgtgctttgggacaatgagactgatataacttttacggtcctgtt

SEQ ID NO: 24088 - DNA, 1564 bp, Zea mays
  Clone ID: LIB3607-020-A8_FLI
ctgctggagcactgtccccaagcttgcagggcttcagaggtgtggcaagagctgcaggctgaggtggataaattacctgaggcctgaccttaaaagaggtgcattctctgaggaggaggaagacctcatcgtcgaacttcatgctgtactggggaacaggtggtctcagattgcaacaaggttgcctggaagaactgacaacgagatcaagaatctctggaactcgagcatcaagaagaagctccggcagaaaggcattgaccccaacacccacaagccgctccttgtcgaggttgaacgcagcaaagcagctccaacgaccagtaccgagagaacctctgagtccaatgatgttgacccttcaagtggcgccgcacttggcaactcgagccatcttcttctcagcgagacagcacaatcaccacagctgccagcgctcggtaagcatcgcagagaaactactagcctggcacatctaagggtgccgcccaaggagttgttccttgaccagctggcttctggtcatgagaacctcactggctgccgcacagcaggcccagttccaaatttccctttccaacagctgatgtgctacaacaatgaatttggcaacaagaatggtgctagtaacaattcactctggttaaccacaatgagacaagtggcagcaccatttccactgtgatgccaccagtttcgccatcaactctctcgacatcaacagggctcaataggtcaccagacaacccacactcgggaggcactgccattcagagcacccagttctactgggacgctgctaatcctagcagctgcagcagtagaggaagcagcggaagcaacggcttgggatttgagctgcaaagcacaagctcgcttctggagagtagtgttttcccatggacagaattaacaccagataagaatagccaagttcagcttggggaagaactcaagtggcccgacttgctccacggaacattcacagacacacatgcaaccatgcagaaccttagccagtcactgtacgaagatgttatcaaagccgagagccaattcaacatagagggcctctgtgcagcctggtctcaaaatctgcagccacagcaacacctgcaggtatcagatttgtatgacaaggatttgcaaaggatgtccttgtcttttgagaatatctagacagcatgtttcagcatgcagggaacagagaaatagcagaaagctgagtcaatgaagccttaaaaaatacaatatttcttcacagattcatttgaaggctatgtggaggtgtgttttacgtaggtacattcttatgatgaaacagagatcaatactgataactgttcaccagtgtaaatgaaaaaagggaaaaaaatgaatctatattacagcataatgtatagactagagaaagtacatcctaggagtttacctcctttcatttaaaagttgctgtctttatctgtacatgcatgtagctcggcttttttgtataagtgagtcatggttgatctttctctacaaaataaatgaggcaagaatgtgaaatactgcacttgtcagt

SEQ ID NO: 24089 - DNA, 767 bp, Zea mays
  Clone ID: LIB3607-020-C4_FLI
gaggaattgtcgaactggaaagggctctctcgctgcaggagggggacgaataggatggccggaggcgtcatagttccgagcgatggtcctgccgccgaccacggcgggagcctgacgctgtcggtgttcatgacctgccttgtggctgcctcgggcggcctcatcttcggctacgacatcggcatctcaggcggcgtctccgagatggagccgttcctgcggcgcttcttcccgcgcgtcctggagcggatggcgtcggccagggggaacgagtactgcctctacgacagccagacgctgacggccttcacgtcgtcgctgtacgtggccgggctgctggcgtcgctcgtggccagccgcgtgaccagggccatgggccggcaggccgtcatgctcatgggcggcgccctgttcttcgccgggggagccgtgaccggcgccgccgtcaacatcgccatgctcgtcgtcggccgcatgctgctcggcttcggcgtcgggttcaccaaccaagtcagtctcagtccgctgtcccgcaccatccggagctcggcgccagccgccagctgtgcgttcttcttcttcttctctgcgacgcgtcacgcgcatggcatgtgttcactggagtcattggaccttgcggtagacatcttcccttacagcgagtccacgatagagtgccgccactagtacagagaagttctatagtggcggttgtaaacctatttatagtggcgtttttcgtaaccgccagtgctaggggccagtag

SEQ ID NO: 24090 - DNA, 955 bp, Zea mays
  Clone ID: LIB3607-020-H3_FLI
gtcccttccctggcccggtggcgagagcgagaagagggaccatccgatcggctccgtcatggctggagctgctgctctcaatgagggtatcctttcttccgtgtccgagaaaaatgttgctgttcacccatggcatgatttggagataggaccagaggctcctgaagtgttcaattgtgtggttgagattcctagaggcagcaaggttaagtatgagttggacaagatatctggtctgatcaaggtggatcgtgtcctttactcctctgttgtttacccacataactatggtttcattccacgcacactctgtgaggatagcgaccccatggacgtcctcgtactgatgcaggaacaagttgtccctgggtgttttctgcgagctcgtgctattgggctcatgcctatgatcgatcagggtgagaaagatgataagatcatagctgtctgtgctgatgaccctgaattccgtcactacaaggacatctcggacctccccccgcatcgccttcaagagatccgccgcttttttgaagattataaaaagaatgaaaacaaagaagttgcagtgaatgatttcctcccagccgaagatgccatcaaagcaatcgagcactcgatggacctgtatggctcgtacgtcatggaaagcctgaggaggtgatctgctgctgcttgattgtggatgctacgtaattttctcaacagctcatcgagagtaccgtagtccgtagtacggcaaatgttaacacgcacgaactggaatcatgaccaagggatattaccttctgttcatgctgaaacgatcagcagtttctttctttgcatcatatgccacgtcaaatcaaggcacttgcctctgaaatctttgtggtcaagtcaaaccagcacttcgacagaacgattgatggatgcctcatgcctgtattactgttacataaatgtccatttgctc

SEQ ID NO: 24091 - DNA, 1503 bp, Zea mays
  Clone ID: LIB3607-021-B8_FLI
catagcttagcttgcttccccaatgccaatgtcatcgacagcacaaatggcttccctcgccgttctcatcatttccctcgtctttgcggcgcttgcctccgacgccgccgcaggcgtccgcgtcgagctcacgcgcgtccacgccgaccccagcgtgaccgcgtcccagttcgtccgcggcgccctgcgccgcgacatgcaccggcacaacgccaggaagctagccctagccgcgtcgtccggcgccacggtgtccgcgccgacccagaactcgcccaccgccggggagtacctgatggcgctggccatcggcacgccgccgctgccgtaccaggccatcgccgacacgggcagcgacctcatctggacgcagtgcgcgccctgcacctcccagtgcttccgccagccgacgccgctgtacaacccgtccagctccaccacgttcgccgtgctcccgtgcaacagctcgctgagcgtatgcgcggcggcgctggccgggaccgggacggccccgccgccggggtgcgcgtgcacgtacaacgtcacgtacggcagcgggtggacgagtgtctttcaggggtccgagaccttcacgttcgggtccacgccggccggtcagtcccgcgtccctggcatcgccttcggctgcagcaccgccagcagcggcttcaacgcctcgtccgcgtccggcctcgtcgggctgggcagggggaggctgtcgctcgtctcccagctcggcgtccccaagttctcctactgcctcacgccgtaccaggacaccaacagcacgagcacgctcctcctcgggccgtcggcgtcgctcaacggcaccgccggcgtcagctccacgcctttcgtcgccagcccttccactgcgcccatgaacaccttctactatctcaacctgaccggcatatccctcggcacgacggcactgtccatcccgcccgacgccttcttgctcaacgcggacggcaccggcgggctcatcatcgactctggcaccaccatcacattactgggcaacacggcgtaccagcaggtccgggcagcggtcgtctccctggtgacgctgcccaccacagacgggtcggcagccacggggctcgacctgtgcttcatgctgccctcctcaacgtcggcgccgccggccatgccgagcatgacgctccacttcaacggcgcggacatggtgctcccggcggacagctacatgatgtcggacgactccggcttgtggtgcctggccatgcagaaccagaccgacggcgaggtaaacattctcggcaactaccagcagcaaaacatgcacatcctctacgacattgggcaggagacattgtcgtttgctccggccaaatgcagcgcgctctgatcagagctttacagaactgaaaatatgtgcgcgcaattgcataaggatcgtgatttttttaactatatattatgtaaaaatgtcgtgttgcttgggttgggttgtaaagcaggagatatttttccttc

SEQ ID NO: 24092 - DNA, 659 bp, Zea mays
  Clone ID: LIB3607-021-B9_FLI
gcagccccagccccagccccggctccggctccggtcccggcccctacggtggtcgagtggcccgagggcggcgcactgacgcgggactgggtggcggggctggcgtccacgctggactggtgctcgcggcacctccccgcggaccgcctcccggcggtgctcccgcccgcgctggtccagcgcctggtcctggccgccgccgccatcctgcaccgcgagcccaacctcgtccgcgtcgacccgccccccggccaggccgtcgtcgtcgtcggggacgtccacgggcagctccacgacgtcatcttcctgctccgcgacgccgggttcccgtccgaggaccgcatcttcgtcttcaacggcgattacgtcgaccgcggcgcctggggcctcgagaccttcctcctgctcctcgcctggaaggtgctactcccaaactgtgtgttccttctccggggaaaccacgaatccaagtactgcacgtcagtatatggtttcgagaaggaggtaatgactaaatacaaagatcagggccctcaaatttaccggaagtttttaagatgttttgaggaccttcctctggcgacaataatagcaggatgtgtgtacactgcacacggcggtatcttccgtggaacaattgtagtgccatcaaagaaatc

SEQ ID NO: 24093 - DNA, 1058 bp, Zea mays
  Clone ID: LIB3607-021-F5_FLI
gctgggacggaaccggaacgtttcgctagccctcgttcccgttcggccttgacaacccaacccgaccccaagttcccaacgcagaggatcgaactgaatcctccgcaattcgccgccgccgggaccgaccgacccgatcctatcgatcgaggatgtcgtacgcctacctcttcaagtacatcatcatcggcgacacaggcgtggggaagtcgtgcctgctgctgcagttcacggacaagcgcttccagcccgtgcacgacctcaccatcggcgtcgaattcggcgcccgcatgatcaccattgaaaataagcccatcaagctccagatttgggacacggctggccaagaatcattcagatctattactagatcatactacagaggcgctgctggtgcccttttggtttatgatattactaggagggagaccttcaaccatctcgcaagttggttagaagatgcaaggcagcatgcaaatgctaacatgactgtgatgctgattggaaacaagtgtgatctttctcatagacgtgctgtcagctatgaggaaggtgaacagtttgccaaggagcatggtctggtctttatggaggcatctgctaaaactgcacaaaacgttgaggaggcattcattaagaccgctggtacaatatacaagaaaatccaagatggcatatttgatgtatcaaatgagtccaacgggatcaaagttggctacgctgttcccaactcatctggaggtggtgctggctcgtcctctcaggctggtggctgctgcagttgagtggtggcagcaagtcatacaaatgcacaaggttctccctgcagtatcttgatgtttgcctatagctggccccggatgattcgttctttcagccatcatgtttcaatccataaacaaatcatcttcagtgtttagctgtcctttatacttgtgcaattcacgattagtaccctatgtgagtatgtgtcttgtgtaaccaaattgaaatcagttttatggtattcatttgttcaacatgtatatatgcttctctggctagtcatgtttctctgc

SEQ ID NO: 24094 - DNA, 1102 bp, Zea mays
  Clone ID: LIB3607-023-B8_FLI
catcgacagttctctcctgctcactcactcccttggccttctccagtcctctgtcctcgatcgatcggcttgtttacttccttagcttggagatccatttccatggaccctcacctcagctcccacgttcacgcggcagctgcggcggcctcggctttccccgatggtaagaagttggagagtgacgtgctgcctccaggggtcgtgaccctcgacgtcgaggcgggtgcgccgacgaacgcggccggggccgatccgcgcgacggcgacgacggggacgccggcttcgactacatggcccgcgcgcagtggctccgcgcggccgtcctcggcgcgaacgacggcctcgtctccgtggcctccctcatgatcggcatcggcgccgtgaacgcgacgcgcaaggccatgctggtctccggcatggcggggctcgtggccggcgcctgcagcatggccatcggcgagttcgtctccgtgtacgcgcagtacgacatcgaggtctcgcagatcaagcgcgacggcgaggaagccgccagggacagcctgccgagcccgacgcaggccgcgatcgcgtcggcgctggcgttcgcgtttggcgccctcctgccgctgctggcgggggtgttcgtaccgtcgtgggccgccagggtggccgcggtgtgcgccgcgaccagcgtcggcctggccgggttcggcgtggcgggcgcgtacctgggcggcgccaacatgctgaggtccggcctgagggtgctcctgggcggctggttcgccatgctcgtcacgttcggtgtgctccggctgttcgggacggtcttccacatacaagtctcgtcggcgtgatagctctcggagtctcgggctatggtggcaaatgaaataacgatccagggcccaggggcctagctatagctcttgacatcggaatgtgaaattaaaacctgcatgtcttgagtaaaaaactagcggtcgcctggatagcgaaatagaggcatgggtgtgggtgtgtccgtgtggcagtggatgtactgctttattgtaatgttatcttgtgctactggtatctgctgacgagaaaatcgaacacagattgtataattgtatt

SEQ ID NO: 24095 - DNA, 833 bp, Zea mays
  Clone ID: LIB3607-023-C9_FLI
tcgccgacgagctcctctcgccgtctccttcctcccctcactcctcccaccagccggagaatatgagcggcaacggcgcgaagaaggtggtcgatgcggcggtgaaggccggcaggacgatcatcgactgggacggcatggccaagttgctcgtcaccgacgaggcgcgcaaggagttcgccgccctccgccgcgctttcgatgacgtcaaccaccagctccagaccaagttctcccaggaaccccagccgattgattgggagtactacagaaaaggaattggatcaaaagtggtggatatgtacaaagaggcttttgaaagcatcgagatcccgaagtacgtcgacacagttactccccagtacaagccaaagtttgatgctgtgattgctgaattaaaggaggctgagaaagagcatcagaaggagtcagaaaggatagagaaggaacttgctgaaatggaggaaatgaggaaaaagatcagtacaatgacagcagatgattactttgagaagtaccctgaactcaggaagaagtttgacgatgaaatccgtaacgataactggggatattgaagagattggagagaactcttatgatgccatttccatgtccgtgaagaaccaataattttcctgtgccctgaattgggtggtttccatagcatgtgcacggggtttgggtggaatgcctacagaatcgactgtgtcaagctttcttgattccgtagaaacatgttttgtttgacctcatcatagaggatctccgcttttatcgtacaaagattgtgatatgttcttagcttctttctacctgaataagaggatttctgc

SEQ ID NO: 24096 - DNA, 1682 bp, Zea mays
  Clone ID: LIB3607-023-D3_FLI
gttcttgggcgtacgcggacacagccccgatccgaatcgtcctcctcgcgagcctcgtcgatcccccactcccctcccctcgcttcaagatgcagatctttgtgaagaccctcaccggcaagactatcaccctcgaggtggagtcttctgacaccattgacaatgtcaaggctaagatccaggacaaggagggcatccctcctgaccagcagcggcttatcttcgccggcaagcagcttgaggacggccgcacacttgctgactacaacatccagaaggagtcaacccttcatttggtgctgcgccttaggggaggcatgcagatctttgtcaagaccttgactggcaagacaatcacccttgaggtggagtcttcagacaccattgataatgtcaaggctaagatccaggacaaggagggcatccctcctgaccagcagcggcttatcttcgccggcaagcagcttgaggacggacgcacacttgctgactacaacatccagaaggagtcaaccctccacttggtgctgcgccttaggggaggcatgcagatctttgtcaagaccttgactggcaagacaatcacccttgaggtggagtcctcagacaccattgacaatgtcaaggcaaagatccaggacaaggagggcatcccacctgaccagcaacgtctcatctttgccggcaagcagttggaggatgggaggacccttgctgactacaacatccagaaggagagcaccctccacttggtgctgcgtcttaggggtggtatgcagatctttgtgaaaacccttactggcaagaccatcactcttgaggtggagtcttcagataccattgacaatgtcaaggccaagatccaggacaaggagggcatcccgccggaccagcagcgtcttatctttgccggcaagcagctggaggatggacgcacccttgcggattacaacattcagaaggagagcaccctccacctggtgctgcgcctcaggggaggaatgcagatcttcgtgaagacattgaccggcaagaccatcaccttggaggttgagagctccgacaccattgataatgtgaaggccaagatccaggacaaggagggtatccccccggaccagcagcggctgatcttcgccggcaagcagctggaggatggtcgcaccttggctgactacaacatccagaaggagagcaccctccatctggtgctccgcctgaggggcggtatgcagatctttgtgaagaccttgactggcaagaccataaccctggaggttgagagctctgacaccatcgacaacgtgaaggctaagatccaggacaaggaggggattcccccagaccagcagcgtctgatcttcgccggcaagcagctggaggatggtcgcacccttgcagactacaatatccagaaggagagcaccctccacctggtgctccgtcttcgcggtggttattaagccatcagtcgttgaagctgctgctgtatctgggttatctagtgtctctgccattgcccatggatggtgctgtctttcaaagtatttgtatggtttgtgtcgtgagtcgtgactgagctggtttcatggaccagttgtgttctcgttacccaaaactatcgtgcgaccgcatatggcttaatcatgaataaatgttgtttgaatttaaactattcgctg

SEQ ID NO: 24097 - DNA, 1239 bp, Zea mays
  Clone ID: LIB3607-023-D9_FLI
gtcattttctcatgggcacccccaaagcagccaggcacctatggtgggcctcaggccatcaatggctgaagttgatagaggttttgttacactggttgcttctgaccatccaggaattgaggtttgcaacccaaatggtcattggtacccagcggatgtgggctcaagccctgatgtcctgttgcttttgactggaagagccttgagtcatgttactgctggcctacgtctaaattctcagtacaggatcattaataatgaaaacagggcatcactcatgtttaggctcatgcctcgtgccaatgcaatattggactgctctccaatttcagctgctgggcattgcacaccacagatccaccggcccatatctgcaagtcagtttatggatgatttgcgtgctgaagagaatgtttaccatcacttagaagcaccgcctgaatcacagggaaactttgttaatgaaccatcgctcagaagtgtactgtcagaccctttgtctggggcttttcttgaagatgctatggttctcccatgtgggcactcgtttggtggcctcatgctgaagaaagttcttgaattggcaaggtgcagcatttgcaacggagatgttgatgaggcctccttatttcctaacctcgctctaagagcggtagctaccgtggtgaagatggaagacgataggaggctctttcacaatgcggcccttcgaaagcgcaggaaagaagtgactgagcatatggatgcccaaaggcgaaatggaagtagcaaggacagtattgagctggggctagaagctgaaagccctagagcgttcaagggggtgcagtacccgtttgtggtgggtgagagagtcctgatcatgggaaacaaaaggacgcctgataaattcgttgggaaggaggcagtggtgacatcacagtgcctgaatggctggtaccttgtgaaggcagttgatagcggagaaagcatacggctgcagtacaggtcgctgaggaaagcaggggagctacaagtgcaagcactcctgcagagtagacgatgattttttgcactagtgttgcttgtctcgtgttttgtttctgtcctatgcgatgaaaaggaaaaggaaaggatgcagcgtccttttgtacaaatttccattcagttttgccagccaagtcacgtagctgtaaaatgacagatgttgtgtggtgttctgtggcctttgtgcttgtgcactaagtcttgttaattgtc

SEQ ID NO: 24098 - DNA, 1760 bp, Zea mays
  Clone ID: LIB3607-023-F8_FLI
gcagccacgaaggatggcgccacacaaccaccaactcgcgatccatcgatttgattgcagaacaccacccaacagccaaaccatcactaggcgtctacgcttgacatggataaggcctacatcgccgcgctctccgccgccgccctcttcttgctccactacctcctgggccgccgcgccggcggcgagggcaagaccaagggctcgcagcggcggctcccgccgagccctccggcgatcccgttcctgggccacctccacctcgtcaaggccccgttccacgcggcgctggcccgcctcgcggcgcgccacggcccggtgttctccatgcgcctggggacccggcgcgccgtggtcgtgtcgtcgccggactgcgccagggagtgcttcacggagcacgacgtgaacttcgcgaaccggccgctgttcccgtcgatgcggctggcgtccttcgacggcgccatgctctccgtgtccagctacggcccgtactggcgcaacctgcgccgcgtcgccgccgtgcagctcctctccgcgcaccgcgtcgcgtgcatggcccccgccatcgaagcgcaggtgcgcgccatggtgcggaggatggaccgcgctgccgcggccggcggcggcggcgccgcgcgcgtccagctcaagcggcggctgttcgagctctccctcagcgtgctcatggagaccatcgcgcacaccaagacgtcccgcgccgaggccgacgccgactcggacatgtcgcccgaggcccacgagttcaagcagatcgtcgacgagctcgtgccgtacatcggcacggccaaccgctgggactacctgccggtgctgcgctggttcgacgtgttcggcgtgaggaacaagatcctcgacgccgtgggcagaagggacgcgttcctgaggcggctcatcgacggggagcggcggaggctggacgctggcgacgacagcgaaagtaagagcatgattgcggtgctgctcactttgcagaagtccgagccagaggtctacactgacactgtgatcactgctctttgcgcgaacctattcggcgccggaacggagaccacgtccaccacgacggaatgggccatgtcgctgctgctgaaccaccgggaggccctcaagaaggcgcaggccgagatcgacgcggcggtgggcacctcccgcctggtgaccgcggacgacgtgccccacctcacctacctgcagtgcatcgtcgacgagacgctgcgcctgcaccccgccgcgccgctgctgctgccgcacgagtccgccgcggactgcacggtcggcggctacgacgtgccgcgcggcacgatgctgctggtcaacgtgcacgcggtccacagggaccccgcggtgtgggacgacccggacaggttcgtgccggagcggttcgagggcggcaaggccgaggggcgcctgctgatgccgttcgggatggggcggcgcaagtgccccggggagacgctcgcgctgcggaccgtcgggctggtgctcggcacgctgctccagtgcttcgactgggacacggttgatggagctcaggttgacatgaaggctagcggcgggctgaccatgccccgggccgtcccgttggaggccatgtgcaggccgcgtacagctatgcgtgatgttcttaagaggctctgaaaacctcatggatcgaattgctggcatcggctgaagggtgtatgactatgacgtagcttccaagttccgagcatatatattcgtattgtgggttgccttgt

SEQ ID NO: 24099 - DNA, 203 bp, Zea mays
  Clone ID: LIB3607-023-H7_FLI
cgcgatcagaaccagtgttcgacttgtaactcttagctttagaataagatccatgcaaatcgtgcttggaaaggaaatgttgtacatgaaagtatagacacgtggactggttcctgatccctctatatcgttacaactataaggagggatcaggaaccagtccacgtgtctatacttatagttgtaacgatatagattttttc

SEQ ID NO: 24100 - DNA, 1076 bp, Zea mays
  Clone ID: LIB3607-023-H8_FLI
cgtcacgttgtgaattgaatcactctctgttgatgggcagcctgagcgctccgccagtgctgtcgccgctcgtttctgggctcatcttttcatctgacagagtcctcaaatctagagggttaactaccagtagcgtgatgaagtcatgtaggctatccgagctcagcaatgctgaggttagcagcctcaaggctcgtcctcgcatcgattcctcgtccatgtccatatttggcacggtgaatccaattgttgagggtgtttgtgtcagaggtgatgcagcagataagcagtaccaggtgaaaaactgcagatggaggccaacttttgccttggagactgatgggccatctaacactgatggccaagactttgatgaggacagtggttttcttggtaggactagactgggaagactcatccaagctgctgcaagggagctacttgacaagctgaactctgcgagaaccaattcgccaacaaagatattccttgtcctccttggtttttacacagccaatgccttggcaacaatactagggcagaccggtgactgggatgttcttgttgctggtgttgtagtggctgccattgagggaattggcatgctcatgtacagaaaaccaattgccaggcctcctggtaggttccaatctttgatttcaatggtgaactactggaaagccggtgtatgcctgggcctttttgtggatgccttcaagctgggtagctgagtttatacaatcatctgctgctatctgcctatggtaattttttgggtatattgggatcacaataacgccatgatatggttccatgatggccattgctcgttgctcgaattctaatagctgcatttggctctaattctgggagcattggctgctgaggtatcagatttcttcaaagttaatgaagatgtttggagcagatattattctgaggtgactattcatttttccataatcgaaggccatgtttgtcaaccattgtttggcccgtaaactgtagatatgctgtagtttttccacctccatgtcatttagccctaatatgcatttatgcgtactgagagaagt

SEQ ID NO: 24101 - DNA, 1366 bp, Zea mays
  Clone ID: LIB3607-025-B11_FLI
cggtggacaatgggagggaggggtagggcgcctcataaaaccagcagatccctgcgcgcgccgtaggaaggtttttcttccatcatttgtgtgttcgttcaactgagccgccatgcgccagccacggtccgggccggggaagaggcggggccgcggtccgcgcatccctgcggcgacgcttcagaagcagaaaacggcgttggcgaacgtcgaccagatcaccggcgccaagattccgaagagcttcgtattctcccgcggtaaactcccctccacgcttcgccatcttcagcaggacctccgcaaggtcatgctcccctacactgctctcaatctcaaggagaagaaacgaaataacctcaaggattttgtcaatgttgccggcccgatgggtgtgacacatttcttaatcctctcaaaccctcaaagcctgccacatttgcgctttgccaaatcaccgcagggcccaacattcacatttcagatagaggagtactcacttgcggcggacattgcaaactctcagaagcgcccaaggtgcccaccagggatattcaaaaactcaccactggttgtacttggtgggttgacaggtctcggcaaccctttcaggagtttggtcgaatacttccaacatatgttcccttccgttgacccaaccactgtcaagctggcaacatgccaaaggattctgttgttaaaacatgataaagagaaggatgttattgaattccggcattactccatcaagctccagcctgttggggtcagtcgcaggattagaaagctcatgcaaaacaatcaagtgcctgatctaggagaatttgaagatgttagtgagtttgtgaaaaaagctgggtatggatcagaaagtgaagcagacgatgaagcagcaatggtaagcttgccaagtgacattgacaaattaaaccgggcatccagaaaaagcgctgtcagactccaggagattggaccaaggatgactatgcgcctagttaaagttgaagctgggctatgttcaggagatgtcttatacccatggcctgtggaaaaggaagtggtgggaaagaaaggaacagaaactggggaagtagaagggcaagaagacgattctgaggccacagatgagtccgaggatgagatggtgtaggatttcagatgttttggacaggcagacgcaggtgttttgacagtcctggatgtttcatgctgaaaccaacgggccctgtgcccaataacgtggtgcattcatgccaattttgtcactgaaggtgcattgcattcgttgtaacgaagtgtaacattgttttgccgatggttacctcttttgtgttatgacaagtttggaggatagtttttggttcgc

SEQ ID NO: 24102 - DNA, 661 bp, Zea mays
  Clone ID: LIB3607-026-A2_FLI
cgatttcctgggccggttcgtggaggcgctgcactactactcggcgctgttcgacgcgctgggagacggcgccggcgcggccgaggaggagtcggccgagcggtacgcggttgagcgacagctcctgggcgcggagatacgcaacatcgtggccgtaggggggcccaagcggaccggggaggtgcgcgtggagcggtggagccacgagctgcggcaggccgggttccggccagtgtccctggccgggagccctgccgcgcaggccaggctgctcctcggcatgtatccgtggaaggggtacacgctggtggaggaggacgcgtgccttaagctgggctggaaggacctctccctgctcaccgcgtcggcgtgggagccggcggacgacgctgttgccgcttctgcgcccaccggttaacgagtacaagacaagatttttgcagcgggtagattatgattttggaattccatttcatgcctgctgccagcctcgcagccatccttggtggcctggtcgtcttctcttcttgctgccgccctgctcgtgtaggcgtcttgtgagtttgtttttgtgatataatcgtataggcttcggcattcctttcgttctcctacctccagtatcaattaccaaatcaactttggattttgaatatttagt

SEQ ID NO: 24103 - DNA, 924 bp, Zea mays
  Clone ID: LIB3607-026-B7_FLI
ggcagcccccaactacccccagcctcggaaggaaccttccagaagcgcaagactctaaaggccgtcgccttcccattcttcctcgccgcgggggtcgcctgagatcacataaacaatggtgaaggctgttgctgtgcttggtagcagcgatggtgtcaagggcaccatctttttcacccaagagggagatggccctaccgctgtcaccggaagtgtctctggcctcaagcctggcctccatgggttccatgtacatgcacttggtgacaccaccaatggatgcatgtcaactggaccacactacaatcctgcgagcaaggagcatggggcaccagaagatgagaaccgccatgctggtgatcttggaaacgtgacagctggagcagatggtgttgctaatatcaatgtcaccgacagccagatcccactgactgggccaaactcaatcattggcagagctgttgttgttcacgctgatcctgatgatcttggaaagggtgggcacgagctcagcaagagcactggaaacgccggtggccgtgttgcttgtgggatcattggactccagggctgaaaacgatcgccggacttgggggtgcctgagaggtccgtctcctgccgtccccagcagacgagcctgaacattcggagacatcgtgaaataagagcgtcgctgatctgtgatcatcgtatttgtcattatgcacctgtagcaaccgatggactgaactgtgctggattatgctgttggatcacctgagtatgtgttacatgtcggttttgatgtgacatcctatcgtttcgatgtgttttgtggaagtgttgttgcaagatttcaacagtcacgacttggttttgatatgcagtcagcagcagctcctgagttgtgattgctcagctgcggtccttttcttttaaaaaaac

SEQ ID NO: 24104 - DNA, 855 bp, Zea mays
  Clone ID: LIB3607-026-G3_FLI
ctagcgccggcgcctccatttcgttttcctcactctctcctccagctcagggtccggcggcgaagggaaggcaagatgtacaccgcgaggaagaagatccagaaggagaagggtcttgagccctccgagttcgaggactccgttgcccaggctttctttgatctggagaacgggaaccaggagctcaagagcgacctcaaggacctgtacatcaacaatgctatccagatggatgttaccgggagtaggaaggctgttgtcattcacgtcccataccgcctgcgcaaggccttcaggaagatccatgtcagactcgtcagggagctggagaagaaattcagcggcaaggatgtggtaattgttgctacacggaggattgtgaggccacccaagaagggttcagctgttctgcgccctcgcaccaggactctgactgctgttcacgatggcatcttggaggatgttgtctacccagctgagattgtggggaagcgtgtcagataccgtctggatggttccaagattatcaagattttcttggacccaaaggagaggaacaacactgaatacaagctggagacctgcactgcggtctaccgcaggctgtgtgggaaagatgtggtctttgagtaccctatgaccgaaaatgcataaatatgatgccctctggatatctccactctatttcgttgattctgaatgttatgttgggtctccctatgtacttcaaaaaacatagttttgatgctaaagttgcctaggaatttggtacggtgaagtggcagtggacgtgaacaatgttaagttttgagcatttaaattaaacctttgccctgataacgttgcgagttattt

SEQ ID NO: 24105 - DNA, 865 bp, Zea mays
  Clone ID: LIB3607-027-B8_FLI
cgccgccttttcgtccccgcgtcggcgtcgcggctccactgggcgtacgcgtcaccggcggaaggcgagggcaggcggtggtcgcgatggcgtccgccgacgcgcgcttggcggggattgcctcctccatccgcgtcatccccgacttccccaagccagggatcatgttccaggacatcacgacactgctgctcgaccccaaggcgttccgtgacaccatcgacgtcttcgttgagcggtacaaggaccaagggatcaccgtagttgctggtgtggaagctagagggttcatttttggtcctcctatcgctctagccatcagtgcgaaatttgtacctttgaggaagcctaagaagttgccaggcgaggtgatctccgaagaatattctctggaatacggaactgacaagatagagatgcatgttggagctgtacaggccaacgatcgggctcttgtagtcgatgatcttattgccaccggtggaacactctgtgcagctgtcaaacttattgaacgtgttggagcaaaggttgttgagtgtgcttgcgtcattgaattggcagaactgaagggccgagacaaacttggggacaggccagtttttgttcttgtcgaagcagatgcttgagcggaacttgggacttctcttctcagtgagttagagttggtgctgttgatgctacctctctgtcaacaacaaagtttcccatgttggctatattcttgctgacacgtaataaagtttcattccaaattgtgatcccctgaatgatttgtcaatgtagacatgattgctggtccttgtatactgtggcttattattcacatcaattaaggataatcctgattggagcttatcggtgc

SEQ ID NO: 24106 - DNA, 1360 bp, Zea mays
  Clone ID: LIB3607-027-G1_FLI
cactcacacagccatctctcccagtgtcccagctcagcttagcaatccgtctctctatctacaggcgggggaattaatagatggagggcaaggaggaggacgttcgcctgggcgccaaccgctactcggagcgccagccaatcggcacggcggcgcagggcacggaggagaaggagctgacgtcgtggtccttctaccgggccgggatcgccgagttcgtggccaccttcctgttcctgtacatcagcatcctgactgtgatgggcgtgagcaagtcgtccagcaagtgcgccaccgtgggcatccagggcatcgcgtggtccttcggcggcatgatattcgcgctggtgtactgcacggcgggcatctccggcggccacatcaacccggccgtcaccttcggcctcttcctggcgcggaagctgtcgctcacgcgcgcgctcttctacatggtcatgcagtgcctgggcgccatctgcggcgccggcgtcgtcaagggcttccaggagggcctctacatgggcgccggcggcggcgccaacgccgtcaaccccgggtacaccaagggcgacgggctcggggcggagatcgtcggcaccttcgtgctcgtctacaccgtcttctccgccaccgacgccaagcgcagcgcccgcgactcccacgtgcccatcctcgcgccgctccccataggcttcgccgtcttcctcgtgcacctggcgaccatccccatcaccggcaccggcatcaaccccgcgcgcagcctcggcgccgccatcgtctacaacaggtcccacgcatggaacgaccactggatcttctgggttggccccttcatcggtgctgctcttgccgccatctaccacgtggtcatcatcagggccctccccttcaagagccgtgactgattatacgtacattgtttattaccaacagcaaccatgcagcatacgaatcatcgttattaagctatatatgtataatatccagcatgtcttgttaattactagtatatgtgctagtaagtggtgcgtgctcgctcttccatcgctgtcgtcgtctcatctgctattgttcgtcatatatatatgtccatgtgagctagctagtgtgtatcacgcgcggaggccagttcagctagccatcagtctgcaatgcactttgtgacttctctgtttagtcctctctcgcttgggttttggtacggtgaagtatataaactaagcatgcatatgtgtaaaaattcaaattcaagtgtatgcatgcatgccaataatgaaagttaagaagaagactccctgtttatgataagatgttgttgtaccgatttatttgatgtgtccaaacgttgtgactttggttc

SEQ ID NO: 24107 - DNA, 1464 bp, Zea mays
  Clone ID: LIB3607-028-B9_FLI
ggccgcggcgggacacaccgcctccgccgaactaacgcgacgacgacgcacggcggcctcgtccggcaccggcaggagcgcgatggggcagaagcgcgccttgctggtgggcatcaactacctgggcacggacggggagctgaagggatgcctcaacgacgtggcccgcatgcgccgctgcctggtgggccgcttcgggttcgacgaggccgacatccgtgtcctggccgacgccgacccgtccacgccgccgcccactggggccaacatccggctggagctcgagcggctcgtggcgggcgcgcgccccggggacgcgctcttcttccactacagcggccacggcctgcagctccccgccgagactggggaggacgacgacaccgggtacgacgagtgcatcgtgccatgcgacctcaacttgatcaaagaccaagatttcacggatcttgtggccaaggtccctgacggctgccgcttcaccatggtctcggactcgtgccacagcggcggcctgatcgacaagaccaaggagcaaatcgggaacagcaccaagcagaacagaacccagcagcgccgagagcgcgaaatgaagcctcctcctcccgctcccggttccgcactccgcgtctccctcgcgcgaatcgtccgtggcgtgctggagtctctggggtgcatccactgcagtcgttgccgtgtccagcagcagggcaacagcaatagcagcagcatcagcaaccggtcgctgccgctgtcgacgttcatccagatgctcagggacaagaccggaaggcacgacgtcggcgtgggctccatccgcacgacgctgttccaccacttcggcgacgaggcgagccccaaggtcaagaggttcatgaaggccatgctgttaggcaagctccggcacgacggcaaggaagcggaggagcagtcgcgcgttcccagggaggcagaggtggaggagaccctggcgcaggacgcgcacagcgtcgaggaagtgtacgcggggccggctgcggcggcggcggcggccagggtgccgccgcgcaacggcgtcctgatcagcgggtgccagacggacgagacctcggcggacgcgaccacggccgacggcatgtcctacggcgcgctgagcaacgtgatccagaccatcctcgccggggacggcaagaagcgcggcgtggcgctggcggtgacgaaccgagagctggtggtccgggcgcgggagctgctgtccaggcaggggtacacgcagcagcccgggctctactgcagcgacgagcacgccacgctgcccttcatctgctgaagacgaaataaactccgtgtacagtgaatttcaggcttcattagttcattttacgggatgctacgttgtgttgtgtgtgtaacagaattgacactttgtgttgactcgtggtgtgccgcagcctgcgtatgttatggtgttactgttacgttgtt

SEQ ID NO: 24108 - DNA, 1175 bp, Zea mays
  Clone ID: LIB3607-029-C9_FLI
ggaaaaatacacagggcacaatgtgcggaggcgccatcctcgcggagctgatcccgccgacgcggcgcgtggcgtcgaagccggtgacagaaggccacctctggtcggcgagctccaagaaagccggcagcggcagggacaagaggcaccagcacgaatacgccgacgatgacttcgaggccgccttcgaggacttcgacgacgactttgacgtgcatgaagacgacgaggacggccacttcgtattctcgtccaaatccgccttgtccccagccctgcacgacgggcgcgcggcgagccagaagaagcagcgcgggcgccagttccgcggcatccggcagcggccctggggcaagtgggcggcggagatccgcgacccgcacaagggcacccgcgtctggctcggcaccttcagcaccgccgaggacgccgcccgggcctacgacgtggaggcgcgccgcctccgcggcagcaaggccaaggtcaacttccccgcagccagcggtcgcgctcgcggtcgcgcgcgcccacgccgcggcgacgacggcaacccacgaaccgcgccggaaacgcagcacccagcacagcccgctctgctgcctcgaggagagagagagacgcagaggaaggaagggatcgccgccgtgaagccagaagctacggagtcgttcgacgtgggcggcggtctcttcttcgacatggccttccccaccttcccagcctcgccgccgccgcaggccgtggatacgtccttcgccggcagcaccgccacgtcggagaccgggagccccgcgaagaggccgagatgcgacgaagactcgtccgagggcggcagcggctccgcgctggagctcgctgacgagctggcgttcgacccgtttgtgctgctgcagatgccctactcgggtgggtacgacgacgactcactggacggccttttcgccgcagatgaggccgtgcagcaggacgtgggcaacggcatggacggcgtccgcctgtggagcttcgacgagttcccccccgtcgacggttctgttttctgacgtttgcttactacgtactactactattttctgcctggtggaatcatatgtgatagtgctgcatgtgtctgcctgatcgtcagattgtactccactctggatatttgtgctacgtactcgtctggtatttcc

SEQ ID NO: 24109 - DNA, 937 bp, Zea mays
  Clone ID: LIB3607-029-D12_FLI
gcgccggccgaggcagacacaacccgcagcaacaacttgcatcggcacggacgaccgattgagagcctcggcgttcgtacgccacgccaccaagagactctgtgcaacaagtgaagggacgaaatgtatccggccaagcccgccgcctcctccagccagccagcggccgagatggcgcagccggtggtcggcatccccatcagcagccccggcgcggtcgcggtcgggccggtcgtcggcaagtggtcctccggcctctgcgcctgctccgacgactgcggcctctgtaagcaaagcactaaccgctgctaccttcttctctctcttcacgcatgcactaatgactaaccgctgcctgcatatatctgcatccaacacaacgacgaacaggctgcctgacgtgctggtgcccgtgcatcacgttcggccgcatcgcggagatcgtggaccgcggcgcgacgtcgtgcggcgtggcggggaccatctacacgctgctggcctgcttcacgggctgccactggatctactcctgcacgtaccgctccaggatgcgcgcgcagctcggcctccccgaagcctgctgctgcgactgctgcgtccacttctgctgcgaaccctgcgcgctctcccagcagtacagggagctcaaggcccgcggattcgaccccgacctcggctgggacgtcaacgcgcagaaggccgccgccgccgccgccatgtacccgccgccggcggaggggatgatgatccgctaagctaagctagctacctcgtcgccgatccggcccaacctccaacgctaaactcagatgcgttgcgtcgtcagtcagatcatcgcgtacgtacgtgttttgtacgtatggtcgtgtatattaatttgtacgtgatgcgtatatatatataatgtcatgactgaatgtctgagtttcaagataac

SEQ ID NO: 24110 - DNA, 1164 bp, Zea mays
  Clone ID: LIB3607-029-G8_FLI
agcagaggctggtggccatgatggcgggcgccctgtcgtctcgcatccgacgcccacccgcgtctcaccagcacctcgcgggcctatgcggcgccgagcagcgcgcggaatggcagctgctgcagcacgtctccccctgcttcggcctcgccctccacggcgccaacctcgccatcctcgacgccgtggccgaccagcgcgccatccacctgatcgacttcgacgtcagcgtcgcgcagcacaccgccctcatcgactccctcgccagccgccgcgtggccggcacgtgcctcaaggtcacggccgtcaccgacccgacgtcgccgttcacgccggctctggcgcaggcgctggcggccacgggccagcggctcaaggagcacgcccggcaggcaggggtggagttccggttcagagcggtcagctgcgtcgccggagaggtcgaggcgtccaggtcgaggctcgggtgcgacgagacaggggaggcgctggtggtgaacctggcgttcgccctctcgcgcgtcccggacgagagcgtgtccccggccaacccgcgcgacgcgctcctccggggcgtgcgcggcctgcgcccgcgcgtggtgacgctggtggagcaggagctcggcgcgaacacggcgcctctggcggcgcggttcgccgacgcgtgcgcgcactacggcgcggtgctggagtcgctggacgcgaccctggggcgcgacagcgcgcagagggcccgcgccgaggcggccctggcgagcaaggcggccaacgccgtggcgcgtgagggccccgaccgggtggagcggtgcgaggtgttcggcaagtggcgcgcccggttcggcatggccgggctgcggcccgtggcgatcggccagggcgtcgccgaccgcgtaaagggacggctaggtcccgcagcacgtccgggattcgacgtgaagctggacagcggccggctcgcgatcgggtggatggggcgcgtggtcaccgtcgcctccgcctggcgttagccgtacgtagcacccctagtgatgagctaatcatcagctcccggttatcgacgcctatcattcagagtacctcaggaacagccgttgtgcaaccacgaacgaatgcctagtagttgtaacaataatctctctaattttttacggcaactggtcgttg

SEQ ID NO: 24111 - DNA, 1601 bp, Zea mays
  Clone ID: LIB3607-030-G10_FLI
gaagcttcaaacttaccccagttacccggcgcggttccttccttctgccgagcagagagcacaaaaccaagaaacagcagaggcggagaggtagctacctgaaccaatcggtgttgcaatgtctgcagcgggtatcaccagggcgccgatcgggcagaatccgaggctcgggtgctacgccccggggaggggcggaggcgtggtgaggtgctcgttgcagggcgcggtcgtcggcggccgggcggagtggcagagcagctgcgccgtgctgtccagcaaggtggccgcgctcggtacgcactccgtcaacggccacgtcgcgccggcgccgactcagaacggggcggtgctggatttggtccccgtgagtagtagtagtatcaatggcgccatcaccaagaacctgccgcagccgcttcgcatcgcggacctgtccccggcaccgatgcacgggtcgcagctgcgcgtggcctaccagggcgtgcccggcgcgtacagcgagaaggcggccgggaaggcgtacccgggctgcgacgccatcccctgcgaccagttcgaggtggcgttccaggccgtggagctgtggatcgcggaccgcgccgtgctccccgtggagaactcgctgggcggcagcatccaccgcaactacgacctgctgctccggcaccggctccacatcgtcggggaggtgcagctccccgtgcaccactgcctgctggcgctgcccggggtgccaaggagtgcctgacccgcgtgatcagccacccgcaggcgctggcgcagtgcgagcacacgctcacggccatgggcctcaacgtcgtccgcgaggccttcgacgacacggccggcgccgccgagtacgtggccgccaacggcctccgcgacacggccgccatcgcgtcctcccgcgccgccgagctgtacgggatggaggtgctggcggacggcatccaggacgactccggcaacgtcacccgcttcgtgatgctggcccgggagcccgtcgtgccgcgcaccgaccgccccttcaagaccagcatcgtgttcgcgcacgacagggagggcacctccgtgctcttcaaggtgctctccgccttcgccttccgcgacatctcgctcaccaagatcgagagcaggccgcaccgacaccgccccatccgcctcgtcgacgacgccaacgtcggcaccgccaagcacttcgagtacatgttctacgtcgacttccaggcgtccctcgccgagccccgcgcgcagaacgcgctggccgaggtccaggagtacacgtccttcctccgggtgctcgggagctaccccatggacatgacccccatgaccgccggctcctcctccaccgttgtttcctcgtccgatgatccctcgtcgtcttgattggcgctggaggctggagctagctccgaggacaagtcgtcgagtagggacgttggttttctgctcatgtcgtcctactcgatcgccccctcgctgcggccggagtaattaattttgagtttccttaaatctttcgtggtaatagtattacgtacgtgtaattgttcaaaatcatccgcggtgaatatatctgtgaaacagtactagatgac

SEQ ID NO: 24112 - DNA, 1606 bp, Zea mays
  Clone ID: LIB3607-031-C6_FLI
gaaaagaaaaagggaaacaaaccaagctagctagagaaaagaagaagctggtactagctagctagctagcttagctatgggcaccatcgtggacgctgacgtcgggttcgcggtgaagaggacgagcaggtcgctggtgccgcctgcgtcggcgacgccgcgggagacgctgcggctgtcggtgatcgaccgcgtggcggggctgcgccacctggtgcggtcgctgcacgtgttcgccgcgggcggcgacaagaagcggcagcaggcgacggcgacgccggccaaggcgctgcgggaggcgctggggaaggcgctggtggactactacccgttcgcggggcggttcgtggtggacgacgcggagggcggcggggagacgcgggtggcgtgcaccggcgagggcgcctggttcgtggaggccaacgccgcgtgctcgctcgaggaggcccgccacctcgaccaccccatgctcatccccaaggagcagctgctgccggagccctcgccggacgtcaacccgctggacatgccgctcatgatgcaggtgacggagttctcgtgcggcggcttcgtggtggggctcatctccgtgcacacgatcgcggacggcctgggcgcggggcagttcatcaacacggtggcgacgtacgcgcggggcgccacgtccgccacgcccaagcccgtgtgggcgcgcgacgtgatcccggacccgcccaagatgccggcgcctccgccgcgcctggacctgctggacctgcgctacttcacggcggacctgagcccggaccacatcggcaaggtgaaggcgcggtacctggagtcgacggggcagcgctgctcggcgttcgacgtgtgcgtggcgcgcacgtggcaggcccgcgtgcgcgcgctgcggctccccgacccggccgcgcccgtgcacgtctgcttcttcgccaacacccgccacctgcttccggcggcggcgacggccgggttctacggcaactgcttctacacggtgaaggcgacgcgggcgagcggggaggtggcggcggccgacgtggtggacgtggtgcgcgccatccgcgacgccaaggcgaggctgggcgccgacttcgcgcgctgggccgcgggcggcttcgaccgcgacccctacgagctcaccttcacctacgactcgctcttcgtctccgactggacgcgcctcggcttcctcgaggcggactacggctggggcaccccgacgcacgtcctgcccttctcctaccacccgttcatggccgtcgccgtcatcggcgccccgcctaagcccaagcccggcgcccgcatcatgaccatgtgcgtccaggagcagcacctgcccgagttccaggagcagatgatgagccagcaggccgcctaggcctagctagctcctgatcatccatgttcatctatatcgtcatcgtcatcatgcatgcggcgtgcacgtttggaatatttgttaatcaatcaataacggtgaggtgaggttgctattgtatgaagtagtagtaacacctcaacaacaacaacccaatgcaatgggaactcgcgtgtaatttgctccttcttcttcaaatataattccgcctcaattgtatgt

SEQ ID NO: 24113 - DNA, 1928 bp, Zea mays
  Clone ID: LIB3607-031-G7_FLI
aagccctcctcgtcgtccaagaacaagaagaagaagggcttcttcttcttcttggacggcgcgggcgcggggacctcggcgggcttggtggggaggtcggtcgcgcggctggtcctggacgacaacaacttcaccgggggtatcccggcgggggtgagctcgctgggcctgctccagtacttcgacgtgtccgggaaccagctgcagggttggatcccctcctccgtcttcgcgctcccggcgctgcggtacatcaacctctcccgcaaccggctggcgggccagcttcccgccaccacggcttgcgcggaggcgctggcgttcgtggacgtctcggcgaacctgctcactggggcgcgcccgccgtgcatgcggggcaactcctcggcgcgcacggtcctcgtcgcgggcaactgcttcgccgacgccaagcagcagcgggccagctcgtactgcaaccccggcgcgctggccgccgtgctgccgccgccgcagggcaacggaggaggaggagggcaggggacggggaagggccgcgagatcgggatggttcttgcgattgccggcagcgtcgttggtgccgcattgctgattgcgctggccatggtggtggtcctgaggagggcgaggaggcagcgtccggaggcgaccatcctgccgaagtcgcccgcggcgacaccgaccaacaaggcggatggatggaaggctccggctaaggcaacccagaagattattactcctgctgataagagacatgcatcacaagctgcaagggtgaatacactggaagtaccagcctaccgagtgtgtacactggaggagctccaagaagcaaccgacaatttcagttcctccaacctaatcaagactagtcctcttgcacaggattataatggtcagcttcaagatggttcacgagtactggttagatgtttgaggctgaagccgaagtactcctcccagagccttgtccaatacatggagattatttctaaacttcggcaccgtcatttggtcagcatcattggtcattgcattgtcagtgatgaggagaatcctaataatgcgagctcagtctaccttgtttctgaatgcgtgacaaatggatctttaagaagtcaccttactgagtggaggaagcgtgaaatgctcaagtggccccaacgggtttgcgctgccattggcattgcgagaggggttcagtttctgcataatctgactgctcctgggttcgtacagaacaatctcaacatagaacatattctgctggacaagaccctcacgtctaagatcagcaacttcagtcttccaatgatatcaactagcaagaacggcaagattctctcagagaccccatttgctgtccatgaagacaatgatatcggcagtgctcagaacgcggcacaaggtgacaaggaagacatctaccagattggcctaattctcctggaggtgatcacaggcaaaccaacagagtcccaaagccaactggagtccctgaaagctcagctaagtgaggcgctgactgaagacccagacaggctgaaagacatggcagacccggcgatacacggtacttttgcagtggactcactgagcacagtcgccgagatagccctcaagtgcacggctggcgacccaagcgaccgaccttccatcgacgacgtgctctggaacctgcagtactccatgcaggtgcaggatgggtgggcgagcagcgagagcttaggcttgagcgtcaaatctcaggtttagataaaggcgcagtgattcggttcctatgcaaatgatgattatgaagctctatgcgccatcactctgcctctagttttctggggtttttttttgggaggagaggtcgttggtatagtctctactgtatatacgtggaccttacctttttcagaactgttgtttatggtacctgt

SEQ ID NO: 24114 - DNA, 1226 bp, Zea mays
  Clone ID: LIB3607-032-A5_FLI
gaagagagtttgcaagaagcactggtcaaatctctgttcaacctgcggggactccaggaactatcgctgtcttctaaaatgtggcagcagggaagcactatgtggggagactgggagccaccaaggcagcttcggggcctgatcgttcaaggcattgtcttctcacgacagcctcgatggatcaaccgctcctgcctgccacacctctgcttcttatgtctgatggtgcacgctgttgaagcacaggacctagataacctagggaggttgccagagctccggtacctcaagctagagggtgtcatctggcctccaagggtactggagttgggaacacaatggtgtgccgttggagcagttcccagtaatggatgtgatcgaagatcttgacttgggcctggataacttgctttcacttgagcaagtaatagtcaaagtcaactgcttaggtgctactgctgcacaagtgcaggagctggaggctgtggccatgggtgccgtggaaaatcatgccaaccgtccaaccataaaaatggatcgagcatatgaagaaaatatcttatctgatgaaaagctggaggctctgcttcagcaacacattgaactagaactagaaggcggcgtgctccagctgaaggataaacctgatgctttcttcatcagccagctacggttgtatcgacatcttcagaaagccgttatttcctacgactgtgcgggtgccagcatgtgtgaggtgctgaaagtggaagcagcttgtagacatgcagccgaggttcatcctaaccatccaagtattgaactgatccgaacaaataccgatgaaatggcctcctcatctgaccatcctaacacagaggtttgtcctagctgcttgaatgtccaacccagccgcaggtaaacgtgagttgtttaagtacggaagagacaggtcctgttcagcaagatgattacaggcatttgcagggcattttggatttgtggttcttagtctaacatcacattgaagagggagatgaacacaagtgatgcagtttatgtgttatctacatttgtctctatttttgtaagatggccatatatatttcctcgaaagtgatcttgattgattatgtgtgaagtgtattttttttaatgacatgggtcatgtatttccttggaaacgaccatgggactggttgtgtatttgcttgaaagataaggatgatataatttccttgaaaatc

SEQ ID NO: 24115 - DNA, 592 bp, Zea mays
  Clone ID: LIB3607-032-A6_FLI
gcgacgagggagggaaggctcgccgcgagatctgggggagctcccattcccaggatgcacgacttctgcttcaccatcccctacgggttcgccgtgctggccggcggcgtgctgggctacctccgccgcggcagcaccgcctccctggcggggggcgccggcgccggcgcgctcctcctcctcgcgggcttcgtcagcctcaaggccttccagaagcgccgcaactcctacgtcgccctcgcgctcgagacgctttgtgcattagccttaacttccgttatggggcaaagattcctcgagacttcgaagattatgccagctggtgccgttgctggtctcagtgccgtgatgtccgcattttatctgttcaaaattgcaacgggcggcaaccacatcccaccaccaaagaaagagtaaaccaggctttaacttgtaaattatgtttgattgatgtcgaagaagactacgagcgattgtgttgtctagttgcatggtaacttcagggactaacatcttcttccccatttgtaattcggctagaatgtaccatggtttgtgaacaatgtaaaagaaataaagatgtgattcacgg

SEQ ID NO: 24116 - DNA, 223 bp, Zea mays
  Clone ID: LIB3607-032-D12_FLI
acgattgcggtcgacggaggtatgactgtgaacgggttttaccctcccaagccctaggcggcagctgccatgtttctttgtgctgaggaaacgacaatagctgttgttcttggttgttgagaaaaaaaatctaataaaatgtatgtaaaggtaaggttgtcatgttgatactgttcattacattacataattctatcagggcaatgtgaagaacgttgtgttt

SEQ ID NO: 24117 - DNA, 657 bp, Zea mays
  Clone ID: LIB3607-032-F11_FLI
tttcaacctctctcccctcgactgttgggtgtggtggatttcctccgctcccgccgaacggtcgatcttttgcatggcagcagcggcggctagctccaaggggcgggcgatcgctgggagcttcgtcagccgcgtcctggccggcaaggccgcctccccgaggagggccgtgcacgcctcgtcgtacgacaagaacccggaggagcaggtgcgcccggcgttcgtgccggacgatgtgatcggccgcggcgcggggagccccgacaagtactggagcccccaccccaagaccggcgtgttcggcccggcggcggtggaccccaaccagctgggcgtcgccgctgacgctgcagcagcaggaggcacggttctggaccagaaggtgtggttccgcccgctcgaggacgtcgagaagccgccccccgtcgcctgaaccgcgccacgcccacgcgacgcgacgctgccagcccacactgctgatacaagggcggcggccgggagggagagtcctggcaacgtcatgctcgtgcctgtaataagaacaagcaggagatgtgtgtgcctgtgatgtaccggtgtcgttatcagcgttatacaagtacttgcggttcatatgatcgataaccactagaacatgagtgtgcagtacgttcaaac

SEQ ID NO: 24118 - DNA, 908 bp, Zea mays
  Clone ID: LIB3607-032-H2_FLI
gcctcccaagtcccacccccactccctcgctcaccagaggaactagcggaccaggcaaagccgagccgcaccgcaaccgcgaagatcttgcgtggcctccttttcccagctcgtcactgtgccgctcgtgccctacactcccggtccgcccaaccaataatccatccatccatccatccaccaccaccccgctgcggcgatgtgcggcggcgccatcctctcgggtttcatcccgccgtccggggtggcggcggcggcggcggcggccaagaagcagcagcagcagcagcagcggtgccgtgtgactgcggacctgctatggccggggcccggcagtaagggagctcctccaaaggatgtccaaggagatagagcagtaaaaaagcgcggccggaagaaccagtacaggggaatcaggcagcggccttggggcaaatgggcagctgagatcagggaccctaacaagggcgtccgcgtctggctcggaacctacaacaccgccgaggaggcagctagggcatacgacgccgaagctcgcaagatccgcggcaagaaagcgaaggtgaattttcccgatgacgcgacaggcactcgtcacaggccaacgaccgatgagatctttaacaacctgaagaacgacgacaacaacaacaacgatgatctgtttgcgatgtttgcgttcggtgacaataagaagaaggttcctgcagcgaagccagccgccgccgagggtggcagtggcagtggcagcttcctcgtccctgcgcctgcggtggcggtggtgcccggtaataagaggaggtcgtccgcgaccaacactatgctctccgtctccgacgaccagcgcagcaactcctacggctccggctcctccgacttggtggggtcgtggtcgtgggacgacgacg

SEQ ID NO: 24119 - DNA, 1122 bp, Zea mays
  Clone ID: LIB3607-033-A2_FLI
gaaaaaaaaaaccagagaggttgagcaagaaccgaggcggatccgccttttgtccctcctgcccgagggctagcctgccgccgcccccgcgagagatcgagaggaggcgctgttcagttcaggggggtgagaagccgtgggggaaaagatgatgcgggagacgtacatggacgtgctgccgccggtggaccacatagccgcctcacggagcggcggctggttcccgggcgcggcgcgtctctggacggcggcggagaacaagcagttcgagcgggcgctggccgggctcgacctctgccgcccggactgggagaaggtggcgcgggccatcccgggccggacggtgcgcgaggtcgtcagccacttcaagagcctccaggtcgacgtccagcagatcgagagcggcctggtgcccatgccggtctacggcgccggggccggggccggctcgttcaccctgcagtgggacggctgctacggccccgcggactcgaggcacaacggctaccgcttcggaagcggaggctgcgggaggcggcaccacggccgcaccccggagcaggaccggaagaagggcgtgccgtggacggaggaggagcacaggtcctatatcctatatgtggtgatgatgcgagagctccaccaaacgcctgtgtgagattggcgatgtgagtcagagttccactacctcctcggcgtctctctgcatcagctttcgcagctccctttttggccctgctgcttcccttgctcggaaaggcgtctgcggatccttgtgcgagcaccaaagggcgcttctctgtaggctgtagccaggccaagccccaaaaaaaaaatgcagccatcttcttctcttctgtgggtggttgctcgtgctttttctggctcctcgctctgcaagttgcagcgaaatgcagaacacgaggcacccactgatgatgatggagatggagggcactgttccagagaaggaagcttctggtgcgggggtgtgtgtgtgtgtgtgtctatctactgctgagcttgccgtcagtgctgctgcagcaagatctgatgaaaagcctggaattcttcaggctagttgccattgccagtcccagtcccagtcccagtcaccttctc

SEQ ID NO: 24120 - DNA, 469 bp, Zea mays
  Clone ID: LIB3607-033-B9_FLI
gagacgtcgcgtgggcgccaaacctgggccttccaaagtccaccatcgccagcgcctctcaggatggaacagttgttatctggacagcagcaaaagaaggcgagcagtgggaaggccggttgctgtatgatttcaggacccctgtgtggaggctgtcgtggtcactgactgggaatatactggcggtgtctgacggcaacaacaatgtgaccctgtggaaggaagctgtggacggcgaatggcagcaagtgacgactgttgagccataggtctctagagttgtccctcgtctatattgccttaatacttgtagtttttgtgtacctatggccctgtgtgggtagcaagcaggccacggtgcatgactacttgagacgtgatttcaggctcgggcagaagtgaaaaatgaacttgttgtatatgtggagcattctgtttctcgattcagtgccttttctttcccatggtt

SEQ ID NO: 24121 - DNA, 1350 bp, Zea mays
  Clone ID: LIB3607-033-F1_FLI
gataaatctgccggtaggtcgatcaaggagagcgcggtccacgtctccgttccgttccgttgcggggaaggaaggaaggagagagaggagcgatggcgtccgggtaccgcgcggaggaggagtacgactacctgttcaaggtggtgctgatcggggacagcggcgtggggaagtcgaacctgctgtcgcggttcgccagggacgagttcagcctcgagaccaggtccaccatcggcgtcgagttcgccaccaagaccgtccaggtcgacgacaagctcgtcaaggcacagatctgggacaccgccgggcaggagaggtacgcccttcttcgctgttgtacgctatgcaggttgcagatgcagctctaggatctgtgcaccatttttcagggcttcctggttagtagtaaggatttagttaatggttgctaatacggaaacttaagcgtaaccgacggtttccaacatacacctgtgcttctgattcgcatttcaaaaatgaaaccaaaccactggcctgttcatgactatgttttacggctgaatacgagattgatgtccatactactacagttgggagttcatgccgtaatgaatccatcaattaacatagcatcgcgatcgcgatcactaaaaagcgcgcgcgcttttcagattgttgcttgcgtatcacattttattcaactccagctaactttacgtgcgtttcgctagcgtgccattcagtgtcctcgaccctttcggcgatcgcagctgattgcttgtgtgccggcctcaggtaccgcgccatcacgagcgcatactaccgcggcgcggtgggcgcgctggtggtgtacgacgtgagccgccgcaccaccttcgacaacgcggagcgctggctgcgggagctgcgggaccacacggacgccaacatcgtggtcatgctggtgggcaacaaggccgacctgcgccacctccgcgccgtctcgcccgaggacgcggcggccttcgccgagcggcacggcaccttctccatggagacgtcggcgctggacgccaccaacgtggagcgcgccttcgccgaggtgctccgccagatctaccacgtcgtcagccggaacgcgctcgacatcggggacgaccccgccgcgccgcccaggggcaagaccatcgacgtcagcgccgccaaggacgaggtctcccctgtgaacgcgggcgggtgctgctcgtcggcttagccctggtcaaacatacgctttgctgattaaggaagacataacgtgatgacaatctttgttgacttcgtcaagcggttgggggtggttggcgctcgtgatgtgtttgcagactagcaatcgctgtcctcgattgt

SEQ ID NO: 24122 - DNA, 870 bp, Zea mays
  Clone ID: LIB3607-034-F4_FLI
cattcgagaagccgaagaaaattcgaagacgaggagcagctacactgcggacggacttcgggcatggagggccagttccaggttggcaaggaggaggtcatccaagcatggtacatggacgacagtgaagaggaccagaggcttcctcatcatcgcgagcccaaagaattcatccctctcgacaaactttccgaactaggaatattaagctggcgcctaaatgctgatgattgggagaatgatgagaacctcaagaaaattcgtgaagccaggggttactcttacatggacatttgtgatgtgtgcccagagaagttgccaaattacgaggctaagataaagaatttctttgaagaacacttgcatactgatgaagagatacgatattgccttgagggtagcggctactttgatgtgagggaccaagatgatcagtggatccgtgtagcggtaaagaaagggggcatgatcgttttgcctgcaggaatgtatcaccgctttacgttggatagtgacaactacatcaaggcaatgcgtctatttgtgggcgagcctgtctggacaccatacaatcgtccgcatgaccatctcccggctaggaaggagtacgtcgagaaaatcatcaaccgaggtggaaaccaagccgtcgaagctcgttgagcgtgtccactctacatgtcctcctgccgtctcagcctcttgtgttttacactctacaactcctagtaccgccgaataagatttgctatctgcaatgtgctcatgccaccaccgtgtgtgccagttaacagtttgcacgaaacccgcttaaaatcttccctagatattttgttgtacgaatgaatgacatgtggtgtttgataaatgatg

SEQ ID NO: 24123 - DNA, 1553 bp, Zea mays
  Clone ID: LIB3607-034-G4_FLI
cgccccacggcttccgccgcctcctaaccctagaatcttcgagaagcacccggcgaagagcgcgctgccacggcgctttccggaaacttcttggagagagagagagagagagagacggccccgcagcggcggaggcggagatgggggcgtcggatctagaccggcagatcgagcagctgaagcggtgcgagccgctcacggaggcggaggtcaaggcactgtgcctcaaggccatggagatcctcatcgaggagagtaacgtgcagcgcgtcgacgcccccgtcaccatttgtggagacatacatggacagttctatgacatgaaggagctgttcaaagttggaggtgactgcccaaagacaaactatttgttccttggggattttgttgaccgaggattttattctgttgaaacttttttgcttcttttggctttaaaggttaggtatccagaccgtattaccttaatacgaggaaaccatgagagcagacagatcacacaggtttatggattctatgatgagtgccttcgcaaatatggctcagtcaatgtctggagatattgcactgatatattcgactatttaagtttgtctgcacttattgagaacaaaatatttagtgtccatggaggcctttctcctgctatcacgacactggatcagataagagtaatagaccgcaagcaagaagtacctcatgatggggctatgtgtgaccttctatggtctgatccagaggacactgtagatggttggggactaagtcctcggggtgcaggattcctctttggtggaaatgtggtctcatcatttaaccattcaaacaacatagattacatttgtcgtgcacatcaacttgtcatggaagggtataaatggatgttcaatagcaagattgtaactgtatggtctgctcctaattactgctacaggtgtggcaatattgctgcaatcctagagctggatgagaacctgaataagcagttccgcgtatttgaagctgctccacatgaatcaagaggtgttcctgctaagaggccagcaccagattactttctgtgatgctacacagcgaacgcttgagcttactgtgctttcaagcgctggacctcatgttgcaagaagagctcaggccctacagctttccagccaggaggtggttttcaggatgtgtaaattgagtgtcatcttctcccttcaggtccatgatttgtaagagagttggattttggcatccagttttttcacagaacatcacccatttgagctggagaaatacgcccttgcgaaggggtttcatgtgatgtgctaaaagtacacgttgtaagatttttttgcgattgcataccccctagaaaaaccgttcctggaatatgtggcaatcaggaaatgtgtcgatgctctggaaagtgtaggagatttttgtagtagtcatttgcgcgtgctgttagggactagggagcatgtggtcaggggacactagcactagcttgtcggcatgcaatggtgtattgtaactgtctttatgcagcatctctaattcaaatagct

SEQ ID NO: 24124 - DNA, 1061 bp, Zea mays
  Clone ID: LIB3607-035-A9_FLI
ctctcccccattccaattccgagaacaggggcggcggagtcaaccaggtacgatgtgctcggtagcgaggctggcgtttgtgcttgcactggccatagccgcctcatcaattacggttgcggagagcagagattttaatatctttgctcagggcagcttgcctgatgcaaccaagggatcgtcaggtctagctgcaaccagtggaaagttgtgtcagttatgcgagcagtactcatccgaggcgctcctctatctcacacaaaacgagacccagactgagattcttagcattctacaccatgaatgtgccagccttgccccactcaagcagcagtgcatcacgctggttgactactacgtaccccttttcttcttggaggtctccatggttacccttgagaagttctgcgagtcgatgcatctctgcaagaaggggatgaagattagcctacccacccgggagggtacttgtggtttgtgccaccatgttgttgttgagattcttatcatgcttaaagaccccaacatgcagctggaagtaatcgacctactcaccaaaacatgcagcaaggcgcagaactatgaacagcagtgcaagcggctggtcctcaagtatattccactgattctggtgaagggccagaaattccttgagacaacggatgtctgctctgtgatacatgcatgcaaagcaggcacacaagcatcaatggaagccatgcctctgtctgccatgttgtgaaggtgatgcgaatcagaataaggcttatttgcctaggagatcaaattggggagaaacgatgaaaagtcagatgactgttttaagctctcttcctctattgctgaaacactattgatcggtgaaaattcgtctgtgtaaaattcttgtgtaaatttgggggtatatccagtgtttctctgaagtatacagcaactgcagctacaccaatctcttcggcattgggttgagaagttctaagcagtaattgcattttactgtatcatctatttgtttgtaactactgagagttattaattccttgtttctctgttgctctgac

SEQ ID NO: 24125 - DNA, 520 bp, Zea mays
  Clone ID: LIB3607-035-H1_FLI
caccgctgcactgaatcccatcctcttccaggtcctcatcagtccgatgcttgggggaaccaccgaccagaaagttgtggatgagaaccttgagaagctgaagaaggtgctagaggtgtacgaggcacgcctgaccaagtgcaagtaccttgctggagacttcctcagcctcgccgacctgaaccatgtgtctgtcactctctgcctgtttgctacgccctacgcatctgtgctcgacgcctacccgcatgtgaaggcctggtggtctggtctgatggagaggccgtctgtccagaaggtcgctgccctgatgaagccatctgcttgaaacggttgccctgtcaatcggtgaatggaataagccaagtctgttctgggttgtttgcttgttcagtgatgtgtcttctatgacgaaagttgagtgcctatgtgtgagcatgcttgcttgtaacgagaccttgaattgttcggaaatgagcattcctgtgctcttctttaaaataaactttgccttaggttc

SEQ ID NO: 24126 - DNA, 1537 bp, Zea mays
  Clone ID: LIB3607-036-A5_FLI
tcaatcagagcgggcggggaggagaatacaaggccccttcgtctcgtctcccaccaccaacccttcctccgcctccgccgccgccgcctggagctgaaagtatcccagatctgagcccgccttccgatggcgatgccttcctccccttcccccacacgccttccaacggcctcctcctcctactggtgctaccagtgcgaccgcttcgtgcgcgccgcctccccgctctcctcccccgcctgcccctcctgcggcggcggcttcctcgaggagatgagcgcgccgccgccacgaccggcctacctccgccgcccccgcgcgcaccacgccgccgactcccgcgcggcctcgcccttcaaccccgtcatcgtgctccgtcgctccccgcccgccgccgccagcttcgagctcctgtacgacgacggcgcggggtcgggcctccgcccgctcccggagaccatgtccgacttcctcatgggctcgggcttccagcgcctgctggaccagctggcgcagatcgaggccgccggcgggctggcggccggcgcccgcgacgccccgccgccggcgtccaaggccgccgtccaggccatgcccgttgtctccgtcgccgccgccgacgcgcactgcgccgtctgcaaggaggccttccacctgggcgccgaggccagggaaatgccctgcgcccacatctaccacgccgactgcatcctcccctggctcgcgctccgcaactcctgccccgtctgccgccaccagatgcccaccgacgccatcccccttgagcaggaggaggaggccacggtcgggctcaccatctggaggctccccggcggtgggttcgcggtcggtagattcgccggcgggcggacgcccgaggagcgggagctccccgtcgtgtacacggagatggacggcgccgggttcaacagcggcggcgcgcccaggcgggtctcgtgggggtccaggcaggccgcgtccacgaacaggggcaccgtccgccgcttcctccgcaacgtcttcgcctgcttcgggcgcggccacgcctcgtcctcctcgcgctcccacgccgtgcctgagctcaacgacgacgcgttcagccatggctccaggagccggagcaccagctggaggctcgaggacgggcatgccgacgccacggtgcagagttgacggacgaaccaactcctgctgcctgcctccctgtctctagtacagcacgctgcaagaagcgaatcttgttgcttttgtttcataattcattcgtcttgtattgtgtttaccatactgctgctcctactcctgcctgctacttagaagaaaaagaggaaggggaaggggaaggcgaaggaggaattggaggatttgtagaacaggtcgattgcaaggagaccatgcaagggttttcattgtaggtgggggattgttttttttttgcttcttctgtagctgtatgtatccatgctagtcctatcctttcctatgttgcagcaggatacttgtgctggctgcttgcttggcagggcagcagcatcac

SEQ ID NO: 24127 - DNA, 489 bp, Zea mays
  Clone ID: LIB3607-036-B5_FLI
tgaccaaccaaccaattccatttgtgcttggtggatctctgaatgtaatggaagccaacattaaactgttagctaaggactcaccttatggtgataatctggactacatctacactgagcttcctgctgcgctgtctcatgtgcataaactctcgataacctcgggtctcttcgtttatgatcagctgcaagggttttccaaaacctcagccagattcatcaatctgaggcatctgaccatgtatttgcctctttatggggaacctaagtcaattagtgggattcttcgcttggcctacctactggaattggccccagctctagaagaattggaattgcatgtgagtggcttactaactctataatctgttatagattttctcaaggtatgccttatctgtagaagtttttgtagagcaattgcagcactagtgtaccaggcatattgtttatcatctttgctaattttgaattgtctgaatatttatt

SEQ ID NO: 24128 - DNA, 970 bp, Zea mays
  Clone ID: LIB3607-036-G7_FLI
cagtatctgctcctgcaattgcccctgagcttgcatcaggggctgttggtgtgcctccacctgttagtgctgtggtacctgagctgtcagaactggatgttcacaatgaggagaagttgctgagggagctggaggaaatgggttttaggcaggtcgatctcaacaaggaaatcctcaggcagaacaattacaatctggagcagtctgtcgatgacctatgtggcgtcaatgaatgggatcctctccttgcagagctggaagagatgggatttgatgacacagagatgaacaaggagctgcttgcgaagaatgagggaagcatcaagcgagctgtgatggagctcattgccagggagaagaaggacaagtgaagatcgtgtgctatctaagtatatattcgtaaataatgagacggctgtgccactgcggtgcagccctggtgcgtctcagagcttgcttatggtgaactcttcgtgttaggtttcttccttatatctgtcgtgtctgcggtgtcgatgaactatctagtatgtggagcgtgtgcgtctcagcagttaccctgccatgccacgtggactggctgtcgtgcctactgtctgttaccatgtatatatataaaaaatgatgcgtggaccaatgtttgatgctggcgctcttgccctcgtgataatgtattagcggttggcttgttgcttgcttgtcagccccagcgatttggtgatatgcactgccagtggagtttgcttcacaaagaatggaatggaacctggcgaccctacgtggagtttgcgcaccgatgtaaggagctggaggccggctccgaggactattgcttccacttcctatatgtggcacgctgaagggcaatgccgtgttttagttgaaattttggccagtccacgagcaatgtggtgtttctactctctgtatctctactaatattaccaaaatcaaatcctctgattatctc

SEQ ID NO: 24129 - DNA, 1164 bp, Zea mays
  Clone ID: LIB3607-037-E6_FLI
gaccaattaactagcttcttctagctctagctaggctcgtctgctgcaagaaggtaacagcgcaggcatggaggggaaggaggaggacgtccgcctgggcgccaacaagttctcggagcgccagcccatcggcacggcggcgcagggcacggacgacaaggactacaaggagcccccgccggcgccgctcttcgagcccggggagctcaagtcctggtccttctaccgcgccggcatcgccgagttcgtcgccaccttcctcttcctctacatctccatcctcaccgtcatgggcgtctccaagtccacctccaagtgcgccaccgtcggcatccagggcatcgcctggtccttcggcggcatgatcttcgccctcgtctactgcaccgccggcatctccggcgggcacatcaacccggcggtgaccttcgggctgttcctggcgaggaagttgtccctcaccagggcggtgttttacatcatcatgcagtgcctgggcgccatctgcggcgcgggcgtcgtcaaggggttccagcaggggctgtacatgggcaacggcggcggcgccaacgtcgtcgcgcccggctacaccaagggcgacggcctcggcgccgagatcgtcggcaccttcatcctcgtctacaccgtcttctccgccaccgacgccaagaggaacgccagggactcccatgtgccgatcctcgcccctcttccaatcgggtttgccgtgttcctcgtccacctggccaccatccctatcaccggcaccggcatcaaccccgcgcggagccttggcgccgccgtaatttacaaccagcaccatgcgtgggctgaccactggatcttctgggtcggccccttcatcggcgctgcgctggctgccatctaccaccaggtgatcatcagggcgatcccgttcaagagtaggtcttaaaggagccgatgctgctgcttcgagatgctgccggtcttgaaaggatggattcgtggctgtttcaaatgatcccctactatgttacgtggagttccattcctctttcaaagttcggagctgcttttatccgaacccagacttgtaattcatctgtaccaattgtgtaatatgccgcgcctctgttatgtgcaattcaaaattatgagacagcgagtcaagctttaagagtt

SEQ ID NO: 24130 - DNA, 1531 bp, Zea mays
  Clone ID: LIB3607-037-H5_FLI
ggacgaggcaagtgaagaaaatggcaatgggatttcttatataagtgatgaacggattgctgagctggaagatgagcttcaggaagcaaggcaacaaattgaggcgcttgaggtaaagaacatgcactgccagtgtgagaaacttgaagagagtctcaaacaagttagcaatgaaaaggaagatctggtagctgcaattctggcaagcaagaatgaggtcgaggatctaaaaggagacatggtctcggcagctaaacattttgaagcccaactagtgcaccgtgaccatgagattgagaagtgcaagcaggaggctgagcaagtttctgaaaagtatttccatgagaaatccactctcgaatctgaaatccaaaggctccaggaagttgttaagagttttgaagagaacctaacaaaagttgctgatgagaaattgcagcttgaggcccagctaaaggaacttgaacagacttctaatgatttagatgactcttctgctgagattataaagctacaagaaataatcaaggatctgcaagaaagattggaaaatgactcaaacgagaagagtgtacttgaggaacgtgctatggagctggagcaagttcgtaggcagttagaggattcaagagctgaggctagtatggagctacaaactacaattaagaacctgaatcaagttcttcaagagaaagcagaacttgagaatcgtatgaaggatgcggagcaggcaaccagcgacctaaactccctggtcgcttccctcgacggcaagctgaaagccacagaggcgcagctcgaacagcttcacgcggagagagcagaagcaatcctcgagagcgagaaacaggtatccgagctgaaccaagccatcgcccgtctcaagacgcagctggagctgctgtcttcggagaaggccgcagtcgagaacaaggcgtccgctctgctgaccgatgtcgccgttcgcgacgagaagctgaaggagacggaccgccacctgcaccagctgcacctggagcacgtcgagctgatcggagcggcggacgccgcgcgggaagacgcgtcgggcctgcgctcacgcgtgcgcgagctcgaggtggaggtcgagaggcagaggctcatggtggcagacagcgcggaggggaagcgcgaggcgatcaggcagctgtgcttctcgctcgaccactaccgccacgggtaccagcagctccggctgctcctgcagggccacaggcggccccggcccatggtgatgacagcgtgatgagttgaagtggttgttgtcctggatgttgggacttgggaagtatgtcgaaactcttgacttgaagctgctgcttctcggtgtgttgtcctgacgacatgagtgagtttctatctggatgagcggatggtaggaggaagtcgaaactctacatagttcgaggagagcttgtgctctgtagttactttgcactgcggagttactcgtcaatttgtgctgtgtgatgtaaggagctagctatcacggtgttcccttctttattctctc

SEQ ID NO: 24131 - DNA, 854 bp, Zea mays
  Clone ID: LIB3607-038-D4_FLI
cgggggcggcaagcaaccacgggcggagctcggagcgtcctcctcctcccgtctataaattcccctccttttcttcctccatatataggggccatcagatccaagaagagggaagagcaccaaggaccttcggcgcccgttcaggatccacatcttcccgagcgagttcttggttgacctcttcccccttcggaccacctccaaggctcttggtgtagcttgccactctcaccaatcaagttttcatgtctgatctcgacattcagatcccaactgccttcgatcccttcgctgaggccaatgctggggactctggtgcggcagcagggtcaaaggactacgttcacgtgcgcatccagcagcgtaatggtcgcaagagcctgactaccgtccagggattgaagaaggagttcagctacagcaagatcctcaaagatctcaagaaagagttctgctgcaatggtacagtggtccaggacccagaacttggacaggtcattcagctccagggtgatcagaggaagaacgtctcgaatttcctcgtccaggccggcattgtgaagaaggagcacatcaagattcatggtttctgagcaaccgccgggtccatagcaaaccaaccctgcatgcagggccagcttattatatataatatctgaggtggagcatatctatctggctgtgtactgcaagcaggcctagtacgccgcctgcgcgttcctcctattacacatataggcccctccctgcgtgtatgcttgttaccgtcgtgtcgaaccttgtactacgaggctccatcgaacatcgatggcttgcttctttatcagaacatgtttgaataaacgctatttggt

SEQ ID NO: 24132 - DNA, 2082 bp, Zea mays
  Clone ID: LIB3607-038-E11_FLI
ggcatgtgcgcatgctcacacaggagatccgcaagtcgctcgacagacataccatcttgtacaccaccatggttgagctctcgaaggcactggaactgcagaattgtgctgtctggatgcctgatgagaccaggagcacgatgatcttaacacatcagctgagggaaagggatataatggacccacagaaacactcgattcctattgatgatccggatgttcaagaaataaaggcaaccaaggatgcaaaagttcttggcccagattcggcgctaggggtttctagccgaagcaagcatgaagcagggcctgtggctgcaataaggatgccgatgttaagggtgtcaaatttcaaaggagggactccggaagtgatgcagacgagctatgctatcttggttctggttttgcctaatgatggttcattagggtggggtcgaagagagttggagattgttgaggtagttgctgaccaagttgcagtcgctctgtcacatgctgcactcctagaggagtctcagctgatgcgagagaagcttgccgagcagcatagggacttgctgcaggcaaaggatgaagccatgagggcaggggacgctaggaattccttccagactgcaatgtacgatggaatgcgaaggccaatgcactcaatccttggtctcgtctcaatgatgcaacaggagagcatgaatccagagcaaaggcttgtgatggatgccattgccaagacaagcagtgttgcatccacactgatgaacgatgtgatgcaaacatcgacaatgaactgtgagcacttgtctttggtcaggaggccgttcaaccttcattccttcattaaagaagttgttggagtggtcagatgtctaactggttgcaagggtgtggagtttgagtttcaagtggagaattctttgccagaaaggatcattggtgatgagaagagagtcttccatattgtcctgcacatggtaggcactctaacagaccgatgtaatgctggctgtatctcattatatgtaaatgtccataatgaggttgaagataggcataatcatgactggatgctgcgaagagcaaacttctctgggggctatgtatgtgtgaaatttgagattaggattagaaaatcaaagggctatctgttgagttcatcaagcagtcagataagtcagggatccaaacccaacaattctgagatggggcttagcttcaatatgtgcaagaagattgtgcagatgatgaatggcaatatttggtcagtatcagattctaaaagcatcggagaaactatcatgctagtcctccagttccagttggaacctgtgactccggtctctggagcgtcctcagatttgtacagatcatccgcaattcccaactttaatgggctcagagtcctccttgcggacagcgactgcaccaaccgagctgtaactcacaggctcctagagaagcttggttgccgagtcctttcggtcgcttctggcgtccaatgcatcagctccttcgctgcggagtcgtccttccagctggtggttcttgatcttgacatgcagacgatggatggattcgaagtagcccgcgcgatcaggaagttcagtagcaatagttggctgccgttgattattgccctagcagcaagaatcgacgacaacatccgggatcgttgccagaggtcaggagtaaatggcctgatccagaaaccggtcacattagccgcgctgggagatgaactgtatagagtccttcagaacaattaaaagagcctgacggttctcatttctttcaatctcaatagattgctatagcttgatcggtaactaatttctgccaggttagctccatacaatcacaaaaaaaaacattttgaggcaaaagggaaatgtataggaagctgaaagcatcgctttctgcttggttcctcggtgaaggaggaggaggacgactacgacaggaaggtacaaaaaacttggagagatcatactgttagaacttagacccattcatctgtaaaccctcagataagcaaagaattagattcatgcactaacactaaccacgatataattagtttggacg

SEQ ID NO: 24133 - DNA, 1573 bp, Zea mays
  Clone ID: LIB3607-039-C6_FLI
cacgtgcaaaacttgtatgtgcgctctccgtagacagacatccaatatcgtgcatctggtccaaagccccaactcaaatttacatccaggccattcgccggagatggcgtcggagctgacgtaccgcggcggcagcgtggcgccaggctccgcctccaacggtggggaatactccccgaagccctccaagccgctctcctggctcgcccgcgccgcgcgctacgccgccgccgagcaccgccccgtcttcgccctcgccggcatgctcttcgctgccgctatcttcaccttctcttccccctccaccttatctccgtccgaacccgccgcgtcggtcggcttcaaccaccttgccgtcagcgggcacccgtccttccgggagtccgtcggcgggaaggttcccctggggctgcgtcggcgcgcgctgcgggtgctcgtgacgggcggcgccgggttcgtggggagccacctggtggaccggctgttggagcgcggcgacagcgtgattgtggtggataacttcttcacggggcgcaagggcaacgtggcgcaccatctccagaaccccaggttcgaggtgatccgccacgacgtcgtcgagcccatactgctcgaggtagaccagatctaccaccttgcctgtccagccagccccgtgcactacaagtacaaccccatcaagaccatcaagacaaatgttgttgggacactgaacatgcttggattggccaagaggattggggcaaggtttctacttacaagcaccagtgaggtctatggtgatcccctccagcaccctcaggtggaaacctattggggcaatgtcaaccctataggtgtcaggagctgctatgatgagggcaaacgtacagctgaaacattaaccatggactaccatcgtggtgccaaccttgaggtaaggattgcccggatctttaacacatatggtcctcgcatgtgcattgatgacggccgtgttgtcagtaatttcgttgctcaggcgctgaggaaggagcctttgacagtctatggtgatggcaagcagactaggagctttcaatatgtctcagatttggtggaagggctgatgaagctcatggaaggggagcacattgggccgttcaacctcggcaaccctggagaattcagcatgctggagctggctaaggtggtccaggacaccatcgacccagaggcgcacatcgagttccgtccgaacaccgcagatgatccgcacaagcgcaagcctgacatcagccgcgcgaaagagctcctcggctgggagcccaaggttcccctccgtgagggccttccccgcatggtcactgacttccgcaaacgtatcttcggggaccaggaagggtccaccgaggcagctggtggcctttcttaagtgctcaaaaacttgttgaagtgacacgtttgtatggtatatgacttgatacagttttggcgctgtgctctatacgtagttgttatatagggatataaatgtttgttaaagtatggaaatagcttggcacgctatactatgtaacgacgtaccattttgtaatgtcattgttaacgggtt

SEQ ID NO: 24134 - DNA, 758 bp, Zea mays
  Clone ID: LIB3607-039-D12_FLI
gggagcaagcagcagccgtccgtggaagaagatgtcgtacctgctgccgcatctgcactcggggtgggcggtggaccaggccatcctcgccgaggaggagcgcctcgtcatcatccgcttcggccatgactgggacgagacctgcatgcagatggatgaagtgctggcagcagtagctgagaccataaagaactttgcggtcatctaccttgttgacatcacagaggtccctgatttcaacaccatgtatgagctgtacgacccttcgacagtgatgttcttcttccggaacaagcacatcatgattgatctcgggactggaaacaacaacaagatcaactgggccctgaaggacaagcaagagttcatcgacattgtggagaccgtatacaggggcgcccggaaaggccgtggtctggtgattgctccaaaggactactccaccaagtaccgttactaagaaggcaggcattccccttatgcaatctattggggatgtttacacggacagttagtccgacaggtgatccctaactgtatcttggcataccctagtaattcaagttgctggctggagtgatgcttatccatgtcttggcatgccatagtgaacatgtaaacctgtgatttgaggtgattattcgagtgtaaagaaaccaggattgcgttcgcctatgactatgtgtctagttgtctacttaataagaaacagttattggtttggaatatcggaactgagacaatggtttcctttcggt

SEQ ID NO: 24135 - DNA, 1255 bp, Zea mays
  Clone ID: LIB3607-039-D7_FLI
ggcatccctcctgaccagcagcggcttatcttcgccggcaagcagcttgaggacggacgcacacttgctgactacaacatccagaaggagtcaaccctccacttggtgctgcgccttaggggaggcatgcagatctttgtcaagaccttgactggcaagacaatcacccttgaggtggagtcctcagacaccattgacaatgtcaaggcaaagatccaggacaaggagggcatcccacctgaccagcaacgtctcatctttgccggcaagcagttggaggatgggaggacccttgctgactacaacatccagaaggagagcaccctccacttggtgctgcgtcttaggggtggtatgcagatctttgtgaaaacccttactggcaagaccatcactcttgaggtggagtcttcagataccattgacaatgtcaaggccaagatccaggacaaggagggcatcccgccggaccagcagcgtcttatctttgccggcaagcagctggaggatggacgcacccttgcggattacaacattcagaaggagagcaccctccacctggtgctgcgcctcaggggaggaatgcagatcttcgtgaagacattgaccggcaagaccatcaccttggaggttgagagctccgacaccattgataatgtgaaggccaagatccaggacaaggagggtatccccccggaccagcagcggctgatcttcgccggcaagcagctggaggatggtcgcaccttggctgactacaacatccagaaggagagcaccctccatctggtgctccgcctgaggggcggtatgcagatctttgtgaagaccttgactggcaagaccataaccctggaggttgagagctctgacaccatcgacaacgtgaaggctaagatccaggacaaggaggggattcccccagaccagcagcgtctgatcttcgccggcaagcagctggaggatggtcgcacccttgcagactacaatatccagaaggagagcaccctccacctggtgctccgtcttcgcggtggttattaagccatcagtcgttgaagctgctgctgtatctgggttatctagtgtctctgccattgcccatggatggtgctgtctttcaaagtatttgtatggtttgtgtcgtgagtcgtgactgagctggtttcatggaccagttgtgttctcgttacccaaaactatcgtgcgaccgcatatggcttaatcatgaataaatgttgtttgaatttaaact

SEQ ID NO: 24136 - DNA, 1119 bp, Zea mays
  Clone ID: LIB3607-039-E4_FLI
gaaaacccgctccgaaaggcagaaaaccacaataaacaaggcacgcaacgaatccgatcccgatttaattcgcccaaatccgtcgattaatccccacgccggccgcgtcatgctccggccattcctctcccctcccctcaccgctctgccgccgccccctgcctccaccgcagcagccgcgggcgccgcggcgatgcgacccgcatcctcctcctcctcccgctcctcggccggcggaggcggggcccaccaccaccaacacaaccacggcggccacagcatctccgtctctccgccgacgtgcaggcacgccccatcgtcggccacgctcgatctcctcatcctgcttctcgtgctcttctcgcttgccttcctgctcgcctcctcgctctcgcacgtcgcgcgctcgctctccccgctgctcgccacgccgcccgccgccgcggcgctcgcctacgccaccgccgcactgccttacctggccgcggcggccgtgctcgtcgccaccgcgttcctctcctgtcgccggctcccgcggcgccggtgccgcaacccgcgctgccgcggcctgcgaaaggcgctggagttcgacgtccagctgcagaccgagggggcccttcgcgccggcgccggaagcaccgccggcggcgccgaagcatccatgtggcgcgagatcgaggcgctgccgtggaagggcggccagggcggaaacaacccagactacgagtgccttcgcgccgaactccgccggatggcgccgcctaacggccgagccgtgctgctcttccgcaaccggtgtggctgccctgttgctaaactcgaaggatggggcgcccccaagagcaaacggcgcaacaagaagggcacgcaaggttcgttccatgaccgagggctgaggtgaacgcaagtccggtgtcgccagttgcaaacttgcaacactgttgctttagactgccatgttgaataatacttctagcaaaagatacgccaatcacagtttacatgtgggttgcgccatgattgtattgttacgggtgttcggtgaaccccaacagttatgccgatacaaagacgagacgcaacaatagaactgttaataaaggacaatgggcttgtttc

SEQ ID NO: 24137 - DNA, 352 bp, Zea mays
  Clone ID: LIB3607-040-C12_FLI
gatgtcgacaccaggagccccgagcctggccacgacagcggcggctgtcctgtgcgtcctggccgcggcgctcgcggtcacggtcgcgagcggccagcagtgcgggcagcaggccggcggcgcaacgtgccgcgactgcctctgctgcagccgcttcggcttttgcggcgacacctccgagtactgcggcgccgggtgccagagccagtgcaccggctgcggcccgcgtcccgcgggccccggcgtggcatccgtcgtgccgagagacctcttcgagcggctgctcctccaccgcaacgacgcggcgtgccctgcgcgcgggttctacacctacgacgcgttcctggccgcc

SEQ ID NO: 24138 - DNA, 182 bp, Zea mays
  Clone ID: LIB3607-040-H2_FLI
ctcgcacccagaagggagagaactcgtcgcgacgaggagagaagaacctgaagtggtcccgaatcagacgcggaagagggtgggttcaggagcaagccagcctgccgccaccatgaggcgcgcctcgaagaaatccttgtcgtctgccgcgaccgctagcgctggtgcggaacaagtaaatg

SEQ ID NO: 24139 - DNA, 1538 bp, Zea mays
  Clone ID: LIB3607-041-A12_FLI
accccccgacacgaggcaatcccccccttgctcgcttcgcttcccaaatggctcattccaccactgccactgccactgccactgacggcgagaccgccccggtgccgcgggccctcgcgccggcgcggaaagtggcgctgatcacgggcatcacggggcaggacgggagctacctcacggagctgctcctgtcgaaggggtacgaggtgcacggcctcatgcgccgctcctccaacttcaacacgcagcggctggaccacatctaccacgacccacacgcggtgccgtcgtccccgcggcccccgctgcggctccactacgccgacctgtccgactcctcctccctccgccgcgcgctcgacgccatctcccccgacgaggtctacaacctcgcggcgcagtcgcacgtcgccgtctccttcgaggtccccgactacaccgccgacgtcactgccacgggggcgctccgcctcctggaggccgtccgcctgtcgcgcaggcccattcgctactaccaggctggttcctcggagatgttcggctccacgccgccgccgcagggcgaggacacgcccttccacccgcgctccccctacgccgctgccaaggtcgccgcgcactggtacaccgtcaactaccgcgaggcctacggcgtcttcgcctgcaacggcgtgctcttcaaccacgagtccccgcgccgcggcgagaacttcgtgacgcgcaagatcacgcgcgccgtcggccgcatcaagctcggcctgcagaccaaggtcttcctgggcaacctctcggcggccagggactgggggttcgcgggggactacgtggaggcaatgtggctcatgctgcagcaggatcagccggccgactacgtcgtcgccaccgaggagtcccacacagtcgaggagttcttgcaggctgccttcggctacgccggcctcaactggaaggatcatgtggtcattgacaagaagtacttccgccccgcagaggtcgacagcctccagggagactccaccaaggcgaggaagttgctcaaatggaagcccaaggttgggttccagcagctcgttgagatgatggttgatcgcgacgttgagctcgccaagaaggagaaggtcctggtcgatgctgggtaccgtgaccccaagcagcagccatagaagcagcacggctgcttcttgctctgctgcgttccggattcagactgttgctcatacacggtgattctcagagtaaaggttgacccaagttactatcgatacttctccaggtaagaaataaggatggttgcagtatgaccctcacagtatcttcattactttttttttcctgactataaaccaaacacccccttaaacaaaacgatgaataatccatgccagtttggtatttggaagaggatgaaacgcctgtctgattgtagctgttgatgttaagacatactgatagcatcagtttgtattgttctacttcagctactgtcacacatgtactgtttgatcggaaatatatgtttttttaggaaggttaatttc

SEQ ID NO: 24140 - DNA, 2167 bp, Zea mays
  Clone ID: LIB3607-041-D6_FLI
gaagaagcagcagcaggactgcgcccggcccgcccgacgccatgtccatccgcaaggcactgggcgcggtgaaggaccatgcgacgatcggcatcgcgcgggtgacgggcgccgtggcgcccgacctggacgtggccatcgtgcgcgccacctcccacgacgacgcgcccccggacgagcgccacgcgcgggaggtgctccgcctcgcgtccgccacgggcgccgcccccgcctgcatcgcctcactcgctcgccgcctctcccggacccgcgactacgtcgtcgccgccaagtgcctctcgctgctgcagcgcctcgcctccgccgagggcgacgtggagggcggagccggcacgcggccgttcctccacgagctgctccgccccgccgtctcgggccgccgcgcgggagagcccgtcctcgcgctgctcctcgacttccgcgacgacgcacacccggggtcctgggaccactccgccttcgtccgcgcctacgccacctacctcctcgaccgcgtccgcttcctcgtcctgctcctccccgcgccgccgcgcttttccgacggccgcgtcgcgccgggaccaccgcaggcgccggcggacgacatggacgcggaggcgctcctgggccgcgcgcgccacctgcggcacctgctcgaccgcctcctggcgtgccgccccgcgggcgccgccggtgccagccgcgtcgtgcgcgccgcgctccacccgatgctcagggacagcttccgcgtctacgaggacgtggcgctcctgctcgccctcctcctcgaccgcttcttcgacatggactactccgactgcgtcaaggccttcgagacctacgtcggcaccgccaagcagattgacgcgctccgggccttctatgcctggtgcgaggacgccggcatcgcgcgctcgtccgacttccctgacgtcaagcgcgtcgacgacaagttgctcgagacgatggagcagttcctgagggagcgcggcagggcggggcgcgcctgggcatcaccgccggcgccatcacgactcgcacaccagcctgatgcgaacgcgcaaggcgacgacggccatgtcgacggcatgaacagcatcaaggtgctcccggcgccgtcaacgcgctccatcggcgctgagcctgccacacccagaccggcggaagaggccagtcagtccgacctggtggacctaagagaaactgctgctaccgcggacgaggagggcaacaagctggcgctcgcgctcttctctgcgccgccggccacgaacggcagctgggtcacgttcccatcgggaccggacgccgccccagagccagcggtgacctcggcgtggcacacgcccgccgcggagcccaggaatgcggattgggagctggcgctggtggagacggcgagtaacctctccaagcaggcggcttcgctgggtggcgggatggacacgctgctcctgggcgggatgtacgaccacggcgccgtgaggcggcaggtggccgcgccggggagcgcgagcagcatggcgctgctgcccgggcatcaggtggctccggtgctgatgctcctgggccccgacggcagcacagcgcgtcaggtggccgggggcgacccgtttgcggcgtcgctggcggtgccgccgccgtcgtacgtgcagatggcggagatggagcggaagcagcagctgctggtgcaggagcagcagatgtgggcgcagtaccggcatggtggcatgcaggggcagcccgccgggttcaacaacggcctcgccggcggcagcgtgttcgcgccgaacgccgccatggccgtgccctatggggggtatgggtactattaacgatgcgactgcgagccttgctaattttccgcgatgaatgatgaagtctttgtcagcaaaccagtatcagcagaggtaactgaagtgttgggccaggaagataaggctgaaagtgtccatgggctgaaaaggagcgacagatctgggccagagtggatggcgtgaggcaaatgctgcagcagaagatggccgtaatagtgtcgcttgagctttaagctagtgggctttgtgctggcatgtaataagtagtggaaaggagttggagaaaggcatcaaagattgtaactgaattctgtttcctaagattctctcggctgctgccgttcttcccc

SEQ ID NO: 24141 - DNA, 1112 bp, Zea mays
  Clone ID: LIB3607-041-E3_FLI
ggcgcggtggcgctgcggtggaaggggcagccggtgtccttctgctcgctgtggcggccggcgtgcagcggctaagagcatctccaagagagcccaaaaaaataatctcccaatacaagggaataaggatctccctaaatctcttaattccattctatgggtaccatctccaacagatcccaagattttctcaaaatgtaaatccataaaggcccacaactgccgtacgtacctgccaaccttcctgcgcgcagctgccatctcaaccttcatgcgccgccaccgaacgtcctggcgtacagttcattcttttggttgaaacttggtggcatagggcatcgtggtggcgttgattttttccccaggcgctgctgattattccaggtcgacgccggaaagctcatgtttgatctggctcagccatagagccatgaatattcgacaatcaatgttgcaattgaatgagtcatcatcagacgatgatgaagaaattagtttcgccgagtatcatatctttcatcagccttcacacagtaaaagaaagcatggtgggtctatccccggacatttagttaaatttcgagacagacaagcaggacatgcaagaatgtatcaagattacttagcggacaattctacgtttagcttaactgatttcagacgaaggtatagaatgagtcgcgatctatttaaacgtataatggttgcagtagaagatcatgatgactacttcaagttcaagttcaatgcagccagtacacctggattaagttgtttccagaaagtcaccgcggtatttcgtatgataacatatggagtagctgcggatgctacagatgagtatgttcgtatcggagaaagtacggttatagagagtctgaaaaagttcgtgaaggcaattattaaagtgtttggggatgaatatttgagagcacctaatgaaatggatacatctcggttacttgcaattggacaagaaagaggatttccaggaatgcttggttctatagattgtatgcattggaagtggaagaattgtccatcatcatggcacggcatgtattcaggccatttacatgagcctacaattatattagaggctgttgcttcac

SEQ ID NO: 24142 - DNA, 1240 bp, Zea mays
  Clone ID: LIB3607-041-F12_FLI
aatcaaaggttagaaaatggacagagtggagctatggccctggcttcgaattcatctgatcggtctgacagatctgacaaacctatggaccaaaaggttttacgacggcttgcccaaaatcgtgaggcagcaaggaaaagtcggctgaggaaaaaggcatatgtgcaacaactagagagcagcaagctaaaacttgcaagcctggagcaagaactccagaaagctcgacaacagggaatcttcatatccagttctggagatcaaactcatgctatgagtggaaatggagctatgaccttcgatttagaatattctcgatggcaagaggaagaaaataagcagataaatgagctgaggactgcagtaaatgctcatgcaagtgaaagtgacctccgtcttatcgtcgatgggataatggcacattatgatgagatattcaggctgaagggtattgctgcaaaggctgatgtgttccatatactttcaggcatgtggaaaacacctgctgaaaggtgcttcttgtggcttgggggtttccgttcgtctgagcttctaaagctccttgtgaatcagcttgagcctctaactgagcagcaattgatggggctatccaatctccagcaatcctcccagcaggctgaggatgcagtgtcacaaggcatggaagcattgcagcaatccttggcagaaacgctggctgggtcccttggtccatcaggatcttccggaaacgtcgcaaactatatgggtcaaatggctatggccatgggaaaacttggcacactcgagaatttccttcgtcaggctgacaatctacgacagcagaccttgcatcagatgcagcgcatcctgacaattcgacaagccgctcgcgcgcttcttgcaatacacgactacttttcacgtctacgcgccctgagttctctttggcttgctaggccgcgagagtagcatcacccacgttggagtcactccatgggccgatctgtgaatgtggggctgctggctgcaaactcgcaacgcatttgcagatggctggagggtcagttctctctgtacaagttgtattaacatcttctggtctcatattgcgcttcagtgttgtacaagttagggtaaagcttgcatttaacttgtaagttatcatggattcatgattgacatattgtacaattatattagcaataagaatagaagtacataaatgctggaaggactatccagcgtctatattggttgg

SEQ ID NO: 24143 - DNA, 1503 bp, Zea mays
  Clone ID: LIB3607-041-G10_FLI
attaatgaatgcatcaccagaaatccgtgcaccaataggtgctcaaacacaataggtggtttccagtgcacgtgcccagcagggatgagcggcgacggcctcaaggaaggaagtggttgcaatggagtaagcacactagtgattgcaatagttgcaggattagctctgctagtgcttctcctcatccttggcttctggactcactggcttgttaagaagaggaaacttgcaaagacaaggcaaaggtacttcatgcaaaatggtggcctgatgctgaagcagcagatgttttctgaggaggcgccgctgcacatattcacctccagtgagcttgacaaggctaccagcaacttcagtgatgacaatattgtcggcagaggagggtttgggactgtgtacagaggcattctgtccaatcaagtggttgtgcgatcaagaaggcgcagcgagttgatcaaacccagacggaacaattcatcaacgagatgatcattctttcacaggcgaaccacaaaaacgtggtccagctattaggctgctgtctcgagactgaggttcccttattggtctatgagttcatcaccaacggggcccttttccaccatcttcacaatacgtcggtccccatgtcatgggagagccgtctaagcatcgcggttgagactgcgtcggcacttgcatacttgcacttagctgcaaagatgccaattattcacagagatgtcaagtcgtccaacatactcctagatgacaacttcactgccaaggtgtccgatttcggtgcctcaaggccaataccgcacaaccagacccatgtgacaacattggtgcaagggacactagggtacatggaccctgagtacttccagacaagccaactgactgagaagagtgatgtgtacagctttggcgtcgtactcatcgagctactgacaagaaagaagcctatcatggatgatatcgcggaagacattagaagcctagcgctgcaatttagtatgctattccatggaaataagctgttggaaatcgttgatcctgtagtagctgaagaagctggagtcagacatgttgaaacggtttcgaagttggcgttacgatgcttaaggttgaaaggggaagaacgcccaaggatgatagatgttgcgattgaacttgaagcactgagaaggctgatgaaacaacacttcatcttgaagaacgagtctttgcttcaggagtcatgttgcaatgaagaaatgagcatcgacgcaccatcaagtttgttccttggcgttgatggcatttctgacgatgaaggcatggagatcattccacttacatgtccatccaaaattctcacatcctatccctaactcgcaactatcacaaataaaaaggattttagctgacttctaccttctcaattgccaattccgtcttagtaatctcttcgtcttatgattagcttccaacgtaactacccggttaatggaatatgactgagttatttggcttatcgtc

SEQ ID NO: 24144 - DNA, 883 bp, Zea mays
  Clone ID: LIB3607-042-A1_FLI
gggcgtcaccccgatggagacgaagagggagccgggtgcggggcgctggccgtgaggctgtgtaaggagctgggcagctggccctggccaggccgcgggagggcggggcggctggctgagggagctgcttgtcgggcacagcagccgccaggcgaggggtgagccacaaatgtgagcgttggcgcgtgcctgcgtccttgtgtcgggcagggcggaaacggggatgagctgcgagcgcggctagggtttggtaactggggcaccggactgcgataactagctggaccacgaagcagaccgaagcccgggctagccaggccgtgcctccgctactggttaggatcaacatctttgataagtgataaaatcttgtgtttcatttgtcatcattggtgcttatatatatatatatacacacacacacacacacacacatataattatgaactaaatttgcccccccccccccctttgtagtatttgggtatttttcctgttgccacaattgtctttgagttgtgctaatttttttttctgctggttcccagtgcctcatgattctgacagtttccgtcaacctgacatgcaccatggaatggaggttcgccttggtttgtccaagggacctatctgtcctagcttcaattgaggcagtaatgtaattctgctgcaagttcacctctcagtccagtacttcagtcaatagaccatattaagatggtgaaatatgaaaactggtagcttgcatctgttcaatgttatgttttaatcaacgctgaatttaatatttgtcaagtttgaacttttctggtttccttgccactgcgaggccatggaagcgaccaaatttatatatgtttgatgcgggttgtccatggttgcc

SEQ ID NO: 24145 - DNA, 2024 bp, Zea mays
  Clone ID: LIB3607-042-B10_FLI
ggataatcgtcccagagacccagactcccccgctcccaatcccaccaccacccaccttcttgcaattgcagccgccagccggtagtggcagtacggcaatttcagcctcagctgaaggtcactgtctctcttccatctttttctctctcaacaaaactccctgaattgcaaactccaccaaaacaaactccaagcccatccatcaccagtcctctgtcccctccccgaccgcaacgatctgctttgcatcttccccttcctccaattccagtcccatgcgtaatcgtctttcggaattgaatctctccatgtcatggcgctctgagcaagtacagctgcagtcagtgagagaaatgtaggcaccacaaatcggtccagcaaatccctgctcgtgctctaccaaaaaatccagtctttttccagcccaaatccgcctcttccgctgctgccataaagtccggactttacgaggctttcacgacgtgcgagatttctgttatcgatctccacgaacccgatagcctgccataaagtctgcacagacgcttcgcattgcttcaaccaaagatccatccaaactctgcaccccagaaagctagtacgatctcggggggacatgaagcgcctgcagtgcttcaagcagagcagcggcggcggcaatggtggcgggccggggaagcgcctggagcggcggctgtcgctgggcgagtacaagaaggcagtgtcgtggtccaagtacctcgtagcgccgccgggggctaggatccggagcggcggcgaggagctgtggagcgccgacctgtccaagctggagatccggggcaagtttgcgtcaggccggcacagccgcgtctactccggcaggtacaccggccgcgaggtggccatcaagatggtcagtcagccggaggaggacgccgcgctcgccgctgagctagagcgccagttcgcctccgaggtcgcgctcctacttcgcctccaccacccaaacatcatctcgtttgttgcagcatgcaagaaaccaccagtattctgcatcatcactgagttcatggcagggggctcccttaggaagtatctacatcagcaggagcctcactcagttcccctcaacctagtgctgaaattagctctagatatcgctcgcggaatgagctacctacactcccagggtatactccatagagacctgaaatcagagaacatacttctgggagaagatatgtcagtcaagtcgcagatttcgggatttcatgcttggaatcacagtgtggaagtggcaaggggtttacaggaacctacaggtggatggctccggagatgatcaaagaggaacatcatactaggaaagtggacgtgtacagctttggaatcgtcatgtgggagatcttgactgctttggtcccgttcagcgacatgactccagagcaggctgctgttgctgttgccctgaagaatgcaaggccgccactgcctgcttcatgccctgtggcaataagccacctgatcatgcagtgctgggcgaccaaccctgacaaaagacctcagtttgatgacatcgtggcgatcctcgagagctacaaggaagcccttgatgaggacccgtcgttcttcttgtcgtatataccacctccaccggaccacggccaccaccaccatcatcagagccttctccggtgcttccctcgctccatgcgaaggtctgcatctctgaaagtatgatcaggccgggatgttgcctctgctcatcgatgctgtgtacaatatgcaccccctttcgactttctttgttttctatgcgcgcgtcggccctctattatgcggcattagcatgctatatgagctagtttatgctctcattttctccttgttggttaattatttccgtcattgatgccttgagtaatgtagagatgacaggcaggcatgcagcttccggttattatctatggatgccatttgcttttggtgatgggaaacatgaaagagccccagtaaatgtaatataattaagctctccattc

SEQ ID NO: 24146 - DNA, 1198 bp, Zea mays
  Clone ID: LIB3607-042-D3_FLI
ccaacctccattccttcctcctttgccaatgcagctctgatctctcctacctgagaatgtcagtgtgagtggccattccatctgcacaacatcctcctccacgcacgcaaaacatagaaaaaggcagaagcggaggagatgaaggcaatggccgggccaaagctgctcgtcgtccacgcgtcgtcgaacaaggccctgaacgggatggcgcccacgtcgccggcgtcgcccggctggtcgcggtgcctgtggctggtggtgttcctggccttgttcacctgcgtgtccctcctgaccgtgctctccacggcgcgcgcctcggccggggcgccggcgtgccaggcggcgtcgctcacggccagcgctgccggcgccacggaggccggcctgccgcggcacgtgttcgacgcgctggtgcagtacgctgcggcggcagggaacttgtcgtcgagcatgccggagccggacgtgcgcgcgatcgcgtcggtgctccggcggcgcgcgccgtgcaacctgctggtgttcgggctgggcgcggagacgccgctgtggcgcgcgctcaaccacggcgggcgcacggtgttcctggacgagaacccgtactacgtggcccacctggagggcaagcacccggggctggaggcctacgacgtggcctacgccacggcggtgcgcgagctccccgacctcctcgacgccgcccgtgccgcgcgcgccgccgagtgccgccccgtccagaacctgctcttctccgagtgccgcctcgccatcaacgacctccccaaccagctctacgacgtcgcctgggacgtcatcctcgtcgacggcccgcgcgggttcatggagggatcgccggggaggatgtcggcgatctactcggctgcggtgatggcgcggaccaagggcgcggagacggaggtgatggtgcacgactacgagcgggaggtggagcgcgcgtgcggccgggagttcctgtgcgacgagaaccgggtcacggcgaccagcacgccgtcgctcggccacttcctcgtgcacggcggcgccgccgccaaccgggaagccttctgcgggccgcccgccggcgccgctgagaaatcgaaaccgagctaagcgagtcgtagtcgttacttctccttcccgggcaatgttggcgatctctctttgacaggggaaagtaatgaactcgcagaattgactc

SEQ ID NO: 24147 - DNA, 1861 bp, Zea mays
  Clone ID: LIB3607-043-A12_FLI
atcaacttcagtctcgtcccgtaggaggaatttgaaaacccaaacgtacacctctgatacttcagctggagctgcaatggcaacgcccgatttgtccccggtctcgccggtgcggcgggacgacaagcagtgcgcgccatcctcctcgtcgtgcacaattctgagagtgcaggacgcgtccgcggccgaggcgtacgagcagtacctgcggctgccggaactgtcgagcctgtgggaggccgggtgcttcccggagtgggcgggcgagggcctggtgaagccggcgctgcaggcgctcgaggtcaccttccgcctggcgtccctcgcgctctccgacccgcgcgggtacgccagccgccgcgagctcgcgcgccggctggagtcgctcgcggcgcgggaggtggggctggtgtccgcgctctgcgagggcgaccggagcgcgccgctcgccgagctgggcgcctccggtggcgtgctcccgcgcgagcgcagcgcgtccgaggtgtggcagctgcccgggagcgccgccgcggtcgtgtgccaggtcagcgaggccagcctgctcccgcgcctcgccgcgtgggacaagtccgagacgctcgcggccaagatcatgtacgccatcgagagccagatgcagggctgcgccttcacgctcggcctcggagagcccaacctcgccggcaagcccgtgctcgagtacgaccgcgtcgtgcgcccgcacgcgctgcacgcgctcaagcccaagccagcgccggagcccaagtctgggtaccgcaacagagagaacgagacgctgttcaccatgtaccagatactcgaatcgtggctgcgcgccgcgtcgcaactcctcgcccgcctcaacgaacggatcgaagccaagaactgggaagcggcggctgccgactgctggatcctggagcgcgtgtggaagctgctcgccgacgtcgaggacctccacctgctgatggacccggacgacttcctgcggctcaagggccagctcgctgtacgagcggctccatggtctgacgcgtccttctgtttccggtccagggcgctcctgcacgtcgctaacaccactagggacctcaagaagcgtgtgccctgggtgctcggtgtcgaggtggaccccaacggcggcccgcgggtgcaggaggcagccatgatgctgtaccacagccgtaggcgcggcgagggcgaggaggcgggcaaggtggagctgctccaggccttccaagcagtggaggtggccgtaagaggattcttcttcgcgtaccggcagctcgtggcggcggtgatgggcacggcggaggcgtcgggcaaccgggcgctgttcgtgccggcggaggggatggatccattggcccaaatgttcctcgagccgccatactaccccagcctggacgccgccaagacgttcctagcggattactgggttcagcagatggcgggggcctctgatccgtcaatacaaagctgaaacggcgaaatggcgcggctgtatggcgaccgaatcgcgcagttttgcagcctaaagatactatgtatgcatgcatcgtaatttcgttgtggccttgtggtgatagagtgattcatttctatagcgatcctgtactagtgtagtacatgtagcactagattctcttattatcgttgtgcactgcgttgtgttgtgttctacatagattgattcagttagatgacatttgtcactctaggcaagtgtttcaattgggcaccgtgtatatagaacttttataaacactggtagatggattcatcaattactgaatgttgatgttgacacaggaagaagaactgagaataggaggaattggacgacggagaattggtgttt

SEQ ID NO: 24148 - DNA, 1277 bp, Zea mays
  Clone ID: LIB3607-043-G6_FLI
gattgctaatgatgcagaggaagttatatgatcgcggaggacttaaggttgaagggatctttaggattaatgcagaaaatagccaggaagtctatgtgagggaccaattaaacagtggagtggttccaaatgaagttgacttgcactgccttgccgggttgataaaggcatggtttcgggagcttccttcaggtgtattggatgcactgacaccagaacaagtgatgcactgcaacacggaaggggggtgcgctctccttgcttctatgctaccaccagtggaagcagcattacttgactgggcaattaatctgatggccgatgttgtagagcaagaaaactacaacaagatgaacgcccggaacatcgcgatggtttttgcgcccaatatgactcagatggccgatccgttaactgccctgatacatgcggttcaggtgatgaatttcctcaagaccttaatcttgaagactctaaaggaacgaaacaaaaaggatgaggcacttgaggcgttgcaaccatgctccagctctccaaatgaccaagacgaacatcaggtgtccgagcatttggagaaaccttcagttctgccaaatcaaaaaggcttcggtttccacatgaatgatagtgccactcctgttcaagtccttggagctgagaaaactctccatcatcactcacaaatccgttctcacgagccaaaaaagtttggaaccgatatggaccacaagaaaagacagagtgatgcctcctctctcctcggcagcgattcgagcaaccgattcaacagttctgggagagaattcggtagcagaaatggcgcgtccgacagatttagttttaggaaaggggtggagaggctttgcaggcatcccgtgtttcagttgaataggtccatgaagaagtctgcagatgccgtggtcttcgatgccccccgagaagcaagacaggcttgggtgtgatacaataacgacattgtatgtattatgtagttctgtttccacctgtgtttcagctgataagccgttcccactagtctgtgtgagtagaatcggttagcctgttaggtgttacaaaatccaggttatttggagtgtacattatcgcagtttacttttttccgacgaaagtgtcaggagaagtacacactgtacactagcacgtgtcttgtgcggaacgaacgaaagcgagagtgaactcaggctccatggctgcgcgctgcatacctcaagcgttagtgaccccttgatattataaccttgctgatattttgtaac

SEQ ID NO: 24149 - DNA, 956 bp, Zea mays
  Clone ID: LIB3607-043-H3_FLI
taagattgaggccggcggcctccgaaataaaaaagatcctgcaagaaaaaaaaaagaaagatctagggcgagagaggaagagggagggagggaggaaaaagaataacctagcaagcaagcttgtgagatcgatcgtggtcaagattatggatccggtcacggcatccatacacggtcattatctccctccgccattcaacacccgcgacttccaccaccatctccagcagcagcagcagcaccaccaccaccagcagcacctgcagctcaagaccgaggacgaccacggcggcggcgcgccagggctgttcggcgaccgcggcacgcagggcgaccacgagaacaatgacgagaacagtggaaacagcaacgggagcggcggcggcgagctggcgctggttcccccgtctggtggcggcgggcccgagggcggggatgccacccctcgccgcccgagaggccggccggcggggtccaagaacaagccgaagccgcccatcatcatcacccgggacagcgccaacacgctgcggacgcacgtgatggaggtggccggtggctgcgacatctcggagagcgtgacggccttcgcgcggcgcaggcagcgcggggtgtgcgtgctgagcggcgcgggcaccgtgaccaacgtcaccctgcggcagccggcctcgcagggcgcggtggtggcgctgcacggccggttcgagatcctctccctctccggctccttcctcccgccgcccgcgccgcccgaggccacgggcctcaccgtctacctcgccggcggccagggccaggtggtcgggggcagcgtcgtcggcgcgctcacggcggctgggcccgtcgtggtaatggccgcctccttcgccaacgcggtgtacgagaggctgccgctggaggacgacgacttgctcgctgcccatcaagcgccgcaggcgcaggccgacggtgtcctc

SEQ ID NO: 24150 - DNA, 2446 bp, Zea mays
  Clone ID: LIB3607-044-A7_FLI
gttcggatttccttccgccttccgacagcggctgtctcggcgacccaaccccagcctgaccccacctcccgccgccgccgccgccgccgccgcgccttcgtcgtcaggagaagggtcccggtggctgcgtctctctcccctgcccccctgctccacactcggttcacgcgtcggctcgctaccgcaggccctcgactcgtacgcccgtccccggcggcgatccggccggcaccgtaaccctaggactccgacggagcaggaatgatgagtcatgaacaacaaattgtccctcctagtaagggttctgtgaatgggttcccccatagaaaactggataaggagggcagtggaacgcaaagtagaataaatttggtgaggtcatcctctggtggttttactaattcagggcatggaagccattccagggaccggctaatctatgttctaacacaacttattgggcatcatgtggacgtgcatgtgaataacggctctataatctctggaattttccatgcaacaaaccctgacaaagactttggcgtcgtcttaaaaatggctcaggtcataaaggatggttctgccagaggacaaagatatcctgctgttcttgtaaagaaacctgagactatgataataccggcaagggagcttgtacaagtttttgccaaggacatagaacttggcggcgagctgccaaaagttcctggcaatgacaaaaggaaggacttgctgattgattctgctattacccgctatcattatctcgaagagagggaacttgagcgctgggcaccagatggaggagattcagagtgtattgaactggagaagtatgaccggaagggaaataggagctgggaccagtttgaaaccaatgcagcattatttggggtaaagactactttcaatgaagaaatttataccacaaagcttgagagaggtcctcacatgagagagcttgaaaagcatgcttcgagaatagctagagaaatagagggagaagataccagagatattcaccttgcagaggagagaggcttattcctgggtgatgacctggaccatgatgaagagataaaatattcagcagtgcgtagagacaccgataacagcaagtacaagccaccatttactaaggtcccaagcagtacatgccatgttgattcgtttaacaggacagtcaatattgatccgaatgattcactggcatgttcatcaacaatggacaaagaatcatcatcccacatatttgatgacactgatgcatctgccactatccatacaaatagcgttagccagccaacatctgattatctgtcagatagacccttgtccaatgatgaaaacaggttggacagaaagctgaacaaagagagtaatgaaaacatggataacagaaagttgcaacatgaggataatttacctgatggtgccagacctcttatttcggaagcgttggatgggcgatcctcaagttcacatgcatatgaaccgtctttttctggtcaaggattcaaatctccagaaacacccgattcgacagtgcctgtcaagcatccttctgcgatggaacctgtgacttcctctcaaagacctggcagctcaacatcgtcaacatcagagcgcattggtgcaaactcagccacgggtgctcctggcttgtcaccaagctcttcaataggatctcttaccgctgaaaaatcgactttgaaccctaatgctaaggaattcaagctaaatcctaatgccaagagtttcactccgtcagcatctctgaggccaccacaccctacatcatctgatgcatcatattactatcctaataacatgccggcggtgccacttggacccggtttgcctgtgggcatggggttcccaccggcatatggcgcccagcctgtcatgtacaatactcaacctggagcatcaccgcacggttacatgcatcctgctggtccacagtatgggcaacaaatgacgattggggggcagactcgtcctgtttattattatgcgcctgagatgcaacaatacagaggaagaaacttttagatataccattctgaactgctcttagatggaagtcgctgcaatccccacaagtgggattttgaccagcaaaaaccgctattacaatggaaaaaactggtcctgttgtgttgctcggattggttggacaaaaaagcgcaccgactttgtgttgctcggattgcctggtcaaaatgctcttcattgtcctgtatcagtgttgctcggaagcaggttcactggaatttcatattatttttgtcagactattgatgttgtaaattgaattgcgggtcatctgttcgacccggaaatgacattcataaatgtgtgaggttgccccatgtaacatttatgtgttccttaacgttgttctgatgtaagatttggacgaaatggatcaaattgctgacct

SEQ ID NO: 24151 - DNA, 1656 bp, Zea mays
  Clone ID: LIB3607-044-C6_FLI
tttgctgcgttgttttgtttgccgcgcccacagaaataggcgccagttcatccgcttccattcctagttctcaccacccagaagtccacctccttgttgccttcctccaatcccaaatctcacctccttccagttccagctatcgctgctcgtgttggctcgcctcttcctccattcagtggctccttagatcggctcagggacacaccagctgatcgtgtcggcgccgaatttagtggcaatttctcgctattgttgccccggagcagtggtttggatccaagaaagcggccgaccttcttggttgtatatcctcccgcaatggcggcgctcctggagctgttcctgggctcctcgtccgcaccggtggactgggaggcagaggcctacccggcgtacggggacttcgccgtgctacccttactcgtcgcctttttccccgccgtccggttcctcctcgaccgactcgtcttcgaggttttagcacggaaacttatatttggaaaagaacatgataagcttgctgaaacagatgacagtagaaagaaaatcaataaatttaaggaatcagcatggaagtttgtttattttctttctggagaactgctttcactatctgtaacatacaatgagccatggtttaagaacaccagatacttttggataggccctggtgaccagatctggcctgatcaaatgataaaactgaagctcaaagctgtctacatgtatgctgctggattttacacatattcaattttcgctcttctgttctgggaaacaaggcgttcggactttggagtatcaatgtcccaccatatagcaactgttgttctgattgttctttcctacattttcagatttgctcgtgttggctctgttgttttagcccttcatgatgcaagtgatatattcctagagattgggaagatggccaagtacagtagctgcgagtggctagcagttgtggcatttcttcttttcgtggcatcgtggatacttctccggcttgttatattccctttctggatcctaagaagcacaagctatgaagtactgctgaccctggacaaggagaaacatcagttttatggccccatatactattatgttttcaactgtcttctgttctcactcctagttcttcacatatattggtgggtactgatatggcggatgctagttaagcagattcaatcgaaagggcatgttggtgatgatgttcgatccgattctgaaggcgaagaggaacatgaagattaactttttaggttgaatgcttaactgaagaactatgttgtgtgatacctacagcaaggcacaccttctgaaaccaccttttccttctaaagaagatttgcagatattagattttattagatcatatcattctttcagcatcaaagatgacaactatcatttgcgagttgccactgaagccgtctgtgctcttggatgtttgtatgaaaacagaagtgcattgtatttttttcccagtcaagcgtcatttgtaaaagatacagaataatcgcttgttcatccattcttgtaactagacagttgatttgatttcaaatcatgtaatttgctacatcagcttagttgattacttggtgtatcatccattatgatgtaaatgggagtcttgggaagttc

SEQ ID NO: 24152 - DNA, 1237 bp, Zea mays
  Clone ID: LIB3607-045-G8_FLI
tgcttcacaggaggagccgcacgctgggagggagctccgatcgacctgcgcgccgagctgtcgcggtgaagagcggcagggggagcaatggcgcggccacggacctgctcgtctgcttcccgtcgcgggcgcacctcgccctcatgccgcccaaggccatctgcagcccgtcgcggccgtcggcgtccgagccggtcaagcgccggcacagcaccagccggccgcccagcgggctctacaagtcggccgcgggcgcggccaggaacccgagccgccgcggcgcggacgtccccgtggacgacgagccgacgtcgcccaaggtgacgtgcgtggggcagatcaaggcccgccaggccaagcccaagggccccgggcccggcggtggcggtggcggtggcaagaagaccaagaaggccacgtggctgcaggcgctggggatcaagaaggacgccctggcgctcttggacgccctgcacggcgctttcaggttcaacgttgccggatgcttcggcagcttccccggcgccgtgggcgtggggtacacttccggggaggacgacgaagacgaggaacacgatgcgccgcgcaccgagaaggaaacagaacacggcgcggcattggcccggtggttcatggtattggaggaaggcaagaaggtgtctgccaagaagctgcagggccaaaaaccggaacagagccaccaggaggaggacagggaggaagacgcggccccgccggcgaacgcgctgatgctgatgcggtgccggtcggcaccggcgaagggattagcgaggaggctagagacagaggaggagcgcaatgatgtgaagggcgccgccaagaagactccagatcaggaagagaaggagaacgagggcctggtgctcatgacatactcgccggacttcttcaaggtgtcccttgacattgccaaggagacttggatcgtcggcggtgatgacgcggtcctgcgctgccggagctggaagagatgatcgcagtgactgttcaacaaggaatgtatgtgccttttgtttaccttttactcctccgcttgctttttttcttctttttttccgacactcttgatgattactactactcttgcataaggctcgtgtgaagggtacgatcagcacacagcagaattggtttagccaaggccactgtatgtctgtattggcctcaccctgcaaaacattcctgctctgtaaatagtgctgtaaagtcccttgtt

SEQ ID NO: 24153 - DNA, 485 bp, Zea mays
  Clone ID: LIB3607-046-A7_FLI
cattattgccgtctcccttttgcgtgagcaaagaaagagagcgagaagcagtcgccatgtctggcatcatccacaagatcgaggagaagctccacatggggggcgaccacaagaataaggaggaggagcaccacaagaaggccgaggagcaccacaagaaggaggagggggagcaccacaagaaggacggcggggagcacaaggaaggcatcgtggagaagatcaaggacaagatcaccggcgagcacggcgacaagtccggcgaccacaaggagaagaaggacaagaagaagaaggataagaagaagcacggcgagggccacgaccacgacggcggccacagtagcagcagcagcgacagcgactgagatctggtgtcgcagcacaggtgcaacacatgtatgcttgctggatggaggattcataccagctgatgctgatgtagtgtttcactggtgtcatgcatgtatcgtgctattataatc

SEQ ID NO: 24154 - DNA, 992 bp, Zea mays
  Clone ID: LIB3607-047-A6_FLI
ccgcagcctccacaccacgagcggaaggagatcgccggaagaggggggaggcgcggagatgagcgggagcgcgttcaacgcgttcaagtcgcgggtgccggtggcgtggagtccccggctgtacatcacgctggtgcggggcctaccgggcacgcgccgcctccaccgccgcacgctcgaggccatgcgcctccgccgctgccaccgcaccgtcgagcaccgcaccacgccgtcgctgctcggaatgctcacccaggtgaagcgcctcgtcgccgtcgagaccgaggagatgtacaacgcgcgcaagcaggccgaggcggagaggcgcgcgcccagacccccgctcgtcgtctcccaccaccagccaccgccgccggctctgaagccggcagccgccgccgcggagggtgccgctgccactgcgccatagcctctgggcatcagaagactttcattacagttcagcaggataataattaaactgccctgtgttttgggtctgctggtctccactctccagacgatcgcattggatcctcttgctcacaagatctgacaaccgatatgtctctagatcgttgtatggtgcgacttgcattggccctacacaacgactgagggcatagtttcccaatgcttttatctagaatcaagttccgtggtttggtttcagttaccaaattccttgaaaatgctttttaagggcttgttcggttgcggcttgcgcctagttcgaaggagattaccttcttttaattttgactagggagggatttaattgtctctaatccgaagtaaccgagtaagccttaagatatgtaggttgtggcttcttgtgtaactgaaccagaggattgctagcgtctgaatttttcgttgttcggagtagtagtttacagtctgaaaggtacgaggatgcgggatgcgggatgcgtacggttggaagctattggggcgatgctggagcaaataaagtgatgcagtttgcttgc

SEQ ID NO: 24155 - DNA, 657 bp, Zea mays
  Clone ID: LIB3607-047-H10_FLI
cggacgaacacacagatcgctacagcccgcatgaccaacctctccgccatggcagcgagccaatcctacgtgatccgattcgacggccacttcgacgagccgtcgccgagctccgcgggcgccgagccgccgggcccgcagccgccgttcgcagggaggatgatctcgctcgagcgggagcaccaagtcattgtcgccgccctgctgcacgtcgtctccgggtacgccacgccgccgccgcaggtcttcacgccgccgccggcagcggcgcgctgccaggtgtgcgggatggagcggtgcctcggctgcgagttcttcgccgccggggagggcgcattgggcggcggcgcggagaaggcagccgcgacaggaggcgcggcggcgctggcggcggggcaaaggaggcggaggaagaagaagaacaagtaccgcggcgtgcggcagcggccgtgggggaagtgggcggcggagatccgcgacccgcgccgcgcggtgcgcaagtggctgggcacgttcgacaccgccgaggaggccgccagggcctacgaccaggccgccatcgagttccgcggcccgcgcgccaagctcaacttcccgttccccgagcagccgccgacggggcacgacgagcccatcagcagcaacggcgacgcgagc

SEQ ID NO: 24156 - DNA, 1004 bp, Zea mays
  Clone ID: LIB3607-048-C9_FLI
ctcggttccgtttgccgcgcccctgcgctcgtcgcggtgctccagctcggattcagtcctgcacgcagccgcttttcatcttcctgctcagctcgctgcgccgaactgcccagggtcgcgcgcctagctcggccgtctctagctcgccttgctccctgctgctcgcccggtcgagctccctgatcgccgcgccgtgaattttcctgcgcttgcatgtctccttgcgcacgcccagcactctggatttccggatctcgcgcgcccctggctcctctgttggtcgcgcggttgtttcctgcttcctgcgcgcgcgagctcgccatctattttgctcgcctctgcttctgctcggaattcccatggccagagctttcccctagcccggatctcacccagtcgccgagctcggctctgtccatactccagctcgccccctctgtttgctctcgctgctgggtcgggtctgctcggccgccgagtccgatccgctcctctgcacgcagttcgccccaactccagtctgtagtggtcgccagtcgtcgatcatgctcggattccatctcgccagctcgctccagactcgatctcgtcgtaattccgtgcgtcatcaagaaatcccaagaatcgggtgaagacgaagctagcaacgcgatattcctcaagcgctccacaaatggcctggatcagaaaatcgctaccgatctcgcggattcgtgtcatctgttgaaacggtaagctgatgaattgtttagaatagttcgaacgttaaataaattaatgtgttagtgcgatgctcattacgtgctcgataaattgcgtgagtcacgaaactctcgtcgacttcgcggtttttacgagtatcgagccagattcagttatagcgagttatgtcgctattccggtcaattaactaaattagtataccgagtagaatattagtaggcctgtgtgataaagaaatatttgattaattgtagacatgtaaaatatgtgaggagtaaaat

SEQ ID NO: 24157 - DNA, 1803 bp, Zea mays
  Clone ID: LIB3607-048-D10_FLI
gctctcgtagagagcacttgctcacctgctccccgccccccctctactggcgctggacttgctcggagtggagatccatccggacctcacctggttcgatttcttcatttcgggttcgattcggtttttctatcccagagcgaaagatcaatatcacctgacacaacataacgatttcgtggaagccgaggttgcttctctgctcagtgggtggataactggattgtggattttgctaactacatgctgggttatcagcctatcataaggaaagcaaagaagagacaacaaagcaattcttaggagctggcgagtactcggcatggcagatgctagttcaaggactgacacctcgactgttttagacatggatgataagaatcaaaggttagaaaatggacagagtggagctatggccctggcttcgaattcatctgatcggtctgacagatctgacaaacctatggaccaaaaggttttacgacggcttgcccaaaatcgtgaggcagcaaggaaaagtcggctgaggaaaaaggcatatgtgcaacaactagagagcagcaagctaaaacttgcaagcctggagcaagaactccagaaagctcgacaacagggaatcttcatatccagttctggagatcaaactcatgctatgagtggaaatggagctatgaccttcgatttagaatattctcgatggcaagaggaagaaaataagcagataaatgagctgaggactgcagtaaatgctcatgcaagtgaaagtgacctccgtcttatcgtcgatgggataatggcacattatgatgagatattcaggctgaagggtattgctgcaaaggctgatgtgttccatatactttcaggcatgtggaaaacacctgctgaaaggtgcttcttgtggcttgggggtttccgttcgtctgagcttctaaagctccttgtgaatcagcttgagcctctaactgagcagcaattgatggggctatccaatctccagcaatcctcccagcaggctgaggatgcattgtcacaaggcatggaagcattgcagcaatccttggcagaaacgctggctgggtcccttggtccatcaggatcttccggaaacgtcgcaaactatatgggtcaaatggctatggccatgggaaaacttggcacactcgagaatttccttcgtcaggctgacaatctacgacagcagaccttgcatcagatgcagcgcatcctgacaattcgacaagccgctcgcgcgcttcttgcaatacacgactacttttcacgtctacgcgccctgagttctctttggcttgctaggccgcgagagtagcatcacccacgttggagtcactccatgggccgatctgtgaatgtggggctgctggctgcaaactcgcaacgcatttgcagatggctggagggtcagttctctctgtacaagttgtattaacatcttctggtctcatattgcgcttcagtgttgtacaagttagggtaaagcttgcatttaacttgtaagttatcatggattcatgattgacatattgtacaattatattagcaataagaatagaagtacataaatgctggaaggactatccagcgtctatattggttggaaacgagcagcagaagcttgtcatgtcgattttgaatagtcggttgaagtgtttttttgggggtctatagagaacaaagaaagcttcaggagaaatgtataggtattcaccagtctaccatagagtgtgtgcttcggggagctccttgtgatggtaaaatttgataacgaggatgagttctgtg

SEQ ID NO: 24158 - DNA, 1057 bp, Zea mays
  Clone ID: LIB3607-048-G2_FLI
tccagggccccagcgcggcgccgtgggcggacatggacacggactgcctggttcacgtgttcgggcgcctcgacctggaggacctggcggcggcggccccgctcgtgtgccggggctggcgccgggccgccgccgaaccgtccctgtggcgcgccctcgacctgcgccgggaccacgtcgcgcgcttcatgccctggggcgcgctcgccgccgccttcgcgcgccgctacgccgtgcgcggcttctcgctcgcgggcttcctcaggatctgcgtgtggcgcgcgcgcggctccgccgaggacgtcgcgctcccgccgctcctcgccgagccggcgcacgagatcgaccacatttcgctccggtgccccaggttgcggcgcctggcgctcccgcacctgacggtcggcgacgaggcgcgcctgccggacctcgtcccgcggtggccgctgctggagcatctggagctggagacaaagccgtcgtcctcctccttcccggcgctcgccgcgcaggtcgcgctgcactgcccggccttcgccagcctcaagacctcgggggccttcaagcgcgaggacgccgcggcgctggcgcgctccctgcccaggctccgctccctctgcgtcgaccgctcctacctgcccaaggagcagcttctcgccatcctcgccgcctgcagggacctgcgggagttcagcgcgcgcagctgcgttggcttcgacgacgaggacgaggaggtgctcaggcacggggccaggatcctgcggttcgacgtcggagggtcgaagctggtggacgaactagacgacgagttccccggcggtggcggtttctgcgactcgtcctacgttgacgtgatgtgatctctgtcgctggtgctcgcggtcgcggcgcggctgctaagtgacagagcccacacataagtacacaacataattaatgcagtttggatttcattctattgtatgagcaggggaattatactattattattgtatttagaggcgtttggtttctaaaaataatttttagtctattattttatttaattttagtctct

SEQ ID NO: 24159 - DNA, 620 bp, Zea mays
  Clone ID: LIB3607-048-H5_FLI
cagggcgttcctgaaaccgcaagagccgaaggtttacgacacctgagccagcgtgaggctgcactgaacaagttccggctaaagaggaaggacaggtgctttgagaagaaggttcggtaccagagccggaaattactcgcagagcagcgtccacgggtcaagggccagtttgtccgtcaagatcatagcatccaaggaagctagggtccagttactgagctggaactcttccccattatctaaaaaaaagtcactgtaagtgactccactgcggggtatcctgatgtcaggtttttttcgaagagttggaagcaatcacaccgagttacggtttgctgtgtatgtttgctaaagcttgtaatataagtatgtataggctgactcttctttccttaggttaggcacaggacctggcacgttctagacggtttgtcgttagacgttagaaaatacaggcatacttgtgtcctccagtagcacgtcctccagtagcacgtgtgctttaagccttgtattatgtaattagccaaggtgctgtttggttcacgaaatgtaacgtaaagggtaatggtaatggtttacacttgattacaggcggtaacaagtttgaatagtccggt

SEQ ID NO: 24160 - DNA, 1391 bp, Zea mays
  Clone ID: LIB3607-049-C10_FLI
gagcgtgtgttcgtttcgagaacgcacgcacagacgccatggaggtgacaccaaaccacaccctgaccgtgaccgggtgggcggccatgaacgagtccgccggcaaggtggagcccttcgtcttcaagagaaggtacggttagggtacaaaccaaaggcggcgtccattcgcttccagtactgatctgctggcctgttgggcatcatatcatgcagggagaacggcccggacgacgtgacgatcaaagtgcagtactgcggcatgtgccacacggacctgcacttcatcaacaacgactggggcatcaccacgtacccgctggtcccggggcacgagatcacgggcgtggtcaccaaggccgggcgcaacgtcacgggcttccgtgtcggcgaccgcgtcggcgtgggctgcatcgccgcctcctgcctggactgcgaccactgccgccgctccgaggagaactactgcgaccgtgtggcgctcacctacaacggcgtcttctgggacggcagcgtcacgtacggcggctactcgcgcgcgctggtggcggacaagcgcttcgtggtgcgcgtccccgacgcgctgccgctggacgccgccgcgccgctgctgtgcgcgggcgtcacggtgtacagccccatgaagcaccacggcatgctggggcaccccggcgccagcctcggcgtcgtcgggctcggcggcctcggccacgtcgccgtcaagctcgccaaggcgttcggtctccgcgtcaccgtcgtcagcacgtcgccggccaaggaggccgaggccagggcccggctcggcgccgaccgcttcgtcgtcagcaccgacgacgcgcagatgcgggacgcggccaggtccctcgactacgtcatcgacaccgtctccgccaagcactcgctcggacccatcctggacctgctcaaggtcagcggcaagctcgtgctcgtcgccgcgccggaccagcccgtcgagctcccctccttcccgctcatctttgggaagaggaccgtcagcgggagcatgacgggagggatcagggagacgcaggagatgctcgacctctgcgcccgccacaacatcacctgcgacatcgagctcgtctccacggacgggatcaacgccgcgctcgcgcgcctcgcacgcaacgacgtccgataccgcttcgtcatcgacatcgccggcgactccacctcaaaactatagttcattcaattcgttgcattattatcatctatcaatatcgtcaccagtggcaggcatggcctctggttgcttgcattttgctctctatccatatcaagtgtgtgtcagcatgggccagcgtgcatattgcgccattgcttgcagcaaataaacattcatatatacacatctgctcgatattttc

SEQ ID NO: 24161 - DNA, 1168 bp, Zea mays
  Clone ID: LIB3607-049-C8_FLI
gcagcattggaggcgaggaagagctgtcggccggagatggacaagtactgggaggagacgcagcgctacctggagtacgaggagctcagcatctatttggaggcgcaggaggacgccatgtcttgctacgactccagctcgccggacggctccatctcccactcgtcgtcgtcggcggcggcgtgcggcaacaagaacatcctgatggagcgcgaccgccgccgcaagctcaacgacaagctctacgcgctccgcagcgtcgtgccgaacatcaccaaggcaagcggcggtcacgcactcacgctgcgaccgaccgacggtcgtctgtcccgtcgtcgtccgtgctctcggcattatattatattgcatgcatgcagatggacaaggcgtcgatcatcaaggacgccatcgagtacatccagcagctgcaggcggaggagcggcgggtgctgcaggagctgcgcgtgctcgacgacgacaccgccgccgccgccaccgcgcaggtggagtgctgcgacgtcgacgggggcctgctgcgacgggaagccgagcgcgcgaagaagatgaagcgcgcgcagtccgtcgccagcggcgcgcagtctgctccgcctccgcctccgcccgcgccgccgcacgtcgaggtgctggagctgcgcgtgtcggaggtgggcgaccacgtgctggtggtcagcgtgacgtgccgcaagcgacgcgacgccatggccagggtgtgccgcgccatcgaggacctccgtcgccggctgccacgtgcacaccgtcttcgtcgaggtagataaaatcgaccacatccaagtgaagaacatgattgaggctgctctcacgttgctcgacgcccccggaagcccccacagctcgatgagctattacgagacctaactatgttgagcaatgcttttcggacgtctactaggtcaacaactcagtccacaattaaccagaaaggagtatgtcgtgttttgctacaatgtgcttgttgtgtttttttttcaacatcacccctaagagatgatggttgtttcctctaagatgcagctagtgtaccaagcaatgtttggacttcgtgtcatacatcaccacgagagtgacatgtatttgtgtactataacatgtatatgctaaagaaaataacaaggggacttgtctttcg

SEQ ID NO: 24162 - DNA, 929 bp, Zea mays
  Clone ID: LIB3607-052-B12_FLI
actagtaaccgagctagctgatgttggccgaaaacgggaagcagtgttagctacatttctgccagagcagcagggaagcttcaaaaaattcacagaattggttggcaggatgaatattactgaattcaaatacagatacaattctaatgcaaaagatgcccttgttctttacagtgttggcatctacactgacaatgagcttggagcaatgatggatcgcatggaatctgcgaaactgaggactgttaaccttactgacaatgatttggcaaaggaccaccttagatactttattggaggaagatcagaaataaaagatgaactggtttaccggttcattttcccggaaaggcctggggcccttatgaaatttttggacacgtttagtcctcgttggaacatcagccttttccattaccgtgcacagggtgaagctggagcaaatgtattagttggtatacaagtgccgccagcagaatttgatgaattcaagagtcatgccaacaatcttgggtacgagtacatgtcagagcacaacaatgagatataccggttgctgttgcgtgacccaaaggtctaatgtcatatgcctttgctcccataataagttggtgacacttttcaaggaagattttgctccaaggtagaagttgcgagtttcttctaaagttgaaatgaagccatcaccaaatgtagcttcggtgtgccatctgtttactcagttagatcatgtagtgtatcagttgtgtatctttgttgttgtgcttcgtgatctcaatttattgctttctgcacctagaggttgtcaaataatgataaccgatatgttatctaaatatctaataatgattatgtgattgtgatttgggccgcatcactgctgtaaagtgtaaacccttgtctctgcaacatgagttatcaacaaattt

SEQ ID NO: 24163 - DNA, 1940 bp, Zea mays
  Clone ID: LIB3607-052-B2_FLI
ctcctgcccccctttcctcttcatcctctcctccctcgcggcgcgcacgctctccgccctcccaagtcccaaggaaacctatccaccattccggcggtcgatacatccatccgtccagggagagcaaggaataatcaatcaatcggccagcgaatcagtcgaagggaggaggagagccggagtccgaccagcgcggcgcgggttggtggtcccttgcgtctccggctctgccccgcggcgccgtcttttgtggttcttgcgttgcgtcgaggaagcagaatccgcgacgaggagaaggagggagaggcgttcatcgggttgcgctgcgtctgtcgcacggcaagacggcggcgttgaagatgcgggtgctggaggaggacctcttcccctccaccccgggcaaggtgaagatcgagcgggcgggcgccatgaaccggcagctccaccgctgcttcgcgtccaccagcaccatgttcctgtgggcgctgttcctcgtcgccatgacggcgtcctacctcagcttccagtccttcgtcgacacctcctccaagtacttcgccgcctcctggggcggcctgcactgggagcggcagatccgcgcgtccgccgtgccgaggcggccccccgggtccgccgccggggccgggatgtcggtgctcgtcacgggcgccgcgggcttcgtgggcacccactgctccctcgccctccgcaggcgcggcgacggcgtggtcggcgtcgacaacttcaacgcctactacgacccgtcgctgaagaaggcgcgcagggcgctgctcgcctcccacggggtgttcgtcgtcgagggcgacatcaacgacggccgcctcctggccaagctcttcgatgtcgtgcccttcacccacgtgctccacctcgccgcgcaggccggcgtgcgctacgccatggagaacccggcgtcgtacgtgcactccaacgtcgccggcctcgtcacgctcctcgaggcctgcaaggacgccgacccgcagccggccatcgtctgggcctcctcctcctccgtctacggcctcaacgacaaggtccccttctcggagcgcgaccgcaccgaccagccggcctcactctacgcggccaccaagaaggccggcgaggagatcacgcacacgtacaaccacatctacggactctccatcaccggcctccgcttcttcaccgtgtacgggccctggggccgccccgacatggcctacttctccttcacccgcaacatccttcaggggaagcccatcacggtttaccgcggcaaggaccacgtggacctggcccgcgacttcacctacatcgacgatattgtcaagggctgcctcgcctccctggaaacggccggcaagagcaccggcaccggcggcaagaagcgcgggccggcgccctacaggatcttcaacctcggcaacacctctcccgttacggtgcccaacctggtgtccatcctggagaagcacctccgcgtcaaggccaagaagaacgtggtcgagatgcccggcaacggcgacgtgcccttcacgcacgccaacatctccctagccagggagcagctcgggtacaaacccaccaccaacctggacgtcggcctcaagaagtttgtcaagtggtacctgtcctattacggctacaccaggggaggatccaagaactcgcgacattgatccgtgctaattctttctccttttcctgctttggcccggccgtggccaccatgctaggtcggacattgacattggattttgttggttggtggaaatatgttatgttaggatgttcgtcgaagaaaaatccttcgcttggtgaggagaggtctggaggaagaaagcaatggagagcagtctttttttttctttttctttcctccgtcttctttctctctgtgtaaattggccgttctccattaatcaaactgcaatttt

SEQ ID NO: 24164 - DNA, 1216 bp, Zea mays
  Clone ID: LIB3607-052-B8_FLI
gtcctctctctctctcgtggcgacgactgggcgacctccccgcccccgccgctctacgccaggtgcccagatcttcgtcgggcccttcgccgaagagcagccaacaggttgccggtctgcgagttgaatcatggcggagcacttggcttcgatcttcggcactgagaaggacagggtcaactgccctttttacttcaagattggggcctgtcgtcatggggatcgctgctctcgtctgcacaacaggccaactatatcaccaactcttgtgcttgctaacatgtatcagcgccctgatatgataacccctggagttgatgctcaaggccaacctattgaccctgagaagatgcaggagcattttgaggacttctatgaggacatctatgaggagttggggaagtttggtgagattgagaatctgaatgtttgtgataaccttgctgaccacatgattgggaatgtctatgtccagttcagggaggaagagcaagcagccgcagcatacaacgctcttcaggggcgcttttactctggccgccctataattgttgagtattctcctgtgaccgacttccgtgaagcaacctgtaggcagtttgaggagaacagctgcaaccgtggtggctactgtaatttcatgcatgtgaagcaaattggcagggatctcaggaggaagctgtatgggcgttctgcttccaggaggtaccatgggagaagccgaagccgaagcccgccaccacaaaggaggggccaccgtgaccgtgatgactaccaccaccgtgaccgtgatgactaccgtggtggcggcggtggtggaaggggaagaggtagcaggtatgacaggtacgatgacggagccggcagaggtggcaggcatgccaggtatgatgatggagcaggcagaggcggcagacatgacaggtatgatgatggaggaaggcgcaggcatggtagcccctcaaggcgtgcaaggagcccagtcagggaaagcagcgaggagcgaagggccaagattgagcagtggaaccgtgaacgggagggaaaacagtgagctctcggtggctactgttcgccggacttgttgcttagctcggctctcatcgctatattctaagtatgcttgtgtggatgacattctgcctgtctaagtaaaaccttttaagatcaggattcctcggttcattttatggttaaaccagacatcatttgcttc

SEQ ID NO: 24165 - DNA, 1787 bp, Zea mays
  Clone ID: LIB3607-052-E2_FLI
ccccgatcttccccgctcagcttcgcgtaattgcatttaagcccctttggcactcattgccgtccccctcggctccatttcttggaggtgaccgcagctctccggcggaaggcggcgcagatggcttccgcggcgacacagtgcttcagctactcctcgttgccggccacgtgggctctgcggcagcggggcggcggtgccagcgtgctccggctctcttcccggcggaccttctcggtctccgcggcggccgggttcgacaaccagaaccgcgagtatgtgatcgtcgggggagggaacgctgcgggttacgccgccaggacgttcgtggagcatggcatggctgacggccgcctttgcatcgtctccaaggagccagttccaccatacgagcggccagccttgaccaaaggctatctttttcctccggacaagaaaccggctcgcctacctggtttccatacatgcgttggatctggtggacagcgacagactgctgaatggtacaaggagaatggtatagaggtgctgtatgaggatccagttgtagcatttgatggcaaaacgcaaaccttaaagacttcatcggggaaagttctgaaatacggctcacttattatttctactggatgtgaagcatcgagattacctgagaaaattggagggaaattacctggagttcactacatacgggatgttgctgatgctgatgctctagtatcctcattgggaagtgcaaagaaggtggtggttattggtgggggctatattggcatggaggtagctgcagcagcttgtggctggaatcttgacacaacgattatattcccagaggaccacattatgccaagattatttacgccctcgcttgctaagaagtatgaggaactgtatcagcaaaatggtgtcaaattcataaagggagctcttatcgaaaaacttggagctggctctgatggaagggtgtcttctgcagtacttaaggatggatctgtagttgaagctgatacagtaattgttggtataggagcaaaaccagttgtcagcccgtttgaagctgttggagttaaccctaaagttggtggaatagaggttgattccttgttcagaactagtgtacctggcatctttgcaattggagatgtagcagcgttccccctgaagatgtacaatagaattgctcgagtggaacatgtggatcatgctcggaagtccgcacaccactgtatagagacgctcctaacatcccagacaaaagcgtatgactaccttccatacttctactcgagggtttttgagtacgagggaagttcgaggaaagtctggtggcagttttatggcgacaatgtcggcgaagcagtcgaagtagggaactttgatccaaaggttgcgactttctggatcgactctgatagccggctgaagggtgttttcctcgagagtggaacctcagaggaattctcgcttcttccgcagctcgccaaatctcagcctgttgttgacaagtcaaagctccaggccgcgacttctgttgaagatgcattagagattgcaagaagctcactccggtccagcgccacggtttagatctcagaatctagtactttcttgaacccgaggctgtgcgctgctcgagcggttcatagcgtcgagaccacgtcagcaataacgcacaattacatagaatctattcccactggggttgtaacattcttcagtgcacctgggtcggccatttccagcttgaaataaacctggttgccctttgaggggttgatgaggatgat

SEQ ID NO: 24166 - DNA, 1012 bp, Zea mays
  Clone ID: LIB3607-054-A4_FLI
cactactccacacctagacttcccaatcctccattgggcaacctgtcacacagtacgccgtcgcctgtggtttggtttgtggagtgagagagaaagagagagagagacatagactcggactcggagagaaggagatgatgtcgagggagcgcaagaaggcggctgctcttcaggagaagctgaagatcctccgctccatcactcactcccacgctctgagcaacacgtcgataatcatggacgcgtcggcgtacatcaaggagctgaagcagaaggtggtgaggctgaaccaggagatcgcctgcgcgcaggacgcgctgagacacaagtcatcatcatcctatcccacggtgaccgtggaagccctaggagtgcaggggtcgtcgttcctggtgaacgtgttctccgacaagagctgcccggggctgctcgtcgccgtgctggaggccttcgacgagctggggctcagcgtgctccaggccaccgcgtcctgcgccgactccttccgcctcgaggccgtgggcggagagaacgtggcggacaacgtggacgagcacgtcgtgaagcaggcagtcctgcaggccgtcaggagctgctccgagggcggcagcgagcacgacgacgaggagtagtagctatagcaagaggctgagcgcgcgtaagcacacacgccttctgctacttgcatcggtcgatgtcgtccctgctgctggtgcatagctctggctggacaaccgcgcatgtactcgatcgatcgtcgaccggccggcgccctctctgtgtatggtagtagcagtagctccgtttctcagctagctccccctctcgatctttaattcgattttttttactcttctctgtttcctctatctatctatctatctatcggtggcaaagatgaaacagagccgctgctcctagctgctgatggtccggtgaattcgttcgtagcagcgccaccgtttcctgtgtaatagtattggccggagggcacgccgtgatttacatattt

SEQ ID NO: 24167 - DNA, 1462 bp, Zea mays
  Clone ID: LIB3607-054-B1_FLI
cgcatgaggggggcgacttcctcgaattttccttctcttctctgaccgactgatcttagcgaccttctccctcgaatttttccttcgtgcttagcgtagcggtagcgccgatcctgttcctgtgccgtgccggcttggaaaataggagggagaagatcaacgccgccgcggtgcggcctgtggagtattaaacaaagatgcgcagagccgcagagcccggcgccggcagctagcagccaacgcgaaacaaaccatcgtcacccaatagccaccggccaactgtcaagcactccttcggtgcttccccatctgcgccgcgccccgaaccctccggaccccgcgagcgaggccgtcgccggcgcgcgcgagatttgagctgaggccatggagtcaccgttccgggccgacgtggtcaaggacaaggcggcgctggtcaccggcgggggatccggcatctgctttgagatcgccgcccagctcgcgcgccacggcgcgcaggtcgctatcatgggccgccgccgggaggtcctcgacaaggccgtcgccgcgctccggtcccagggcctccgggctgttggtttcgatggagatgtccgcaaccaggaggacgcggccagagtgcttgctgcaacagttgcacattttggcaagctcgacattcttgtcaacggtgcagctggcaacttccttgcttccccggaggatttgacgcccaagggattcagaactgttcttgagatcgacactttgggtacatacacaatgtgctatgaagccctcaagtatctgaaaaagggtgggccaggaaaaggcccgtccactggtggactaatcattaacataagtgcaacactgcattacagtgcttcttggtaccaaatccatgtctctgctgctaaggctggggttgatagcatcacaagatcactggctctggagtggggaacagattatgacattagagtcaacgggattgcacctggaccaattcaagacaccccggggctgaggaagcttgcacctgaagaaatgagcaaggggcttcgagaaatgatgccattgttcaaatttggggagaagcgggacatagcaatagctgcgctctaccttgcttctgatgcaggcaaatatgtaaatgggacaacactggtggtcgatggaggtctttggttaagtcaccctcgccatattcccaaggaggaagttagggagctgtcgaaggtggttgagaagaaggttagggcctctggtgttggtgtaacatccagcaaattgtgatttgcatttgtgtgatctgtagcatcgatcaatatgttattacagaactttattgtctatgtggtctaattagcgagtttgtttagttgagtaacttgacatatttacagtacatttgtttcttcaaagttccatttgagacagttttgattgatatgtgatgccagccaagaagttccatttg

SEQ ID NO: 24168 - DNA, 800 bp, Zea mays
  Clone ID: LIB3607-055-B5_FLI
ccgacccctctagaacgaccgcccctgccgaggagccgaccgacgggcgaagcgggagggaggcgatggcggcggcttgggggcagaaggccctgggggctctgccgcagctggtgaagtcgctgcggagtgatcccgtctccggcagcgcacgacacaggcgccttccgtctctcaggaggaccttctcgttgtacgatcagatcaacctcatcgacagcgtcccggaagacgagctccgattccagtcgtatgatgacactggattcaaaattaacaatgtaaaatatgaaggcagtgtattgattgtagagaacaagataatgacatgggcacccaaaacgttctcagagataactcctgaaagtttatcaatcttcaaagttgtgcaccctatcccagagatctttattcttggttgcggaagacacgtccagctggtcagtcctgagctgcggatgttcattcggtcaactggaatgaaactagaagcagttgattcgaggaatgcagcttcaacatataatatcctgaacgaggagggcaggccggtggcagctgcagttcttccctatggagtcacttgttaatgttttatcttctataccagttgggcaggcgttctctctttataatcgataaccaactgagctttgtttcgttcgtgctgtttcttggaagttctatatctgtcatgcatgtccaaagtagagttgtctatcttcctgcttttctacttcctctagcaagcccagatgcacagactgttggtatgttttggttgccgagggtacaatcat

SEQ ID NO: 24169 - DNA, 2144 bp, Zea mays
  Clone ID: LIB3607-055-H6_FLI
atctcgctgtcctcatcggtcaaaggcggaggcgctcctgtaccgggttcacgccgcgccgcccatacgggtctcgctagcgccgaggttaaggttgcaggcttttagcttgggattctgaaagatggggacctcttctggcgcgaatttccatcagcaacctcctccgacccaggggatgttgcctccaaggcatggtccacgcccctcagggttgcagacctcgctctcgctggcctcttcggagcaggttggctcgcctgacatgcaggagcctggttcaaactcggagccagggcatgattccgccactgagagcgccagttccaaagacacatggccagctgagccgaaccagagcaatggtggggtggctgccagtgatgttgtgagtaaggcggcggagaaggaggtggcaaatggtgtatccaagccgcaggttatccatggaccctcctcccgtgtgagtgggatgcttctgcgggaggttgcacgggagagggttgatctggtcgctgagaagatgaagatgatgtcggatgagcacctagaggaggtcaagaatgagctcaggtcgattctggagggcactggaggttctcaccacatcgaggagttcttgtacttgcagaagcttgtccaggacaggcatgatttgacaccatccatgctttcagtggcacaccatgtgcagcttgagatccttgttgcaatcaagactggaatacaggcctttctgcaccccagtgttaccattccacacaatcgcttggtggaggtcttcttgtacaagaggtgccggaacattgcttgccagagtgctctccctgctgaggagtgcagatgcaacgtgtgcgctagcaggaatggtttttgcaacctgtgcatgtgtgtcatctgcaacaagtttgattttgaggtcaatacatgccgttggattggctgtgatttttgctctcactggacacatacagattgtgcaattcacaatggccagatcggaatgggacaatcagtgaaaagcagcattggtcatgctgaaatgctttttaggtgccgagcttgccagaggacctcagagctgctgggttgggttaaggatgtcttccaacaatgcgctcctggttgggatagggatgctttgttacgcgagcttgagttcgtttgtaagatattccgtttaagtgaggatgcaaaagggagagtgttgttcaggaaatgtctagatctgattgaaaggctgaggaacactccagctgattccatcaatcctaggatgatactacaagcactccaagagcttgagatggactcccccaagatctctgaaaatgaagatgttgggcatctgatcacaccccaggaagcctgcaaccgcatagcagaggtagtccaagaggccgtgagaaagatggagctcgtggcagaagaaaagatgcgactttacaagaaggctcgcctcgccgtggaggcctgcgaccgagagctggaggagaaggttagggaagcccaggagctgaaggcagagcgtcagcgcaagaagcagcaggtggaggagctggagagcatcgtgcggttgaagcaggcggaagcggagatgttccagctgaaggcgaacgaggcccggcaggaggcggagcgtctgcagagcattgcgctcaccaagtccaagacagccgagcaggactatgccagcatgtacctaaagcggcgcctggaggaggcggaggcagagaagcagttcctcttcgagaagatcaagctgcaggagaatcagaggccaacggtcggcgtgggcagcagcagcggtgcgggaggggactccacgccgatgatgatgctatccaagattcaggatctgctcaagaacgtccgcagcatgccagcaaagtcggagggtcactagtcggagtaagagctttcgctgctgacactttcggtaattatgtgtgatctgctgacttgttcgagcagaggtgtaacgaaatcgtgtggtgctgtgagaaattcgaatcccttcgcgttactgtcggtactcgctaggcgtgctgatgtattaactctgttgtcgcaggtgatcatagtgtgcttgaaacaatgttaaagttacatcggtagacacgaaacaaccaacagttgtggcc

SEQ ID NO: 24170 - DNA, 1021 bp, Zea mays
  Clone ID: LIB3607-056-B7_FLI
cgcaaataataatgtagggtatacaagagaggcagatttgacagccgtcctactccatttgctcctagtcccaaatactagcaggcggcaggcggccaagaccggtgtccctcgacgacctgccgagtgccgaggcaagacgcgaggaggctgtaatggcgggcgccgaggtgggagaagacaagtaccgctccttcatccacggcgagggcgagagggacaccgtgtggaggtacggcgccccgcccaactacgacgtggtcaacaagctcttcgaggaagagaggactcaggtgtggcccgagggctcgctggaggagaaggtgcagcggctgctcaagagctgggagatggagctggtgcacaaggcgcggcccgaggaccagaagaccgtcaactcggagaaatactctgccagcaccaacgggatgagcgctctgacccgggccgaggtgatggccatcggcggctacaacaacttcctgcgcaccaagctgcccccggagcaccgcatctacgacccggacagcgagaccgtggagtccgccatggccaccttcaccacggccttcccgcggggcttcgccatcgaggtgctcgacgtctacagcggcccgcccaggatcgccttcaagttccgccactggggctacatggaggggcccttcaagggccacccgccgcacggccagcgggtcgagctcttcggcgtctgcatcttccatgttgacgaagacatgaaggtggacaagtcagagtacttctacgagcgcggcaacttcctcgccggcttcttgagtgcccctgcccctgatggctcaggcggttgccccgtgatgcgcgggaactgaatgggcctgcaatgggacattggaagactaggcattggaacattgggattattagcattagcgatcccgaatccgcttttattacggtttaataattccatcatgtaacatgacacttgcatttgtgtttgaataaacatttcagttgcttccacgtattagcagaaatg

SEQ ID NO: 24171 - DNA, 972 bp, Zea mays
  Clone ID: LIB3607-056-H8_FLI
ccgctcctccctcgtccggcaggcgacgactcgattccttcctcccttcctcctcctcgtctctttcatcggcgactccgatcttctctgccgtcgccgccgccgccaagagatcgacccgaccccgagcgcccgacccgaccccccaatccaaccaccaaccgccggcgcgcgcggaagattcagatttggcccctcgccggtaagggagaaagcgaggatgggtgcgtggatgtcgcgcgtgtggttcctcatgttcccagcgcgggagtacaagctcgtcgttgtggggctcgacaacgcggggaagaccaccacgctctacaagctccacctcggcgaggccgtcaccgccgcgcccaccatcggcagcaacgttgaggaggtcgtcttcaagaacctgcgcttcgaggtctgggatctaggagggcaagaaagcctgcgcacttcgtgggcgacgtactaccggggaacacacgccgtgatcgtggtgatcgacagcacggaccgcgcccggatcaacatcatcaaggacgagctgttccggctgctgcagcacgcggacctggagggcgcggtggtcctggtgttcgcgaataagcaggacctgaaggacgccatggcacccgcggagatcaccgatgccctctcgctccacagcataaaggaccacgactggcacatccaggcctcgtgtgccatcaccggcgatggcctctacgacggcctgggctggatcgcgcagaaagtcgccggcaaggcgaccgcgagctgacgtgcaggagagcagtggttgtgtgttcatgaacggattggatttgttgaagggtaggggtggtggcagggcgggtttgtttcttcctcggcgtcacgcccaatgcttatttatgtttttttaagaaaagtggcttgaaactttgtgtctgtattccaatcaatatgaatatatgaaaattgggaaatttgcatgcc

SEQ ID NO: 24172 - DNA, 721 bp, Zea mays
  Clone ID: LIB3607-057-A2_FLI
aactgccactaagtttttaagttagtatataatgggtggctgttgttgctgttcgtcgagaacatctgaagccgatagagcaccaattgatatatataatacgatgaagaaaatccccgctctgtaactaagtgtgagcaccatttccatctttgctgcattcttgaatggatggagcgaaaagatacttgcccagtttgtgaccagacaattttggtggatgagatgtccgaatagacttggtaatcctggtggatcatcacttgaagctgtttgttactgaggaagtgcaggcaacaactactacactcttgatattcgtccattctgggtggctctcagagtaatgaattgatggggcaaaaattgaaaggatgaacgacatgaaatgtatttacgccccctcctttaccctgcattctgtgtcatgcttttgctgttcatagcaacaggtggactaggaaactgcttggttgaattatatatagagagagatatgtcggcttgcaggttgattcagttaaaagtgcaaaactatgccatttcgcttttctgaattcagagtttcagacatctgctggttcttccaggaatccagtcagctttttacatggtatattaggtggttgcaggtaaaaatggtctagatggaggtgggggtttctttgtataatccacatgctattcaagcttcctgtatataatatttcctgttttcttc

SEQ ID NO: 24173 - DNA, 482 bp, Zea mays
  Clone ID: LIB3607-057-A8_FLI
cccccgctcctctcgtctctttcttcgcctcttccatcgcaggattcggcggccatgggcggcggcaacgcccagaagtccaagatggcgcgcgagaggaacgccgagaagaacaagggcggcaaaggcagccagctggaggccaacaagaaggccatgaacatccagtgcaagatctgcatgcagaccttcatctgcaccacctccgaggccaagtgcaaagaacatgcggaggcgaggcatcccaagaacgacctctaccagtgcttcccccccctcaagaactagtaagcagcagaagcatatgctctgctcagctaaaagacaagtactacatatatatatatacgctgtgtgtcaattaatgggttctaggctgctgctgatgcggctgcttcgttcgtgttgccccgtctgattatgtactgtaacccttggctgtcagcctgctgtgctaaaaaccattggttctgtgtggattc

SEQ ID NO: 24174 - DNA, 670 bp, Zea mays
  Clone ID: LIB3607-057-C12_FLI
ctgttgctgtgcttggtagcagcgatggtgtcaagggcaccatctttttcacccaagtgggagatggccctaccactgtcaccggaagtgtctctggcctcaagcctggcctccatgggtttcatgtgcatgcgcttggtgacaccaccaatggctgcatgtcaactggaccacactacaatcctgcgagcaaggaacatggagcaccagaagatgagaaccgccatgccggtgatcttggaaatgtgacagctggagcagatggtaatggtgttgcaaacattaatgttaccgacagccagatcccactgactgggccaaactcaatcattggcagagctgttgttgttcacgctgaccccgatgatcttggaaagggtggacacgagctcagcaagagcaccggaaacgctggcggccgtgttgcttgtgggatcatcggactccagggctgaactgaaacgaatggtcgctggacttcgggggcgcctgggagtgccgtcaccactcaccagcaggctagaataacatcccgagacatcgtgaaataataataataagagcgcctgatatgtgatcagtggtgtactcgccattaagcacctgtggcaaccgatgagctgaactgtgttggactgttggataatgctggttcgcctgagcatgtgtt

SEQ ID NO: 24175 - DNA, 1145 bp, Zea mays
  Clone ID: LIB3607-057-D10_FLI
agctagcttcttctagctctagctaggctcgtctgctgcaagaaggtaacagtaacagcaggcatggaggggaaggaggaggacgtccgcctgggcgccaacaagttctcggagcgccagcccatcggcacggcggcgcagggcacggacgacaaggactacaaggagcccccgccggcgccgctcttcgagcccggggagctcaagtcctggtccttctaccgcgccggcatcgccgagttcgtcgccaccttcctcttcctctacatctccatcctcaccgtcatgggcgtctccaagtccacctccaagtgcgccaccgtcggcatccagggcatcgcctggtccttcggcggcatgatcttcgccctcgtctactgcaccgccggcatctccggcgggcacatcaacccggcggtgaccttcgggctgttcctggcgaggaagttgtccctcaccagggcggtgttttacatcatcatgcagtgcctgggcgccatctgcggcgcgggcgtcgtcaaggggttccagcaggggctgtacatgggcaacggcggcggcgccaacgtcgtcgcgcccggctacaccaagggcgacggcctcggcgccgagatcgtcggcaccttcatcctcgtctacaccgtcttctccgccaccgacgccaagaggaacgccagggactcccatgtgccgatcctcgcccctcttccaatcgggtttgccgtgttcctcgtccacctggccaccatccctatcaccggcaccggcatcaaccccgcgcggagccttggcgccgccgtgatttacaaccagcaccatgcctgggctgaccactggatcttctgggtcggccccttcatcggcgctgcgctggctgccatctaccaccaggtgatcatcagggcgatcccgttcaagagtaggtcttaaaaggagccgatgctgcctgctgcttcgagatgccgccggtcttaaaaggatggattcgtggctgttttcaaatgatcccctactatgttacgtggagttccattcctctttcaaagttcggaagctgcttttatccgaacccagacttgtaattcatcagtgccaattgtgtaatatgccgcgcctctgttatgtgcaattcagagttatgagac

SEQ ID NO: 24176 - DNA, 1278 bp, Zea mays
  Clone ID: LIB3607-057-D11_FLI
gcacatgtaccgtgtggtcaaagaaagcctccaggtcggcgtagctggttccgctatcaaacagtccatccgcggcggccggaccgccggagccaccgcttgccttgtacgaagctcattccgggcaggggtcaggccgcacggaacggcggaggtcaaatcgaacgaacacgctttggtcatcacgggcctccccgtgtctccgtcgcgcaccgaagcaaacgcgcggccaacggccatcgacgacccacgcgggacgcgcacacgcggctttcgctccgcgaccgcgagcctcggctcgggctctcgaatccaccgactcgctctgagtctctgaccgccccttccgtcgtccccgttcgaaggcgcggcaagcgagcgattcagccagattcgattcgacatgaatcccgagtacgactaccttttcaaacttctgcttattggtgattctggtgttgggaaatcatgcttgcttctcagatttgcggatgattcatatttggacagctacatcagcacaattggggttgattttaaaattcggacagtagagcaagatgggaagaccataaaacttcaaatttgggatactgctgggcaagagcgcttcaggaccatcactagcagctactaccgtggagctcatggaatcattattgtatatgacgtgacagaccaagaaagcttcaataatgtgaagcaatggttaaatgaaattgatcgttatgcaagtgacaatgttaacaagctccttgttgggaacaagagcgacctaactgccaacaaagttgtggcaactgagacagcaaaggcatttgctgatgagatgggcatcccgttcatggagacgagtgccaaaaacgccaccaacgtggagcaggccttcatggctatggctgcatccatcaaggacaggatggccagccaaccagccgcggccaacgcaaggccagcgacggtgcagatccgcgggcaacccgtcaaccagaagacgtcttgctgctcgtcttaagcttgcctgatttctctggttccttgtgactattactaccgtttgtgcgagcatgcaaatgtatttgttgcattattgctgatagcatctgttcgttggccagatgagtagagagctgaaaaaatgttaagaacaccatagagagaagtctatccgtgctctctcaacttaaggagcaaacagcaagacttcattttttttctactttactgtttattagtcgcgttacatttgtgaacagttattgtaatgtcttttttttt

SEQ ID NO: 24177 - DNA, 1133 bp, Zea mays
  Clone ID: LIB3607-057-E8_FLI
gccagcagcaggcacgagcagcctccagagacccagtgcgttctcagagccaagcagcttgcaatataatggcgtcgtcgctcaagttcacggtgcggaggcggcccgcggcgctggtggcgccggcgtccccgacgccgcgggagctgaagcggctctcggacatcgacgaccaggacgggctgcgcttccacatccccgtcatccagttctaccgccggagcgcgctcatgggcgggcgggacccggcgccggtggtccgggacgccgtggccagggcgctcgtgcactactacccgttcgccggtcggctcagggagctggaaggccgcaagctcgccgtggagtgcacgggcgagggcgtgctgttcatcgaggccgacaccgacgtgcgcctcgaccacttcggggacgcgctgcagccgccgttcccgtgcctcgaggagctcatcttcgacgtccccggctcgtccgaggtgctgggctcgccgctcctcctcttccaggtgacgcggctggcgtgcgggggcttcatcctcggggtgcggctgcaccacacgatggcggacgcgcaggggctggtgcagttcctcgacgccgtggcggagctggcgcggggcgcggcggcaccgacggtccggccggtgtgggggcgggagctgctggaggcgcgcgacccgccgcggccggccttcgcgcaccgcgagtacgacgaggtgccggacaccaagggcaccatcatcccgctggacgacatggtgcaccgctccttcttcttcgggcgccgggaggtggcggccgtccgcgccaacctcccgccgggcctccgctcgcgcgcctccaggttcgacctcctcacggggctcctgtggaagtgccgcaccgcggcgctcgccccggacgccgacgaggtgatgcggatgatctgcatcgtgaacgcccgcggcggcaagtccggcgccgccatccccgagggctactacggcaacgccttcgcgttcccggtggccgtcgcgacggccggggacctcgccgcgaggccgctcgggtacgccgtggagctggtgaagcgggccaagggcgaggtggacgtggagtacatgcgctcggtggccgacctgatggtgctacgc

SEQ ID NO: 24178 - DNA, 1791 bp, Zea mays
  Clone ID: LIB3607-058-C1_FLI
gtgcgttcttcagtgttagttctccaccctctccttggcggaaaaccctaaccccctttctcggcgacgatccgacccctaccccatctcccggccgaccccacggcgctctccgccatgccggacgtgcaacctctcgtcagcgacttcgtcctcaagctcaagcgccggaaggtggaggggtcgcacgcggtggcccggcagacggcggagctgctacggtcggttgtgtcgcagcatcggatgggtagcagcgccaaccaggcggccacacttgccgatgccgtacgggctgtgggggagcagctcattgccgccaatcccattgagcttgctgttggaaacattgtgagacgtgttttgcatataataaaggaggaagatatatcttccacagcagttggtatcgaaggtctttctgttactgttgacagtgatgatgaatatgacagcgaacatgatgatcgccctgcattatctgctgctgttcttgctgcacatgctagaaatgcccttcgtgcaccttcattgcagactctgctagaagacattcctgtgagtcctgcaatttcccgcactgcatcatcaactggtgactcagacggaaaaagtaaatcagctggagataagagctcaactagaaaactgaagcatgatgtcatcgcagccattggtgatcttattgatgagattgactcatgctatgagccgatttctgagcaagctgtggaacttattcaccaaaatgaggtaatcctaactctaggtcgttctagaaccgtcaaggagttcctgtatgccgcgaaagaaaagaaacgatcttttcgtgtatttgttgctgaaggtgctccaagatatcagggccatgttctcgcaaaagagctggttgagaaaggtgtacaaactacagttataacagattcagcagtttttgctatgatatctcgagttaacatggtcatcgttggagcgcatgctatcatggcaaatggtggagtcattgcaccagtagggatgaacatggttgcacttgctgctcaaaggcatgctgtgccttttgttgtggttgctggtagtcacaagctgtgtccgttgtatccacacaatccagaagtgttgttgaatgaactcaaatcgccgtctgatttgctcgattttggcgagttctcagattgcatgaatttcagtactcaggatggcagccccttgttaaatgttgtcaacccaacatttgactatgtgccaccgaagcttgtgagcctattcatcactgacactgggggacacagtccatcttatatgtatcggcttattgctgagtattactcagctgatgacctggtagtgagacggaaggcaacatcttgaaggaagacaaaagcgctgcgaagtctccttggtgttctgatcataggatttgcgatcttattggaatcctagtgttcttgtactcgtcatgatctgttgcctgtagagcggtgctgctgtgataagtggaatcacctgtttgtggatccagttactgtcaaactgcaggaaatcgatgcaagcattctcgcgcatcgttgtaaccatggcggcattttaagtataaactgttgaggaatggagcgttacgtcatggaagaattgtttcactataggagaggttcaaatatatgattgactggttgtgtagagggtgtctgtttcttttctggtcataggttaatctgggccttggctggtccaaattttgaatgttataaactccagcaagctgttcgatatgtctatgaagtgttaccatgc

SEQ ID NO: 24179 - DNA, 657 bp, Zea mays
  Clone ID: LIB3607-058-C10_FLI
tttgactcacgtggagatgttaaagtcattctagcaacaaaccgcattgaaagtcttgatccagccttgcttcggccaggccgtatagaccggaagattgaatttcctctaccagatattaaaactagacgacgcatcttccagatacacacatcgaaaatgacattagctgatgatgtgaacttggaagagtttgttatgaccaaagacgagttttcgggtgctgatattaaggcaatctgcacagaggctggattgcttgccttaagagaacgcagaatgaaggtgacccatgcagatttcaagaaggcaaaggagaaggtgatgtacaagaagaaggaaggtgttccggatggtctctacatgtagccaatctattcatcatgccgaacaagttacccgattgtgtgtgtactagcacatctcttcatcatgggagatatgttaccacaatacttgttgcatactgtgctaagtggtcaggagaaccttgtattaattaattatcctttcattgtctcaaagtaaaaatttcccttgcgctaaaaatatgcatccgttcagcatccgtgtgacgtgttggcagcttgatcgcatggtgactattgcgtacacgaaattgcaacttatttgaatgaaaaaattggatattagagg

SEQ ID NO: 24180 - DNA, 1376 bp, Zea mays
  Clone ID: LIB3607-058-C2_FLI
taagaggcgacatcacatcgcgttccgccgcctcacacgctagttggagctgtagtattagccaaccagccagcctccgatctccatatggaggaggctgcgcccgcggcggtcatggagcgggagcgcctcacggccgagatggccttccgcggcgcggacggagctcggcgggacggcggcgacccggcgcccagcatcgtcatcaagatccgccgccggctcccggacttcgcccgcaacatcaagctcaagtacgtgaagctcgggatccgccacggcggcagcctcacgtcgctgctgccggcgctctgcgtgccggcggtcgcagccgccgcctactcgttcgtccgcctcgacgtcatctactactccgtcgacctgctcacctgcgtcgcctggctcggcaccgcgctgctgctgctcaccgtctactacctcaagcggccccgccccgtgtacctcgtcgagttcgcgtgctacaagccggaggagcggctcaagatctccaagtcggccttcctcgagatgaccgagagcaccggctccttcaatgaggcggctctggacttccagaccaagatcaccagccgctccgcgctcggggacgagacgtacctgcccccgggcgtccaggcgcgcccgcccaggctcaacatggcggaggcgcggatggaggccgaggcggtcatgttcgggtgcctggacgcgctgttcgagtccacggggatcgacccgcgccgcgacgtgcgcatcctcatcgtcaactgcagcctcttcaacccgacgccgtcgctggcgtccatgatcatcaaccactacaggatgagggaggacgtcaagtcgttcaacctcggcggcatggggtgcagcgccggcctcatcgccgtcgacctcgccaaggacatgctccaggcgaaccccggctcgtacgccgtggtgctcagcaccgagaacatcaccctcaactggtacttcggcaacgaccgctccatgctcctctccaactgcatcttccgcatgggcggggccgccgcgctgctgtccaacaggcgcgcggacgccgggcgcgccaagtaccggctgctccacacggtgcgcacccacaagggcgccaccgacgagtgcttcaactgcgtgtaccagcgcgaggacgaggccggcaaggcgggcgtctcgctggcgcgggagctcatggcggtggccggcgacgcgctcaagaccaacatcacgacgctggggcccctggtgctgcccctgagcgagcagctcaagttcctcaggtcgctgatgatgcgccgcgtgttccgcgtcgggggcgtgcgcccctacatcccggacttccggcgcgcgttcgagcacttctgcgtgcacgc

SEQ ID NO: 24181 - DNA, 1194 bp, Zea mays
  Clone ID: LIB3607-058-D3_FLI
catcaacctctgcagctacaggacagcgtgcttgtgagtggctgtgcttccgtaggggtagtagggtgcttgcgttgcgttgcagtgcagaggacactgacggacggcgaagaatcgaagatggaggcgtacgctgctggagccaagttcgactgcttgctgttcgacatggacgacactctgtacccgctgagccttggcatcaacctagcatgccgcaagaacatacaggagtacatgctgaagaagctgcggatcgaggagagccaggtccccaggatgtgcctggacctgtacagggagtatgggaccacaatggccggcctcaaggttttggggtacgatttcgactacgacgacttccacgcctgcgtgcacgggacgctgccgtacgagaaggtgaagcctgacccggtgctcaggcagctgctgctttccctgccgcagaggaagatcatcttcaccaactccgacaaggcccacgcggccagagtcctggagaagctcggcctccaggactgcttccaagggatcgtctgcttcgagacactgaacccgccaccaccaaccgagaccgagaagaacagtggcagtgctgggacgatcctgtgcaagccctcgctggcgtccatggaagccgtcatcgagatcgccaagctcgacgccgagagaacggtgttctttgacgacagcgcgcgcaacatcgccgcagggaaggccgccggtttccgcaccgtcatcgtggggagctcggcgctggtgccaggggcggacgtggcgctggagagcatccacaacatcaaggaggcgctgccggagctctgggaggttgccgccgccgctgccgccggcgaccgcgtcgacgccgtcctccggtccaccaccgccgtggagaccacagtgattgcctgagcaataataccatatgacaaatgacattaaccgtcacggactcacggccacgtaatataatgctggcgtgtagtatttcttgtgacgtgcaaattaaaatgacttggaatgtggtgtgcctgattaagtaccgaccgaggtaactaatactactgtatatgacagaccagaactttactggtaataaggtttgtatagctcatccctgtcggcccgtgcttttttatggcgcggtccgtggtgcaaatggatgccacgtactgaatacaaataaatatatat

SEQ ID NO: 24182 - DNA, 669 bp, Zea mays
  Clone ID: LIB3607-058-F7_FLI
gcggtaatcccacgtcctatcagccgccgatccagccttgcttccatccatccatccatccatccatccatctcgtcgcttctctctgttccgcgtgcgatcgagtagatcaaaaggaggaggaggatggcgaggagttcgttcaagttggagcaccccttcgaaaggaggcaagctgaggctaaccgcatcagggagaaataccctgacagaatccctgtcattgttgagaaggccgagaggagtgacatcccagacattgacaagaaaaagtaccttgttcctgccgacctcacagtcggacagtttgtgtatgtggtacggaagcggatcaagctaagcgctgagaaggcaatcttcatcttcgtaaagaacaccctcccaccaacagctgctctgatgtctgccatctacgaggagaacaaggacgaggacggcttcctctacatgacgtacagcggcgagaacaccttcgggctgttctgagtgggcgccgctatggatccacattgggcaatgcctcctgtaaatactaaacatgcatcacaagaatctgtgtccataacgtaatctggtctgtctgtctgtctgtctgtctgtcattacgcaacttgacgtgcaatgctaaacacatttaagtaataatatatactactctgctttgggatg

SEQ ID NO: 24183 - DNA, 1931 bp, Zea mays
  Clone ID: LIB3607-059-A6_FLI
caaagctctagttctagctagctagcaaagggggggaaaatggctccgcttctcgctgctgccatgaaccacgctgcagcccatcctggccttaggagccacctagtaggacccaacaatgagagtttctcacggcaccacctgccgtcttcttctccacagagcagcaagcgaaggtgtaaccttagctttactacacgatctgcaagagtaggcagccaaaatggagtccaaatgttgagcccctcggaaatcccacaaagggactggttcccctctgacttcaccttcggtgccgccacttcagcgtaccaaattgaaggtgcttggaatgaagatggaaagggggaaagcaactgggatcacttctgccacaatcatccggaaaggatactggacgggagcaattcagacattggagcgaattcgtaccatatgtacaaaacggacgtcagattgctcaaggaaatgggcatggacgcatataggttctctatctcttggcccagaatactgccgaagggaaccaaagaaggaggtattaacccggatggcatcaagtactacagaaacctcatcaacttgttgctagaaaacggcatagagccatatgtaacaattttccactgggatgtacctcaagcactagaagagaagtacggcggcttcctagataagagtcataagagcattgtagaagattacacatactttgctaaggtgtgctttgataacttcggcgacaaggtgaagaattggttgacctttaatgagccccagacatttacttccttttcctacggaactggggtctttgccccaggtcggtgctcacctggactagactgtgcctacccaactgggaattcactcgtcgagccttacactgctggccataacattctcctagcccacgctgaggctgttgatctttacaacaagcattacaagcgcgacgacacccgcatagggcttgcgtttgacgtaatgggtcgtgtgccatacggaacatcgtttctggataaacaggccgaagaaaggtcctgggacatcaacctaggatggttcttagagccagtggttcgtggtgactaccccttctccatgagatcattggctagggaacgactacccttcttcaaggacgagcagaaggagaagctcgccggttcctataacatgttggggttaaactactacacctcacggttctccaaaaacatcgatatctcaccaaactactcacctgtgctcaacactgacgacgcctacgccagtcaagaagttaacgggcctgacgggaagcccattggtcctcctatgggaaatccatggatctacatgtaccctgagggcttgaaggatctccttatgatcatgaagaacaaatacggaaacccacctatctacatcacggagaacggaatcggggatgttgataccaaggagacacctctacccatggaggatgccttaaatgactacaaaaggctagattacatccagcgccacatcgctactcttaaggaatcaatagacttgggatcaaatgtgcaaggctacttcgcttggtctctgctggacaactttgaatggttcgccggcttcaccgaacgttatggcattgtctacgtcgaccgcaacaataactgcacgcgctacatgaaggagtctgccaagtggttgaaacagttcaacgccgcgaagaagcccagcaagaagattcttacgccagcttagaaatcgggggcctcatgatgtgggtgcagcccataaaaaactggtgtgtggtttcgaaccgaaaattttctgtttttttccgccacgagaggttctggaggcatactctccagcaccgtggctaataacgcattgttccaattcagtctggccttgtcatgcatgcaataaataaagtgatgggtttccct

SEQ ID NO: 24184 - DNA, 1103 bp, Zea mays
  Clone ID: LIB3607-059-C6_FLI
tctcctccgtccttcaccgcttccttgaccctctctcttccccaccccacccacggaaagcttcgagctttctctctataccccagggagaaggaaggaagccggcacagtctactggccttgtggtgccggcaactgactaggatcgagaaatagggttcttggagagcggccggtccatggcacagcggggcgagctggggcggcagctcccgctgagaggccccctcaaagccctagaggcagacatccaccacgctaacgccatggcagatgctattcagaggaattatggtggcgcatgtgtgcagatgaggctgtcgttcagctccctggctccattgtttttgtacttcatccaatggctggactgcggctgctgttatgcccttcccagctatttaggattgtttcacattctcatatgcaaggtttatgctgatggagatagctcagtgtcgacatatgaaaggcgggcaagccttagggaattctacgcaattatctatccgattctgcagcagcttgagagtagtttgatcgagagggacctgaaagggaagggccgatgcaaggatatagtgagtaggaggaggatggaggattggaaaaaggtttccggtagggatgtggaaagggaggatgaatgtgggatctgcatggaggcatgcaccaagatggtcctgcctaattgcagtcatgcaatgtgcataaagtgctatagggactggtataagagatcagagtcatgccctttctgccgaggaagcctcaaaagaatccggtcgacagacctttgggtgcttacaaattccaacgatgtcatcgaccctgcacatttagaaaaggaaaacgtgaggcatttctatagctacattgacagcttgcccctaatacttcctgatagcattttctttttctattacgagtatctactataacgccaaggcaacatacatcagatgtgtaaattgcgaaaagcagatgaaatcatggttttcttttgtagatgaaccccctctcactctgaccacatgcatgtctatttacccataggctgctaatgtaaacattaatgcatctgtcaataaagttgttaggag

SEQ ID NO: 24185 - DNA, 527 bp, Zea mays
  Clone ID: LIB3607-059-H2_FLI
cggccaggttcccgaacagcgcgttcgtgaacaaatcctacgccgtgaaggtgcccggcgcgccggcgtcgtggagctacagcctcaacctgcagcggctgtgtttccggacggcgtacgtggcgagcaccacggggctggccctcctcttcccctacttcaacgaggtgctgggcgtgctgggcgccgtcgtcttctggcccctcgccatctacctccccgtcgagatgtactgcgtccagcgcggggtcctgccgtggacgcggacgtgggtcgcgcttcaggcattcagcgtcgtctgcttcgtcgtcggcaccttcgccttcgtcggctccgtcgagggagtcatccgcaagaggctcggctagttgtggtattagcgccttttctgtcgtcaaccatgtcatgaatggtggaagtgtgtaaagagagtgtactgtatctaagttttttttatttccctgtgttcgcttagccatgagcccatgaccatgatgattgatgaatatatctacccgtgcgtgttt

SEQ ID NO: 24186 - DNA, 1485 bp, Zea mays
  Clone ID: LIB3607-060-F2_FLI
gtggtgattggaggcctagcaatcatgtctgggaagttaactgctgagcagttgacaaaattcacactctatgctgaatggctaattttgtccacatggtggattggggacaactggtcctccctgatgcagtctgtcggagcaagtgaaaaagtttttcgtttaatggatctccttcctagcaagcagcttagctctgaaggcctcaagttagagaagttgaaagggcaaattcagtatgctgatgtatcattttcatatccatcaagacctacggtaccaattttgggaggcttgaatttaacactgaatccaaacgaagtagttgcaattgttggtcttagtggaagtggcaagagcactataatcaatttactacttagattatacgaacctacaaatgggcaaatactaattgatggtgtcccgctcactgagcttgatatcagatggttcagggaaagaattggtttcgtcggacaggaaccacgcttattccgaatggatatcagctctaatattaaatatggttgcccaagagatgtcagtcatgaagaagtgatatgggctgcaaagcaggcctatgctcatgacttcataatggctttgcctgatggttataacaccatcgttgatgatgctcttctcagtggaggtcagaaacaacgtgttgctattgccagggcccttctgagggacccatctatcttactgcttgatgaagccactagtgcgcttgatgctgagagtgaacattatgtcaagagcgtcatcacaaaagttagtcgagattcaaaggctaaaagaactgtggtaatcatagcacacaggctatctacaattcaaacagctgatagaattattgtgatggaaaatggtaatattgtggaggatggtaaacacattgatcttattgagaagggtggtctatattcaagattagccaggcgacaaaatgacgatctcaagtagccctggatcacagaatgtggtttagtgcacgccttctttttaaatggaatggcagaagggagagtcgtctgtcattagtgtattctttgcaagaactgacctggacccaggagctcgaataagctggcattgtttttcccatgaaccagaaacggtttgtgactgatcaaaataaaccaaaacggtttcccccacgaggacgagcacattaagcatcgagagcggcagtatggagaacagacttctaagaggtccagtattgtaaaagtagcttccataacaaagtgtatatgcgtttttatcttgttatcgggaactctgaaacttatcttacactacacacggaggaaacgctccaattttgttacgagcactgtgtgccttatttcctgaattttcgtgtaaaaatgtactccctgcgtcccaaaacagttgacgttataatatttatagttaaacttgtaacttaaattattagcaacataaattattataaaaatatatttaaagatc

SEQ ID NO: 24187 - DNA, 936 bp, Zea mays
  Clone ID: LIB3607-061-A11_FLI
gagacgggcaggggaggaaaaaaatctaaccctagcatccgcagcgctagggttcgggggttgcgatggcggcggcggcgaggcagcgggggacggtgaagtggttcaacgacaccaagggcttcgggttcatctcccccgaggacggcagcgaggatctcttcgtgcaccagtcgtcgatcaagtcggagggcttccgctcgctcgcggagggcgaggaggtggagttttccgtctcggagggtgacgaccctggccacatggccagggactgctccagcggcggcggcggctacggcggtggcggcggcggtggtggtggcggctgctacaactgcggccaggccggccacatggccagggactgcccaagcggtggcggcggtggcggagggaggttcggcggcggcgggggtggaggcgaccgctcctgctacaactgcggcgaggccggccacatcgcccgcgactgtcccacgtgaggtgtgtccgcgtccgtccagccagccagatcggatcggatcgctccaccacctgctggtctgatggcgccgcccccttctagatctcgcttaaaaaaacatccccctctcgctgtgtgtcggagtaccgctttagttttgccgatccgggcacgagtgcccgctgcctctttcctctcatgcgtaagaggatcccgtccgccgttttcagatttcgttcggttcgtagaagaactctcaagttaagttaagttatcatggtgtgtgcttggtcgtcgtccgtcgtcgtcgtcgttaaggttttaagagatgatttggtcctgtgttgccgaggggaagtccaatctgcttttcttttctttttttgtggtttgttccatcagacttgaggaaggagatgagatgattattctcccagattataatcctgcctgcttgtgcttgatttggttac

SEQ ID NO: 24188 - DNA, 1273 bp, Zea mays
  Clone ID: LIB3607-061-A2_FLI
cgacgacgaagcggcactgcttgcgcttcaccaccgtcctggcgacgacgcttctctccgccaccgccgcctgcctcgacgtcggcttctacgacaggacatgccccactgccgagaccatcgtgcagcagaccgtggcggccgcgttcaggaacaactccggcgtcgctccggcgctgatccgcatgcacttccatgactgctttgtcaggggctgcgatggctcggtgctgatcgacacggtaggcaacctgacggcggagaaggacgcgccacccaacaaccccagcctccggttcttcgacgtggtcgaccgtgccaaggcgtcactggaggctcagtgccccggcgtggtctcctgcgccgacgtgctcgccttcgcggccagggacagcgtcgtgctctccggtggcctcggctaccaggtgccggccggacgccgtgacgggcggatatccaatgacaccgaagccctcaacaacctgcctccgccgttcttcaacgccaccgagctggcagacaggttcgcctccaagaacctcactatcgaggacctggtcgtgctctccggcgcgcacaccatcggcgtcgcactgcagcggcttcgccggcccgacagacctgaacggccccgttgaccggctctacaacttcagctcgcctgacgggattgacccgacgctgagcaaagcctacgcatttcttctcaagagcatctgcccggccaacaccagccagttcttcccgaacacgacggtgttcatggacctcatcacgccggaaaggtttgacaacaagtactacgtcggcctgaccaacaacctgggcctcttcaagtcagacgtggcgctgctgaccaacgcgacgatgaaggccctggtcgactccttcgtgcgcagcgaggcgactttcaggaccaagtttgccaggtccatgatcaagatggggcagatcgaggtgctgacggggacgcagggcgagatcaggcgcaactgcagggtcatcaaccccgttagtgccaccgatgatgtcgtcctcgcccgcccatcaggattcactggagtggctgcgagctagctaaccaactgtcggttcatgcacatgcattgtgcagtgtgtgatgtctagtgtgagttgatgtgtgaaattgtaataagtaatgagcagattatcttggtaagctcgcttgttactgtggcaaaagttgttttgttgcatgacaaaaatgtatactcatcggattattgaaaacaaaactgatatttgttcaggc

SEQ ID NO: 24189 - DNA, 588 bp, Zea mays
  Clone ID: LIB3607-061-D3_FLI
gcagcagcaggacacacagaggtcctcggcccggccgtgcgtggcagcacgttcacgttgaccaccggagctcaaacgcaacagccgcccatcatcagccagccgagccatcatcaggagagttcaggtggtgcaagagctgcggggaaaacaaaaggcatcgatccatccgtcggtcgcccaatcatgattctgggcttgggaggatgctgcggagctgccgccgccgccgccgccgtgtcgccggatgccgtcggtaagcaattgggaggccatctagaggccagtgagcggcagcagaagaagcgggggccaagtgatgagcagaagatgaacaagggaggcgagcagggagcggcggtagcagcagggggcggcaaggagaggagcaagacgaaggatcatcacaaggctcccccgatcgttgtgcatcagttccccttccactctcgccccggcttgctctgaattcctctactcatcttggcgtcatgtgcgtgtttgtgatcctgtaattattcgcgatctcgtgtgttatccattgagatatagtattacagtataagaaacaatcattttctcaacacc

SEQ ID NO: 24190 - DNA, 967 bp, Zea mays
  Clone ID: LIB3608-001-E3_FLI
cgctgcacgcacagggcacagctagcagcaataatggaagtagtcggcggcggcaggcacttcgtgctggtgcacggcctctgccacggcgcgtggtgctggtacaaggtggccaccgcgctggaatccgccggccaccgcgtgacggcgctggacctggcggcggcgggcgcgcacccggcgcgcctgcacgaggtgcgctccctggaggactactcgcgcccgctgctggacgcggtcgccgcggcccccgacggcgacaggcttgtcctcgtcggccacagccacggcggcgtctgcctcgcgctcgccatggagaggttccctagcaaggtcgccgccgccgtgttcgtggccgccgcgctgccgtgcgtcggcaagcacttgggtgtcaccctcgacgagttcatgagaaggaatgcttccgaagggctgctcatggactgccaacgggtgcccatctccggcgtggggcagcaagggacagcgatcgtgatgggtccaaggtatatggaggagaagtactaccaggagagcccctcggaggacctgaccctggcgaagctgctggtgaggcccggcaaccagttcatggacgacccgctgatgaaggacgcggcgctgctcacggccgccagctacgggtccgtcaggaaggtgttcgtggtggccaaggccgactgctccagcaccgaggagatgcagcgctggatggtggccatgagccctggcacgacggaggtccacgagatcgctggcgccgaccacgccgtcatgaactccaagcctgtggggaactctgcgacgtccttggacgggtagccagcagctgtggctgagaacatgacgacgacgactattgttgcagcttgtagtgtagtactacactactagtagcacctgtatatctcgtgaacactgcttatattattgaatgaataaaatgactcgggttatttcgaattac

SEQ ID NO: 24191 - DNA, 1977 bp, Zea mays
  Clone ID: LIB3608-002-A4_FLI
cgcttccctcgtcaaccaaatcaactcgtgaggtctcctccccatcgccacacccacgcgccgcgcaccgcccgcccgctcgccccgcctccgatccctaatcaatcggcctgaccctagcccgccgccggccgcccacgcccgcccgcctcggctcgtctcaaatcgggcgccccaggggagcgaggcctcgatcgcggcggaccccgatgctccgcattccggcccctccggcgacgtcggcggcagcggaggcatgatccggtggggactcggcggacctgccagccatggacgccaccgcacgcccggccatcgtcatcgacaacggcacagggtatagcaaacttggattttctgggaactcggagccgtctttcactctccccactgtagtagctgcgaatgaatcttttctagaccagacagagctgttgagtagtgcaaactggatagcacagtataatgcaggcatcatggctgatcttgacttttttattggagatgaggctttatcgcggcttaggtctagtgggctgtacactttaagaaggccaatccgtcatggtcaggttcatgactgggatacaatggagagattttggcagcaatgtattttcaattatctacgttgcaatcccgaagagcattatttccttcttacagatagtcctgtcagtacacctgaaagtcgtgaatgtacaggagaaataatgttcgaaaccttcaatgtccctggactatatatttccgttcaatctgttctcagcctttctgctggatatgcctatctgaaaagtatttctgatgacgattcagatactgtgtctgatatgacaggggtagtagttgatattggggatggagctccacaaattgtgccagttgtaaatggctatgtaatcgggagtagcataaagtcttttcctttctccggaagtgatgtaacccagtttgtttcacagcttttacaggaaagaggtgagcttttgccacctgaggattctttagatatatctcgtaaagtgaaagaaatgtattgttatacttgttcagacattgtcaaggagttcaagaagcatgacaggaagcctgataagtacatcaaacattggtcagctgttaaaccaaagactggggtcccatatacaattgacattggatatgaacgctttcttgggccagagatcttcttcaatcctgagatttactctgccgatttctccactcctttgcccgagttgattgacaactgtgttcagtctgcaccaattgacacaaggagagctctgtacaagaatatagtattatctggtggatctaccatgtttaaagacttccacaagagactccaaactgatataaagaagatagtggatgaccgtgttgctgcgactaatgcccgtcatcgtgtggaagtgagacctattgaagtcaacgtggttgcccatccaatacagagttacgcggtttggttcggggggtcactagctgcatctaaccctgacttctttgagttttgccacacaaaggaggactacgaggaacatggagccagcatctgcagaacaagccccgttttcaaaggaatgtactgaatttttcctcacgacccatcctctagctggtgagctcatttaggtttcttcgacagaatatagtcaattttgattcttttttggtgcgttccaaccattgtcgggccaccctgattaggtatgtagctctgtttgtactagttgtttgttttgtgttctgcgtcgaatgttgtgtatagccaacagtttggttcctgttcgaggtgcttcattgtagccagaacctcggacagtttagaggaaaaatatttggttattcttttacattagcttgttcagacagatttacgggactcttattaataagagaagtcaaatttaggactttgtcgtggatgaccacattatttcaattgaataatatggtatccctactttc

SEQ ID NO: 24192 - DNA, 1991 bp, Zea mays
  Clone ID: LIB3608-002-B2_FLI
gggcgaacatgcgagcccctagaaacgatgacaaccaagagagtgcctcctgtcctcctaacatcgattttcctccggaatcgtaacctcagaaagccaaatctcattctccggcgctcaggcccacccaagcgtcgactctcccgatccaatcggtacctcctagttcctcgccggcggtagcggcgtcgggcgaacagcggtgacttggcgagggcgcttggccggcgacaatcatccactaggatggaaggtgaggcagagaccgtggttggttcttgttctaaaccatgtgggcctctggaggactactacattccagattacattctgaagccaggtgcccaacaagtacttgttgatcatgcggcaccctgccccgttgtagtgttcatcaactcaagatctggaggccaacttggaagtagtttaatcaaaacatatcgtgagcttctcaatgaagcacaggtttttgatctctcaaaagaggctccagataaggtattgcatcgtttatatgccaaccttgaaaggctgaagatggaaggagacattcttgcagttcaaatttggaggacactgaggctaattgttgcaggcggtgatggtacagctagctggctgcttggggtagtcagtgaccttaagctttcccacccacctccagtggcaactgttcctctgggaaccggaaataacctccccttttcatttggatggggaaagaagaatccttctactgaccaagaggctgtaaaatcattcctcgggctagtaaagcatgcaaaagaaattaagattgatagttggcacatcattttgagaatgcgagttccagaggaaggtccatgtgatcctattgctccattagatttgcctcattcattgcatgcgttccatcgtgtctcaagtagtgattctctcaatatggaaggttaccacacattccgtggaggattttggaattactttagtatggggatggatgcagaagtgtcttatgcatttcattctgaaaggaagaagaatccagagaagttcaagaatcagctgacaaatcagggtacatacgctaagcttggacttaaacaaggatggttttgtgcttctcttagtcagccatcatcaaggaaccttgctcaaattgcaaaagtaaagatcatgaaaagagctggtagcctctgggaggaacttcacattcatcacagcattcggtccatcgtgtgtctgaatttgcctagtttttctggaggtttgaatccttggggcacacctggcacgaggagagcagaagatagggagttcactgcaccttttgtcgacgatggacttcttgaggttgttggcttccgtgacgcctggcacgggctggtcctgctggcccctaatggacacggcactcgcattgcccaggcccataggatccgctttgaattccacaaaggcgcagcagagcacacgttcatgagggttgacggagagccctggaagcagccccttcccaaggacgatgacacggttgtggtggaaatctctcaccttgggcaggtcaccatgctagcaaatgagccgtgcaggtccaagagcgtcaacgaccagtcgtcactgtcgccggcgcacgacagtcatggtgattacaatgatatcgctgaggaggacgaagacgagtgggaggacggcaggaggaagtttggggcggcagatacatttaagattcctgacgagattgacattgctcatttcagttgagctttgactagtgcatcgtcgtgtgcgttctgatcatacgagtatggtttggtttataaccatctcctttcttttgatttcatatatttgcgatatgattgttgcagccatgtgtaagtgaatcctaggtaaccaagtgctgcgttgctatatatgaccaatgtatgtatagattcagtggaacggtaaaaacacgcgaactctacggttttctccttttgttgttaccagttcaattgaac

SEQ ID NO: 24193 - DNA, 1279 bp, Zea mays
  Clone ID: LIB3608-002-C2_FLI
gaagccaaacagatctcctcgtcgtcgcctcgctgtctcctccgccgttgcctgcgatcccgatatcatcatcgtcgccgtcgtcctctgcatcatctgccgctaggctcgctgaacgtctacagagaagaaggaggttcagccccgtccgtctctgcactctgctagctgtacgtacaatgtcaaatcagcactaacacacccacgcgtccgggcggcgcgggcggacaaggagcaggcggaggaggagctgtgccaagccacaatgggtatctcgcgtgactcgatgcacaagcgccgggccaccggtggaaagcagaaggcctggaggaagaagcgaaagtatgagcttggtcgccagccagccaacaccaagttgtcaagcaataagacagtgaggagggtccgtgttcgtggaggtaatgtgaaatggagggctcttcgccttgatactggtaactactcatggggaagtgaagctgttacccgcaagacccgtatcctcgacgtggtctacaatgcatcaaacaatgagcttgtgaggacacaaacccttgtgaagagtgccattgtgcaagttgatgctgccccattcaagcagtggtacctcactcactatggagttgacattggtaggaagaagaaaacccctgctgcaaagaaggataatgctgagggacaagaggttgaggcagcagctgaggaaacgaaaaagagcaaccatgtcacgaggaagcttgagaagcgcaaggagggacgtacccttgacccacacattgaggagcaatttggcagtggacggttgctggcatgcatttcttcccgccctggacagtgtggccgagctgatgggtacatccttgagggtaaagagcttgagttctacatgaagaagctacagaggaagaagggcaagagcgctgtagcttagagcattctcatggattgtcttgcaccgaaatgtgtgtcctgatgagtacactttttttggttaatcgtctcaagttcagagcgttatgccatgttttcagacctgattagtacactgttttctaaaagcgattgagctctagtccaatgtattgataatatctgctgttgtcctattgcggtgatgttgatttgccctgttcgctagctgcaatagttcctatttgttgatgaatttgtttgaagcataaacgcagaacatgtcgtaaagaaaacatttttctgtaatattagcttgtaagatcgtcatggcatcactgcatatataggccctgtttgggagagcttc

SEQ ID NO: 24194 - DNA, 1165 bp, Zea mays
  Clone ID: LIB3608-002-F7_FLI
gcaaaccccagcctccgttactctccttcctcttggctcgcctcggctcccgtcgtccccttccttgagatctctaggatacgagcgcattcgcatcgcttcgcctccgccgcggcctggggagatggcgggtttgggaaaggcgatgtacgcggtgggattctggatccgggagaccggtcaggccctcgatcgcctcggctgccgcctgcagggcaagtacttcttccacgagcagatttcaaggcatcgcaccatcatgaacatctttgacaaaaccccacatgttcatagggatgcatttgttgctccaagtgcatcccttattggtgatgttcaagtcgggcaaggagcttccatttggtatgggtgcgtcttaagaggggacgcaaacaacatacaaattggatctgggaccaatatacaagacaattctcttgtgcatgtggctaaatctaatctaagtgggaaagtctttccaacaatcattggcaataatgtcacaataggtcacagtgctgtgttacaaggatgcacggttgaggatgaagcttttgttggcatgggggcaaccctattagatggtgtcgttgttggaaagcatgggatggtagctgcaggatcccttgtaagacagaatactaggatcccttgtggagaggtatggggagggaaccctgccaaatttctgaggaagctcacagatgacgagatcgcatttatcacggaatcagcttccaactattccaatctgtccaaggtgcatgctgccgagaatgccaagcctcttgaaaagattgagtttgagaaggtgttgcgcaagaagtttgctcaccaggatgaggagtatgattcctccatcggcatcactcgagggtccccaccggagctgacatccccaaatccagcccaataaacctctgtttttgtttctgttttctctttgacgccttaattattttgtattggacagcgctggattttgaccgggccatagttccatgacttaggtggtttatgtttacttttcctccccaataatcttgggtcgagcgatgttataaagctggtcatgcacttcttccagattctgtattcggtatgtttaagatgtgctccctggagagttccaccaaataaactgaaatgcattgttttgacaggt

SEQ ID NO: 24195 - DNA, 2631 bp, Zea mays
  Clone ID: LIB3608-003-D8_FLI
gaaaagttccgaaaatgccaagaggagctggaacaaagaaatcttgagttatctgcgctgagaagaaagataaatggtttacattctaatgaactggaagtttgtgaatctggtgcgacatggaagtaccaagctagaatagcagatctagaggatactgaacctgagacagatacacttaaggctaggtttgaactgcagctacaggaaaatgatgaccttcgtcgttccaaggttgagatgcagaattttatttctgagtttcaggcagagaagagtcagcttgaggaacgcctgtccgcgtcgcttaaagaaagcagcatcacatctaaatgtctggatgaagtgcggaaagatatccttgtgctttccagcagtatagattcccatgtttcaaccaataaacttcttgagaggaacttagttgagctagagagctgcaaagctgaactagagttgcatgtatcggagctggaacaggaaaacgtcgagttgtcagaacggatatctggacttgaaacacaactgacttacgtgacaaatgaaaaggagtcaagcgagctgcagttgcatgactccagatctctcatcatcaatctcaaagataaagtagagtgtcagcaatcagagatggaaactcaaaggctccagtttaagcagaaacaacaagaatctcaaagaagattgtgcgaagcacaagatgattctgaagttctgagaagatctaattgtaaactacaatctacggttgagagtcttattgaagagtgcagttctcttcagaatctaattgctgatctgaaaaggcagaagttggaattacatggtcatcttacgcaaaaagagcaggaattggatgagtcgaaaaaaaagaactttgagtttagcaaaacagtggagttccttgaggcaaaacttttgtcactacagaaggacatttcttctaaagaacaatctttattgtcagaattggagaatattttccaggagcacatggaacaagaagaaagaattaatcgcgcacatttcatgctcaataagatcgagaaagaaaagactcttgaagtagagaatcttgaaagggaggtcgtcagcctcgctgcacaggtctcctccacacacgaggagcgagaaagtgccactctgaatgctattcaagaggtatctgtcctgcgagcagacaatgctaaacttgaggctaatctccaagatgttagtgaacagctgagatgttacgagtctcaattggaagaccttcgtaaggagtctaaaagtaaaattaaaggattggttgattcccttaatgcctccaaacaaagcgaggaaatgttgacatcagatgctgaacatatgaaaaagttgatggaagctgctaaatccaatgaagatgcactaaggaagacttctaacgaactagaactgaagcttaaatccagtgattatgtgaaacaacaaatgctggaagaaatatctggcctgaaacttcaggttcagaaaataatgaatcttcaagatgaggtttccaaacttcagagttctcttgatgaggccaagttcgaaaaagggaaacttgaggagtttctgcgctcggtgactgaggaatgtcaagaactaaaagcacagaaggctatgctaacagataaagtttcttatatgcaggagaccttgagaaatggtgaagaagaaaaccgaaacagaatagctatgcatgcaaagctcatgaggttggagagtgatctaacagcattagaagcatcacatgtacatgaagcagaattaaagaacgaactcagtaggatcaagagatcaaacagtgagtatcagaggaagatacaatctctcgggcaggaaaatgaggatctcactaggcgagttcaaattatggaaaagggttttgagcgaatgtcccacgctaaagagaaccttggaaagcaggagattggaggagataaccaggaagccatccagtcaacaattcagttactggaaattaagcttgcagaggcattggaggaaaataagatatacagagctcaacagaagagttcgatgtctgaggggcaacctgctggtggagatggcaaggagggcaataccgacaggattttgcagttggaaggagagctgagagatatgaaggaacgattactcaacatgagcttgcagtacgcagaggtagaggctcagagggaacggttggtgatggagcttaaagctatcaagaaaggcaggtggttttagcaggatgcggagttgttgcctgacataaaacatgaggctgacaccacagaactacaggtgggcatcatcaagccgtgctatgtccgtgcttgtagcaatacaacgtttattatcatgtgagactgagagcaagcaagtgcaagtgcagagtcagacagtgatgtagcctggacgtgctaactggtgctggagcatgtgtctcactgaagctccgtatgatgcggtacccagcccttggggcgttgtcccctagagtcatgatcccgttcttattggtatttatttttaatggtatataattaatatatacgccagtatgtattgagtttgactggagagtgatggtcagttgttgataccatccgatccctctgttttacatgattgatt

SEQ ID NO: 24196 - DNA, 747 bp, Zea mays
  Clone ID: LIB3608-003-E5_FLI
gagaataactaatcaagatcgatcgagaatggcgtttccgaagcctactagtcgtctagccgcgctagctgccctcgctgcggccatggcggcggcgatgatggccgcgaccgcctcggcgcagaacacgccgcaggacttcgtgaatctgcacaaccgcgcgcgcgcggcggacggcgtgggcccggtggcgtgggacgccagggtggccaggtacgcgcaggactacgcggcgaagcgcgccggggactgccggctggtgcactcgggcgggccgttcggcgagaacatcttctggggctcggcggggcgggcgtggagcgccgccgacgcgctgcggtcgtgggtggacgagaagaggaactaccacctgagcagcaacacctgcgaccccggcaaggtgtgcggccactacacgcaggtggtgtggcgcaggtccacccgcatcggctgcgcgcgcgtcgtctgcgccgacaaccgcggcgttttcatcgtctgcagctacgaccccccgggcaacgtcaacggccagcgcccgttcctcaccctcgacgcggctgccaagtagaggcagagagcccggctgcatgcagtgtgcgtacgcacgcatctgcgtgtgcatggcgtggctactcgatcgatcacgtactgcgtgtgcgcgcgcaccataataagtattgtgtgtgtacgtatatatccgcatctgcagtgtttgtgtcatatataaaataatcgtctgcgtgcgct

SEQ ID NO: 24197 - DNA, 1069 bp, Zea mays
  Clone ID: LIB3608-003-G3_FLI
gcaaaaaaaaaaaagagcagaaaaagtagagtagactacgacagcgtccggcgaggaggcggaggcgaagatgaggaagaagctcggcacccgattccccgcggctcgaatcaaaaagataatgcaagcagatgaggatgttggaaagattgcactagcagttcctgttttagtttcgaggtctcttgaattgtttttacaagatttaattgaccgtacttatgaaattactcttcaaagtggagcaaagacactgaattccttccacctgaagcaatgtgtgaagaggtacagttcttttgatttcctaactgaagttgtcagcaaggtacctgatcttggtggcgctgattcctgtggagatgaaagaggattacctagaagaagaaagtcaaatggcagtgacccagagaatgatgaatcaagatctagtaaaatggccataagaaatgcaaacatcagccccagaggacgtgggaggggtcgaggcagaggacgaggtcggccaccaaccaagagaaaggaggttggttatgtacaatttgaagatgagagcagcatgtttgctgaacaaggtgagcccttgccaggagaggaaacagttcaagagatcaatggcaacgagaccatgcctcaaagcacgcaacctccagtagaggctccgccaacagcccttgcacaagctacaacaagttctaaggcggaagaagcgaacagtgatcatcagtcagattggcctatgccagatgccattggaagcatcggtgtcgtgccatctggttttggacatctgacagtgcaggttgaagatgaggactacgacaatgaggattagtcagggtcatcttctcattgtatgcactaacaggactgttctggtgttgtaaaatgtaaatatagtttgaaatagttgccgcagtttacctgtgattgtctgtcgttttatgcggttatgtagtcctgtgtaactttcgttctccaataattgcttggtagttgcttttttacatgattcaagtgttttgtcacatttaacacagtatttgagcagggattgcctattttaagt

SEQ ID NO: 24198 - DNA, 1081 bp, Zea mays
  Clone ID: LIB3608-003-H12_FLI
ctctcgtcttcttccccaccccacctgtgacccacgcgttcctcagatcagatcggcaaggccaatccgaaatctcgagctttcgcgccggcgaccacagcaaagaggaggccacagcacgacagcgccccagggttcctactctcgtcgcagcggcagcagtgaggggaagatgtcgtcggtgttcagcggcgatgagaccgcccccttcttcggcttccttggcgccgccgccgctctcgttttctcatgcatgggggcggcgtacgggacggccaagagtggcgtcggcgtggcgtccatgggtgtcatgcgcccagagctcgtcatgaagtccatcgtgcccgtggtcatggctggtgtgctcggtatctacggcctcatcatcgccgtcatcatcagcactgggatcaaccccaaggccaagccatactacctctttgacggctatgcccacctgtcgtccggccttgcctgtggtcttgctgggcttgctgcaggcatggccattggcatcgttggtgatgctggtgtcagggcgaacgcccagcagccaaagctgtttgtgggcatgatcctcatcctgattttcgccgaagcgctcgccctatacggtctcatcgtcggcatcatcctttcatcccgcgccggccagtctcgtgcggactaggcacgttccacatgtctccgccacctggtcgtaaccggggtcgtgttttgtatccgtgatgagccgacaagctggagcacttaatttttttatgctgtctagttttttgaacttgcgttgagtcgagaaaacaaaatagaacttgtgtagccgaggggtgacctttttcccttgtgccattcttttccctgtcgtggtgggtggtgggctgtggctgatgcttctttctgcacactttttttttttgcttgggctgggggcgttggtgtaatctggtgaataagcgagtgcgtccagtgcaatgggagctcaggactcctttgttcaaaatccgccttgtttcgtcgttgtcttgttctgtgttctatatgaatattgttgtgtgggaaatacatgcgtggctcatgaact

SEQ ID NO: 24199 - DNA, 245 bp, Zea mays
  Clone ID: LIB3608-004-A3_FLI
cctcctcgggcgcctcgcgcggcaccgccgccgcggcggacgacgaagaaggcgcggcggccggcggctggcgcttcttgctggggacgcagccgccgcccttgcccatctctggtttacgctctggtcaacgggcggcaccgatccgatccaatccaatccaacccaaccaccgtccccggcacgtcccgccccgctcgccgccgcacgcgggaaaccttggaattcggcggggcaggttgttg

SEQ ID NO: 24200 - DNA, 2147 bp, Zea mays
  Clone ID: LIB3608-004-C11_FLI
cgcagtctccgacctctctctttctttttctctctccctcgctttttctgctgtctatccccgcgccgcgcgaggttgctgccttggccttgctggttctttgcttgtgggatgagtggaaggaaggccggtcctcgctgcagaaagagggagaagacttcatctgcacgtgctgctgatgtgcattagaggatccgtgctgataatatacagctgacacccacaagatcgactggataagttcgagcctgacggcatcatgggttccggcgatttgagctcggagatggagaggacggttcttggcctgacgctgtgggtctggattgccatcggcgtggtcgcgcttctcgtggcaatcctgctgatgatctgcatttgggtggcgtcccgcctgaggaccaagagaaccatggacagcctgaggcagacgcagatccccatctactccaaggagatccccatcgaccgggtcggcgggcgcagcctggcacagacaatgcatgagcgcgagcagccgagcttgccgccgccggacaagtacgcgaaccgggagccggccggggcggctgtggggcacctggcactcagcaagtcctcggatcatgacaacatgagccaggggagctcggtttgcaatgctgaccgtgctggcactggcagcatgcactccggtgaggatgggagctcaggacctcggaggaaacccaactctcctgcggcgttcgtgtcagcttcgcccttggttggccttccggagttctcgcatcttggttggggtcactggtttactcagcgtgaccttgaacttgctaccaaccgcttctctaaggagaatgtgctcggggagggtggttatggagttgtgtaccgtggacgtctggtgaatggaactgaagtcgcaataaaaaagatctttaacaacatggggcaggcagaaaaagaattcagagtggaagttgaggctattggccatgtccgacataagaatttggttcggctgttgggatattgtgttgagggcgtaaacaggatgctagtatatgagttcgtgaacaatggtaatttagagcagtggcttcatggagctatgcatcagcgtggtgtttttagctgggaaaatcgcatgaaggttgtaacaggcactgcaaaagcgcttgcttaccttcatgaagctattgagccaaaagttgtacatcgagatataaaatcaagcaacatattgattgatgatgaatttaatggcaaagtatctgactttggattggctaaacttttgggatcagacaaaagccacattactactagagtgatgggaacatttggatatgttgcacctgaatatgctaatactggaatgttaaatgaaaagagtgacgtttacagttttggcgttctcttgttagaaactgtgacaggaaggaatcctgttgactacagccgatcttccaatgaggtcaatcttgttgaatggcttaaaacaatggtggccaatcggagggcagaggaagtggctgatccaagcttagaggctagacccagtatccgggctctcaagcgggctcttttggtggcactgaggtgtgttgatcctgactctgaaaagagacctaagatgggccaggttgttaggatgcttgagtcagaagaagtaccataccgggaggatcggagaaatcgtagaagtcgcactggaagcatggatattgagtccattgcagagggttccaactctgcggagtttggaaagaaggtagaaaggactggaagctctatatctgacagatctcaaccatgaggcctggaaatctaagctatatcaggaactgtctcagaaacgatgttaatcaccaaggtgattgctgtcctgataggggatgctggtaggtgacagaggcaaggcaggcccaggtattactgcctaagtattaggctttagttttcaggtgcagtagaagcattcttggatgaggaacctcctggtctcctcttatttgtataggtatatgttggtgcctgaggaattcctcttggtttgggtgtttaacatttgttcggttcttttatttcttgcattgttgccttcttaaatcagtttcacttctccctgatgaaatgctgaacatgaggttgtggacttgtggtct

SEQ ID NO: 24201 - DNA, 889 bp, Zea mays
  Clone ID: LIB3608-004-D12_FLI
ccacattccagttccactccgcctccgctgccggtcgccgactccgaaactccgacagtccgaccacaaggatccacagaaggatgagtgaagaggataaggctgctgcttctgctgagcagccgaagagggcccctaagctcaatgaaaggatcctctcttctctgtccaggaggtccgtagctgctcatccgtggcatgatcttgagatcggtcctgatgctcctgctgttttcaatgttgttgttgagatcacaaagggaagcaaagttaaatatgagctcgacaagaaaactggactgattaaggttgatcgagtcctgtactcatcagttgtataccctcacaattatggtttcgttccgaggactctttgtgaagacaatgacccaatggatgtgttagtcctgatgcaggagcctgttgttcctggttcgttcctgcgagcaagagcaatcggccttatgcccatgattgaccagggtgaaaaggatgacaaaataatagcagtctgtgctgatgatcctgaatatcgtcactacaacgacatcagtgagctgtctcctcatcgcctgcaagagatcaagcggttctttgaagattataagaagaatgagaataaagaggttgctgtcgatgcattcttgcctgcgaccacagctcgagaggccattcagtactccatggatctgtatgcgcagtatattttgcaaagcttgaggcagtagattggaagcaactatttatctgggcgtcttggaatgagtgtgattttaataagtcaaaacacttgatattgtgtgcaaatcttggggttgagaacaatgtcactagctgtgatttacttctgtgacttgcattttttttcttgttaaattatgaataagcg

SEQ ID NO: 24202 - DNA, 1619 bp, Zea mays
  Clone ID: LIB3608-004-H1_FLI
gtctctactcctcttcctcctctctctactctccaagttctcttctccgtcgaccgctctacacgtctcttgtcgacctggacaccgaggtggaagaaggaagcagtcagcagatggatccatggatcagcagccagccttctctgagccttgacctgcgcgtcggcctgccgccgctcagcctccaccaccaggcgccggtggccgtcgccttgcccaggcccaagctgctcgtcgaggagaacttcctcctgccgcctccaaagaaagaaccagaggtcgcggctctcgagacggagctgcagcggatgggcgaggagaaccggcgcctggcggaggcgctggccgaggtggcctccaagtacgaggcgctgcgggggcagtacacggagatggtggccgcggcggccacggcctgcgggaaccacccgtcgtccacgtcggagggcgggtccgtgtcgccgtcgcggaagcgcaagagcgagagcacggacaccgcgccgcccgcgcagcagctactgcaccagcactacccggcggtggcgccggaccagacggagtgcacctcgggcgagccgtgcaagcgcatccgggaggcggagtgcaagcccagggtgtcgaagctgcacgtgcacgccgacccggccgacctcagcctggtggtcaaggacgggtaccagtggcgcaagtacgggcagaaggttaccaaggacaacccctgcccgcgggcctacttccgctgctccttcgccccggcctgcccagtcaagaagaaggtgcagcgcagcgccgacgaccccaccatcctggtcgccacgtacgagggcgaccacaaccacggccagcccccgccacaggcgcaggcgccgcacgacggctccagccctggcgccagcaagaagccgccgtcgccgccgaggccggtcgccgccgctccggcgccgctccaccaccagcaggtccagcagcaccagcagcagcaggcggttggcgcggtgaaatgcgagccgcccgtggccgcggcggcgtcggagctcatccggcggaacctcgcggagcagatggccatgacgctgacgcgggaccccagcttcaaggcggcgttcgtcaccgcgctgtccggccggctcttcgagatgtcgccgaccaaggactgacggaacggatcggatggattgggagattggcatcgcaggagattctggatcagattgtcttcgagcgcacgccgcaatggtcaactgcgcagcgctggcttggctgtcagagcgaaacagcggtaacagagcaagacacgaggggtctgcactctgcagttgtgcaggaggaggaacagacacaaggggaggacggcgcgcggccggacatggcgtggaacagagatcgtcgtcaccgccggcgggggtgtggtcgacgacgcgacatgcgaaacactacgtgctagctagcataggaaaaaacaacatgaaatcgtacaaccaaccaatccctcgcactgttttagttgttagctgtaggcgaaactgttcatccaattgatcaaatgaaacttattttttccctagcactatgtttcatgagaatgagaccaggaatgaaccaacttgagtttgaaaatt

SEQ ID NO: 24203 - DNA, 1511 bp, Zea mays
  Clone ID: LIB3608-005-C1_FLI
cgtggtgcgacccgggattccctcgcgcttctctgtgtccccttcctccggcctgaggggaggaccccgcagatcccatcgaaattcacggccggcctaacccaagccggtcctccccgactcccggcgacgaccaatttctccctgttctcgcccctccaacccttcatgatgcttagataatatacagtgctgggttttagcactgttttgagtttttaaattgagctaaggcttcagtgttagtcttgaaagatgaacggttcaagtggttcccaagggcatcatgtcagtggagagaagaagcaagtgtgtcatgttagtcggcccattcttaacaatggaccaaagcaccgtccattgacccccatgaggcgatgccgtggtgtagcatgtgtagtgattatactgtcaacagcattcctgttggtagtttacttggctcctattactacttttgctgtgcggctgttcagtgtgcattacagccgaaaggcgacttcctttctatttggaatgtggttatctttatggccgttcttgtttgagaagataaacaaaaccaaggttgtcttctccggtgaaaatgtgcctccaaaacgacgtgtattgttatttgctaaccacaggaccgaggttgactggatgtacttgtgggatcttgcactgaggaaaggccatttaggatatatcaagtacatacttaagagcagcttgatgaagttgcctatttttagctgggcatttcacatttttgagtttatcccggtagaacggaaatgggagattgatgaagcaattattcagaacaagctatcaaaatttaagaacccgagagatcctatctggttggcggtttttcctgaaggcacggattatactgagaagaaatgcatcatgagtcaagagtatgcttcagaacatggcttgcctatgctagaacatgtccttcttccaaagacaaagggcttcatttgttgtttgcaagagctgaggagttccttagatgcagtttatgatgtcacaatagcatacaagcatcgactcccagattttctggacaatgtgtatggcgttgatccttctgaagtccacatccacgtcagaatggttcagctccatcacatccccacaacagaagacaagataacagaatggatggtagagaggtttaggcagaaggaccagctcctggcagatttcttcatgaaggggcactttcctgatgaaggaactgaaggagatctgtcgacgccgaagtgcctggcaaacttcttaacagtagtatgcttgacggccatctgtttgtacctaactcttttctcatttgtgtggttcaaggtctatgttgtagcaagctgcgcttacctctcatttgttacctattactccatactaccaccccaactgataggttcaccagagggtgatgtcaaggccaaaaaggttgtgtagatgttgatgtaacttgccatgaaaactgtacatccgcaaacgatttttactgctgg

SEQ ID NO: 24204 - DNA, 782 bp, Zea mays
  Clone ID: LIB3608-005-C3_FLI
cttgtatctcacaatggcaggcacaaagctaatatcacttgggctccttgttctcataggcataggactagccaatgctgtgagggtggccagatactctagtgctgatgggactggcacaggagagggacagggtggtggatatgttaatggtgggggatcaggatctgggtctggcaccggatctggtgatagtagtccttatggtgcccatgcaagtgctggagggggtggtgcgggtggtggagctagccaaaatggtgggtctggatatggttcaggatcagggtcagggtcggggtcaagtacatacagtcagggagggtattattcaggttatggagaatcttctaatgctggtggtactggtgggggtgggggtggtggacaagctggaggttattggaattccaacgctcaaggatccggtagtggcactggttctggttctagctatgctaacaggtattgggatggatcaagtgaaggaggtgcaaatgctaatggcaatggcggtggcatggggaatagtcaaaatggtgggggcggcggtggttcaggtgatgggtctggatatggcaatgcctacccatgaacttgatatcagttaatctaatgttgggcccaccatctttccttgtttgaagttgtaggattattattttccttgcctctttgttgtgcttttggtagaaccgaattaataaagggtccaactatcttgtaaggtccaacttataagatgatgttgtaacagtgtttgttaatgaaaactatatatc

SEQ ID NO: 24205 - DNA, 1222 bp, Zea mays
  Clone ID: LIB3608-005-F6_FLI
ttcccgtccggtctttccgttacccggcggctttaaaccctagttcccattccatcttcgtttccgctccgccgccgtcgatggagttctggggtctcgaggtcaaacctggatccactgtcaagtgtgagcctggacatggctttatcctgcacgtttcccaggctgcccttggggaatcaaagaaaagtgacagtgccttaatgtatgtcaaagttgatgacaagaagcttgccattggaacgctctctatcgacaaatacccacagatacaattcgatttggttttcaataaagagtttgagctgtcacacacatcgaaaactaccagtgtatttttctctggttacaaggttgagcagccaattgagggagatgaaatggatcttgattctgaggatgaagaggaggagctaaacattccagtaatcaaggaaaatggcaaagctgatgggaaggaggagcagaaaaatcaagagaaggcagtagctgctacagcttcaaaatcaagtcttggccttgaaaagaaaagcaaggatgactctgatgattctgatgaggatgagtctgatgattctgatgaggatgattctgatgattctgatgaaggcgagggattatctcctgacgaaggcgatgatgattcaagtgatgaggatgataccagtgatgatgacgaggaagaaaccccaactcctaaaaagccagaggcaggcaagaagagaggtgctgaaaatgctctgaaaacgcctctttctgataagaaagcaaaggttgccacaccgccagcccagaaaacaggtggcaagaagggtgccacccatgtggcaactccacacccagcaaaaggcaagacccctgcaaacaatgacaaatcaacggagaagtctccaaaatctggtgggtcagtcccttgcaaatcatgcagcaagacattcaatagtgagatggctctgcaggctcactccaaggcgaagcatggggccaaatgagttgcaggtccaactgagtccatgaaggagaagcatggtggccaagtgagtcgaaggtccattcgagtccatgaaggtgaagcatgggagatccaagcgagtctggaaagattgtcgatgttagtaggctgtccttattttgtttagagacttgtggctatgtgattgatgtagcgaaacaaggctgtgatgtgttaactctgccttataatattttggttgaacgtgct

SEQ ID NO: 24206 - DNA, 1035 bp, Zea mays
  Clone ID: LIB3608-005-G10_FLI
cagctagcaaagcagcagtcgagcactccaccatccagcttcgcattccgcaagttcccagtcagccgaacagccagcggcggtgccaaaaggccgagctgcgagctccactccccccactccccagaacaaaaaggtgatggcgcaactgccgccgcgggcgccgagcgccgcgccgcaggaccactggccggcggcggcgggggagttcctgggcttcgccgcggccaggcgcggcgcgcaccgccgctccgcgagcgactcggccgcgttcctcgaggccgtgcccatggacgacgacgtcgtcattggcgctggcggcggcggcgacgacttcgaccgcctcgaccacgaccagctcctgtccatgttctccgacgtcgacgtctccgtctccggcagcgctggggagagggcgcagctcatggacgcggggggtgcggacgacggggtggcggactcgtcgccggctgccgcggacggcgtcgctgagcccaaaagggtcaagaggatattggcaaacaggcagtcggctcagaggtcacgagtgaggaagctgcagtacatctcggagcttgaacggagcgtcaccagtctccagatggaggtgtcagcgctgtcccctcgcgtggccttcctcgaccaccaccgttcacttctcaccgtcggcaacagccatctcaagcaaagaatcgcggcgctcgcccaggacaagatcttcaaagacgctcaccaagaggcgctggagaaggagatccagcggctgcgccaagtgtaccagcagcagcaggtcaaggtggccaccaccggcggcgccgacatcgccaccgccgcctcgccgtcgatgcaggccaggcaagagctgctcgcgtgcgagggcgctgctattcgatagcggaggcggcggcggcggcggcggcgttcacgcccctgttactgttagtagcttaattaacttttgtgcagtctgatcaatacgtgttggcttgtttgtttgctgcttcttaatttaattcgtatgtgatgtattctgct

SEQ ID NO: 24207 - DNA, 592 bp, Zea mays
  Clone ID: LIB3608-006-A5_FLI
agagagagagaccgacgcgccggcagatcccaagctcaccggagagggggaagagggcgaccgaaggcggcgatgggtttcatcatggacttcgcggagaatctgatcctccgtctgatggaggacccggacaagcgcgaccaggttcggcgggagcatgtctacaagatgaaggagcggtgcgagcgcactaaggcggcgtggagcctccctctgcgcccctacggcttctggaccttcgaccgcttcaactcgcagctctcctgggatccccagatcagccaggccgccggccgtcgggacccctacgacgacctcatcgcccgccactctggctcgccgccgtcttcctgaacacccgttccgatccttgcccagaaggtctacttgggcatcaataagaaactctttcccctcaaactgattgtggttccatcctcttctgtctggaaaatgttgtcaccaaactaccctatttcctgttccagtttggcatggaagtataagttgtgtacttctattctcaagttgttgtctttgtattatgaaatgtttccaataatcagcagtttttgatgtatggtcgtggatc

SEQ ID NO: 24208 - DNA, 1285 bp, Zea mays
  Clone ID: LIB3608-006-C5_FLI
gatcaacacaatagctctccttgttttttttttcaaataaaaaagcacgagctcagcgccatggcgcccgccaaagcgcagcacacaagcactaaccagcagacattgctggatgcgcagctccagctctggcatcacgccttcggctacgtcaagtccatggcgctcaaggccgccctagacctcggcatccccgacgccatccaccagcacggcggctcagccaccctcccacagatagtcaccgagctggccacactccacccgtccaagacaccgtgtctgcgacgcctcatgcgcgtgctcactctcaccggcgtcttcggcgtcgtcgttcagcactcgacgaccgacggcggcagcgatcttgtctacgagctcacgccggcgtctcgcctcctggtcggctcggcgccgtcgaacggcccgaacgtgagtccgtttctgaacatgatcctcggcaccgccttcgtgtcctccttcctcgacctcggcgagtggttccagcacgagctgccggacccgtccccgttcaagctggcgcacgggcggcacgtgtgggacatggcccgccacgacgcgagcttcgccaagctctgcgacagcggcatggtcgcggacagccggttcatcatggacgtcatggtcgaggagtgcgccgacgatgttttccgagggatcagctccctggtcgacgtcgccggcgggctcggcggcgctgcccaggccatcgcgaaggcgttcccgcacatcgactgcagcgtgctggacctcccgaacgtcgtcgccgctgcgcccactagcaccgacgtgaagtacatcgccggcgacatgtttcagagcatcccagccgcagacgttgtcttcctcaagtgggttctgcatgactggggcgatgccgaatgcgtcaagatattgcagaactgcaagaaggccataccatccgaaggagggaaggtgataataatggatatcgtggttggagcggggtcgtccgaccggaagcatgtagagacgcaggtcttgttcgatctctttatcatggctatcaatggagccgaacgagaagaggaagagtggaagaagatcattttcgaagccggatttagctcttacaatatcatacccgttctaggtgttcgatccatcatagaggtctacccgtagtccatacaagttaatgtaacaaagtgctgttttgggcgacccagatgcagtttcgttgaaagcgtccctgaatgatgctagaatcaacagccacacacaataattaataatttgcatc

SEQ ID NO: 24209 - DNA, 1403 bp, Zea mays
  Clone ID: LIB3608-006-E1_FLI
caaatttcacagttcgccaatcgaacgcaacgacaaccaccagtccgtcgccttgcatcgacatcgatcgataacctacgcacggaaccagctgctaggagtgttttcctttcctatatatagtgatgtttgattgtcagctccacaaatcgataggctaaggaagctccatcgatcctgcgttattttgccggtaattgattgatagatggcgtcggagaagagcaagatcctggtggtcggcggcacggggtacctgggcaggcacgtcgtggcggcgagcgcgcggctgggccaccccacctcggcgctcgtcagggacacggcgccgtccgacccggccaaagcggcgctgctcaagaccttccaggacgccggtgtgacgctcctcaagggcgacctgtacgaccaggctagcctggtgagcgcggtgaagggcgcggacgtggtcatctccgtgctcggatcgatgcagatcgccgaccagagccggctcgtcgacgccatcaaggaggccggcaacgtcaagaggttcttcccgtcggagttcggcctggacgtggaccgcacgggcatcgtggagccggccaagtccatcctaggcgccaaggtgggcatccgccgcgccaccgaggccgcgggcataccctacacctacgccgtggccggcttcttcgcgggcttcgcgctccccaacatcgggcagctcctcgcccccggcccgcccgcggacaaggcggtcgtcctcggcgacggcgacaccaaggcggtgttcgtggaggagggcgacatcgccacgtacacggtgctggcggccgacgacccgcgcgcggagaacaaggtgctgtacatcaagccgccggccaacacgctgtcgcacaacgagctgctgtcgctgtgggagaagaagaccggcaagacgttccagcgggagtacgtgccggaggaagccgtgctcaagcagatccaagagtcgccgatccctctgaacatcatcctggcgatcgggcacgcggcgttcgtgcgtggggagcagacgggcttcgagatcgacccggccaagggggtggacgccagcgaactgtacccggatgtcaagtacaccaccgtcgacgagtacctcaaccgcttcctctgagcctgaggtctcaacaaacaggacgtcacgtacggccttggcgcgcggggccatgatgtgtggagtgtggacgtcttcatcgtcagctgctagtcgctagcgacgacgtgccaacctaaacatcactagcagcataccgtagtgtacgctacggtagaaatggaaagacaatatgttttctaaataataagatagattaaggttcatggcaaaagagatttatgatgagttatatcatattgttgagctcataaaaaatatgctt

SEQ ID NO: 24210 - DNA, 915 bp, Zea mays
  Clone ID: LIB3608-006-E9_FLI
ccgccctcgtatcctcacgcccacaaaacacccgaagaaaagaagagactgaacgccgcgagttcacgtgacgatggagaacgccgcctccgccatcgctaagccgtcgctgtccaagaagccctcgccgtcgttccgcctccggaacggcagcctcaacgcactgcgcctgcgccgcgtgttcgacctcttcgaccgcaacggcgacggcgagatcaccctcgacgagatggcctcggcgctcgacgcgctcggcctcggcgccgaccgctccggcctggaggccgcggttggcgggtacatcccggccggcgccgcggggctccgcttcgacgacttcgaatccctccaccgcgcgctcggggacgcgctgttcggccccatgccggtggctgtgaccgaggacgacgacgacgagggggacatgaaggaggcgttccgggtgttcgatgaggacggcgacggcttcatctcggccgccgagctgcaggccgtgctcaagaagctcggcctgcccgaggctcggaacctggccactgtgcaggagatgatctgcaacgtcgaccgcaactgcgacggccgcgtcgacttcggcgagttcaagaacatgatgcaggggatcaccgtgtggggcgcttagctgccgcgcacctgcgttgtcacaccccctctactgcgtggtgtcatgtatgtatccaggcaccgtagtaggatgcgcttttctacccggcgcttcttcctcctcttgatggcgcagtggattcttcctgttcttggctttgctatctgactctgcttgtagtcttgagaatctggcggcacacagacatagttttctttagtttcttgtgtttgatttactccgtgtttaattgcacagtttatttacatgtaagaacgttgaccttgaccagc

SEQ ID NO: 24211 - DNA, 2517 bp, Zea mays
  Clone ID: LIB3608-006-F2_FLI
cttgcacctccagtcctccattcccagtctagatctcgatccacctccatggcggatctcgccacggacctcttcggggagccgatcgaggcgcaccctccctggttcaagcccgacgccttcctccgcgccagcttcgatccggacgcctacgtcgccgagctccgctcctacgtcccgctcgagagcctcgccgccgagctccgcgcccacctcgacgcgctccgcgccgagctcgtcggcctcatcaaccgcgactacgccgacttcgtaggcctcagcgcgcgccttaagggcgtcgatgccgccgccgcgcggatgcgcgccccgctcgccgacctcagggacaaggtcgccgccttccgcgcgggggcatcagccgcgctcgccgcgctccgggcgggactcgagcagcgcgccgccgccgccgccgcgcgcgagctgctcgagctcttgctcgacgccttccacgtcgtctccaaggttgagaaattgatcaaggaactaccaactgcgccatcggatttatcgaatgctgaagttcctaacagtgacactggaacaccaaatggggtggctggaacgggtgtcagcgaaacacaaagcattctcttagaaagaattgccagcgagatgaaccggcttaaattctacataagtcatgcacagaacctcccttttattgagaacatggagaagagggtccaaggtgctacaaaactgcttgatggtagcttggagcgctgctttgtggatggtctggaacaccgtgatgctaaagttatatacaactgtttgcgtgcttatgctgcaattgacaacacatcatcagccgaagagcttttccgtacagcagtggtgtctccattgattcagaaaataatccctcaaaattatgcaagagctgttgctgggacatcatctgatgagctggaagacgattatcaacagataaaggaatgtgtacaaaaagattgtaaatttatattggaaatatcttcctcagaaaactctggattgcatgtttttgattttctgggtaattcaatactcaaagaagtcctttctacaatccagaaaggcaagcctggggccttttctcctggaaagcctaaagaattcttgaggaactacaaagcgagcttaggatttcttgattttcttgaaggttactgcatctccaagtctgctgtaacgaagttccgctctgagcctgcttacacagatttcatgcgacaatggaatgttggtgtctacttttcgttgcgatttcaggaaattgcgggcggccttgattctactcttacaaacacttttagtcctactggattgaatgaggctcaagggaaaccattgctcttgaagcaaagtattaagctcttagaaagtttggattcatgttggagtgatgaggttcttgtattctctcactgtgataaattccttcgtctgtccttgcagcttatttcaaggtatacgacatggctttcatctggtttaacggcacgtaaagcttctgacgggagcccaaattcacctgcagatgctgaatgggcactgtctatacctatagaagatttcatatatataatgcatgatgtgcatgctgtaattggcgagctttcagaatcaggcagcttcattggacatgtgaatcagttactagggtcatgccccattgaagtatttaatcttgtgaaacaaagtatactgcaagctgttgaacctttaaaggaactgttgcctgcaataatcaatgttatgattggaatcatagttaagaagtctaacgaggacttgaagcacctgaaaggaataacagcgacatataggatgacgagtaaacttccagtcaggcattctccatatgtatcagggattttacatccgttgaaggtgtttcttgaaggggaccgtatacgctatctatcagaagatgataaaactaagttgtgtcgtgggtctacagataagattactgcaatttactatgacttggtctctgaagttgtcactgtggcaaggaaaaccgagtcttcgttgcaaagactgcgccaaggtgcacaaaggcgagtaggagctagtacagatgcctcagataacatcatatctgatacagacaagatctgtatgcagctatttcttgatattcaggagtacgcacgaaaccttcgtgcgataggaatagacgcgagagagattgattcctacagagctctatggcagtgtgttgccccaaaagacaaacaagagaacattcagttttgatgtaaagaacgctgtcagtacatataaagttgtctgcccgtagatctctcaaacatgtaggcgtatctgatgttgtccttttcggtttgaagtacttattatggatgcatacgtagagtagatagagagctggattttggtacccattttattgttaggatggatggtcacctccagatataatccagaactggagaacgtgtaccagtatatgatttcattttgatgtgaaatactaggatactgttg

SEQ ID NO: 24212 - DNA, 1605 bp, Zea mays
  Clone ID: LIB3608-006-G11_FLI
aaagtgttctcttgcttgatccgccattcagaagccggccactaatccgagctaggcacgctcccatccgacgtcgtcccagctagcacagccatttctgtttcgtttcttccactgcagtcagaacccagaagcagaggccgccgttgcaagcatgccgccgatggaggccgccgaggacgtcgtcatcgtcggcgccggacttgccggactcgcggtggctctcggactgcacaggaaaggggtgaggagcctggtgctggagtcgtcgccgtcgctgcgcgcgtcggggttcgccttcaccacgtggacgaacgccttccgggcgctggacgccctcggggtgggcgacaagatcaggaggcagcaccagcaggcgcaggcgctacgcgtcatggcttcttccaccggagaaatcgtacaggaagtggacctcacgcagcaggggaaacgagggcccaacgagatccgttgcgttcggcgggacctgctgctgcaggccttggaggaggagctaccgagaggcgccatccgctactcgtccaggatcgtgtccatcgaggaggaggacggcaacggcgacaaggtcctgcaactaaccgatggttcagtcatcagagcaaaggtgctcgtcgggtgcgacggggtcaactccgtggtggccaaatggctcggcctcgccacgccgtcctactcggggcgctcggcggcgagaggcttcgcgcgttacccggacggccacggcttcgagcccaagttcctgcagttcgtcggccacggcttccgctccggcatgctgccgtgcaacgacaccgacatctactggttcttcacctggactccttccgagaacgacaagggcgtcgacgagagcgcggccaagatgaagcagttcgtgctggccaagctccggggctccaataaggtgcccgcggaggcgctggcggcgatcgacaggagcgagatgagcgacgtgctcgccgcgccgctgcggttccggtcgccgctgtcgctggccaccgcgagcatcgccaggggcagcgcgtgcgtggccggcgacgcgctgcacccgatgacgccggacctcggccagggcggctgctcggcgctggaggacggcgtcgtcctggcccgctgcctcggcgacgccctgctgccgccgccagctggcagtggcagtggcaggggcaaggaggaccgggtccaggcggccttgcgcgagtacgcctggatcaggcggtggaggagcgtcgagctcgtcgccacctcctacaccgttggcttcgtccagcagagtgacagcgcggtcgtcagcttcctgcgggacaggctcctgtcgggagtgctcgctcgaaggcttctgaaaatggcggactacgactgcggcacgctcgaaagctactagcccccttgtactgtttcctgtgtgtacatcagtacacgtgttgtgttgtgcctgctgctggaataatatgcctactgttatgtgttattagtagaaaattgtactgcaatatcatcacctctgttgcacatttttttctacccttgtttatgcatagcataggaaccgtcacatcgatgtaacttttgatttctctgctt

SEQ ID NO: 24213 - DNA, 1404 bp, Zea mays
  Clone ID: LIB3608-006-H4_FLI
gtcgacgcccggcgaattgcccgatactatggagggagacgatcggagggccccgctgctggcggccggcggcggccgtcccccgtctctgcggcgccgtgactcggcgcggtcgctgcgcagcagcttcctgtcgcggctgcccgacaaggtgcgcgccgggctcgacccggagcacctcgccgacgtcgacctctcccgcgccaaaggcatgtccagaggtgtgagacagtactacgagaagcagctcgcgaccctgaagaccttcgagcaggtggaggcgcgctgcatgcccggcgaattcgattcggatgtcgaggcctccgactcggaggacgcggagcagaagcagagcgagttcgccatgaagatctccaactacgccaatattgtgctgctggtcttcaaggtgtatgcgacgatcaggaccgggtccatggcgattgcggcgtccacgctcgactcgttgctggatttcatggccgggggtatcctctggttcacgcacctttccatgaagagggtcaacatctacaagtacccaattgggaagctgcgcgtccagcccgtcgggatcatcgtcttcgccgccatcatggcaactctaggtttccaggtcttggtccaggccgtcgaacagctggtggagaacaaacctggcgagaagatgacatcggagcagctgatatggttgtactccatcatgctttcggcaaccgccgtgaaactggctctctggctctactgcaagagttcagggaacagtattgttcgggcttatgcgaaggaccactacttcgatgtgataaccaatgtcgtcggtctggtggctgctgttcttggggacaaattcctgtggtggattgaccccgcgggggctgtcatacttgctgtatataccatcgtcaactggtccaaaactgtattagaaaatgcagctaccctagtgggccaatgtgctcctccagatatgctgcagttgctaacgtacctcgccatgaagcacgacacacgagtgaggcgggttgacactgttagagcttacagctttggagctctctactttgtagaggttgacatcgaactagcggaagatatgcgtctgagagaggcgcacgccatcggtgaatcgctgcaggagagaatcgagaagttgcctcaagtcgagcgggcgtttgttcatatcgatttcgagagcacgcataagcctgagcacaaagtcaggagcagactgccgtctactgatccctgagaccctgacagatttccgaatgcccatgcatgtagtacattgttaagagatagtagctaatagcccggcgttttcttcgagggttacgaggaacgattcccttcacctgtaaaataaaggtacaggatcaacttttccagtttactgatcct

SEQ ID NO: 24214 - DNA, 1579 bp, Zea mays
  Clone ID: LIB3608-007-C4_FLI
ccttgcctcgcgcaccggtctggttctggtgggtgccctcttcgccggtggccggaaggcgagggggaagccggaggacgctgagggcgggcgaggccgccgtccccagatctcacttccgccgcccgcccgccccgcttttggtactactcttcttctgttccagggattgagagaggaaggaaggaaaggaggtgcttcaatatgaaggcgctcattcttgtcgggggtttcggaacccgccttcggcctttgactcttagcttcccgaagccccttgtggattttgcaaacaagcccatgattctgcatcagatcgaagctttgaaagaagttggggtcacagaggtggttttggccatcaactaccgcccagaggtaatgattaatttcttgaaggactttgaggataaacttggcatcacaattacatgctcccaagagactgagcccttaggaactgctggccctcttgctctagcaagggacaagcttgcggatggatctggcgagccattctttgtcctcaacagcgatgtcataagcgaatacccatttgctgaactcatcaaatttcacaagtctcatggtggtgaggcaacaattatggtcactaaggtggatgaaccatctaaatatggtgttgtggttatggaggaggcaactggcagggtggaaaggtttgttgagaagccaaaaatatttgtgggcaacaagatcaatgctgggatttacttgctgaacccatctgtccttgaccgcattgaactgaggccaacatcaattgagaaagaggtcttccctcaaattgcagctgatcaacagctctatgcaatggtccttcctggtttttggatggatgttggtcagccaagggactacattactggattgcgtctttatctagactcgcttaggaagaaatcggctgccaggctagctgctggagcgcatgttgttggcaacgtgctggtgcatgagagcgccaagatcggagaaggttgcctgatcggtcctgatgtcgcaattggacctggatgtgtcgtggaggatggcgtgaggctttcccgctgcactgtcatgcgtggtgtgcgtatcaagaagcatgcctgcatctcgaacagcattatcgggtggcactcaactgttggacaatgggcacggatagagaatatgaccatcctgggcgaggatgttcatgtgtgtgacgaggtatacagtaatggcggtgttgttctcccacacaaagagatcaagtcaagcattctgaagcctgagatcgtcatgtaagagttctccagttttaactacagtacattcttaagttcttcgagtaagtgaggattgcagatcccctttttataagtgatatctattggtatctttggcctaattcaaacagcttcagacatgttcgcttgctaaactgttgacaatgtatccttgttctttgttgaaaagttttgtacttgtagtgtcaatcatatttcacaaagtggttgtcatataatactgagaggttttggacccttgatctgcagaagttcaataccatagtagcaagaataagtttattttt

SEQ ID NO: 24215 - DNA, 1510 bp, Zea mays
  Clone ID: LIB3608-007-D1_FLI
gcagcagcagcacgaaaccctgtagtagcctgccatgactacgcgctgctgcctggtcgtcgccactctcctcgcggcgctgctctcggtcagtgccagcctcgagttcggtttctacaacaagacgtgccccagcgccgagaccatcgtgcagcagaccgtggccgccgcgttcaccaacaactccggcgtcgctccggcgctcctccgcatgcacttccatgactgcttcgtcagagtaagcccgcacatgcatgtttattcgtcatcaaacaaaaagaaaagtatcgtctccagcctttttgcatgacctcacagactagatttatgatgatttccatgtcataacttttctcatctagaacaacacgacgtggccatttgcattattgcagggctgcgacggctcggtgctgatcgactccacggccaacaacaaggcggagaaggactcgatccccaacagcccgagcctgaggttcttcgacgtggtggaccgcgccaaggcgtccctggaggcgcggtgccccggcgtggtgtcctgcgccgacatcctcgccttcgcggccagggacagcgtcgtgctcaccggcggcctcggctacaaggtgccgtccggacgccgtgacggccggatatccaatgccacgcaggccctgaacgagctgcccccgcccttcttcaacgccacccaactcgtcgacaacttcgcctccaagaacctcagcctcgaggacatggttgtcctctccggcgcacacaccatcggcgtctcgcactgcagcagcttcgccggaattaacaacacaggcgaccggctctacaacttcagtggctcatccgacggggtaaatttcccctccgaccatcttccgttccctagatagttctcatgtgattattatccactgctactgctatatatatggcctactatacagattgatcctgcgctgagcaaagcctacgcgttcctcctcaagagcatttgcccgtcaaacagcggccggttcttccccaacacgacgacgttcatggacctcatcacgccggccaagttcgacaacaagtactacgtcggcctcaccaacaacctgggcctcttcgagtcggacgcggcgctgctgaccaacgcaaccatgaaggcgctggtcgactccttcgtgcgcagcgaggccacgtggaagaccaagttcgccaagtccatgctcaagatggggcagatcgaggtgctcacggggacgcagggcgagatcaggcgcaactgcagggtcatcaaccctgctaatgccgccgccgacgtcgtccttgccagtcagccagattcatcaggatccactggagtggctgcaagctgatgtgtttggtgtgggatgtgatatatattgcaataatctagaaaactgaagaagaagcaggtgatgaccacactctgtagtgcatcacgcggtgcgtgttcatttaaccttggcgtttgattgtgacgatgaaataaaacacatgtatgacc

SEQ ID NO: 24216 - DNA, 1513 bp, Zea mays
  Clone ID: LIB3608-007-E10_FLI
caaaggcactccactccaccctatgcactgccgcccctgcccgtcccagctctcgcctcctctcgcacccatcattccggcactccccttcccggagccagctcttccgatggcgtgcagcggcctccgcctcgcgctcctcgccgccgtcctcgccctcctcctcctcctcctcccctccgcgctcgcttccgagcccctcaaccccgaagtgcaggcgttgatcgccatcaggcaggggctggtcgacccgcacggcgtgctcaggagctgggaccaggactccgtcgacccctgcagctgggccatgatcacctgctccccgcagaacctcgtcatcggcctgggagtgccgagccagggcttgtcggggactctgtccgggaggatcgccaacctcacccacctcgagcaagtgctgctgcagaacaacaacatcacggggcggctgccgccggagctgggcgcgctgccgaggctgcagacgctggacctctccaacaaccgcttctccggccgcgtgcccaacacgctgggccgcatcaccaccctccgatacctgaggctgaacaacaacagcttgtccgggccgttccccgcgtcgctggccaagatcccgcagctctccttcctggacctgtccttcaacaacctcactggccccgtcccgctcttcccgacacggaccttcaacgtcgtgggcaacccgatgatatgtgggagcaacgccggcgcaggggagtgcgccgccgcgctgccgccggtcaccgtacccttcccgctggaatccactccgggcggcagcagtgagcactcttccttcctgcctctatgtctatcattcatatctacggccagtcaggcaggccagctcgcgcgcctagtcgcgctcaatgcttttcggccctttctcggagtgcgtggcgtggcgtgcatgcatgcgtcgctgctgccgctgcttttgtgcccttgcctcgccggggtagcggtcgaggggacacggacacacggtgctgtcggcatgggggcgccgtcgcttgcggccgggaatacctgtagtaggctgtatgtagcgctggtggcgcggtctggcctgaaccgtgcatctgctgctgctctcgcctggggatcagcgtttggcttttgtgtgtgtgcgcgcgcgcagggacagggacaggggcggcggcagcgggcaggtcaaaggctgctggcgcgcggctgccgatcggcgtagggacaagcctgggcgcctcctcccttgtgctcttcgccgtgtcctgcttcctctggcggcgaaagcgccggcacacgggcgggcggccctcctccgttctcggcatcctccacgagcggggcggctgcgacctggaggacggcggcggcggcggcgtggtggcggcggcggcgcggctggggaacgtgcgccagttcgggctgcgggagctgcaggcggccacggacgggttcagcgccaagaacatcctgggcaagggcgggttcgggaacgtgtacc

SEQ ID NO: 24217 - DNA, 1201 bp, Zea mays
  Clone ID: LIB3608-007-E4_FLI
cgatctcctcgctcggctgttgcctcccaaagccgcgccttacaacgagattcctcccctcctctctccaataaccctagcctcctccgccgccggcgacgaatccggcgttttgagtttctgttgccagcgtagccatgtccatgttcaataggatcttcgggaagcccaaggagcaggccaactccaatgccttggccactctggacaagttaaatgagactcttgatatgctggagaagaaagaaaaggtgctggagaaaaaagcagccgctgagcttgagagagccaaggagttctcaaaagctaagaataaaagagcggctatccaatccttgaagaggaaaaaactttatgagcaacaaattgagcagcttggaaattttcagttgagaatccatgatcagatgatcatgttagaagcagctaaagctacaacagagactgttgatgcattgagaactggagctgcagctatgaaagcaatgcaaaaagcaacaaacattgatgatgtagacaagaccatggatgaaattaatgaacagactgaaaatatgaaacaaattcaggatgctttgtcagctcctctcggagcttctgctgatttcgatgaggatgaactggaagccgaacttgaagaactggagggagcagagttggaatctcagcttctggagcctgttgcagctcctccggtgcatccagtgcatgccccagccaacaagcaaccagcgcgccctgctccacagaaagctacagctgaagatgatgagcttgctgcactgcaagctgaaatggcattgtgatcaggtttccaatgaagaggtggaatgtgtatatgaatggtgttatgctaccaagatgaaagttgagtcaggatttattatatttgccatgtgtataatcttgggggatatttggcaagcagaaaaaaagctgctccaggcagtgtttgtttcagtgattttgggctctgttttccacaaacagtttaatgtcgcccggttagctctaagctaactattcaggtcaccaacgtgcattgtttgtcacagtatttttcatttgcccatattgtctggagccatgtaagagtgttgtgtaacaccctaatccgtcaatgaaaaataacttagcttatattattaattcctagtagaaaaaattattatgttttcaattaatgaaatggtgatttcct

SEQ ID NO: 24218 - DNA, 2791 bp, Zea mays
  Clone ID: LIB3608-007-F4_FLI
gggcgctcgtcactcgtcagtactcagtggaggaggcggcggcggggagggagacagatgcgggaggcccaccgcggggtcgccggaccagatggacacgccggataggccccgcgccggcgccggcgccgggttcgaggattctcctgtgttcaatttcatcaacaatctctcgcctataccaccacctaaacctttagactcagcacataatgtgcagctattcaagtcatcagatttggcacctgtttcttcgatctttgcctcaccacatgttaatccaacaaagggaactaaagttctgatcagggacgaatctgttcagcttcctcatgaattgcactcacctagcagtgtcagaactcggataggcacctcaggctcttttagaatgatcagatgcaaagacattgtgccagagaattgtaatatcacttgtcaactaaacgaggcatctattgattcttcagatcatacatcaagctctacaggccaattgactcaatccataaaagatgctgctggcagtatggaaagcgataaggatcaatgcgctggtggtaaaatagaccttaccatgtcccaggagtgcacaggcctagaaggtatgaaccttgatgagagtagcccagacagaatggattcatcacattctgggatagttgttcatgaaaaccagctatctgaacaaaacaatgatgaacctgcggcatataatggggtttacatgattacacaccaatcaagtagtgatatgctgactttagccgtaccatctggaacagaagcacaaccaatgaatgatacacaaaaggctgataatccctacccttgtgaatccttgttggatgttcagtcaagtggaaattgcacccaaaattctgtgcatgaaccccatctgtactggaacggggcagttgaaggggctgcagtagcttatactccccaagcacttcctggtgctttgcaaagtcagttgatgccatgtaacaagctcaatgagccaaaagattacatgcctactgagcaaaatgctttgtcacagcatttacgtggcatgcgtaggcgcagccttttcaatgaaaaggctgggcttagtaataaaggtgtagacaaagcttcagatcatcatcctgtaaattcaactacccccaaatgcaaaaccatttctggtgacaactcaaagactctaagaacccccccatgtgcattgcctggtattggcttgcacttgaatgcccttgccgcaactgcaacacctaaagagaaaatagtccctcaagacattcagtctactataaatgaatcaagtaacttgataggccctgctggatcttctccggcaccttctgagcaaaacattataaatgatgatttcactcaaacaactgatgttgcaaccgctgaagcttctagtcagggtagtcccaagaagaaaaggcataagtttgatagtggtgatggcacttcatgcaagcgttgtagttgtaagaagtccaaatgcctgaaactttactgtgagtgttttgctgctggagtctattgttctgagccttgttcgtgtatcggctgtatgaacaaccagagtcatacggaaactgttctatctacgcggcaacagattgaatctcgcaatccattagcatttgctcctaaagtaattcatacatctgagcctggtctggaactaagggacttctccaataaaactcctgcttcagctcgtcacaaaaggggatgcaattgcaagaagtcgtcatgtctaaaaaaatactgtgaatgttttcagggtggtgtgggatgctccataagttgcagatgcgagggctgtaagaatgcttttggaaaacgggagggggctgccgtgttaagcatagaggaacctaagcagggattggaagaaaaggatgtttgtgtgaaagaagagaaaagtgaaatcgagaaacagcttgttgtctaccaaactcctgatgatgctcctgctgaaaatgtactgaccacaccttccatggtgcagtgcagacccttggcttgtcgtccacccccaagctccaagaaaagctccaaaaaaccacgatcttcaacaaaactcactggacatccttcgcggttgtgcaacttacaagctcctccgaagaccgacactatgctctccccattcgaaaactacgcggaaatggtccttggtgatagcacatcggatatcctcaagggaaattcatctcctcaaacttctgttaaagtggtgtcaccaaacaagaagcgaatctctcccctgcgaatgggtaccgggctatctccaatctgtaggagtggcaggaagctgattttaaagtccattccttctttcccttcccttggcggtgatgtaaacaatgaggatccagaaaccaagttgccagccccttgaatttaccatattttgtcactggtttatttctaccataccatctgatagtggacagccaagcgactttcctttcatcatttctatctctctcgatcaatgattatttatgtactgctataataatctgccgcgtgctggcaaaattctgcctccctagaacaaccaatggcatttggtttgctggtaaattatctcttggctccgtgtgttccctgtggctgtctgtctataatttatgttcattattttgttccggagaccgaagaatctgaggacttgtatgtatctgggatcaagatgtgaatctcgcatgtaccagatgacagaactgttaagacttatatttgtctgaggttaaactgcaagacttttatttaagct

SEQ ID NO: 24219 - DNA, 2992 bp, Zea mays
  Clone ID: LIB3608-008-C10_FLI
cgtttgaggaggcctcgggccgggaggccgcgccgagatgatacgatcaaggagaccggttctcttgagctggggactgcaaaggatacgtggcttcagtcattgtgctctggatttttagatcaagggaccaatgcctccaggataatggcggggaaggacggagtttctctgaaatctgtgtcatacggggcaaggctgcgcaggagttgtgatgcatcactgagagaggcagggtccatgagagacccattcttgaaacacagagtaaagaaatttgatctatctagcctagattggattgatgagattccagattgccctgtattttctccatcaacccaggagtttgaggatcctctggtttatctcagcaaaattgcccctgtggctgcaaaatatggtatatgcaagatcatttcacctgtctctgcttcagtacctgcgggcactgtactaatgaaggaactaggtgggattaagtttacgaccagagttcagcctctccgtcttgctgaatggaccaaggatgacaagtttgccttctttatgagtggaagaaagtacacatttcgggagttcgagaagatggcaaataaagaatttgtacggagatactctagtgctgcttgtcttccatcaaggtatatggaagaggagttttggcatgaaatagcttttggcaagatggagtctgttgagtatgcatgtgatatcgatggtagcgcattttcttcttcttctcatgaccaacttgggagaagcaaatggaacttgaagagattctcacggttgccgaactctacgctgcgtcttctcagagctgcagttccaggaataacagatccaatgctgtatattgggatgctctttagtatgtttgcctggcatgtggaagatcattacctgtacagtattaactatcaccactgtggagcccccaaaacatggtatggtattccaggaagtgctgcttctgattttgagaaagtggtacgtgagcatgtatatgatcacgaaattttatcaggtgaaggggaaagtgcagcatttgatgttctgttgggaaagactacaatcttcccacctaatattttactggatcatcatgttccagtctatagagccatacagaaacctggagagtttgttgtaacgtttccccgagcttatcattctggtttcagccatggtttcaattgtggtgaggcagtaaattttgctacgggcgaatggtttcctctaggagcagttgccagtcaacattatgcacttcttaagaggataccagtattaccttatgaggagcttctttgtaaagaagcaacattttgtgctaatgagttttccttgtttgaacacggaaatgtaacattaactggaggcacacatatacagagctatatgaagggtccctttgtgcagttgatgcggttccaacaccgtgttcgttggttgcttgtgaaaatgggtgcccgtacatgctataaagcagacattgatgccacagttctctgtgggatatgcaaacgtgactgctatgtagctcacattatgtgtaactgcagagcagatgcaatttgcctttgtcatgaggaagagattagtaagtgttcttgcaactgcgaccgtgttgtttttgtgaggaaagacatctttgaattggaggaaatatcaaagaagtttgaggaaattggaatactggatgaagtaggaaaacaaatgtctcaaaatgatggctataacatgcatccttacttgtccaatggcattgaccacaatgctaaatactttccatactgcaagatcctaattgatacatcccctgaacttcgtaccttttcagaggtagatgttcttggatatgatctgaataagccatatcctacattatcaacaataacttctgcacatggaccccatgagtattctacacaaagtgatgagtgtactagttctaagcaaagaacatactctagctcatgtccagagaatggaacgcttagtgtttatcctttatgtacatctgatcaagcattctcaactgacaaattggctgctcaggatactgatgattctgactgtgaggtatttagagttaagagacgatctagcatagttatggagaaaagatgttcagaagatctaacaataactttaactgagaatcaggctttaagacggttaaagaaagcctgttcagatgacagacaagagaacgcaactgaatcacattgccttgacttcatttctggaaatacagataatttcatcaatcgaagcaaacaaaaaatgaatgtagatcagctagatgcaaaaaatgtggaagatgaagttgctttcggccagaaatctatcggttgcagttacctgtctccatctgtagatcttgggccgaaacgcttgaaaattcgtggcccatccttcccaagcactgtttctgaagtggaaatatcttataggttccaggaggacattgacttggctagtcagcatactcaatgaagtatgctgctcttggtgctaactgctaacatcaatcgtaacttctggaagatgaaagctcttttttcattggatggttcagaactgattctatctacaggtctccaatggaggcactgttatggctggattttatgattctattgccaggtcataggcgatttttctgatgatccgtagctgcacatcacttatttcctttctttgtaggttttccactgtgaataggttagtctactacttttaacaatttggttcattctttttccaccacagatacacctgtacctagaatgctttaatagatcctcatacgaaatggacattgtacattttttttaacaagtcagtcttttgctcattataatctggaaccatttgcaattcttattcttgttcagttgttggcaccggtacatttgtcctcagatgtgttgataactttgatatgttaataaatcgtttgatgctgacaggaattcacttc

SEQ ID NO: 24220 - DNA, 842 bp, Zea mays
  Clone ID: LIB3608-008-C4_FLI
cgagagacttgaccaagcagcagcagcagggatggcgcctctgaagctgtacgggatgccgctgtcccccaacgtggtgcgcgtggccaccgtgctcaacgagaagggcctcgacttcgagatcgtccccgtcgacctcaccaccggcgcccacaagcagcccgacttcctcgccctcaaccctttcggccagatcccggctctcgtcgacggagacgaagtcctcttcgagtcccgtgcgatcaaccggtacatcgccagcaagtacgcgtcggagggcacggacctgctccccgcgacggcgtcggcggcgaagctggaggtgtggctagaggtggagtcgcaccacttctacccgaacgcgtcgccgctggtgttccagctgctcgtgaggccgctcctgggcggcgcccccgacgcggcggtggtggacaagcacgcggagcagctcgccaaggtgctcgacgtgtacgaggcgcacctcgcccgcaacaagtacctcgccggggacgagttcacgctcgccgacgccaaccacgcgtcctacctgctctacctcagcaagacccccaaggccgggctcgtcgccgcccgcccccacgtcaaggcctggtgggaggccatcgtcgcccgccccgcgttccagaagaccgtcgccgccatccccttgcccccgccgccctcctcctcggcttgacctcgccttgcgttgcgccgttgcctgggtcgcggatgcgtcggagccccgagtcgaataaaagaggcagcatcctgtcttgcatttgctgctgcgccatgtgttaacagcctgtgtaataaacactgttgctttcgtgtgtgtt

SEQ ID NO: 24221 - DNA, 1365 bp, Zea mays
  Clone ID: LIB3608-017-B8_FLI
ccgtcacggcgcaggactgcctgtccgcgactttcagcggcgggcggaccttcggcaagtgcaacagcctgccgtcgctcagcgccagcctgcactggacgtaccacgcggagaacggcacggccgacgtggcgttccgcgcgccgtcggaccccagcggctgggtcgcctggggcatcaaccccgacagcggcggcagcatggaagggagcagcgtcttcgtcgcctcgcaggacggcagcggcgccgtgtccatcctcatgaccaacctggagagcaccagccccagcctcaccaacaccaccgccctcaagttcaaggtgcccgccggccccgccgccgagtactccgaccgcgcgtacaccatctacgccacggtggagcttccccggaactccacgcagcagttcacggtgtggcaggccggcccggcgaccagcaacggtggcatctcccctcacccgacggcgccggccaacttggccagcacccagcggctggacttcctctccggctccagcaccgccgcgtcaaactccaagcttcaccgccgtaacatccacgggatgctgaacgcgattgcgtggggcgtcctgatccccacgggcgccatcatcgcgcgctacctgcgcgtgttcgagtccgcggacccggcatggttctacctccacatcgcctgccagtgctccggctacgtcctcggcgtggccggctggggcctggggctgaagctgggcagcgagtccgccggcgtcacctaccagccccaccgcagcatcggcatcgccatcttctgcctggccaccctccaggtgctggcgctgctgctcaggcccgacaagaagaacaagtacaggctctactggaacatctaccaccactccgtcggctacgccgtcatcgtcctcagcgccgtcaacatcttcaaggggctccacatcctcgagccggccagcggctacaagaccgcctacattgtcatcctggccacgctcgccggcatcgcgctctgcctcgaggccatcacgtggcccatcgccatccggaagcgcaggcgcaacgccgacaaggcgtccggcggcaacggctggcagcagggtgcgtagtagggaccagatcgcccggcttgtgcttagttttgaatgcgagagagggatgtgatatcgatgtgctcatttcgttgttcagacttcagagggatcgttgctgcctgtgctttctttctcttcctgttattactacctctctagtctgtacttgtacgtagaagagtagctccttattttttttaattattagggttctataatggcatttgtacacattttttccctattcttattattgattacgattactttgatt

SEQ ID NO: 24222 - DNA, 1982 bp, Zea mays
  Clone ID: LIB3608-017-D12_FLI
gcgctgctctcggtttaggtcgaggagttgctagctagctagggggtttggatccctgctggtgctggctgctccgctgctgcgtgctagtcctactccagccccccagccccagcgaagcaggcaagcatagatagaggctggggtgggcagggaggtgcgcggacggagatccatcagatcagaatcagatcacatcatcggccctcggatgcgatgcagcaccggcgcaagcccgcttccgccgcggcgccgccggccgccaagcagccggccgcgcgcaggcccacggcgcggctgtcgctcgcgggcctcgtcgtctccatcttcctcgtcgccaccttcctgtacaacgaggacgtggtgaaggcggcctccggctcctccagctcagcaacaacagccgacgccgctgaggtaggcgtctccgggcgggcgaggtcacccgacctaagggtgctgcaggaggcggcgcaccagggggtggaagctgaggagcgggaggttggagatcgtacggaagcggagcagaagcagaagcccctgaccctccccatccccatccccgtggtggcgctggcggaggaggaactcgtggagaatactaagggaaggcagaagcagcagcagcaggaggaggagcaaacccagaagccaccgccaccgccgccgcctcctccccaggttgccgggtgcgacctgtaccggggtcggtggacgttcgacgcggccggcgagcaggcgccgctgtaccgcgagtcggagtgcgagttcctgacggagcaggtgacgtgcatgcgcaacggccgccgcgacgactcgtaccagaagtggcggtggcagcccgatggatgcgacctgcccaggtacgatgctcggttgctgcttgagcggctgcgcaacaagcggctcatgttcgtgggtgactcgctgaaccgcaaccagtgggagtccatggtgtgcctggtgcagtctgtggtgccctggggccacaagacgctgcacaagttcgtcaacaacggatcgctcaacgtgttcacggcgcatgattacaacgccaccgtggagttctactgggcgcccttcctggtggagtccaactcggatgacccgcaggcgcacagcgtcatgaaccgtgtcatcgcctggcgcgccatcgccaagcacgccaagaactggaagggcgtggactacctcgtcttcaactcatacatctggtggctcaacacattcgagatgaaagtcattcgccgtcatcagcatcagcttgaaaaggaggaggagggggtgaggtggagcaagtacgcccttgtggaccggccggtggcgtaccgggaggtgctcaagacgtgggccaggtgggtggaccgccacatcgaccccaaccgaacaagagtcttcttcatgggcatgtcgcccaaccacgtcacgccgtgggcgtggggtaacgacggcggcatcaagtgcgccatggagacgcagcccatcagcaacaaccggacggggcgactggacatcggcacggattggcgcctgcacggcgtggcgcgcggggtgctggcgcgctacctccgccgcgtgccggtgcacttcgtcgacatcacggggctgtcggagctgcgcaaggacgcgcacacctccgtgcacacgctgcggcaggggaagctgctcacaccggagcagcaggccgaccccaagacctacgccgactgcatccactggtgcctcccgggactccccgacacctggaaccacttcctctacgcgcacatcctctcgctctcctcgtccgcccaggatcactaaccatttttgcccagcctcacaatgtcaagcgcttcctttcaactcctctccctagaccacccacccaccctggatacctattactactgctgctgctgtagatcttcgtttcattttgacaaatgcatgcaggtcttctcttgtaatttctataaaaaacatccctgatttaattt

SEQ ID NO: 24223 - DNA, 602 bp, Zea mays
  Clone ID: LIB3608-028-E7_FLI
ctttcttttcttcacctcatcaggattcaggaccacccgccggcagcagatacgcccaacaaaaaccaaccacccaccaagccagcaagcacctctccaagcagacagacgggaagggagggcaaccgagagcgatcggcgatgggctccttcctctcgagcttagtcacgccccctccggccgccgacgaccccaactgcgccgtggtggccgcccactccaaggccacctacgacgagcagtgggcggcccacaagagcagcagcaagctgatggtgatcgacttctcggcctcctggtgcgggccctgccgcttcatcgagccggccttcaaggagctggcctcccgcttctccgacgccatcttcgtcaaggtcgacgtcgacgagctcgcggaggtcgcaaggacatggaaggtagaggcgatgccaacgttcgtacttgtaaaggatgggaaggaggtaagccgtgtggttggggccaagaaggacgagcttgagaggaagatccggatgttcacgtcatcttcctcatcgtaaactcctgtggttcgcctgggacggagttgctgaagtgaaatggttcccttctctgaatgctg

SEQ ID NO: 24224 - DNA, 522 bp, Zea mays
  Clone ID: LIB3608-028-F3_FLI
agcagggagcacgccgcacgagccctttccgccgccgccaaaatggtgaacgttcctaagaccaagaagacctactgcaagaacaaggagtgcaagaagcacactctccacaaggttactcagtacaagaagggtaaggatagcctgtctgctcagggaaagcgccgttatgaccgcaagcagtcaggatatggtggccagaccaagcctgtcttccacaagaaggccaagaccaccaagaaaatcgtgttgaagctgcagtgccagagctgcaagcactactcacagcacgcaattaagaggtgcaagcattttgagattggtggagacaagaagggcaagggaacatctctcttctaagtttctcatcgctcatctcgatgttggatcgaagctgtgggtctactactgttctaaaaactcgtcaaatttcaatgttactagtagttctgaaagcaggtcatgctgtgtatcaaattccaatgcctgacatttgcgctgagtgtgggttgtcttttggct

SEQ ID NO: 24225 - DNA, 1039 bp, Zea mays
  Clone ID: LIB3608-029-B9_FLI
cttgtattcttctcgccgagctgcgttgacaccctcgccatgagctcagggacgacgacaacggaggaggagagcggcaaggggccgccgccgcagcaccagcaccacttcgtgctggtgcacggcgcctgccacggcgcgtggtgctggtacaaggtggccacgctcctggcctccgcgggccaccgcgtcacggcgctcgacatggcggggtgcggcgccagccccgtgcgcggcgaggacgtggcgtccttcgaggactacagccgcccgctcctggacgcggtgggagcgcttccgcccggggagcgagcggtcctcgtcggccatagcttcggcggccagagcctcgcgctggccatggagaggtaccctgaacgagtcgccgtcgcggtgttcgtctcggccgccatgcccgccgccggcaagcccatggcgctcgtcttgcaagagttttcgcgagaaatagggccagatttttacatggactgcatatacagcaccggcagcgaacctgagcatccggtggagacacttctgctagggccagagtacttggccaagagactgtaccagctcagccctcctgaggacctgaccttggcaatggcgatggtgaggccgtctcgatggttcgaggacgacgcgacgctgaggagggatgacgggctgacggcgggcaggtacggcgccgttaggcgggtgtgcgtcgttgccgaggacgacgcgtcgtggtcggcggagttccagcggcgcatggcctcgtggagccccggcgccgaggtgaggggcctgcggggagccgaccatatgcccatgctctccaagccagcggacctctcggacatgcttgttgaggtagccaacaagtacagttccgatttggaggaccctgcctgatcgtagtaggatcagcgacgtatggtttctgaatcggtggtgatcgggaagatgttcaaatcttattgcatccacaccatcaccatgaaattattaagatgtacaatctgactttttgatatggtagggcttcattttg

SEQ ID NO: 24226 - DNA, 833 bp, Zea mays
  Clone ID: LIB3608-048-E3_FLI
cactcggcagtcggcacgcaggctagcagcacagcagcagccagagccatcccctctcctcgctacgcttcgcttcctcggcgccgattcctcctcctcctcctccaccctcgtccgtcccgttccggcgcgcgagctcgcccgagatggcgaacgcgagatcgggtgtcgctgtgaacgatgagtgcatgctgaagtttggcgagctgcagtcgaagaggctgcaccgcttcataactttcaagatggacgacaagttcaaggagatagttgtggaccaggtcggggatcgcgctaccagctacgatgacttcacaaacagcctccctgagaatgactgccgatacgcgatctatgatttcgactttgttactgcagaggatgtccagaagagcaggatcttctatatcctatggtccccatcctccgccaaggtgaagagcaagatgctttatgcaagctcaaaccagaaattcaagagtggcctcaatggcattcaggttgaactccaggccacagatgcgagtgaaatcagcctcgatgagatcaaggatcgggcacgctaggcgcaccgccatcgtgagtttcatgatcacgcatcatggactcgcctactactgtggatttgtacgccattatagacttggtgctgcgaaagactgctttggtgatttgtgggtttgttgctgtgtaaaaagatcctcatggcttccagaagaccatgaaggtttggatctatcatgtaattccttgttatctgccaattatgtatgaactatggacatgtgttgcgctgttcaactcactacaaataagtaatcgatatattccct

SEQ ID NO: 24227 - DNA, 1090 bp, Zea mays
  Clone ID: LIB3608-054-C10_FLI
cccacaccccccgagctcagcttagctccactccagctccaatcacagtcgtgaccagagcgcgagagctagctagagggccgtgaaaatgccgatcaataggatcgccctggggagccaccaggaggtgtaccacccgggcgccctcaaggcggcgttcgctgagttcatctccaccctcatcttcgtcttcgccggccagggctccggcatggccttcagcaagctgaccggcggcggcccgacgaccccggcgggcctgatcgcggcggcggtggcgcacgcgttcgcgctgttcgtggcggtgtctgtgggcgcgaacatctccggcgggcacgtgaaccctgccgtgaccttcggcgccttcgtgggcggcaacatcaccctgttccgggggctcctgtactgggtggcgcagctgctggggtccaccgtggcgtgcttcctgctccgcttctcgacgggcgggcaggccacgggcaccttcgggctgacgggcgtgtcggtgtgggaggcgctggtgctggagatcgtgatgaccttcgggctggtgtacacggtgtacgccacggcggtggacccgaagaagggcagcctgggcaccatcgcccccattgccatcggcttcatcgtgggggccaacatcctggtgggcggcgccttcgacggcgcgtccatgaaccccgccgtgtccttcggccccgccctcgtcagctgggagtggggctaccagtgggtgtactgggtcgggcccctcatcggcggcggcctcgccggcgtcatctacgagctgctcttcatctcccacacccacgagcagctcccctccaccgactactaaaagccgaagccgaccgacctaggggtgcgcagcgcagctagcgcatccagctctctctccccgctcgccgccgtttagtttctctcgtgcacgtgcatgcatcgtcgactgtctcaggccgccgctgcgccggcgccgctcgcatcgtttgcttccttggaccagcagtcgtcgccgtcaggctgaactgcttgtaaccgtgaattccggacccgtttgcttctgtaagatttgtgcatttgcctgagt

SEQ ID NO: 24228 - DNA, 639 bp, Zea mays
  Clone ID: LIB3608-054-C11_FLI
gagacgcgccttgcaactttgagctctctggcctgcccccgttccagcaagatctgtactccgtatccatcgtctccttgcttagtgggcactcaaagtgttgcgcatactgctcaaacaaatgatgatccatcgatagtggctgaggtgacagctctccaagtttcgtctgttcgctcgtggtggaaattccgctgagcgagcgagcgagcgaatcctcctcttcccagccccggcgtgaggagcgccggcgatgtcgaccggcggcaggaagatgaggacggcgtgcgtgaccggaggaaacgggtatatcgcctcggcgctcatcaaggtgctgctggagaagggctacgccgtcaagacgacggtcaggaaccctgatgacatggagaagaactcccacctcaaggacctgcaggcgctcgggtccttggaggtcttccgcgccgacctggacgaagacggcagcttcgatgacgccgtcgccggctgcgactacgccttcctggtcgccgctccggtgaacctccacacgaagaaccccgaggaagaaatgatcgagccggccgtcaggggaactctgaacgtgatgcggtcgtgcgtgaaggcgcgcacggtgaggcgcgtggtcctgacctc

SEQ ID NO: 24229 - DNA, 961 bp, Zea mays
  Clone ID: LIB3608-054-C6_FLI
cctcggccttcccgaatggtaagaaagcggagagtactgacgtgctgccaccgagggctgtcgtcaccatcgacgtcgaggcgggcgcgccgacgaacgcggccggggacgatccgcgcgacgccgacggggacgccggcggcgtcgactacatggcccgcgcgcagtggctccgggcggccgtcctgggcgcgaacgacggcctcgtgtccgtggcgtccctcatgatcggcgtcggcgccgtgagcgccacgcccaaggccatgctggtgtccggcacggcggggctcgtggcgggcgcctgcagcatggccatcggcgagttcgtctccgtgtacgcgcagtacgacatggaggtctcgcagatcaagcgcggcgatggcggcgaggaggaggaggaaggcgccgctagggacggcctgccgagcccgacgcaggccgcgctcgcgtcggcgctggcgttcgcgttcggcgcgctcctgccgctgctggcgggggtgttcgtgccgtcgtgggccgccagggtggccgcggtgtgcgccgcgactagcgtcggcctggccgcgttcggcgtggccggcgcgtacctgggcggcgccagcatgttgaggtccggcctgagggtgctcctcggcggctggttcgccatgctcctcacgttcgccgtgctccggctgttcgggacggtcttccacatacaagtctcgtcgtcggtgtgaatgtgacagctctcgtgctaatggtggcaaatggaataatggcccaggggcctctatagcttgctcttgttgacatcggaatgcgcgcgaaaacctgcatgccttgatgagtagcaaactagcggtcgcctggatagcgaaatgagttggaaaaggggtgtgtgggcgtgtggtgtggctagtggatgtactacttgattgtaatgtactatgtcgtgctaatgtatccggcgacaagatcg

SEQ ID NO: 24230 - DNA, 1370 bp, Zea mays
  Clone ID: LIB3608-054-E8_FLI
ccttcacctactatcatcatcgtctccatctccggccgggcacccaaactgagatggcgtccgtccggcggtccgccgtggccctgatcgcctcctttctcgtcgtcgcggcagtgggagcccagccgatggacccgaagaaccccatctcgtcagaccccaatgtgatccccgtatacatgagccccggctcgccccccacctacgtgagctgttacaacagcacccatgggcagcaagggtcggaacccacgtgctccatcctcgcgcgccagtgtccccgcggttgccgggacacctgctacgtccactgcccgtcctgcaagctcgtctgcctgtgcgagctgaccggctcggagtgctacgacccgcgcttcgtgggaggcgacggcaacaagttcctgttccacggccggcgcgacgccgacttctgcctggtgtcggacgccaacctgcacatcaacgcgcacttcatcggcaagcgcaacgacgcgcgcgccgccgcgccggcgcgggacttcacgtgggtgcaggcgctgggcatccggttcggcgggcaccggctgtacctgggcgtccggaggacggccgtctgggacgacgccgaggaccggctggccatcaccttcgacggggtgcccgtggcgctggacgccgtggccggcgccagctggagccccgcggcggcgcccgcgctgtccgtgttccgcacgggccccgccaacggcgtggtggtgcgcctggacgggcggttccgggccgtggccaacgccgtgccggtgaccgccgaggactcgagggtccacggctacggcctgcgccccggggacggcagcctcgcgcacctcaacgtggcgttcaagttctacgccctcagcgccgacgtgcacggcgtgctgggccagacctaccgcccgggctacgtcagcgccgccggggtggacgcgggcgccagggtccccgtcatgggcggcgccggaaggttccaggtgtacggcggcatcttcgacaccagctgcgaggtcgggcggttcgctggcgaggaccacgggcccgtgggcggcgtcaccgtggaggagccgaccgacgcgctctgcggcagcggcaaggccagcactggcctggtctgcaagaagtgacgactgacgaggccggcggtgtagtgtttttgcttgtgtgtacgtgcgtgctgacatatatatagctgctgctgcgaagtaaagtagtagtggttctatgtatggcagggggacctaataagactgtgacgtctcttgtgctgtagtcgtgtggacaacactggaaaaaatgccgtgttgctctggtgttctcgtgtttcatcactccaacaacttttacgttcaagggag

SEQ ID NO: 24231 - DNA, 1607 bp, Zea mays
  Clone ID: LIB3632-004-C9_FLI
tctgaccgagcgtggaagctcccggaccggacattccattttccgttccgaagggggggtgagaaggcggggaatgagtacaaccaaggtgaagagacgtgtgggcaagtatgagctcggccggaccataggcgagggcaccttcgcgaaggtcaggttcgcgagggacacggtcaccggcgaggccgtggccattaagatcctggacaaggagaaggtcctcaagcacaagatggttgagcagatcaagcgggagatctcgacgatgaagctgatcaagcaccctaacgtcgtccgcatatacgaggtgatgggaagtaaaacaaagatctacattgtgttagaattcgctaccggtggcgagctctttgatacaattgttaaccatggtcgaatgagggaagacgaggcaaggaggtacttccaacagttaatcaatgcagttgattattgccatagcaggggtgtgtaccaccgggatttaaaacctgaaaatttgctgcttgattcatatggaaacctgaaggtctctgactttgggctcagcgcgctatctcagcaaatcaaggatgatggactgctgcacacaacttgtgggactccaaactatgttgcaccagaggtccttgaagatcaaggctacgatggagcaatggctgatctgtggtcatgtggagttatcctgtttgttctgctagcagggtatttgccgtttgaggactctaatctcatgactttgtataagaaaatatcaaatgcagaatttacatttccaccatggacatcttttcctgccaagaggttgttaacaagaatccttgatccaaatccaatgacgagaataacaatcccagaaatattagaggatgagtggttcaaaaagggctacaagcgcccagaatttgatgaacaatatgacaccacattggatgatgtggatgccgtcttcaatgattcagaagagcaccatgtgacagaaaagaaagaagaagaaccagtagctctgaacgcattcgaactgatttcgatgtcagcgggcctaaaccttggaaacttatttgactcagagcaggagttcaaaagagaaacaaggtttacatcaaaatgtccccccaaagaaattgtccgcaagatcgaggaagctgcaaaacctctaggatttgatgttcagaagaaaaattacaagttgaggctcgaaaaggtaaaggcagggaggaagggaaacctcaacgttgctactgagatactgcaagttgcaccctctctccacatggtagaagtccgaaaagcaaagggtgacactctggaatttcataagttctacaagaacctttccaagaccttgaaggacgtcgtctggaaatccgacgatcttcaaacgcaacatgcttcttagcagaacctcagagaggaggaatggcaaactattttgtgcaccatcctttcaagcaaactattctgcatgtaacggtgggtgcccaggaaattgcgctggtgctccaccatcgttgtatatgctgcgtcttgagttgcttgctgtagctgaagggaagttcattcagtaggttttgagtatgagttttgtatatccgtatatgcctatgact

SEQ ID NO: 24232 - DNA, 1107 bp, Zea mays
  Clone ID: LIB3632-004-E10_FLI
tcctccgcctctcttccccacgccgccacagcttcccgcactccaaggcgcggcaccaaccaaccgcacccccgcgggagctggcgtgagcaggtctgcgtgcgtgtcgctatcttccccccatggcgtgggtgatgcaccggtcgagctcggacggcgggtcgagcagcgggtggtcggacgccgcggcggccgtggtggcggcggcggaggagcgggccgggtgggaggtgcggccgagcgggatggtcgtgcaggcgcgggacgacgcggcggggtccggcggcgccccgccgaggccgccgccgccgccggagatcaaggtgcgcgtcaagtacggcggcgcgcggcacgaggtgtccgtgtcccccattgccacgttcgggcagctgaagaagctgctggcgccgaggacggggctgcagccggcggaccagcagctgagctaccggggcagggcgcggggcaacgccgagtacctggacgcatgcggcgtcaagaacaagtccaaggtggcgctcgccgaggaccccgccagcgtcgagcgccgctacatcgagcgccagaggaacgccacggccgagagcgccaaccgcgccatcggcgccgtcgcgctcgaggtggacaagctcgccgatcaggtaactagcatcgagaaatcgatttccagagggaacaaggtgccggaggtgcagatcacgacgctgatcgagctgctgatgcggcacgcggtgaagctggagagcatacctgcggccggggactcctcttcgcagaagaacattcaggcgaagcgggtgcagaagtgcgtggagacgctggacgtgctcaaggtgtccaacgcgcggctgcaggcggtggtggtgacgaccaaatgggagacgttcgacgcggcggccaccacgacgaagtgggagctcttcgactgagatctgtgcagtgcagcagggcactgcagccaagaggatacgtgtatacgtgcatggtgttttatttccttgtctctcccggttttatttggtgcacattattgaattcgcgcgttgtaatcaatcatgtacggtgagacgacgacgctaggttagaacatgctataagggccgatcg

SEQ ID NO: 24233 - DNA, 567 bp, Zea mays
  Clone ID: LIB3632-005-C11_FLI
gagtcctgtccaccctgccaccgccgacgccgcgccgccgcagcaattgtcaccgtcgctatggcccgtatcaaggtgcacgagctccgggggaagagcaagacggacctgcaggcgcagctcaaggagctgaagtctgagctctccctcctccgcgtagccaaggtcaccggcggcgcacccaacaagctctccaagatcaaggtggtgcgcacctcgatcgcgcgcgtgctcacagtgatctcgcagaagcagaagtcggcgttgcgggaggcgtacaagaagaagaacctgctccccctcgacctccgccctaagaagacccgtgccatccgccgccgtctgaccaagcaccagctctctctgaagaccgagagggaaaagaagcgtgagaagtacttccccatgaggaagtatgctatcaaggcctaggtcagaactgtgagatgctgcgcttagcatatcatcggctgtgttttaatttttggtttgtatggacatttgctgtgggtcggaagtacgatgtattcctccatttccataaatggctaaattggtttgactggc

SEQ ID NO: 24234 - DNA, 1001 bp, Zea mays
  Clone ID: LIB3632-005-E2_FLI
ctcagtctcaaactccccgctctcccccgcccgtccagctcgtgctccgcctccgctgctctgtcctcttccctcctctgcgtttctcctcagagctgtttgacttgaccggacagtgctgttcggtggctcggccgcgatgccggactccgacaacgagtccggcgggccgagcaacgcggagttctcgtcgccgcgggagcaggaccggttcctgccgatcgcgaacgtgagccggatcatgaagaaggcgctcccggccaacgccaagatctccaaggacgccaaggagacggtgcaggagtgcgtgtccgagttcatctccttcatcaccggcgaggcctccgacaagtgccagcgcgagaagcgcaagaccatcaacggcgacgacctgctctgggccatgaccacgctcggcttcgaggactacgtcgagccgctcaagctctacctgcacaagttccgcgagctcgagggcgagaaggcggccacgacgagcgcctcctccggcccgcagccgccgctgcacagggagacgacgccgtcgtcgtcaacgcacaatggcgcgggcgggcccgtcgggggatacggcatgtacggcggcgcgggcgggggaagcggtatgatcatgatgatggggcagcccatgtacggcggctccccgccggccgcgtcgtccgggtcgtacccgcaccaccagatggccatgggcggaaaaggtggcgcctatggctacggcggaggctcgtcgtcgtcgccgtcagggctcggcaggtaggacaggttgtgaccgtcgccgtccatgcttgcatggccatggcatggctcagtcccgccgccggcttcttgcttggtgtcggtaattagcgctggttaagttaaccttcggtttttccccccttttcttttcgtggtaagtaatgttgtgctgaatggagacagtgatatggttaagatagctccataacctctcggtaattaatcctgtgatttgtactcct

SEQ ID NO: 24235 - DNA, 1670 bp, Zea mays
  Clone ID: LIB3632-015-C9_FLI
gcgtcttcacaaacgccggcgcaaactctcgcccgagcccgacagatcttcaattccccattccgcccaccgatcgaccttcacgccagtctcggtctcttccgaaggcgtcgcgcgcggttgtttgagaggagaggaggaagatgagggagtgcatctccgtccacatcgggcaggccggcatccaagtcggcaacgcgtgctgggaactttactgcctcgagcacggcatccagcctgatggccaagtgcctggagataagaccgcgggacatcacgatgatgccttcagcaccttcttcagccagactggtgctgggaagcacgttccccgtgcaatcttcgttgatctagaacccactgtgatcgatgaggtgcgcactggcacgtaccgccagctcttccaccctgagcagctcatcagtggcaaggaggatgcagctaacaatttcgcccgtggccattacacaattggcaaggagattgttgatctgtgccttgaccgtatccgcaagcttgctgacaactgcaccggcctccagggcttcctggtcttcaatgccgttggtggtggcaccggctctggccttggttctctcctccttgagcgcctgtctgtggagtacggcaagaaatccaagctgggcttcactgtgtacccatctccccaggtgtcaacctctgttgtggagccttacaacagcgtgctctccactcactcactgctggagcacactgatgtctccatcctgctcgacaacgaggccatctatgacatctgcaggcgctccctcgacattgagaggcccaactactccaacttgaatcgccttgtgtctcaggtgatctcatcgctgactgcttctctgaggttcgatggtgccctcaatgtggatgtgaacgagttccagaccaacctggttccttacccgaggatccacttcatgctctcctcctacgcaccggtgatctcttctgcgaaggccttccacgagcagctgtctgtggcggagatcaccagcagcgcgttcgagccggcttccatgatggtcaagtgcgacccacggcacggcaagtacatggcttgctgcctgatgtaccgcggcgacgtggtgcccaaggacgtgaacgccgcggtggccaccatcaagacgaagcgcaccatccagttcgtggactggtgcccgacggggttcaagtgcggcatcaactaccaggcgccaactgtggtgccgggtgccgacctcgccaaggtgcagcgtgccgtgtgcatgatctccaactccaccagcgtcgtcgaggtgttctcccgcatcaacagcaagttcgacctcatgtacgccaagcgcgcgttcgtgcactggtacgtcggcgagggcatggaggagggggagttctccgaggcacgcgaggacctggccgccctggagaaggactacgaggaggtcgccgcagagggcggcagtgatgacggtgacgaggaggaggaatactgatctgcttgcatgaatctgtttggctgtcgagccaggttgtggtgttgaaaaacctttgtttgtgtcctggccccctgggtaatgtttgggtgtttccttccatcatcacttgctgaactgctctagtatttgcatttgtaattgaagtctgtcgctttaagcactcttggttct

SEQ ID NO: 24236 - DNA, 836 bp, Zea mays
  Clone ID: LIB3632-023-D1_FLI
ctagcgccggcgcctccatttcgttttcctcactctctcctccagctcagggtccggcggcgaagggaaggcaagatgtacaccgcgaggaagaagatccagaaggagaagggtcttgagccctccgagttcgaggactccgttgcccaggctttctttgatctggagaacgggaaccaggagctcaagagcgacctcaaggacctgtacatcaacaatgctatccagatggatgttaccgggagtaggaaggctgttgtcattcacgtcccataccgcctgcgcaaggccttcaggaagatccatgtcagactcgtcagggagctggagaagaaattcagcggcaaggatgtggtaattgttgctacacggaggattgtgaggccacccaagaagggttcagctgttctgcgccctcgcaccaggactctgactgctgttcacgatggcatcttggaggatgttgtctacccagctgagattgtggggaagcgtgtcagataccgtctggatggttccaagattatcaagattttcttggacccaaaggagaggaacaacactgaatacaagctggagacctgcactgcggtctaccgcaggctgtgtgggaaagatgtggtctttgagtaccctatgaccgaaaatgcataaatatgatgccctctggatatctccactctatttcgttgattctgaatgttatgttgggtctccctatgtacttcaaaaaacatagttttgatgctaaagttgcctaggaatttggtacggtgaagtggcagtggacgtgaacaatgttaagttttgagcatttaaattaaacctttgccctg

SEQ ID NO: 24237 - DNA, 1388 bp, Zea mays
  Clone ID: LIB3632-023-E12_FLI
ctcaggtggccttcctaagatcgccgactgaatctacctcgcttcgcgcctccagttccgcaccgggactgccgaatctgtgctcgggatcgtctcttccagcggcaatgggggccgattctgaggacgccgtcaagcagctcagcctcctcatggagcaagtggaggccccgctgaagagatcatttcagaatatgcaccagggctatcccaaagaaacactggtgcgtttccttaaggctagagagtggaacgtaccaaaggctcataaaatgattgttgattctttggattggaggattgaaaatgaaattgatagtgtgctagagagacctatagtcccagtagatttatacagatcaatacgtgattcacaacttattggcctgtcaggatacacaaaggagggtctcccagtttttggcattggtgttggacatagcacatatgacaaagcttcggttcactactatgtgcaatctcatatccagattaatgagtaccgtgatcgtataattttgcctaggctgacacaacagtttgagcggcctgttgtcaggtgcataaaagttctggatatgactggtttgaagctatcagcactgagccaaataaagatgttaacttccatatcaacagttgatgatttaaattaccctgaaaagacagagacctattatgttgtcaacgttccatacatattttctgcttgttggaaggttgtgaagcccttattgcaggagaggacaaaaaagaaggttaaagttttgagtggctgtgggagagatgaactgctgaagattatggactactcatcacttccccatttctgccgccgggagggctctggatcatcaaagcattcgtctgctgatgttgacgattgctactcccttgaccatccattccacaaagaactatacgaccatatcaaagagcaagcgtcgcgtagggagctcatcaagatgggatcgttgcacgtgagcattcctgagccagacccagaggacgccaagatcgttgaggtcatccaggctgagttccagaagatcggcgagcaggatgagtccaccaccggccacaaggattagcatgccccaaggacggtcatgtgcggagcgccgccggtgacctcccatgaagttgatcgctgctgtccgtttctattttttttggttgacagtccccagttgcgtggggaatatagcagcaagctcatgcatttgcatgatggagtttatgtagttggaggagaggctgagagataaacgagccagtgtatattagatgcacatgaagccataatcgccttttttgttagtatataaccaacacatatttagctgtatattaaagaagccaaaatccatggaatcgcctttttccat

SEQ ID NO: 24238 - DNA, 2668 bp, Zea mays
  Clone ID: LIB3632-025-C12_FLI
acggcgcaccgcccgcccgccggatctgcgccggcgacgcgcccggacgtcggatctacgccgccgcaggaggggggaggcggcgctgtggccgttctctgcccgcgagcgcccggatccgtcccgccgttgatgcagaggtggtgaaaacatcttctcttctccaaagactgctgactgcaagttgcaaaagtttgtcttcagcttgctgtgttctttcttccctctctggcggagtacacgagaagtttgtagatataggcactaggcagctcctttcagctcttctatgtccagggatttggactgtcctgttcagacacagatggctgtggcagtcctggaccggagcttcagcagtgaatatcctggaggcagcagaactgaggggaggcaactgagctggaagagagtctttgtgcaaactgacaatggttctgtccttggcattgagctggagagaggagaaaatgtgcaaactgtgaaaaagaagctgcagatagctctcaatgtgcccactgatgagagttcattgacctttggtgacctggttctgaatgatgatcttagcagcattcgcaatgactcaccgttgcttctcaaaaggaatcagattcaccgaagcaattccacaccttgcctctcccctactggccaggatgtttggcaaagagaccggagtggacccattgaaatacttggctgttcaagcccttcatctcggatgaagcagattgcgaaggatgtcattaaggccataatgaatggtgtcgacccagttgctattaacagtgggatgggtggtgcctactacttcaagaacatttggggagagcgtgttgcaatcgtgaagccaactgacgaggaaccatttgccccaaacaacccaaaaggttttgttgggaaggctctggggcagccaggcctgaaaagatctgtacgagttggtgagacaggcttcagggaggttgctgcgtacctcctcgactatgatcactttgcaaatgttcctcccaccatgctggtcaagataacacacaccatcttcaacgtgaatgactgtgttggctgcaaaagcaaagtattctgcaacaaatcagagtctgtgagcaagattgcatcactgcaggagttcattcctcatgattttgatgccagtgaccatgggacctcaagcttccctgtatctgcggtgcataggatcggaatacttgacattaggatcttcaacactgacaggcatgctggaaatcttctgatcaagaaggttggtcctggggctgacaatttcggagagcagacagaactcattcctattgaccacggtctttgtcttccagaatgcctagaagacccctacttcgagtggatccactggccgcagtcgtctgttcccttctccgtcgaggagctcgaatacattgcaaaacttgaccctataaaggacgcagagatgctacgcgtggagctacctatgatacgggaggcgtgtctcagggtgctggtgctgtcgacagtgtttctcaaggaagctgcagcgttcggcctctgcctgtctgagataggagacatgatgagcaggcagttcacagcaaaggaagaggaaccaagccagctcgagcttctctgcatggagacgaggaagtgggtcgaggaagagagttatttcttcccgacgaagccggagttgaagacggcgatgatgacttcacccagttccctctcgacagcgacgccttcgaaccgccagctttctgcaagtttggcagcgtgaagacaagttccaggaatccactatccaagctggacgagtgtgacgaggaagacggagacttgtcggaagaggagggcgagcacggtgacgtcctgaccagtggtgcattgccccagaaggttcctcccatctccaagctgtcgtcgtccatgaaggggcttggcttcatcgggaaatcgaaaccctaccgtacaggtggcgtccccaagggtaaggtgacaggtagaactaactacagtggcaaagccagcgagcatcagtccgggagccggagcgccaacgagctgctcccgcccagcgcgagtttcgtgaagctgtcggacatgagccgcaaggagtggagcgcgttcctcgagaagttccaggagctgctcccgagcgccctccgcacccggaagcacagcgccggcgtcggccagcgcccgatgccgaggctgggcacgtcttgccagttttgaaggtgtagaggagaagccaccaccaaggtaaaaaaaatggatgtatacctccgttttagctctggtgtcgtgcaggtgcagcagtcagcaggtattattataacaaaaaagcttgtaggtgtatggagccagtagaagaggttgtctgagaataagatcgtcgatggcacagatgagatgagcttggattgcaggagagtggtgtgtttgtgcatagtgttttgacatatgagatgcgttgttcttttctttttttttctttttctttttgtatatagtgagtactcctgccgcctcgcaacaccgggctcgatctcggccgttacctgatggttggtggtgagtgtgcttggcatcgcctgtgttctgtctttgccgctgtaccattttggagacgcttaccataatatgaacagctgtgatatgatatcgctac

SEQ ID NO: 24239 - DNA, 2255 bp, Zea mays
  Clone ID: LIB3632-025-F3_FLI
aagccagcacctcaaagccatggcgtaagtggaccacctcgctgccgagagggccaccgcgcgcttcgacgtcgaggagatgaaggttgcgtgggccggctcacgccacgccgtccacgtcgccgaccgcatggcgcgcctcgtcgcatccgaccctgtcttccgcaaggataacaggaccatgctctccaggaaggagttgttcaaggacactctaagaaaagcagcgcatgcgtggaagcggattgtcgagctacgtcttacagaagaggaagcggatttgctgagacaatatgttgaccagcctggttatgttgatctgcattggggcatgttcgttccagctataaaaggccaaggaactgaggagcagcagcacaagtggttaccactggcttacaagttccaaataattgggtgctatgctcagacggaacttggtcatggctcaaacgttcagggccttgaaacaactgctacattcgatccgaagactgatgagtttgtcatccacagtccaactctcacgtccagcaaatggtggcctggtggcttggggaaagcttccacccatgcagtggtgtacgctcggttgataactgaaggaaaggactatggcatacatggtttcattgtgcaactgcgaagcttagaggatcactccccacttcctggtgttaccctcggtgatattggtggaaagttcggtagtggtgcatataacagtatggataatggtgttcttcgatttgaccatgtgcgcatcccaagggatcaaatgttgatgaggctttcacaagttacaagggaggggaaatatgttcactcaaatgttccaaagcagctgttgtatgggacaatggtttacgttcgccagtcaattgttgcagatgcttctaaggctttgtcccgtgctgtttgcattgctgtacgatacagcgcagtcagaaagcagtttggctctcaagatggtggccctgagactcaggtccttaattacaagactcaacagagcagactctttccattgctggcttcagcatatgcatttagatttgtgggtgattggctcaactggctatatacggatgtaactcagaaactggaagccaaggacttctcgaccctgcaggaagctcatgcatgcactgctggtttgaaagctgtgacaacatcagtaacagctgatgcaattgaagaatgccgaaagctctgtggtggacatggttacttgaacagcagtgggcttcctgagttgtttgcggtctatgttcccgcttgcacttacgaaggagacaacgtcgttttgcttttgcaggttgcaaggattctaatgaaaaccgtttctcagttggcatccgggaaacagcctgttggcacaatggcctacatgggcaaagtgcagtatttgatgcaatgcaaatctgctgtcagttcagctgaagattggcttaaccctgatgccatacaagaggcatttgaagcaagagcgctcagaatggcggtaaactgtgcccagaacataagccaagctgcaagccaagaggaagctgcaggtttctatgagcggtccccagatttgcttgaggctgcggtagctcacatccagctgattatcgtgaccaagttcattgagaaggtgcatcaggagattcctggacacggagtgaaggaacagctccaggccctctgcaacgtgtacgcgctgtacatcctccacaagcacctgggcgacttcttggcgactgggtgcatcacgcccaggcagggagcgctggcaaacgagcagctgggcaagctgtacgcgcaggtgcgtccgaacgctgtggcgctggtggatgcgttcaactacacggaccactacctggggtctgtgctggggcggtacgacggcgacgtgtaccctgcgctctacgaggaggcgtggaaggacccgctgaacgagacggtggtgccggaggggtaccacgagtacctccgcccactcatcaagcagcagcagctcaagctctcgaggctctgaagtctgaatcctctctctctctctctctctctctctctctctctctctgatgtggaagccagccaagatgtgtgtacgttagacatgtgtggtgggtttcagttgatacacgagggagtgagtaataaagagcgagcgagagatgaaacaaagaactgaatttgtatcgtacaacaaagaactttgccgtttggttcacatatttataacgtaatgggtaattgataacgtt

SEQ ID NO: 24240 - DNA, 733 bp, Zea mays
  Clone ID: LIB3632-025-G1_FLI
cgcaacgcaagcacacgcccggccgcctgccacagttgccatggcgaccatagccacgatggcgctgctgaagcccgccgccaaggccgcggcgcggtcggcgccgtccaccagcagcggcagcgtctcgctgcgcgtccggacggggcaggccgccaagaaggctgcgctgtccgtgtccgcgtcgtccacgctggcgggcgccttcctcgcggcgctggcgtcgtcgcccgacgctgcgctggcggacgtggcggcggcggacgccggcggcgacagccgcggccagctgctgctcgtcgtggtggcgcccgccatcgggtgggtgctgtacaacatcctgcagccggcgctgaaccagctgaaccgcatgcgcagcagccaggccgtggccgccggcctgggcctcggcgccgccgccgccgccgggatggcggccccgcccgaagcctccgccgccgtggtgcaggacctcgcggcaatcgccgccgccgcgcccgccgacgacagccgcggcctcctcctgctcatcgtcgtcgcgcccgccatcggctgggtgctcttcaacatcctccagccggcgctcaaccagctcaaccgcatgcggtccgactgaagctagctagctagcgtccgtttccgtatccgcggcgtgcgttgtagacgtgaagcacgtggttggttgatcaacgtacgtggacgtggcctgtctttccatcttcattcttgagcg

SEQ ID NO: 24241 - DNA, 2012 bp, Zea mays
  Clone ID: LIB3632-025-G5_FLI
ctgcgcggcgcagcttccagagcagcagcagcgccgtcgcgtcacgctccggcgcctcgccatccaacctccccagtcggggcggcggcgccggttgctgccgccgccatggcgagggccgccatgtccacggcggtcgcgggcgtgccaccaccggtgtcgctcgacaccatcagccccaaggtgccgccagtgtcgctcgacaccatcaaccccaaggtcttgaagtgtcaatttgcagtccggggagagattgtcacacgtgctcagaaactgcaacaagaactgcagagaaatccagagtcgcttccttttgatgagatactctactgtaacattggaaatccccattccattggccaacagccagttacctatttcagagaagttctatctttatgtgagaatccagctctcctggacaaaagtgaaacgcatgctttatacaggtcagatgctatagagagagcacggaaaattctagacaaaataccaggaagagctacaggagcatatagccacagtcagggtataaaaggtttacgtgatgaaattgctgccggaattgctgcccgagatgggtttcatgcaagcgcagataacatcttcctaacagatggagcaagcccagcagtacacatgattctgcagttattgataaggtccgagaaggatggcattctttgtcctattccacagtacccattgtactctgcatcaattgctcttcatggtggttcccttgttccttatttccttgatgaagagacagggtgggcacttgaggttgatgagctcaagaaacaacttgaggaggctcgatctaagggcatcagtgtcagggcgcttgttgtcataaatccaggaaatccaacaggacaggtccttaccgaggaaaaccagaagaaaattgttgagttctgcaagaatgaaaggctcgttcttctcgcggatgaggtttaccaagaaaacatatatgtcgaagacaagcaattccactcgttcaaaaaaatcgcacggtcgctgggatacactgatgacgaccttcctttggtatcgttccagtcgatttctaaaggctactatggagaatgtggaaagcgaggtggttacatggagataactgggttcagtcctcaagtacgggaccaaatctacaagatggcatcgataaatctgtgctccaatatcaccggccaaattcttgctagccttgtcatgaacccaccaaaggctggggatgaatccttcgaatccttcaggttagagagggatggtatcctttcatcgttgggtcgccgtgcaaaggctttggaagaagcattcaacagtttagaaggtattacatgcaataaagccgaaggcgcgatgtatctgttcccacgccttcacttaccccagaaggcgattggagctgcccaagcagccggcactgccccagatgcttactacgctaaacgcctactagaggccactgggatcgtcttcgtccctggttctggttttggacaggtccccggaacatggcacatcagatccacgatactgccgcaggaggacaaaatacctgggatagtatctaggttcaaggagtttcacgacaagttcatggatgaattccgtgattattgagtgtccatctcagttcagtcattgcatgaattctgccaagatggcatcctgtcattttgtcgcgatcggcaccgtctgcccgagttccagccacggtcggtcggtcggtcggtactcggtaccgactagctagctagcggtggataaccaccgatgaaccgttcggtatagaccatctctgctgccacgatgtgtcgtcttttcattagtccacattatttcaatgtccaaaatattttaagaacctaagaaaatatttatgaatcatgtaacatttatatttacatattatattttttaatgtttatgtcaattttatttatgatgtacaaactatgtaatttgtatttcttttatgaactatataattttgtttgttc

SEQ ID NO: 24242 - DNA, 1061 bp, Zea mays
  Clone ID: LIB3608-008-C8_FLI
cgcaaaccgcgtctcgcgcgaagaatccgcatttccccttccccgcaccgcaccgcaccgcacccaacccccgtcggagagagagatggcatcggtggcggagatgcagcccctcgcgccggcggggtaccgccgcgcgccggagatgaaggagaaggtggaggcgtcggtggtggacctggaggccgggaccggggagacgctgtacccggggatctcgcgcggggagagcgccctccgatggggcttcgtccgcaaggtctacggcatcctcgctgcgcagctgctcctcaccaccgccgtctccgccctcaccgttctccaccccaccctcaacgccacgctctccgactccccgggcctcgcgctcgtgctcgccgtcctgcccttcatcctgatgatcccattgtaccattatcagcacaagcacccacacaatttcgttttcctgggtctgttcacgttgtgcttgagcttcagcatcggcgtggcttgtgctaacacccaaggaaaaatcgttctggaggctttagtgctgacggctggcgtggtggtttctctgactgcgtatgctttctgggcgtcaaagaagggcaaggaatttgggtacctggggcctatcctgtcttccgcgcttactatcctcgtcctaactagctttcttcaggttttcttcccactgggacccgtgtcggtgggcttgttcggtggtctaggggctctggtcttctcaggcttcatcctgtacgacaccgagaacctgatcaagcgccacacctacgacgagtacatctgggcgtcggttgggctgtacctcgacatcctgaacctgttcctctccatcctgaacatgctcaggagcatgcaatccgacaactagcctcttgatcgaacacggtatacccccatggtaaatgcggtcctgtgctctggttgttagaggacgggatcgacgtgcgacatatgtattgtgtgagcccactcgtgtcaacactgcaaacaattgtggtcatgtcaccttgtatgttcttggtcacttttcaaacaattgtaagtacctc

SEQ ID NO: 24243 - DNA, 1160 bp, Zea mays
  Clone ID: LIB3608-008-E7_FLI
agaagcaagcagcagtaacaagaaaccatcatcgatccatgtatccaccaatggcggcgctcggaggacggcggaggagggcgtcgtcagcggccctcctgctagccttgttggcggtggccctggtctccctggccggcccagccacggccgcggggaacaagaccgggcaggtgaccgtgttctggggccggaacaaggccgagggcacgctgcgcgaggcctgcgactcgggcctctacaccatggtgatcatgtccttcctcgacgtctacggcccgcagcgcggcggctaccaccagtaccacctggacctgtcggggcacccgacggccggcatcggggacgacatcaagcactgccagttcgtgggcgtgccggtgacgctctccgtcggcggcttcggctccggctactcgctcccgtccacgcaggcggcgctggacctgttcgactacctctggaacgccttcctcggcgggtcgaagccaggcgtgcgccgccccttcggcgacgcgtggctcgacggcgtcgacctgttcctggagcgcggctcgcccgccgaccgctacgacgtgctggcgctcgagctcgccaagcacaacatccgcggcgggcccggcaagccgctgcacctgacggccacgccgcgctgcggcttcccgcccgccggctacctgcgccgcgcgctcgacacgggcatcttcgagcgcgtccacgtccggatctacgacgacgccgactgcgaggccaggtggcacctcgcgtgggacgagtggacggcggcgtacccggccaccaggttctacgtcggcctcacggcgtcggagatgacgcacggctgggtgcaccccaagaacgtctactacgacgtcgcgccgtccgcgcagaaggcggacaactacggcggcttcatgatctgggaccgctactacgacaaactctccaactacaccagcatggtcaaggactacgcttgattggatttctcgactcagttcagagcagacatgcatgctagctgcgtcagccgcttcgatctagctcaccgacctatataagccgaagtactgtgtagtgtgtttgcattttattgtaagaaactaagaaggaataaattggcgaataaacaagagtaaaatacaccgggttgttgagtg

SEQ ID NO: 24244 - DNA, 720 bp, Zea mays
  Clone ID: LIB3608-009-C3_FLI
gggagttgcaacaagagtttgcttcgtagttcttgttctgatctgcacatctttcagaggagggagggccgcgacattcacgttcgtgaacaggtgcgcggcgacggtgtggccgggcatccagtcgaacgcggggagctcgaggctggacccgacgggcttcgcgctgcccgcgggcgcgtcgcgcgcggtgccggcgccgtcggggtggtccggccgggtctgggcgcgcacgggctgcgtgcaggacgccgctagcgggaaggtggcgtgcgccacgggagactgcggctcggggtccctggagtgcgacgggcggaacgcggcgacgccggcgacgctggccgagttcacgctggaccccgccggcggcaacgacttctacgacgtcagcctcgtggacggctacaacctgccggtcgtggtggagcccgcgggcggcagcggaggcggcggcggcgccgccacgacgacgacgtgcgccgcggccgggtgcgcggcggacctgagcgagcggtgccccgcggagctgcgcgccgaggacggctccgggtgccgcagcgcctgcgacgccttcggcaggcccgaatactgctgcagcggcgcctacgccagccccggcacctgccgccccaccgcctactcgcagctgttcaagtccgcgtgccccaggtcgtacagctacgcctacgacgaccccaccagcaccttcacctgcgc

SEQ ID NO: 24245 - DNA, 1043 bp, Zea mays
  Clone ID: LIB3608-009-C8_FLI
cgagcgtgcaagcgctgctgggctggtgtcagtcacctgagcaaggaagagagatggccacgctgcctcgcgagggcgccgcggcggcggactccgaccagcttttggtagaagcacatggctctacacgaacgctgattttgaataggccaaagcagctcaatgcactctcctctgaaatgattaaaggtctcctatggtatttcacagcttttgagaaagatgatggagtcagattgttgattatgaaggggaatagaagagtattttgctctggaggtgatattgctcaatgtgcccggtgtttatataatggaaactggaaatgggtcgatgatttcttccaaaatgaatatttgctaaattacatcattgcgacttacataaaaccatcaacaaatgcttctccaaaaggacagttgaagaaatcatagatgctcttgaacaagaaatctcaaatgtttcagacaaatgggttgctgcaacaatcaagtccctgaaaaaggcttcccccaccagcctaaaaatttctctgagatcgataagagaagggagaacacaaactcttggggagtgcctgcgtcgggaatatagagtggtttgccatgtcctgcgtggcaccttcagccgagacttgtctgagggatttagggctgtgctactagaaaaagacaacaagccagagtggattcctccaaggttggaacaagttcctgacgaggcagttgagcaatatttcttgagaattgatgatccccagtgggaagatctgaacctgcctgcgagacttccccaccgaagaaatattgagtccaagatttgattgaggtcttggacgaagagtgagcctcggtcaggataactcgtcaactcatgtttgaagttgtgtgcggaatgttgacgacgattgataaataataaacgcggactgaatatatgtcttataagttcacgtttatcgctaaataatttttgttgcttttgtgtgaagttgtacctgttagccttgttcggttacagggatgaaattctaccatagatat

SEQ ID NO: 24246 - DNA, 1261 bp, Zea mays
  Clone ID: LIB3608-009-E12_FLI
gccacactagctcctcacacatggacgatgagtggaggccggtgatggccatgctcgtcttcaacctcatctctgctgtgatgacggcgctggtgaagaaggcgctccagcaagggctcaacgccctggtcctcatcactcttcgccagttggtggccactctcttcctagcaccaatagcctacttcaaagaacggaacacaaggcctaagctcacgctagagatctttgtgtaccacttcttcagtgcagcgcttggtgcttccctgtcgcagtacagcttcttctacgggctcaagttgacgactgcgacgttcgccataacatttgccaacatggctcctgtcctcaccttcctcattgccatagctctacgggtctgcaaagatggtggggacgctcatgtcgctcggtggagtgctgctgctgagcctctacaagggcatggccgtgacacaccacagcagcggcactcctccgccctctcaagtacaactaggcaacgacggcgacaggaaggtctggatgctggggactgtagcgttactggccaactgcctcgtcttctccctgtggttgctgctgcaaagcaggctgacgaacaagtacccggcgctctactccagcaccgccttcatgttcttcatcagcacgctgcagacaggatcgctgacggtgacggtcgagtggcaccacgcgtcggtgtggattgtcacaaagaagctggagatggtcacgatattgtattcgggaatcatggcgtctgcagcaggcttcctgataatgacctggtgcgtccacaagaggggtccagttttcactgcagccttcatccccatcgtccagatcatggtggccatcatcgatttcttcttcctccatgagcagctataccttggcagtgttctgggatccgcgctgatgatatttggactttaccttctgttgtggggaaagaagaaggatgcaatggcggcatgctctgcaggtacgaccaaacatgacgaagaggccagcatcaacaagtagcttagtgaaataatcagcagtcagcatcatcgagtggtggcaaacacagacatgtactagtggcggcatctgcaattgtttgaagaaaagaaaatctacgatcgatccagaccccttttgccatgcatgcatgagatgtgtttccagcaacactaattaacagaactgccgatcgatgatatcacgagtttattgttcataaccacttgtcaataaaaacttttgcttttat

SEQ ID NO: 24247 - DNA, 1360 bp, Zea mays
  Clone ID: LIB3608-009-F10_FLI
gcggcgacccgaggagtcgagccgagcaccgaaatggggtcgttcaacggccacatcctgccggggacgctgttcctggcggtgggcctgtggcgggtgtggtccgccgtcgcgcgcttcgccgccgacccgccggcgttccgcgtccgcacgtggaaccccctccccaaggggccccggctgctggagctctacttggtggccggcggcgcgttcctggacatgtgcctggagctcggcggcggcatcctcgccggcggcgcccgggtcggcccggacagcctcatctacctcgagcacgccggcatgctgctcatgttcttcctcttcggcgcgctcgccctcctctcccagaagacaaggtacctgccgctgaccgacggcgagctgagcctagtggcagcgacggcattcacgtcagagctgcttctcttctcctaccactccgccacccacacggggctagagggctactaccaccacctcctggtcctcctcatcggcctctgcatcctctccaccgtcctgggcgcgctctcgccggcgagcttccccgccgacctcgccgccggcgtgctcctcacgctgcaagggctgtggttctaccagacggcgctcacgctgtacgggcccatgctcccggccgagtgcggcgtggacgccgacggccacgtcgactgccgcagccgcgccgcggaggagcgcgccgagcagctggccaacctgcagctgttcggggtcgtgttcgtcgctttcgtctacgtgcttgggtgctacgccgtcgcggcagcgaggtacgggcacccggacctcgcggcgatgcatgacgagcacgccgcggcatacgagtgccgtggcggggttggcgccaggaccgaggtcgaatgtgtggctgtgtagtgttcgcttccgatcctgagccagttgagatatatgcagattttgaggagccagatgatttaatatttgtgtatattttttaatttttagaatcattccgtttacctagaatcaatctaaacaataaaaaattaaaaaagagcgactttatgccaccatactctagaactactaaacgctatctaaatagcagctgcacgtacaactctgttcttgcttggtttcgttattttacttagagcttggtttcgtcaacaaagcttgaactctgttcatgctcggatggatatgggttctctctgtgtggcccagccagtgcctctgtgtgatctgttagactgtgtgtgtgagtgtacgtgggccggtaccaccgttggctgccggtccattagggttagaattgagtctatatattgtacacattttctatgcaatacaatggttcatccttctacatggt

SEQ ID NO: 24248 - DNA, 2116 bp, Zea mays
  Clone ID: LIB3608-010-A7_FLI
acgggagagagaatgaattgaaacgaaggcccgcgacgcgaggagcgagggaactaccaccggtctcggcgcctccgcgacgatagcctctccgacctcgagcgcggtccggttcctccctgcgtcagcacgcgagcccttggagcttcgagtcagatcccggcgggcgcccatggtggctctggtgccgttgagccgcgcgatgtagggttttcgcgcgccgcatagtaggagcgatggggcgccggaagatgtccgcggcggcaccgccgtctcggagctggtccaacgttggcggaagcgtcatcccggaacttcgagctaaacacaaaacagacttggagaatttgacgctgaccaaacagccactcagaacattgcattttttcctattagccatgttacaatacttgaaaagattagcaacatatatcctgagtaagggtggtttcttctttctcctaattgttttattggtagcttctggaatcttgctcgtcgtttcggatggtctgcataacaaggtttgttgcatgttcttctcttgtctttgtcttaatcagcgggatatggatagtcattttcataagaacccatgttgcagtattttgtatagcatcttggcattgtttttgagcactaatgttgtttggatgtcatgtatgcagcatgtgcaggaattccttaattatgctaaatttgtgtcgtggtgggtttcattaggtgtggcttcatcaattggactaggttctggtttgcatacatttgtgctgtatctgggtcctcatattgctctgttcactattaaggctgttcaatgtggtcgaattgatctaaaaattgctccatatgataccatacagctaaaggttgggccatcatggcttgacaagaaatgttcagaatttggaccgcctgtgtatccagcatcagctcattcagttaggatcccagtcttcgacctactacctcagatacagctggaggcagttctttggggaattgggactgcgcttggtgagctccctccttattttatatcacgagcagctcgcttatcaggaagcgagtcaaaagctgttcaggagcttgatccagctacttccaaagaagatgggccagtagcatcatctcttaatcgaaccaagcgttggcttctctctcactcccaacatctcaacttcttctctatcttgattcttgcttcggttccaaatccactctttgaccttgctggtattatgtgtgggcaatttggtgtgcctttctgggagttcttgtttgctactttgattgggaaagccatcatcaagactcatattcagacactatttatcgtgtccctgtgcaacaatcagctcttgtatcttattgaaaaggagttaatctggatatttggtcacgttcctgggttttctgccacccttccgtctgtgattgccagactccatgctgccaaggacaagtatctatcaccaccagccccagtctcaccgtcatcacaaatggaggagaaacagtggaatttctcttttacatctgtctggaactctatagtgtggcttgtgcttttgaacttcttcattaagatagtcacgtcaacagcacaggattatctcaaaaagcagcaggatacggagatggaacttatttcggattccccgatccacgaccattctaaaactaactagtggcgcagctagtggtgtttatacacagctgctagcagcaaagattctcctctgtagcttaagcccctgcagatgatttcaagttccaacaattagtattagtagttattcatctgcgcagtggacaaaaacatggacacatggtcttggttaacttgtcagttgacgaccttttgtcattgagcctgtacctgtactggcagctcctggtggagtcattctgtttatttttcggacatctacacggataaacagtaggaattgtttatggagcacggttggctttgtgagatgtatcattcatacctgttcctatgtattctgggaacttgaaatgcaatagaaacctgggaggatttaacaaggatacatcattgtgtcaagtttactatgtgcatgtggtttgcaatttgcacctcttccgg

SEQ ID NO: 24249 - DNA, 944 bp, Zea mays
  Clone ID: LIB3608-010-B10_FLI
gcgaagccgcgcgtcgacgagaggggcggagtcggcgacgagcagatggccggaggcggccccgccgcgtcggcgctttcaagcccctggagggctctgttccagcgagcgctggacgccaacgcccacctcaggcactccacctacttccaactcgctacggtgggcgccgccggcaggccggcgaaccgcaccgtcgtgttcaggggttttcaggaactctgtgataagattcagattaacacggacgcccgaaccaacaagattggtgagatcaagagctgcccctttggtgagatttgttggtacttcacagatagctgggagcaattccgtatcagtggcagcatagatgtgattgatgcttctactacagaccctgccaagctccagcacaaggagaaagcatggttttcaagttcagtgaagtcgagatcgcagtacttaggaccacagccaggcattccggttctagatgatgagcatgttaaggacgttcatctcgatcctttagctggcccagtagatgccttttgccttctggttcttgatccggaaaaggttgattatttgaatctgaaaagcaatcaaaggttgatctttacaagaagacaaaaggatgatggatccaatgattggatggcagtaaaagttagtccttaagctgctgcaaaaactttatttgtgagcttctcttggtaactagactatcatgattcttctgtgttttcatatcatttgaaatgttaggtgcatatcattatgtatatttgagaggccttttcatagtcatacatttatatattgggaatgctttgtaatctcagggatttgttattttttgttaccctcaaatatagaagataaagactgtaaggtatttaggaaggagtcaaagcaggctgtggctattcatgtttgtcaaagccgttggtcttgagatt

SEQ ID NO: 24250 - DNA, 2171 bp, Zea mays
  Clone ID: LIB3608-010-C10_FLI
gcctgacctcccaccctccctcttgaatccgctcaagttcccgatctcccaccttgtcctccagctcgatcgcgttcgcggcaccccactccgtgctccagaaataagtagccggcggtttcctcgccccaggttttgcggttgctggggagtgggaattcgttcggctccggtctggccaatgctcctgcggtttcttgtagaggccgctgagattgggatccaaactgcgttaggcgagcagcagcagtagccgcatcgagattcgccgtcgttgtccgagggattctccgtttcttgggcggggatttcggttgcggcggaaaaaaaaagaattctttcaccggactggcccaactcctcggttgatccggtgatccgttacaaaaggcctccgctgtatgttagggtagcctttccgacgcgtttctttcgtcgccccagatccgtctccccgcccgattctttcggaggaatcggcggcggatcggaggcagaggggtttggaggcctgagctccgatggagatgcacgccgacgtcgacgggtgcagcgtgcccctggccgtgctcctcaagcgggagctgtgcaaccagaaggtggagaggccggacatcctgttcggggaggccaacaagagcaagaaaggggaggacttcacgctcctcgtgcccaggtgccaccgcaccccgggcggcagtggcggcggcgagaatgccggcgacgacgacaccatttccgtatttgcgattttcgacggacacaatggctctgcagctgccatatacacccgggagaatctaataagcagtgtgttggctgctattcctccaaatctcacaagtgaggagtggaaagctgcgctgccaagggcactagttgctggttttgtaaaaacagataaaaacttccaaataaaagctgcacgctcagggaccactgtgacttttgttataatagatggatgggttgtcactgtagcatcagttggcgattcacgatgcattctagaatctgctgagggctcagtatattttttatcagcagatcatcgcctggatgctaatgaagaggaggtggagcgtgtaacagcaagtggtggtgaagttgggagaataaatatcgctgggggtgctgggattggtccactcagatgctggccaggtggattgtgtttatcaaggtcaataggtgatatcgacgtcggggaatttatagttcctgtcccacacgtgaagcaagtaaagttgtccaatgctggtgggcggcttgtcattgccagtgatggtgtgtgggatgcactgcgctttcaagaggctctgaactacaccaggggcctgccagctgaagctgctgctaatcgaattgttaaggaagctgtcacttcgaagggattaagagatgatactacttgcatagtagttgatatactacctccagagaagttaagccccccactgaagagacctggaaaaggagtcatcaaagctctattccggcggaggccctctgatgaaatgtctgaagatcagatggacagaggatgtttagaaattgatgttgtggaggaaatatatgaggagggctctgcaatgcttgctcgaaggttgaatataaattatccagaaggaaatatgttcaagctgcatgattgtgctgtctgccaattggagatgaaacctggtgagggcacctctgttcatggtaacatgcccaagcattcaagagttgacccctggggtggcccttttctctgttcctcctgtcaattgaaaaaggaggccatggaagggaagctacattcaagaaattcccaatctgctgttcaacctctgcctaagtaggcattccttgacgggttctatacattggttcatagacactaactaccactaacaacagcattagcaaataaagtagactcgtcaatgccatcttattcatcaatcaatgtttgacagagtcatgaattttcacctactacattcttatcaaatggcgatcggtacagattttagagatttatggtgtcgtttatatgatgcactacagttgttcggtagtagaaggttcaagtctgagccttatcaagtctatattcagagagaccacagctggcctctaggatcaaatgaactggtggccttaaggtgtgctgctttctgtagttc

SEQ ID NO: 24251 - DNA, 957 bp, Zea mays
  Clone ID: LIB3608-010-D1_FLI
gtcaactaccccatcctaatcttcaaaactcccctgcccaggaaggcccgaaggcaccatcgccgtccccgtccatgcgccgctgaccgcgcgcgccatcaaagccaattacccagccatctagctatcagccatgtattcggccaaccactggggcggctcgttcgagatcgccgatggcgcggcggaggacgaccacagccgcaacatggacctggaccgcggcgcgctctcggcgcggcagcaccacgagctggacgagacccagcagagctggctgctgggcccgccggaggccaagaagaaggacaagtacgtggacctcggttgcatcgtcgtcaagcgcaagatgctctggtgggccttgtggtgcgtcgtcgccgctttcgtcctcatcggcctccccatcatcatcgccaagtccatcccgcacaagaagccaggcccgccgccgccagatcagtacacagatgcgctgcacaaggcgctcctcttcttcaatgcccagaaatccggccaccttcccaagaacaatggcatcaagtggcgcgggaactctggcctgtcagacggctccgacgccaaggacgtcaagggtggcctcgtcggcggctactacgacgctggcgacaacatcaagttccacttcccgatggccttctccatgacgctgctgagctggtcggtgatcgagtacagcgccaagtacaaggccatgggggagtatgaccatgtcagggagctcatcaagtggggcaccgactatctgctgctcaccttcaactcatctgcttccaccatcgacaagttatacgctcaggtgggtactgctaagatcaacggcagccggccggacgaccattactgctggaaccggccggaggacatggcatatcctcgcccttcactgtccgtgagctccgcccctgatctgggtggcgaggtcgccgctgccct

SEQ ID NO: 24252 - DNA, 1338 bp, Zea mays
  Clone ID: LIB3608-010-D5_FLI
gctagttggagctgtagtattagccaaccagccagcctccgatctccatatggaggaggctgcgcccgcggcggtcatggagcgggagcgcctcacggccgagatggccttccgcggcgcggacggagctcggcgggacggcggcgacccggcgcccagcatcgtcatcaagatccgccgccggctcccggacttcgcccgcaacatcaagctcaagtacgtgaagctcgggatccgccacggcggcagccccacgtcgctgctgccggcgctctgcgtgccggcggtcgcagccgccgcctactcgttcgtccgcctcgacgtcatctactactccgtcgacctgctcacctgcgtcgcctggctcggcaccgcgctgctgctgctcaccgtctactacctcaagcggccccgccccgtgtacctcgtcgagttcgcgtgctacaagccggaggagcggctcaagatctccaagtcggccttcctcgagatgaccgagagcaccggctccttcaatgaggcggctctggacttccagaccaagatcaccagccgctccgcgctcggggacgagacgtacctgcccccgggcgtccaggcgcgcccgcccaggctcaacatggcggaggcgcggatggaggccgaggcggtcatgttcgggtgcctggacgcgctgttcgagtccacggggatcgacccgcgccgcgacgtgcgcatcctcatcgtcaactgcagcctcttcaacccgacgccgtcgctggcgtccatgatcatcaaccactacaggatgagggaggacgtcaagtcgttcaacctcggcggcatggggtgcagcgccggcctcatcgccgtcgacctcgccaaggacatgctccaggcgaaccccggctcgtacgccgtggtgctcagcaccgagaacatcaccctcaactggtacttcggcaacgaccgctccatgctcctctccaactgcatcttccgcatgggcggggccgccgcgctgctgtccaacaggcgcgcggacgccgggcgcgccaagtaccggctgctccacacggtgcgcacccacaagggcgccaccgacgagtgcttcaactgcgtgtaccagcgcgaggacgaggccggcaaggcgggcgtctcgctggcgcgggagctcatggcggtggccggcgacgcgctcaagaccaacatcacgacgctggggcccctggtgctgcccctgagcgagcagctcaagttcctcaggtcgctgatgatgcgccgcgtgttccgcgtcgggggcgtgcgcccctacatcccggacttccggcgcgcgttcgagcacttctgcgtgcacgc

SEQ ID NO: 24253 - DNA, 1180 bp, Zea mays
  Clone ID: LIB3608-011-C10_FLI
cgagtagttccctctcctctctctgattcttctgcttctcggtctagctagctagctcggtgcctcggccaaccgggcgtcgcgcgctggccggcctgccaggcaagcaacaatggcagattcaggggaggggcgtcgggtgtgcggcatgccggagaaggcgcagctgcacgtggcgatgctgctgctgcagttcggctacgcgggcttccacgtggtgtcgcggctggcgctcaacatgggcatcagcaagctcgtcttccccgtctaccgcaacatcatcgcgctctgcctgctcgtgcccttcgcctactttctggagaagaaggacaggccgcagctgaccctcaacttcgtcgtccagttcttccttctcgccctctgcggcatcacggcgaaccaagggttctacctgctgggcctggacaacacgtcgccgacgttcgcgtccgccatccagaactcggtcccggccatcaccttcgccatggccgcggcgctgcggatcgagaaggtccggctggaccgccgcgacggcgtggccaaggtggcgggcacgctggcgtgcgtggcgggtgcgtccgtcatcacgctctacaagggccccaccatcttcggtcccagcggcagcggcggcggcggcggcggcctcgagctggcggcggtgggcggcgacaagaactggacgctggggtgcgtgtacctgatcgggcactgcctgtcgtggtcgggctggctggtgctgcaggcccccgtgctgaagaagtacccggcgcggctgtccgtcacctcctacacctgcttcttcggtgtcatccagttcctcgtcatcgccgccttcatggagagggacgcggaggcctggaagttccactccggatccgagctcttcaccatcctatacgccgggttcatcgcgtccggggtggcgttcgcggtgcagatctggtgcatcgaccgtgggggcccggtgttcgtggcggtgtaccagccggtgcagacgctggtggtggccatcatggcgtcgctcaccctgggcgagaagttctacctggggggcatcatcggcgccgtgctcatcgtcgccggcctctacctcgtgctctggggcaagagcgaggagagggcgcgcgtcgccagggacgccgtctccggcggcgaccgcgaggggctccttgtc

SEQ ID NO: 24254 - DNA, 1075 bp, Zea mays
  Clone ID: LIB3608-011-C12_FLI
cccgcttggtgtgccactacagttttttttaaaagccattacgctttcctagaccgcacggctcagtcaccaacccactcatcactcctcactcactcactcaaaagttcaaaacgaaagccagctcagctcagctcagctcagctcatctgctcacacctcacacccacaggccggccgccacagcaccgcggatagcagagcagagcggtgagctgcagagcagggcagccgaggtcggtcgtcgtcgtcgtcgtcagccatgagcaaggacaagcaccacaagcacgagcaccacctgcggcgttgctgcgggtgcatggcgtcgtgcctcctggcgctggtcctcatcgtggccttcgtctcgctggtggtgtacctggcgctgcgcccctcgaagccgtccttctacctgcaggacctgcagctgcgcaggcccatctcgctgggcgacccgtcgctgacggcgtcggcgcaggtgacgctggcctcccgcaaccccaacgaccgcgtgggcatcttctacaagcgcctggacgtgttcgtcacctaccgcgacgaggccgtgacggtgcccgtgtctctgccgccgcagtaccagggccaccgcgacttcaccgtctggtcccccgtgctgtcggccgagtccgtgcccgttgccgcctacgtcgccgacgccatgaagcaggacgtcgccgcgggcttcgtcgcgctgcaggtcaaggtggacggccgcgtcaagtggaaggtcggcagctgggtctccggcagctaccacctcttcgtcagctgccccgccgtgctctccgcgggctaccccggcgtcaacaacaccgtgtcgtcgctcaagttcgcccagcccacaggatgcagcgtcgaggtgtgatgagtttgtgaccaaacaagtgccctgccctgccccctacgtattgctgcgtgctactcaaatttcatcttttgggtgcgagtgcgacggccgccgttaactgggctcttttaatttggttcatgtctcgttgtcaattctcattctcttgtgggccgggccgggggaataaattatttaatttgcttt

SEQ ID NO: 24255 - DNA, 848 bp, Zea mays
  Clone ID: LIB3608-011-C7_FLI
gccttcgcggcgcacccggcaatcggaaccacctccccatctgtctccaagtggagcaaggaggagcaatcagcagcgctctccacagccacggactcgacggcccaggagctagcagagtggaatgccagatacagggagaagtttggcttcgtcttcatgatttgcgcttctgggaggactgcagctgaggtcttggctgagcttaagaggcgttacacgaacaggccaattgtcgaacttgaggctgcggcacaggaagaactcaagataactgaactacgtctcacgaagcttttctcattggagcctactgttccctccactacaattgaaggccccactgtccaatcagataaagcagcaggtagctcgaaccgaagtcgtccgcctattacaacgcatgtgctggacattgcccgtggatcgcctgcatctggaatcgaagttcacctggagatgtggaaggattgttcagctcctccatcattcaacaacaaagatttcagcggatgggaaactctaggctattccgttacaaacaatgatggacgcagtggccagctgatggacattgtcgataatattgctcctggtttctaccgcataagcttcaacactggcaagtatacccctgcagggttcttcccttatgtcagcatcatattcgagatcaaggagaaccaggcggcagagcattttcatgttcctctcttgcattcccctttctcgttcaccacttaccgtggaagctaagttttcaacttacgtgccattacctctgttgggatgttcgaagcaacttgtaaacttgacacttccgttgtgataataatctggttccatgt

SEQ ID NO: 24256 - DNA, 1678 bp, Zea mays; identical to SEQ ID NO: 4238
  Clone ID: LIB3608-011-E10_FLI

SEQ ID NO: 24257 - DNA, 1755 bp, Zea mays
  Clone ID: LIB3608-011-H4_FLI
ttggtaaatttcccaaatccggtgcccccacaccggcatcctcacctcgtcagcgccgccggccttccttccattctccatccccgctcagtcggataggcgccggttggggaaaattctgttcggactgttcatcttgtcggcatgtctcattatcacagcgccgattttgaagagatggaggatgagtacgacatgaacgagccagtcgatgacatggagggggaggatgagtaccaagagctcgtgattagggactctgatgcggaggatgaagacgatgcggaccaattgcataagctctccgacacttcagcagcagatgcaagaagtgggaaagatattcaaggaataccctgggagacgatagaagtcacaagagaaacgtacaggcaggcccgactagagcagtacaagaactacgagaacatacctaattctggagtagcagcaatgatggcatgcaaatcaaccgagaaaggaagaacatattatgaattcagacgaaatactagatctgtgaaatccactatctctcactttcagctgagaaatttagtatgggcaacatcgaagcatgatgtctacctgttattgcattactctgtacttcactggtcggccttaaatggtgtggatacagaaattatggatgtacatggacatgttgcaccgagtgagaagcacccaggaagcttattagaaggttttttgcatactcaaattagtaccatggcagtgaaggataatttgttagtagctggtggttttcaaggagagctaatatgcaaacacctagatcgagaaggaataagcttttgctgcaggacaacatatgatgataatgcaattaccaatgcattggagatattcaatacatctagtggagctcttcacttcattgcatctaacaatgactgtggggtaagggagtatgatatggaaagatatcagttgtttaagcatttccgattcgattggccagtgaatcacacgtcattgagccctgatggaaagcttgttattattgttggtgatgacacagatgctttacttattgattctaattcaggaaagactattcattccatgaaaggtcacttggatttctcctttgcttcggcttggagcccagatggcctgacattcgccactggtaaccaagacaaaacttgtcggatttgggatgccaggaatctcaccgagtctgtccatgtcttgagaggcaacgttggagcaataagatctattcgttttacatcagacgggcacttcttgtcgatggcagaagcagcagactttgtccacatctttgacatcaaaagtgactacaataagagacaggaattggatttctttggcgaggtatccggtatgtccttcagccccgacacggacacactttatgttggaatctcggacaggacatatggcagcctacttcagtttggccgcctgtacaattattcatacctcgactcactactatgaaggtcaaagaaaatatgtgttttccctcggcttataatcaacccagattaggcatcccaaatgaaatttaatttagcctggtattcctcgtaaagaatcctgtaccctggtgtatgtgtacataaaaaactgtattttatagacaccagtagtctgctaccctgctttcagataggtatataaggtgtcaggattcaaatcgcaagttagatctcaattcgttatagcacaagatgaatccataaagtcagaactttgcatgtt

SEQ ID NO: 24258 - DNA, 1199 bp, Zea mays
  Clone ID: LIB3608-012-A7_FLI
agatcgcacgcaagagggagcaccggagcagcgagccagcgacagcagcagagagatcgccggggccgctcgcctgtctggagagaggaaggaaacaagagatggacgagatcatgaacaaggtgggcgcttactggctggggcagagggccaacaaggagatctcctcggcaggcgacgacctcgatgtccgtgagacaaaaccatcccatcccggcctgctctttcagttcttgcacctcacgattcgttcggtttcttttcgttctagcatcgtccagctctcacacgcagcctatttgtccctgcgccctctgatgaatataccagctcaaagttagaacaggcatgggtggatcggtttgtgattttaatagttagagcagccatgaataaacaactccggtctctgtcatctgtttatcatggcaggtttaattaaagctgagatacttatgagagattttcagaggggaaaagagtcgtctcttctttgctgatcgcgccgctgatgtttcctaactctaactgcatgcagtcgctctcgaccagcgtcggggatggagcgaaatggctggtgaacaagctgaagggcaagatgcagaagccgctggcggacctgctcaaggagcacaacctccccgtgggcctgttcccgcgcgaggcgaccaactacgagttcgtgccagagacgcggcgcctgacggtgtacatcccgtccccctgcgaggtcggctaccgcgacggctccgagctgcggttcgacgccacggtgtcgggcacgctgggcgagggccgcctcacggaggtggaagggatcaagaccaaggtgctcgtctgggccagggtcaccgccgtcaaggccgacgccgccaaggtccacttcaccgccgggatcaagaggtcgcgcagccgggacgcctacgaggtcgtcaggggcggcatcaccgtcgacgagttctagcttagttttgctttcgcggctcacatggatggacgggcttcctcttgctcgctgcacgctgagatggacagattgttgctttcagttgcaggaataaattctacacccattagctatgtgggagatctgcgtgcactgtgcatcgtgtgttttgtgctttgttgtgagaatgtaacacctgaaggattcagaacgtgtgctcattgcttatgatatatgtctcgtgtcaggtttt

SEQ ID NO: 24259 - DNA, 1057 bp, Zea mays
  Clone ID: LIB3608-012-C12_FLI
cagacccagcagctattgtggtcgtccctcagccgcgtcgcaccgcatcgcattctacgattcgaagctctctctgctcgcagccatggcgaagaattacccaaccgtgagcgccgagtacagcgaggccgtcgagaaggccaggcgcaagctccgcgccctcatcgccgagaagagctgcgcgcccctcatgctccgcctcgcgtggcactccgcggggacgttcgacgtgtcgtcgaggaccggcggtcccttcggtactatgaagtgcccggcggaactggctcacggcgccaacgcggggctggacatcgcggtgcggctgctcgagcccatcaaggaggagttccccaccctctcctatgccgatttctaccagcttgccggagttgtggccgtcgaggtcaccggtgggcctgagatccccttccaccccggcagggaggacaagcctcagccgccacctgagggccgtcttcctgatgccaccaagggttctgaccacctgaggcaagtctttggcaagcagatgggtttgagtgatcaggacattgttgccctctctggtggccacaccttgggaaggtgccacaaagagcggtctggttttgagggggcctggactacgaaccctttggtctttgacaactcttacttcaaggaacttctgagtggcgacaaggagggccttcttcagctcccaagtgacaaagccctgctgagcgaccctgtcttccgccctcttgtggagaaatatgctgcagatgagaaggcattctttgatgactacaaagaggcccacctcaagctctccgaactggggtatgctgatgcttaaatggtccatatcctggagcgggacacaaactgctgcctgtatggactcgtgcgattcagggtgaaccatcagattgtctagtgtcttctttgtaataaatttatctgttcttggtactttgtctatggttgaatcggaacccattttccgtttgcctagattcttaatttctggtgctgtatccagctgaaactagtagatctatgatcttgtggctgc

SEQ ID NO: 24260 - DNA, 1530 bp, Zea mays
  Clone ID: LIB3608-012-C9_FLI
aaacacatgcaggatctgcgcatcgccatggatagcgagtctgagaagagtgtgaggagggtgagtgggaagggggcacgagggaagcagcatgggaatgagtttgttgacctgcacaccatgcttatccattgcgcacaggcaatggccaccggtgatcgccgaagtgcaaccgagatgctgaaacagatcaagcagcactcctctctcagaggggatgccacacagaggttggcctattgttttgcagaaggactggaggtgcgacttgctggcacagggagccaggtgtaccagtccctcatggcaaaacgcacatccgttgtggagttcctcaaggcatacaagctatttttggcggccatcagcctcaataaggtgcatatcatcttctccaatgggaacatcgtggatgccgtggcagggaggagcaagttgcacattgtagcatatggtgtacagtatggtttacagtggccaggcttgctacatttcctggcaggtagagaaggtgggcctccagaggtgagattcaccggcattgaccttccacagccagggttccgcccagcctaccagattgaagaaacaggccgccggcttagcaactgtgcccgtgaattcggtgtgccattcaagttccatgctatagcagcaaagtgggagatggtctctgccgaggacctgaacattgatccagatgaggtgcttgttgtgaacagcgattgccacttgagcaacttgatggatgagggtgttgacgctgacaccccaagcccccgagatttggtgctcaacaacattcggaagatgcgacccaatattttcatccagattgtcaatagtggcacatatggtgctccattcttcctcacacggttccgggaggcactgttctactactcagcactatttgacatgctggatgcaaccattccccgggataatgatgaacggctgctgatcgagcgggatattgttgggcgatctgccctgaatgttattgcttgtgagggtgcagacaggttggatcgccctgagacttataagcaatggcaggtgcggaaccaccgggctgggctcaagcagctaccgttgaatccagaggttgtaaagcttgccagggataaggtcaagaaatattaccacaaagactttctcatcgatgaggatcgccaatggttgttgcagggatggaaagggcgggtcctctttgccatgtcaacttgggttgctgaggataataactccaccttttagctgcttcactttgtcttgttttggattatgagtgatattgatgtttgatggatggtctgtgtctttattttaccaccaaactacgacccagcatctgtggcccgctggacttctgtttctagagggttttagtgctgaaactttgtaagctagtagaaaaataagtagatgcttagaggtacataggatgctgatatatttctggatatgttgcagaattgtgatgtgtacatcatctgtaactgataaaagcaattttattgattactt

SEQ ID NO: 24261 - DNA, 1380 bp, Zea mays
  Clone ID: LIB3608-012-F4_FLI
tcgctgtcctcgagcttttacttgtacactggctagagctagcaaggttgaagcaacgatatgatggcgacctctaagctcgctgtcctcgctctgtttgccctgctcggctccgtgtcatgccaggccggaggctactacgactactactaccctaccccgcagcgacctccaacaccaagccctgcagggacgcacctcaaggtcggatactacaggaacaagtgtgccgccgcttacgtggatgtggaggccattgtcaagaagcacgtcaaggccactgatgctggcatgcaagctggccttgtccgtctcttcttccacgattgcttcgtccgtggatgcgacggctccatcctcctcgacacgttcagcaacgacacaagcctgaccccggagaagttcggcgtgcccaacttccccagcctgcggggcttcgaggtgatcgacgcggccaaagccgagatcgaggcggcgtgcccgggcaaggtctcgtgcgcggacatcgtcgccttcgccgcccgcgacgcgtcctacttcctcagcgccggcggcatcagcttcgccatgcccgcgggccgctacgacgggaccgtctccctcgccagcgagaccctccccaacctgcccccgccgttcgccggcttcgaccagctcgtcaagatgttcgccgacaagggcctcgacgcctccgacatgatcacgctctccggcgcgcacagcatcggccgctcccactgctcctccttcaccagggaccgcctgccgcccagcaacaccaccgacattgacccggcgttcgccgccacgctgcaggccaaatgcaggtcggcgaatgctggcaccgacaacacggtgatgcaggacttcaagtcccccgacgtcctggataaccagtactacaagaacgtgctggcccacaaggttctcttcacgtccgacgccgcgctcaccaccaacttcacgtccaacaacctggtgcgtgcctacgccgacttcgtgccctatctgtggcagcagaagttcgaaaaagctatggtgaagatgggtggcatccagctcaagaccgcagacaatggggagatcaggaagacgtgccgcaaagtcaacaacaggacgtgatcgatgatcatcagatcagatggcggcgatcagatatcttgtccacctagaccaaattaaactctgccgcttggcttagacgaaatgggaacaaataaccattctttgccttttcggatttccaatttcctaacttttgcctttacctacattattctcctgatatctcctctaatatgccgctgcattctccaactgtatgcctgtttttatgctgtataattttaattggattgaatatcatatcttttgtagtgc

SEQ ID NO: 24262 - DNA, 879 bp, Zea mays
  Clone ID: LIB3608-013-C12_FLI
gattaagcctgcatgctgcaagaacccggccggcgaatgcagcaatagccacccagctggtggcggtccgtcgttgagcagcacgcacgcacgcacagtactgatcccttctccgaatcatcaaccaataatgggcggaggaagggagctcgccgccggccgttatttccccctgcaacggcggcggtcgtctagtcgtcgccgtcctcttctcgtcatcctactgctcgccgtcgtcgccagcggtcaagcatccgccgcctctggcagcatcttcggcggcgactcggcgtcatcggagtgcagccgagcgtgcgagtcccagcgctgcacggcgccgctgatgcgctacggcaagtactgcggcgtgtcctacacggggtgccccggcgaggccccctgcgacgccctcgacgcctgctgcatgctccacgacgcctgcgtccaggccacggacaacgactacctcaacatgtggtgcaaccagagcctgctggactgcgtggccgcagccaggcctacggcgatggcggacacgttcgaggggaaccggtgcaacgtcacggacgtcgccgacgagatcaccgccatcgtggaggccgccgtgtacgccaggggcatcctgcacaagccctagcagtagcctggaccagtaagctcgatggtggatggagcgaccggcggctggcctatacaagtttggtggggtggtggattctgtgttggatcttggatggtggttcatggcttgtcgcaggcgaagtccacgtctttgacgtacatatatatatattagttcctgagtttacacggcctggaaaagtgtacagacctcaataaagtactgtcaatatatgtccttgggagggtagttcagac

SEQ ID NO: 24263 - DNA, 561 bp, Zea mays
  Clone ID: LIB3608-013-D1_FLI
ggcagttccgtctcccttcttcgccttctcagtcaagctaaaacctcgctcgcctcgtccagtcagacatggcatgaaaccctagggcgcccgcctcccctccgcaatttgccattgcgctccgcgatgcaggcatccgcgcgcctctcctactccgtggcctccaggaaagtgatcgcgggtgtctctatcgcgtccccacggtcgtgctatcggacctcccgggggaaggcgcatgcggcgccgctgcctgcgcaggagccgccaccgaaggggcagaagaggattacaaagcaggagcggagggttcgaatagtggaatttgttgagaagtaggttacttttttttcactgtattttctggttgtagagtttatctttttgggtcataggtagcaattgtgtagctttcggcttattagcacttctgtttggctctcgagcttagtaatagacacttagtgtgcgtttggttgggctgtgaactatgaaaacatagctgtgagttgtctgctgtgaaaaaactgttgtgagcaaataaagctgaaactcgtttggttc

SEQ ID NO: 24264 - DNA, 1859 bp, Zea mays
  Clone ID: LIB3608-013-D6_FLI
tacaacttcccacaggagaccagtggcgcggcgtctcccatcccccgcccccaaatttgttgcggcgggagagccggagaggaggcagctccacagaaacagagagcgcataaccggcggcgttggcggcgatgaggatcgaggaggtgcagtcgacctcgaagaagcagcgcatcgccacccacacccacatcaagggactcggcctcgacgccaatgggatggcgattgcgttggcggcggggttcgtgggccaggcggcggcgcgcgaggcggccgggctggcggtcgacatgattcgccagaagaagatggccggccgcgcggtgctccttgcgggtccgcccgccacgggcaagacggcgctagcgctcggcatagcccaggagctcggcagcaaggtccctttctgtcctatggtaggatcagaagtgtactcctcggaggtcaagaaaactgaggtgctgatggaaaatttccgtagagctataggtttgcgtataaaggaaaacaaagaggtttatgaaggagaggttactgaactttccccagaagaggctgagagtacaactggtggatatgcaaaaagcattagccatgtaatcatcagcttaaagactgttaaagggactaagcaactgaagttagattcttcaatttatgatgctctgatcaaggaaaaggtggcagtgggtgatgttatatacatcgaagcaaatagtggagcagtgaaaagagttggtagatgtgattcttttgctacagaatacgatcttgaagctgaagagtatgttcctatccccaaaggtgaagtccataagaaaaaagaaattgtgcaggatgtcacacttcatgaccttgatgcagcaaatgctcagccacaaggtggccaagatattttgtcccttatgggccagatgatgaaaccacgaaagactgaaatcaccgaaaaactacgccaagaaattaataaggtggtaaatagatatatcgatgaaggaattgcagagcttgtacctggtgttttgttcattgatgaggtccacatgttggatatcgaatgtttttcttatcttaaccgtgcattggagagcccattatcaccaatcgtgatacttgctacaaataggggaatatgtaatgtaagaggaactgatatgacaagtccacatggtataccggtggatcttctagataggctggtgattattcggacagagacatatggccctactgagatgatacagatattggctatccgagcacaagtggaggagattgatatggatgaagaaagtcttgcttatttaggcgagatcggacagcagacatctttgagacatgctattcaattgatatcacctgccagcgtggtctcaaagactaatggaagagagaaaatctgcaaggctgatctcgaggaagttagtgggctctatttggatgccaaatcctcggctcggctgctccaggagcaacaagaaagatacatcacctagatttggatcacctgtcgtggaagtctcgaagagaatgtagttgccagctcgaaagtcatctagtgaattgatctgcttcacaggtcttggagcgagcacatttcgggggggacggcttgaattttgcagtgcctgcttgtgttagtctccagagaagacttggtaccggcatattgcctgttcacgcactgttcgctgattagattggtcaccggtgcaggaattgccgtgtgtgttttttatcttgctcatcggtgtccggaatctgtgcctccacgggttgtattggcccgaaccctatctttgtaaccatggataatggatagcattcttacagaatgcaacttgcatggctttatt

SEQ ID NO: 24265 - DNA, 1335 bp, Zea mays
  Clone ID: LIB3608-013-E11_FLI
caaaagggagggacagcccacgcggatcggtgtgcgtggctccgcgctcccttccgccgccagtccgccggctcaactccagccgccgcgtgcccctcctctccccacccgatgcgggccctcgcgcgcgccgcgtcgctgctccgccgcgccgcggggtccgcgcctactacggcgtcgctgtaccatccgccgcggaacgtaggcccttgcctcgtgaagaatctgccaggtttctttttcaatgggtattctactcttttggctccaccaaatgaagtgttgattccaccagaactcctttctagcaggactgtgtggacaccagatcgggagcttgggcagtatgaagacctggtagctagggtcacaaacttccataatgaggacaagggcttcatggttttggatggcgatgtttttgatgttccaattaggaaggacattgttcaccgagtagtaaggtggcagcttgctaaaagacagcaggggacacactcaactaaaactatcagtgaagttagtggcactggaagaaagccttacccgcaaaaaggaacaggaaaagcacgacatggaacactgcgcggtgcccagtttcgtggtggtgcaaccatgcatgggcctaaacctcgaagccatgcaatcaagctgcagaagaaagtacggcggctggggcttaagattgccttgtctgctcgaactgctgaggggaagctcttgatctttgaggacttggaagttcctagccacaagacgaaaaacattgtgcaatacattagacagatggatgactcaaagaaggttctgttggtggatggaggcgacattgataagaagctaaagttggccactcaaaaccttcactacgttaacgtacttccttccattggcctcaacgtctacagtatcctccagcatgacacccttgtaatgactcgggccgctatcaacagaatcgtcgagcggatgcatacccccatcaaccgctagcaaggggggtttctgagtcgcaccactgtttcttacagccagcaacctgtgctttttcgttccctgttcaagctcgaaggtttcctgttatcttggtgctaacatggagctgcaacgtgagctgtttattttctgtcagactggaggtaccgaccgaggtaggagggaaatgttgtggccttttgtaagcaggtcattggatgtttattttagattattttttggcgttttacccacactacccttgaaacttagtgagttcttatccagcaaataagattatgtaatcctggattatataggtccaaagcttgggacagcaatttgtttagagtcctgtat

SEQ ID NO: 24266 - DNA, 877 bp, Zea mays
  Clone ID: LIB3608-013-H2_FLI
ggcagcctccatactcttcatcacagcagcaataccagcagcagcagcatgaagttgcccattcattctatggccaaggcaacacagtattgcttcctgtagcagatcataacgctcagcatcagcaaccgcaaccagtgcagctacacagccagggcccctcctgtccacctcagccaggcaagcccagtcactgcagcgccgcaccctatgctgttcaaggaaacggccagacctacagctccgcatacaagaacccttctaactgccctgcaactgcagccgttgtagctcttctgcctcagcctcctgccatcgcctgtatggcgtaccatcccttgggaccacaggtcgtgcacaaccatccatttggaaatactatggttgaaacgtccaggtccagcgtggtagggtacccacgggatcagtttgagatgctcccggcgattactgccgcccaacctgtactaccggttgataagctcaatgctggcagcaatgtaacatcgtcccctagggaatggtcagcatagcggtggacggtgcgcggtcttgcatttcactgcttccacacagcattctactatacgtattgcagctgggagctcgtcgggtctattttatctggctcttttttcccccatcagccagcagattagaacggatccttctacctttttcagctgaaggtcggtatggaataagataagtaggttggctgagtgatcactggtcgctgttggcatatgccctcacttttaatgggcatatgtgcttgtaaccaggtgcgagcttatattatatgcctttcttatatgagtacatgacgggtttacatcagcttgtcagatgtttttttgtaactgtgaattgcatt

SEQ ID NO: 24267 - DNA, 331 bp, Zea mays
  Clone ID: LIB3608-014-A6_FLI
ctattctcgccgacaagtacatgaacaaggagctggagcttgacaagttcataacccatgaagttggcctcaaggacatcaaccaagcttttgacctcctgctgcaagggaagagtctcaggtgcaccatatggatggacaagtgatgcaataacaagagttacgcatcggaacctgaagatgctatgatgcttccacctcgtttcagtgaaaataattgttttatcagctgccaaaagaaatgttatatgtaccttaaattcgagttttccattccttttcttcacgtcatcactcaaacatgttaaaatgtgcccatgttttgattttt

SEQ ID NO: 24268 - DNA, 1734 bp, Zea mays
  Clone ID: LIB3608-014-B10_FLI
gattgcagtcattcctcccccaagtccatagagtgatagagaatggaggataatctaccagttaatgtccgggaatatcaagaacttgctaagaaagcactaccaaagatgcactatgattatatcaacggaggagcagaagatgaatatacactgagggagaatattgcagcatatagaagaattctgttacggccacgagtccttatagatgtgagcaagatagacatgtcaacaagcttattaggatataatatgccatcgccaataattgtcgcacctacaggggcacacaaattagccaatcccgaaggggaggtggccacagcaagagctgccgcagcatgtaacaccataatggtaactttctgatttttatgtgtgtgttgagggggtgtcttctggtgagtggtgatgtactcaactttaggccctctgtagattgttacacgtgttcatatatgtcatgcagatgctttccttctcatcaagctgcaggatcgaggaggttgcctccagttgcgacgctattcgcttttatcagttatatgtatgatgccttgccattgattttttttagtaaattccactttctggtgttacctgatttctggaagttttcatcgtgtaccttaggtgtacaagagaagggatgtttcggcaacattggtacggcgggctgaaagtttaggattcagggcaattgttttgacagttgacacgcctgtgcttggcaggcgtgaagctgatatcagaaataagtacagcgcttgtatcgttaatgaaatctcctaaaattgagggaaattatgttcatttacaaaattcataattccagtttcctaacccgttgctactgaaggttaaaattttaagctactatcttataccatattgtagatcgttgatacatttatgcggagcattgcagtagcttcaacatcagaatgttgcaaaaaaacaatcccattttcttttatcttgagatgttctgtaactgagctgattgttcatgcaggatgattgctccacctctgtcaaaccttgaaggtttaatgtcattagacgactttgacgatgctgaaggcggctccaagctggaacgattctcacgggagacgctggatccatcattgtcatggaaggacgtggagtggctcaagtccatcaccagcctgccgattctgctcaagggcatcgtcaccgcggaagacgcgaggaaggccgtggaggcgggggcggccggcttgatcgtgtccaaccacggcgcccggcagctggactatgcgccggccaccatctcggcgctcgaagaggtggtcaaggcggtggcgggggctgtgccggtgctggtggacggcggcgtccggcgcggcaccgacgtgttgaaggcgctggcgctcggcgccaaggcagtcatggtgggcaggccggtgttcttcgggctggcggcgcgcggggaagccggcgcgaggcacgtgatcgagatgctgaacaaggagctggagttggccatggcgctctgcggctgccgtagcgtcgcggaggtcaccagggcgcacgtccagaccgagggcgaccggatcagggccctgctgtgacttgtaaataaacggtcatatccgagtccgaccatcgtgctgtcagggttgcgatatgatttatttatatgaacgtgagggcatgtaatgtgacatcgattgttgcctccacacagataagcttactattgcc

SEQ ID NO: 24269 - DNA, 458 bp, Zea mays
  Clone ID: LIB3608-015-F11_FLI
gcggccgtggaggacgccggcggaggctgcagtggcgatggcaacaactaccagtcgctcgtggacttcctgccggggtcggtgcactcctcctcgccggacctggccaacctccttaaactctacactgaatctggccattgcggtgggtgaggagggggaagaggccgtcgctgtcgctgtcaccgtcactgtcacagctgccactgaagaatccatcgggcgtgttgatgctacatccgccgccactgtttctgaatctttacaagaaagctccaatactttccacgccgaaacgacagcaacggaagccgcttaatttgccggtcatcacctcgggtctctcgcccatggtggaaacatgcacgaaaacactgtagtagtagtagaatgctttctcttgtacatcgtcacatcgatttgtttttgttaatattgcaaaatcggtttgtagaatc

SEQ ID NO: 24270 - DNA, 922 bp, Zea mays
  Clone ID: LIB3608-015-F12_FLI
ccgaaccgacccctgaaaagaattcggtgtgtcggaaggaagagcaaccctgcggctgcggtggtggagcgaggacccgggttgagggatgaggtgggagtgggagggcgacggtggtgaggcgccgcgggaggagactcctgtcgacttcgatttcatcgccctcctcgccaagcccaaggattactacaagatactggaagtagattactatgcgtctgaggagacgatcaggtccagctatatccgccttgcactgaaatggcaccctgacaagaagcaggggcagggcgaagagaattcaacctccaaatttcaggaaattaacgaggcataccaagttctgagtaatccagcaaaaaggcaagagtatgacaaaaaaggcattctatatgttcaagatcagaatgtagtggattacctgaaccggcacaaggggctaatacttacgtgcaatggtcttggtataaggtactcagtatggtgaacacgctcaagggcccacagtttgcactcatctgcagtcttggagaatctgtaatgtggggccagtggcacacaagggatgaaaataatttccgatggcatacagggaagcccttgatctgaaaatggtatagtgcagcggtgccatgtttgaaagccaaagattgacaacttgagttcatcctacaaggctacaacagagttgatttttatttgtcgatcagctgttgttgaatgaaagaggcagatatgttcctgctgctccttgtatgtaacatactgttcctaaccatgcaatgtaagcgtttgtttctgtcttggcgctttgtattgacgttatgtggacctgaatgtctgtggaaaaacagaggtgccgtttggttcacgaaatgtaacgaaatgtaacgtaaatggtaatggtaacgattcacactcg

SEQ ID NO: 24271 - DNA, 548 bp, Zea mays
  Clone ID: LIB3608-015-H8_FLI
tttagaggttctccaatgccggtttctagcccatggtctcgtggagcattagctgaaaacaatgacaacattgcttcacgaaagcgccgtggaggccctgatggactttctgagggtgactggacctgtcccaaatgcgacaacgttaacttttccttcagaagcacttgcaacatgaagagatgtggagccccgaggccaactccgggaggtaacacgagctcatctcgcaaggacaacagcaataaggaagcccctgaaggaagctggacctgcccagagtgcaacaacctgaactacccattccgcacggtgtgtaacaggaaaggatgctcgtacagcaagccagccccggcgaacaactgaacccaaccttcgcgcatcgtcgagctattgttgtacccgtagattgtatcctagtcgtgtgcaatctttgaactgcacaaagatgtttttgtgcctggagacgagagattcgattcgttacgcttaatttactattatacatttttattaaatgatgaaaactagggaagagcattatatct

SEQ ID NO: 24272 - DNA, 953 bp, Zea mays
  Clone ID: LIB3608-016-B8_FLI
ccggtccagctcgaaaccctagacctgtgcggctgtccctattctccccaacggaaagatgtactcggaccagatctccaccgggcgcaagcgctccatccacgaccgccttgacggcgacctccccgccggcacgggcgccggcggccgtgttcgtcacacggtgtccaagaggcaacggcagatagatgaaaaatggaagcatgatctgtatcgggaagacgatgaaccagcttcaaaatcaatagatccaaaggatttgcgattgaagcttcagaggcgaagttctcaacaaagctttaccagcacaaggagatctggtgtgcgtgatttacgtgagaagctatctggtataatgcacccacagccatcaaatgctgatccaaagcccaagccaaagccagtatcagaggttgttaacatctcaaggcgtcaaactgctgatgaaatgcctgcacgtcaaagcaagagagcaccaaaacagacttcattgaagaagacttcacagccaaaggctgaaagtccactcggcagtttcctgagttcccttgggcttgagaagtattcgattaccttccaggcagaggaggttgacatggcagccctaaggcatatgacggagagtgatctgaaagctttgggcattccaatgggtcctcggaagaagattatccttgccttggagccaagagcataagggaatggcaagtgtaggaaggtgggagggatttgctaggcatgctcatgtgcaagttcgataaaactctgtaaccacatcttggaaagggacaaagggtaacaacgacaatggtttgtgggcttcttgtaacacatatcctgccctgttgagcatgttcaacgaagtttaggatgttagaaggcaggccacggcgtgtattgatgcaacttctatttctgtgttgattaaatggtgcggtatacatgttggggct

SEQ ID NO: 24273 - DNA, 1319 bp, Zea mays
  Clone ID: LIB3608-016-B9_FLI
gtttccagggtcgcccgcgtgcttgacgcgtaactgtcgtctaactgtgatggaaagtacagtactgtacgtaacaacaactgctctggatggaaacacaagcaggagctgctggaggagctgggcgtgtacatggtggcgttcgaccgggccgggtacggcgagagcgacccggacccgcggcggtcgccggagagcgcggcgctggacatccaggacctggccgacgcgctgggtctgggtgacaagttccacctcgtctgctcctccctcggttcccacgccggctgggccgccgtcaggtacatcccgcacaggctggcggggctggcaatgatggcgccggtcatcaactaccgctggcgcgggctgccgcgggggctggcccggcagctctacgggaggcagccggtcggcgaccagtggtcgctccgggtcgcctactacgcgccgtggctgctgcactggtggatgagccagccgtggctgcccacctccaccgtcgtcgacggctccgcgcccttccccaacgcgctggacgagaagaaccgcgtcatggcgctctccaacggcatgttccactcggttcgtctcgcctcgctcggttgccctgccttagttagcttctctctgtctcccaccacaatgaaacggacttcgatctttctttcttgcagagggcgaggctggcgacgcagcagggcgtacaggagtccttctaccgcgacatgacggtcatgttcgggaggtggacggacttcgagccgacggacctcgagaagccgccgtttccggtgcacctgttccagggtgacgaggacggcgtcgtgcccgtgcagctgcagcggcacatatgcaataagctcggctgggtcagctaccacgagctccccggagctgggcacttcttgtcagcggtgccaggactcggcgacaggatcctcagcacgctcctgtcctcgccggcgtcggcgtgactgatccacgactcgcacctagcaagtactagactactagtacatgactgatgttgctgtagctatgtctccaaagcattgctggtcgctgaagaaaagcactttatatgagcttagactatctctagcagatttattatcacatctcatatctcactctctatttcaaactccattgtacaaacagtacaatctacagttcaaaacaatatttttcccaacgttctggatatggccttagcccctactggtgttgtaccaagaaaccgacgagaaggcacttttatactccctccaatccaaaatagtagtcgttttagctctaaatcatactcaataaag

SEQ ID NO: 24274 - DNA, 1462 bp, Zea mays
  Clone ID: LIB3608-017-A6_FLI
cctcggccctcgccgttgccgtccatcccaatcaatcaatggcgcctgcccgtctcctgccacggctgccgctcttctgggccgccctgctcttgttgccgtttgcgcacccggcagcggcggcgcaggtgggcgacgcgtgctcctcctcctccggcggcggctgcggctccggcctgcactgcagcccctgcggcgccggcgggggcagcatctgcacgcgcgccagccccgtggacccggccacccacggcacgggcctccccttcaacaactactcgtggctcaccacccacaactcctacgccctcgccggcgccgcctccgccaccggctccgcgctcatcaccgagaccaaccaggaggacgccgtcaccgcgcagctcaagaacggtgttaggggcctgatgctcgacacgtacgacttcgacaacgatgtctggttgtgccactcgttccaaggaaaatgctacaacttcactgccttccaacctgccatcaatgtgttcaaagagatccagacattcctcgacgcgaacccgtcgcaagtggtcacgatcttcctagaagactacaccgcggtagggtccttgccgagagtgttcaacgcctccggcctcacgaagtactggttcccggtggcaaagatgccgaagagcggcggcgactggcctctgctcaaggacatgatcagccagaaccagcgcctgctagtcttcacctcaaagagagccaaggaggcgagcgaggggatcgcgtatgagtggaactacgtcgtggagaaccaatacggagatgagggcatggtagcaggcaaatgccccaaccgcgcagagtctccggccatggattccaaaggccagtcgcttgtcctgatgaacttcttcacgactaacccgagccagaccggtgcctgcgggaacaattcggcgccactcgacagcatgctgaagacgtgccatgacgcttcaggcaaccggtggccgaactacatcgctgttgatttttacatgagaagtgacggtggaggagctcccttggctacggacattgcgaacggtcatatggtgtgcggatgcgacaacatcgcgtattgcaaggcgaattcgacattcgggacctgcgtgatacccccaccgccgccgccgtcaccgcccaaggcatccacccccggcagcagaggctcaacagcaggcggcgatgctagcgctggaacgatggccctgtcctcgcaatggagcttcttgctgggactggcttctctgcttcttttgtcgcgctcgtgagagccgagcggcattggtgactggttttgctgctcttgctacatgctctgcgagctgataggagcatcgtcccatgagatgagctgaggctgagctgaactgagctgtatatttgggtttactgcgcaacgtagttagttggatacgggaatcagttaaattcatcattcattttt

SEQ ID NO: 24275 - DNA, 487 bp, Zea mays
  Clone ID: LIB3608-017-B12_FLI
gcccccctcccgccgccgctagggtttctcctccctccccgcccacccccaaatcatttccgaagcttccagtgcgccgcagccatgagcgacggcaaggactccctcgacctctccgccctcggcgctgccatccccaactcggccgagctcagcgcggaggacaaggctaaccttgtggcgtcgatcaagaacacgctcgagggattggcgtcgcggcataccgacgtgctcgagagcctcgagcccaaggtcaggaagcgcgtcgagaagctcagggagatccagggcgaacacgacgaacttgaggcaaaatttttcgaggagagagctgctctagaagctaagtatcagaagttgtatgaaccactttactcaaagcgttacgaaattgtcaatggtgtggtcgaggttgagggtatcacagtagaaagtgcagctgaaacccctgcggagcaaaagactggagatgagacctctgctgatc

SEQ ID NO: 24276 - DNA, 1808 bp, Zea mays
  Clone ID: LIB3608-017-E5_FLI
gcagtttcacttgagagctagctgagactgagagcaaaatggttcttggagcgttggcgagtgcagtcgcctcgatgagcctcctcatcgtctacggtgtcctgggcgctctgctcctgtggaaggccgcccggctgctggatcggctgtggtgggagccgcggcggctggagcgggcgctgcgcgcgcagggcctgcggggcacgtcgtaccgcttcctcacgggcgacctcagggagtaccgccggtcaaaagaggaggcctgggccaggcccctgccgctgcggtgccacgacatcgccggccacgtcgagccgttcatccacggcgccgtcctggagcacggcaagacgtgcttcacctggttcggccccgtccccagggtgaccgtcgtcgacccggacctggcgagggacgtgatggccaacaagttcggccacttcgagaagcccaagttcccggcgctcaccaagctgttctccgacggtgtggccaaccacgaaggcgagaagtgggtcaagcacaggaggatcctcaaccctgcgttccacctcgagaagctcaagctcatgctgccggcgttctctgcgtgctgtgaagagctcgtcagccgatgggcgcagtcgcttggccccgacggctcgtgcgagctggacgtggacccggagcttcagaccctcaccggcgatgtcatctctcgcaccgcgttcggcagcagctacctcgaaggaagaaagattttccagctccaggccgagcaagctgagcgcctcatgtccatcattgacaaattcgccgttccgggatacatgtccttgcctacgaaaaacaaccgaaggatgcgccaaatcaaaagcgagatcgactcgattcttcggggcctgatcggtaaaagaatgcaagctatgaaacaaggtgagagcgacaaagatgacctgctgggcttactgctggagtcaaacgcgagagagacaggcgatcagagcggccagcccggccaaggattgacgatggaagaagtcatggaggagtgcaagctgttctacttcgcgggaatggagacgacgtcggtgctgctcacgtggacgatggtcctgctaagcatgcacccggagtggcaggaccgtgcgagggaggaagtcctcggactgttcgggaagaagaaccaaccgggatacgacggcctgagtcgcctcaaaacagtgaccatgatcctctacgaggtcctccggctgtacccgccggccatcgcgttcagcaggaaaacgtacaaggagatggtggtcggagacgtcacgtaccctgccggcgtgaccctggagctgcccgtgctgttcatccaccacgaccccgacatctggggaagcgatgcgcacgagttcaggccggagaggttcgccgagggggtggccagggcgtccaaggataggctagcgttcttccccttcggctgggggccgcggatctgcatcggccagaacttcgcccttctggaggccaagatggcgctgagcatgatccttcagcgcttccagttcgagctcgcgccgacgtatacccatgtgccgcgccgagttataatgctgcgcccgatgcatggtgcccagatcaagctcagagcgatatgatacgatgctagctcagggattcacatgtggctgttggtccaatcggctttgggctttcaggcctagagctgtgttgtagcattggacctttttatgtatttttttttctatccatggatcattagtagtcagtatctttttgtgtcttttcagttatcacgtattgcatctaacttgttt

SEQ ID NO: 24277 - DNA, 881 bp, Zea mays
  Clone ID: LIB3608-017-H5_FLI
atccgttcgaggtccagatccgcacgagggagatgcatctgcaggccgagtacgggttcgcggcgcactggaggtacaaggagggcacctgcaggcactcgttcgtgctccggatggtggagtgggcaaggtgggtgctcacatggcagtgcgaggcgatggacagagaacggaccgcctcccttggcagtgatgacggtactgtgagcgtgaggccaccaccagcatgcccgttcccccagcatgcagaggactgcccatactcgtacacccgccaatgcaaccatgatggaccgctgttcgtcatcctcttggagcatggcaagatgtctgtccaagaattcccggcgaacttgacggtgatggatctcatggaccgcgtgggcgccaacagctcgagatggagcccctacagcattccgatgaaggaggacctgcggccgagggtgaacggcgagcccatatgcgacccagaccggaggctcaacatgggggacgtggtggagctgacgccggccctgcctcgaaagtccctcagcgggtaccgggaagagatccagcgcatgtacgatcgcggcggcttcgcgctctcagcccggggcggcggcggcggcggcggcggcgccagacgctgctgagagacagtagcaagacgacgatgcgtagccctttttttttctagtaccattgtaccattcaattcgttgtaaatacgtagtatagcaggtaggtaggccttgcagccggggtgggtgggttctgaaatctgttgcaccctgtcctgaaccccatgcagtgtgtaaaaagtagaacgctgtgtatgtaagctgttcaagttcgtctcagcttctatctcaggccctgtttgaattacaaggact

SEQ ID NO: 24278 - DNA, 1243 bp, Zea mays
  Clone ID: LIB3608-018-B5_FLI
ggaaaaccgccacggccgacctcgccttctgcctctccgatccgcatctccgatccgcatctccgcttagtatatacatggggattggtagcgagcgattgattacactgggtgaccatcatcatcagtaactaataattactttagattagaagcaaagggaagcgaagcaagaatcgatcgagtcgagaagatggtgcagttcggcaagtggctgaggaggcagatcgagcggagcctcccggagtggcaggaccagttcctgcgctacaaggagctgaagcggtgcgtcaaggcccgctccggcggctgcccgccgttgcccgcggaggaggccgagttcgtggccgagatcgacgcggagaccgagaagatcaacgccttcttcctcgaccaggaggaggagttcatcatccgccaccgggagctgcagaaccacatcgagcgcgcgctgggccgcggcaggccggcgccggcgccggcgctgcacgaggccgaggtcgccgccatccgcagggagatcgtcaacttccacggcgtcatggtgctgctcctcaactacagcagcatcaactacataggcctggccaagatcctcaagaagtacgacaagcgcaccggcgcgatgctgcggcttgccgtgatggagacggtgctgcagcagcccttcttcaagacggagacggtgtcgcatctggtgcgggagtgcgagtccttgatggaggccgtgttcccggaggcgcgcgatcggggccaggccgccgccgcggcgctcgccgtcgcggaggcggagcagggcatcttccgcaacaccgtggccgcgctcctcaccatgcaggacgtccgcgcggggagctccaccagaggaagccactcgctgccgccgctcaacctgccggactccgactggctccggtccttcgacccgccgtttccgatcccgacccgatgacacttgttgctcgccgctcctagttggcttgcgccagcctcctcgatctcccttccttttcgtctagcttcttggcccgcccggtcccggcccggtacatgctgtgcactgtgcttgccttggttttccattttcccgctttctaagttctaattaactaatgtatgtagagtgcagtagtgagactacagtaaataaatgtaatttactggaatgacagccgagagaacgtacaagctcatactcaatttggttccaattttgtggaaaaaaaacctactgttaactgtg

SEQ ID NO: 24279 - DNA, 588 bp, Zea mays
  Clone ID: LIB3608-018-D3_FLI
caagtcactctcgaatcgtccgatggcgagaagttcaaggtcgacaaggaggtcgccgagcgatcagtcctgattaaaaacatgattgaagatgttggcgagtctgacaacccaattcctctgcccaacgtgaacgcaagcgtcctacgaaaggtcttggaatactgcgaacaccaccgtggtgacccactgcctgctgccgatgccgatccatccaacgacgacaaccgcaagcgggcgactgagatctcggattgggaccagaagttcatccaggtcgaccaggagatgctgttcgagatcatcctggctgctaactacatggatatcaagcccctactcgacgtcggctgcaagaccgttgccaacatgatcaagggcaagactcctgaagagatccgcaagttattcaatatcgtcaacgacttcactcccgaggaagaggctcaaatcaagaaggagaacgagtgggcagaggaccgataaattcgtctattactctcgtttaccttttgacgtcttcatacgtttgtatcattgttacatgctcttcgtcgttgaactgcatctcttggtcttgtcgtatcc

SEQ ID NO: 24280 - DNA, 1299 bp, Zea mays
  Clone ID: LIB3608-018-F4_FLI
gcaagctagctcaaagaaaaacgaaataatgagggatgcggtggcaaagcgggaggcgatgaagggaggcgcgagctcgaaagggccggtggtggtcacgggagcgtcgggcttcgtcggctcctggctcgtcatgaagcttctccaggccggctacaccgtccgggcgaccgtgcgcgaccccgagaacgttgggaagacgaagccattgctggaccttccaggagcaacggaacgcctgtccatatggaaagccgacatggcagacgaagacagcttcgacgaagccatcaggggctgcaccggcgtcttccacgtcgccacacccaccgacttcgagtccaaagaccctgagaatgaggtgatcaagccgacggtggaagggatgatccgcatcttgagagcctgcaaggaggccggcaccgtgcgccgcatcgtcttcacttcctccgctgggacggtctgcgtcgaggagcggcggcggcccgtctacgaccacgacaactggagcgacgtcgacttctgccgccgcgtcaagatgaccggatggatgtacttcgtgtctaaatccctggcggagaaggcggccatggcgtacgcggcggagcacggcctggacctcgtcagcgtcatcccgacactcgtggtgggcccgttcctcagcgcggccatgccacccagcctcgtcaccgcgctggcgctcgtcacggggaacgaggcccactactcgatcctgaagcaggtgcagttcgtccacctcgacgacctctgcgacgccgagatcttcctcttcgagcacccggccgccgccggacgctacgtctgctcctcgcacgacgccaccatccacggcctcgccgccatgctcagggataggtaccccgagtatgacatcccgcagaagctccgcgggatcgaggacgacctgcagcccgtgcacttctcgtccaagaagctcctagaccatggcttcactttcaggtacacggtggaggacatgttcgacgccggcatccggacgtgccgggagaagggcctcatcccgctcgccacggccggaggggtcggctctgcctcactgcgcacacccggcgagacggatgtgacgaatggcgcttagacaacaatagcttgtttcaagaaaaattactacaacttgcctctacacagtagaaatcctacgaataagctatatgtagaggctgtgatgtaatattattgttttcctgcaacaactcaaaacacatctgttcccaaatcaaacagaacttcttatatatatgacaactatttatgcgt

SEQ ID NO: 24281 - DNA, 733 bp, Zea mays
  Clone ID: LIB3608-018-H3_FLI
gcttctcctccccctcttatcaagtcctcctcgggttagggttccttagggttttgtggaggggcgatggcggcggctgatgtggagtaccgttgcttcgtcggcggacttgcctgggccaccagcaacgagtcgctggagaatgccttcgcctcctacggcgagatcctcgactccaaggtcatcaccgaccgggagacggggaggtcccgcggcttcggcttcgttaccttctcctccgagaactccatgctcgacgctatcgagaacatgaacggcaaggagctcgacggccgtaacatcaccgttaaccaggcccagtcccgtggcggcggcggcggcggcggcggcggtggctacggcggcggtcgcggcggcggcggctatggtggcgggcgccgtgacggcggttatggcggcggtggcggctacggcggtcggcgcgagggtggtggcggcggctacggaggcggtggcggctacggcggtcggcgcgagggtggtggtggcggctacggcggcggcggcggcggctggagggactgatgtgtggccccatcctggcttcggccgagttatcttatctatctatagtatcgtgttaccgttcgcttctgtcaccgtgttagtgtccgttctacctttggattaggtgttggtaccccttttgttcgctttggttgctcccgctatgaaacgagacgagagaagaatgagcaaggtttttgttcgc

SEQ ID NO: 24282 - DNA, 1537 bp, Zea mays
  Clone ID: LIB3608-019-D10_FLI
ctcgcctcgacgcgcctctgaaagttcggagccgccggcccgtccgcctccctctccgcctcccgtccccaaggccaatagttttcaagtggcaatggcggaccaggctaaccaacccactgtccttcataagctcggtggccagttccacctgcgctcgatcatctctgaaggtgtacgggcccgtaacatatgcccatctgtctcatcttatgaaaggagatttgccacaaggaactacatgacccagagcctttggggcccttcaatgtctgttagcggtggcatcaatgtcccagtgatgcagaccccgctctgtgctaatgctcctgctgagaaaggaggcaagaacttcatgattgatttcatgatgggcggtgtttcagctgctgtttcaaagactgctgctgctcccatcgagcgtgtgaagctgcttattcagaaccaagatgagatgattaagtctggtaggctatcagagccgtacaagggtattgttgactgcttcaaacgtaccattaaggatgaaggtttctcttccttgtggaggggtaacactgctaatgttattcgttacttccctactcaggctttgaactttgcatttaaggactacttcaagaggttgttcaacttcaagaaggatagggatggctattggaagtggtttgctggcaacctggcctctggtggtgctgctggtgcttcctctttgttttttgtgtactccctggactacgcgagaacaaggttggctaatgacgcgaaggctgccaagggaggaggtgaaaggcagttcaatgggcttgtcgatgtctaccgcaagacactcaagtctgatggtattgctgggctttaccgtggatttaacatctcctgtgttggaatcattgtttatcgtggtctgtactttgggctctatgattccatcaagccagttgtccttactggcaacctccaggacaatttctttgccagtttcgctctgggttggctgatcactaatggtgctggtcttgcatcttaccccatcgataccgtccgcagaaggatgatgatgacatctggtgaggctgtcaagtacaagagctccttggacgcgttccagcagattcttaagaaggaagggcccaagtccctgttcaagggtgctggtgctaacattcttcgtgccattgctggtgctggtgtgctttctggctatgaccagctccagatcctcttcttcggaaagaagtacggctccggcggtgcttaaatggagaaatatgatgacgaacaagagcagtgtgtgttcccggtcctttccaatcaggatctggtgaagtttttgcctttcatatcgaagaaattaataattcatgtagagggaggattcttccaacaatttgttttggatggagacttagatctccaaacactcgtaactatcctactaggtggtgacatcggtccccaaaaacatttatggtcatagagtctgcccttcgtttgtcagtcgggcaatttttcttgcatacaatgccttcgtttaagt

SEQ ID NO: 24283 - DNA, 1067 bp, Zea mays
  Clone ID: LIB3608-019-D5_FLI
gtacgccatctgcgtgcggtcgtgtggaactgtagtgctggacatcctcgccttccagccttctcgaaaatcgaaaccctagaccgcgcgccccctcgccctccggccttccacgtccgatccgatccaaaatgcataagctaggcagaggaagccgggacaaggtgcaacagttcatggcaattaccggcgcaagtgagaaagctgcccttcaggctcttaaagctagtgattggcacttggaaggagcttttgatgttttctacagccagccacaaattgctgttgctaatactcgacatctggaagagctctacaacagatataaagaaccagatgctgatatgataatggtggaaggcatatcacagatctgcaatgatttacaggtggatcctcaggatattgttatgcttgtcatatcgtggcatatgaaagcttccactatgtgtgaattcactcgccaggagttcattggtggactgcagtcaataggagtggattcaatagagaagcttcaggcgaagttaccttcattgcgagctgagcttaaagatgatcagaagttccatgaaatatacaactttgcatttgcctgggcaagggagaagggccagaaatctctcgcattggagactgctattggcatgtggcagttgctatttgctgaaaggagctggcctctcattgactactggtgccaatttctacaggtaaggcataataaagcaatctccagggatacatgggcacagttattggagtttgttaagacaattgatcctcagctaaccaactatgacgaagaaggtgcttggccctacctaatcgatgaatttgtggactacttgaaagagaacggtcttgcctagcatagaaggtgtacggaattgggctgtaggggggagaatttgtcacccacaaggccaccatcattgtataacttaatggtcggatgcttgtattcattgcactaccaatagctaatgcggctcgtgcgtctggggatggagtttatcctctatatagacaaaacttgttgaatgatgtgggtgtaaaacgaaggc

SEQ ID NO: 24284 - DNA, 1433 bp, Zea mays
  Clone ID: LIB3608-019-F6_FLI
gaggagacatggaggaggaaggccatgacatcgtcattgtcggcggcggcatctgcggcctcgccactgctctcgcccttcaccggaaagggatcgccagcctggtgctggagaggtccgaggccttacggtcagacggagccgcgatcggtgttcacgccaacggatggagagccctggagcagcttggagtagccgcggagctcagggagaccgcggacctcatcaccgccgcgagtcgtggcgtgtggaaggtcacaaaaaagactacccaggcaccgatcgggaaggaattccggtgcttgagaaggaaggatctcatagagaccatggcgaagaacatacctgcaggatcgatccgcttcggctgccacgtggtcgcgatccagcaggatcctggtactcaccacggacccattcttactacagtcgacggcggcacgatcagggccaaggtcctgatcgggtgtgacggcgcgagctcggcggtagccaggtacctcgggctgtcgccgccgaaagcgatcccccgcacggtcttgcgtggcttcactgcgtatccgcatgggcatccgttcggggccgagttcctgcggattagaggaggcggggagttcgtcgtcggcaggttgcctgtcacccgcaacctagtccatttcttcgtaaccatgcctaatcctccaacaggaataatgctcgccaccaaagacgcgagcgccacgacgacgaaggatttcatgctggagaagctgcgagattgctgcgctcccgagatcgtcaagatggtccaggactcggacccagagtccctcaacgtcgtgaacagcatccggtaccggcctccgtggcaggtcgcgctcgccgccttccacaggggcgccgtcacggtcgccggcgacgccatgcacgccatgggcccgttcatcggccagggcggctcggcggggctggaggacgccgtcgtgctcgcccgctcgctgtcacgggccgccgccgccgccgccggcggcggtcacggtgccgctgttcgggagtacgtccgggagaggaggctcagggtggcgctgctgtctctcgagagctttgtcgcggggacgctgctgcgcgctaggtcgctggtggggaagcttgcctgcgtggctgtcctggcgctccttggcaccaggtcgcttcggcatgccgacttcgactgcggtcgcctctagtcctcgacctcgaggatgcatttccttagcttgtggatcatggcatattggcttctgtgcgccggacaagaaaattgtgcgacgacaataattgtctccatccttcatcccggatgatgtgatgaaacgatgcatctgtttcttttttttttccttttcatttttaacttttcatgttgagcactacgctgaaaacaaatgaacgaccctcattggtcagtttgtttc

SEQ ID NO: 24285 - DNA, 1204 bp, Zea mays
  Clone ID: LIB3608-019-G10_FLI
cgactctcttctctgagaaaacccaacaaaaaccctcgctcgcctcacttgttcgctcacctcggtgcggcgcgtcgttcggacacggagatacagcggcgattccggcgatggagtacgtgaaccccctcaccggcttccgcgtcgacggccgccgccccaacgagatgcggcaactcaagggcgaggtcggcgtcgttgcgcgcgcagacgggtcggcgctgttcgagatgggcaacaccagagtcatcgccgccgtctacggcccgcgagaggttcagaacaaaggtcagcaagtaaacagcaaggaggctttggttcgttgtgagtacaggatggcagagtttagtacaggagatcggaggagaaaaccgaagggtgacaggcgatcaacagaaatttctcttgttattcgacagacaatggaggcaagcatattaacacatttaatgccacactcacagattgatatatatgtccaagttcttcaagctgatggtggaacaaggtcagcttgcataaatgctgcaacactagctcttgcagatgctgggattccaatgcgagacattgccacatcatgtagtgctggttatctgtgttctactcctttgctcgatctgaattacctcgaagacagtgctgggggttctgatgtcactgttggcattcttgcaaagatggacaaagtgactttgcttcagatggatgcaaaattaccaattgatacatttgaaaatgtaatgggacttgcaatagaagggtgcaaagcaattgcaacttacatccgagaggtgctattggagaatacaaagaagcttgagtgtcagcgtggttaaccttaggaggcagtgcaggcaggttgatgacctgaacctacccaacaacggacatcacacagcccattaaaaggcttactggttgtggttgtgggtggctggctctagtgcagtgcacaggaacttccaacggagtatgtgcaagtcgtcagaagttgttcaaggcagcttgtttgtcatcatcaccagggatacaagacatgcttcctcagtaaggtgttatcggaatttttcggttcctgtaaactgatataaatcgatggtggaactgtactgataatcttccgtatggtgttattggaatttgtgtgacagttcctgtaaactaatgcagagagagagatccagcggggctcctgcctcct

SEQ ID NO: 24286 - DNA, 1170 bp, Zea mays
  Clone ID: LIB3608-019-H7_FLI
gggcgccggggtagcggccaacggatggagtggtagcggcccagggctccgcttggctcgaaggctctgcacctacgacgagagagatgacagggcactagaggaagaagttgagaagaaatttggatggatattgaagataatcttcctaggaactgctggcctagttggttaccaattctttccatacatgggtgataacctgcttcaacaatctatctcgcttttgcgtgtcaaggatcccttgttcaagcggatgggagcttctcgtttagctcgttttgcagtggatgaccaaagaagaatgaaggtggtagagatagggggagctcaggaactgcttaatgtattggaaggtgctaaagatgataaaacacgaaaagaaactctaaaagctcttgctgcgctttcaaaatctggagcaacatggtcatttgtacagcagtaatgcacttctatgtgaatccttaggcttcgccgatcgtgatgagtcttcgcactaaagagatccccaagaagctgcaggatttttggacaaggtcggcgcctacgctatagtcagttccactcccgactctcaagaatatgctgagatccaaacttacaagaccagtcttctgacggcatttgatcaactgaagtcatgatgtccaaatgccaatgggtatattaagcaacattttaactctgcactttgccgtggcggttaatgttctagtttcttgaatcgacgcaatttatctctagaacatgctggacctcctttgttgaccaagtgggttgctgatggaaatgcatgtctggttcatttgtttcaaacaggacagtacattctttccttctgtgggccaataacaagagctttaatttatttattttcttggtataaagtgggttgcaatccaaacagattgcatttggacagttgcaactgtacactcatttaggaaggataggcctagcggcaattgtgagaagccttttcactgagtcaaatgacctaggttcgacagtctctatgcaaaaatgtaggaataaaatttgcctcggttttttagaccgcaatcgacatgtccttgtatgtaccctcagttgtgtctgtacgtaccctcacatttggtgcatttgactttctgcaaacagtgatgcaaagcatgcaatatcatgaac

SEQ ID NO: 24287 - DNA, 447 bp, Zea mays
  Clone ID: LIB3608-020-B12_FLI
gctgctcggtttcttcggcgggttcgccttcgcgccgaccacctatttccttccctgcgtcatgtggctcgcaatctacaagcccaagaggttcagcctctcctggttgaccaactggatgtgcatcattcttggggtgctcctgatgattctgtcgcccatcggagggctccggcaaataataatggacgcgaaaacctaccagttctactcgtgagctaccaccagccatgacttgtaagcacgattggagaaatctgtcaaagcctcaaccacgagtttttgtttttgttttttgtcatgccaaacacatacatatacgtactgtttttttaatattcaaaggtgttcttcgtggcttgcgtgtgtacagtattatgtgtatgagggagacataagtttaatgatgctggctgtcaaagataatggcggttcaattacactttc

SEQ ID NO: 24288 - DNA, 1677 bp, Zea mays
  Clone ID: LIB3608-020-F6_FLI
cacaaggcaataggcagccgcccagccctgaagccgtcagcgtcgacccccgcctcacgcttgttcgcccgttctccctcttcccggagtggtactggtacgacgacgtgccgccgctaggtacctccgcgcgaagacgacgcaccgctggtaggtaggccgtaggcgcgcagccgtagagctgcccaggtccggccgactcccgatctgcatctctcggaccgcccgatgccctgcgggctgcgtccagcgtaacctcgcctcccagcgccagggtaagccggccccagcgagggacgcgcctcaagcggagcccaacagaccggcagctgaaacccttgccaactggctcctgttttgccgggttgaggagaaccatgcaggacatgaagcccgccgctgctgcagtcgccaaggtggtggctggtgactcgcctccctctgctgctagccctgcgccggcagtggccaacagcaatgggacgccacagaagccgcctcctattcctgccgctgccttcgacatgcccaagccaaacctccggggccttaacaagcccaagtgcatcttgtgtggtaacatcgcccgctcccggtgcccattccagtgttgcaagagctgctgctacaaggctcagaatccttgccacatccatgttctgaagcagacaaacacattgccagataagccgtcacctgcaactgctcctgcaacaacagaacatcaatctaacaatttacctgcaaccagttcagcgtcaaggctggctgccttgcaaaagcttccccagcactttctgaagtttctccaaacaaagaaatcagttaccaaaaaggatgttgcgggtataaacaagtggaggtttatgaagctaaaggaacatatgcaaggagataccgacgctgaaaacgaagcgtacgagaggtatacgcagaacgtcgggttactggaggaagcattctgtcccatggaagaagatgctgatgttgatcctgaggctgaagcaacttcttcttcagaggaagaaaggatggacctgttggtttcggcggcaaaggcgaggttgaagtcggataacgaagctgccaatagcttcagggagagggttgccactatcttggaccagaagctgaaggacctgcgcgggagccaaagcgccagtgagggtgacgaaccgtctggcccaagtctggacgatcgtctaaccccgaccccgatgaagttcagcacagcgcagaagatggggagagccacggaactgaacgagctgctgggtaagctgacaggagcacggagcgaggacgatctgaagccttgccgtgatattgccgagcagctgtttgggaaggagaacggctcctctgttggcaattcgaacagagtggatacggagacggagccgggcgatcaggagtcagctgcagcagtagcacggcgctattccgtcccaacgctgtgcagcaggatggaggtgggtgaggatttggcctcagagatgaacgatgaattctgctctttgactcaggtggcccagctatgaaacctgaaacctggactaatcgcaatgtgacattttttaggggatttcatcacatttaagcctagtttagaaactcaaatttcatccgaaattcgagtgaactgagggaaaaataaaataatttctctttcaatcc

SEQ ID NO: 24289 - DNA, 797 bp, Zea mays
  Clone ID: LIB3608-020-H5_FLI
aacgcactatacaatctcaaagatcgccaagaaaaggccttgtgcttctaaaaaatttctttttaaggaaaacagcatctgactcgttgtctctccctgataaggataattatcctgagccagatttagaggaggtctttgaggacggatgcccatccctttcaaggaggcttaattctgagtatcctgtccgagacatgttcaaactttttgcatgtgcaatttgtcaaattgacttggaatctggccaaggcatatccatacacgagggtttgtcaaggccaggaaagctgcgtccctgggatggccctttcctttgtcacagctgccaggaaaagaaagaggcgatggaggggaagcgccattcacgagcactttctcatggattaccattgaattgagacatgttggaagtcgccatgcctatatatatgttggagctgtacggtactggaccgtagagcaaatccaatcgcctctagataccacaccagcgtcttcggcagggcttgtggcagcagctcacgcagggaatgatgacaagaggttgttattattagtgaagaatgtcgacagtggccaatagtcatgtaaattattcgtcgtgtagaggtgcaagtgacaaatagccacggttttgtaattctcaactaggattaggtattgagacctgtaattcgtctgggcagacctcaaactgaaggtcaacaacgtagcgtggccctattgtagaatgtatgttgccccacaatctaaatgattcaacgctgcaattaaatctaagatctttgcagacc

SEQ ID NO: 24290 - DNA, 1042 bp, Zea mays
  Clone ID: LIB3608-021-D12_FLI
aggcaggcaggtcggcgaggagggcaggaagaccgaagaccgagccgtgcgggggctcgggacgggaacgggacaggaccccaaaatctcagatccttcctgcccgcccgcccgtgcccgtcgacgcgtcgttcttgccggccgcgcctcacctccgccctctcctcctccagggggatcggatacgccacaggctgcgcgatggtgctgtgggtcttcggctacggctccctcatctggaaccccggcttcgacttcgacgacaaaatcctcggcttcatcaagggctacaagcgcacctttaatctcgcttgcattgaccacagaggcacaccggagcatccggcgaggacctgcacgcttgaaaccgacgacgaggccatatgctggggaattgcatattgtgtcaagggtggtccagaaaaagagctaaaagcaatgcagtacttggagagaagagagtgtgagtacgaccagaagatatccattgatttctacaaggaaggagatcccttgaaaccagctgtgacaggcgtcttagtgttcgtttccactccagatccaattggcaacaagtactatcttggccctgctcctttgcaggatatggcaaggcaaattgctacagccaatggccctactggctataatagggattacctgttctcaatggagaaggcattagccagcattagccacgaagatgattcgatcatagagcttgcaaacgaggtgaggaaggtgctcaacagaacaaaggagaccaagatcactggtgccaatgcttccctgaaatcacatgcccctcttgtgcacctgtccgcgcttccagaaggcaccgttgtggactcgagatagcgagagccttggacgttggacctctactcggaatctacttccagctcttgcatgtttgtggccatcatgtactgattttcccttttcaacagttgtcgtgaggctgtatcttctggagttaaaaaaatgctaaaagccggcactaataatgatattaacttgaaaaatctatcggcgatccttg

SEQ ID NO: 24291 - DNA, 1171 bp, Zea mays
  Clone ID: LIB3608-021-D6_FLI
cactccaactgctcgaagaagcacttgcatctcgtaataatcataccatattgtcccttagatcggtcgaccatggcagcagcagcagccacgagactcagcggcggcggcgtcgccctcttgctcctggtgctgctggccgccggcacctccacctcgtcggcgcagctctccaccggcttctactcgcactcgtgccccggcgtgcacgacgccgtcaggtcggtgctgcaggccgccatcgccagggagcagcgcatgggagcctccatcctccgcctcttcttccacgacacgcccagcttccagggcgagaagatggccaagcctaacaacggctccgtcagaggcttcgaggtcatcgacgccatcaagtccgccgtcgacaaggcctgccccggggtcgtctcctgcgccgacatcctcgccatcgccgccagggacagcgttgtcaccctcggaggtccgaactgggacgtcaagcttggccggagggactccaggacggcgagcttcagcggcgccaacaacaacatcccgccgcccacgtctggcctcgccaacctcacctccctcttcgccgcgcagggtctctcccagaaagacatggttgcgctctccggagctcacaccatcggccaagcacgctgcaccaacttcagagcgcacgtgtacaacgacaccaacatcgacggcgccttcgcgagagcaaggcgatcggtgtgcccggcagcagcctcatcaggctcaggcggcgacaacaacctggcgcctctggacctccagaccccgaccgtcttcgagaacgactactacaggaaccttgtctgcaggaaggggctcctgcactccgaccaggagctcttcaatggcgcggccaccgacgcgcaggtccaggcgtacgtcagcagccagagcgcgttcttcgcggacttcgtggctgccatggtcaagatgggcgacatctcgccgctcacgggctccagcggggagatcaggaagaactgcagaaggatcaattaagctagaggcagcgcgcttctaagcgtaccttgtatcgttgaagtttctaattcctccgattcaaattaagttgtcaaatcactgtgctacgctgtaccaatgcgttggcatgtctattcgtttgaataaattagtcctatcccctctc

SEQ ID NO: 24292 - DNA, 804 bp, Zea mays
  Clone ID: LIB3608-021-F8_FLI
cgcatcacggacatgaagtacgtggtgcaccacggcaccgtgagcgctgagcccggcggcggcgcgtaccaggagtactacatccgccacgtcgacggccacgccatccggtgcgaggacgagcagcagcgcctcgtgcggtgcctggctgccgccatcgagcgacgcaccgccgacggacttgagctggaggtgcggacgggagaccgcgcgggcctgctctcggacatcacccgcatcttccgggagaacgggctcaccattcgccgcgccgagatctcgtcctccgacggcgaggccgtggacacgttctacctatccgacccgcaaggcctccccgtggagaccaagaccatcgaggccatccgtgcacaaatcggcgaggccacgctgagggtgaggaacaactcgttcggtaccggggaccacgccgacgtggccggcgctggcacgacggcgttcatcttcgggaacctgtttaagttctacaggccgttccagagcttcagcctcatcaaactctactcgtgatgcgcacttgggtagcaattttttcacatgttttagatagtttttactgtggttagctgttctgctctggagattttccaatagtgtgtaaatatggctatggatgatgatggcgatatatacggatacagtccagtgtaagtatatagttaggcaaggttatgtagctgcattgcatggttaggaagaatgatagttttattgtagctctatagcttccaacaagttagtgtataacagcatctctaagagactctttatttttagctctct

SEQ ID NO: 24293 - DNA, 591 bp, Zea mays
  Clone ID: LIB3608-021-G9_FLI
gcacttgccccccaccggccattggacccaactgcctgtcgcgctaactttttcgtgtatatccttgcaggccccgaagaaggacaaggccccgccgccgtcgtcgaagccggccaagtccggtggtggcaagcaaaagaagaagaagtggagcaagggaaagctaaaggagaaggtaaacaacgcggtgctgttcgaccaggctacctacgacaagctgctctcggaggtgcccaagtacaagcaaatcaccccttccatcctctccgagcgtctgaggatcaacggctcccttgctcggagggccatcaaggacttgatggcgcgtggcctcattcggatggtctcggtccactcaagccagcagatctacaccagggcaaccaatacataaggatggggaagaggtctaaaatgcattgtctgccctctctgcaggaggagctcgtctttagaacagttgccatctttgtcaagagttgccaatgttatgttactggtgatgagttccaggtgacggcaacattttagagattttgagtatttctattagttggtactatggtttgccaattataagttacttggcct

SEQ ID NO: 24294 - DNA, 508 bp, Zea mays
  Clone ID: LIB3608-022-D1_FLI
gcggcaagtgcgggtgcggctccagctgcttctgcggcagcggatgcaacggctgcggtatgtaccctgacgtggagaccgccgccaccagcagcgtcaagaccacggtcctcgccgcgccgaccaccaaggccagcgccggcggcttcgaggcggccaccgagggcggcggctgcgactgcaacacctgcaagtgcggcaccagctgcggctgctcctgctgcagctgcaactgagctggcccggcccggcgatggcgcacgagagtcgagaggaggaggacgacgacgaggcgtataaatataatagcggcgtccagtaaataagatcctgtcaactgcacccgccattatccatggtcgctcgctcctcgcctgcgtctcctggtcctggggttcgtctgaacgtcctcgcggcttcacgacggcgatgccgcctccgtcgatcctgtccgtctcgtgccggatttaatattagatctatatgcgtgtttttctgcgttattact

SEQ ID NO: 24295 - DNA, 737 bp, Zea mays
  Clone ID: LIB3608-022-E3_FLI
agcgccgtgctagattccacacctagacaggacgccgcacacggcagccaccctcgtgtgcgtgactgcgtctcgcgcgggcaagagtgcgcaggcagagccatggacgtagaagcgcgtaagtccgacgcgccgcccgcgcgcggcaaggcgatgcaccgctttctcgtagcgctcaactgcgggatgctggcggtgggagccatcggcgggccgctcctgagccggctctacttcagcaagggcgggcaccggcagtggctgtccgcgtggctggagaccggcgggtggccgctgctggtgattcccgtggcggcgtcgttcgtggcccgccgcgcgcgcgacaggggcgccccggtcctgctcgcgccgccgcggatcctgctggccgccgcgggcctcggcgtggccacgggcgcggacgacttcatctacgccttcgggctcgcgtacctcccggtgtccacgtccgcgatcctgatctcgacgcagctggcgttcacggtgttcttcgcgttcctcgtggtgcggcagcgcctgacggccgcgtccgtgaacgccgtggcgctgctgacggtgggcgccgtggtgctgggcctgcacgtctcgtcggaccggcccccgggcgtcaccaggggccagtactggctgggcttcgtgctgacgctcggcgccgcggcgctctacggcctcgtcctgccgctcgtggagctcgcctacaggcgcgccgcgggcgc

SEQ ID NO: 24296 - DNA, 617 bp, Zea mays
  Clone ID: LIB3608-022-G1_FLI
gaccgtgatccggctgggcgtaccgaacgacaagaaccggtctaaggccatgcagatggcatccaagttcgtgggagtgaactcggtggggatcgccggcgacgccaaggaccggctggaggtggtgggggagagcgtcgacatcacctgcatgatcaacctgctgcgcaagaaggtctgccgcgccgacatcgtcgtggtggaggaggtcaaggacaagaagaaggaggaggaggagaagaagaagaaggaggaggaagagaaaaagaagaaggcggaggaggaagccaagaagaagaaggaggaggaagagctcaagaagaagctctgtccgtacctgtacccgccgccgccgtgctccggtgcctgttgccgcgggccgtcgccgccgatgtttctgtgcgagccggaacagccagcgggatgccacatcatgtgacgatgaagtgaagctccgtgaataatcgtcccgtccgaacttgtgcacatgcgtggttgtggttttgctttggcatctgaattacaatcctaagtgatcatggaatttagatcactacttatatataaagtattgttttgtgagtttgtttttaagttaagatgttctaaattcgacc

SEQ ID NO: 24297 - DNA, 995 bp, Zea mays
  Clone ID: LIB3608-024-C10_FLI
agttgaaccctaaactaaggttcagaaggccaatcgaggtcccgttgagcaagccaaacagaaccttagtttagggttcaactccatcggattctaccagatgacgaagttggccataatacccttcacggtgctgttggagactatattcctgaagaaaagattcagtgagacgatcaagttttctctgctggtcttgctgctcggagttggcatcgcctcagttacggacctcaagttaaactgcctcgggtccgttctttccggcctcgccatcgccaccacttgtgtcggccaaattctcacgaatacgatacagaggaagctgaaggtctcgtcaacgcagctcctgtaccagtcagcgccttaccaagcagccattcttttcgccactggccccttcgtggaccatctcctcaccggccgcagcgtcttcgcccatagatacactttcccggttgtgggcttcatcgtcctgtcgtgcttgatcgcggtgtcggtgaacttcagcacgttcctggtgatcgggacgacgtcgccggtgacgtaccaggtgctgggccacctcaagacgtgcctggtgctgtcgttcgggtacacgctgctgcacgatcctttcaccgtgcggaacatcctgggcatcctcgtcgccatcttcgggatggcgctctactccatcttctcggtgcgtgagggcaagaagaagtccgcaggcgacgccctcccggtgtcacagatgcctgacaaggagacggagccgctgttggcgaccaaggacaacagcgacaccaaaaaggcgaacggggttgctcacgactgctaagatgttcccgtttgccgttgcttatagcctaattagtccagctctagtgttactacgacgcactgttctgaatctcagaaagtcagggaagaagtcattcctttttgtttcttataatattgtatatgtaatattcctctattgcgaattataagccgtttcaatttttttg

SEQ ID NO: 24298 - DNA, 726 bp, Zea mays
  Clone ID: LIB3608-024-D10_FLI
gtccagatcatgggcttcttcatgatgaccgtgttcatgctcgcgctcggggtgccgtacgagcactggaccaaggcgtccaaccacaccggcttcgtcgtcctctacgggctcaccttcttcttcgcaaacttcgggcccaacagcaccaccttcatcgtgccggccgagatcttcccggcgaggctccggtccacgtgccacggcatatcggcagcggccggcaaggccggcgccataatcggcgcgttcgggttcctgtacgcggcgcaggaccccaagaagcccgaccatggctactcgccgggcatcggcatccgcaacacgctcttcgtgctcgccggaaccaacttcctgggcatgctcatgtcggtgttcgtgccggagtccaagggcatgtcgcttgaggagatctccaaggagaacgtggatgatgaagctgaggccgaagtgtagagagaccgtctgcacctctgcgtgcagatgcacatgtgaattgtgttgtgaattgtgatgcaccgatggtgttgtgtggttttgcttgtgtcactgtatctgcgcatacgctacgaataaccgtatctggctggctggctggccatgctcgcgcgtgcgtgtctgggtgctcctgtgcagcaaatcgatagccgctgtgtgatttgctaccttttgatattgttgctgtttatgtaataattcaaaactattatgggtaatttccttttg

SEQ ID NO: 24299 - DNA, 845 bp, Zea mays
  Clone ID: LIB3608-024-G11_FLI
cacctcttcagaatggcttctagcaagctctttgcggttggcctcaccgtcttactaagcattattggactgtgcaatgctattagggtggtaaaccacgccaccgcagatggacaaggcggtggaggtggtggaggcggcgggagcggaaccagctatggctccggatccggctccggctacggcgatgccgaggcctatgacggcagtgcccagtccccaacctctggccacgcatatggcagtggatccggggacggtggtggcgtttggcaaggtgacgacgagtgcgcgtccggttacggggcgggcggcgcatccggtgaaggccatggcgactcaggtaactccaacaccgatgccgctgcgaatgcgagcggagctggcggcgggggcggttctggtgggagcaatgggaatggcagcggatctggtggcggcagtggagttggagaaggcgaaggcgataactatggtccctatggttcgagctacgcaaatagcggtggcgccggaaggggaagcggaggcggtcgtaatggtggattcggcggcggttccggtggtggagcggggagcagtggtggtgccgcgtcaggttatgatgatggcagctacaacggatcaacaccttaattatgttcatttgtttgtaccacactgtcaagcaaccgacacgtactgatagggtttttctgtgcttgtgaaataatttggcctttctgagcgatgcagaagtttgttctactcatgtaataagccactgccatttctctgtatacgccatgtttgggctatagatgtcggttagtagacgttcttttgctatcaatcggtgtcatttc

SEQ ID NO: 24300 - DNA, 1166 bp, Zea mays
  Clone ID: LIB3608-025-B12_FLI
gaccaattaactagcttcttctagctctagctaggctcgtctgctgcaagaaggtaacagcgcaggcatggaggggaaggaggaggacgtccgcctgggcgccaacaagttctcggagcgccagcccatcggcacggcggcgcagggcacggacgacaaggactacaaggagcccccgccggcgccgctcttcgagcccggggagctcaagtcctggtccttctaccgcgccggcatcgccgagttcgtcgccaccttcctcttcctctacatctccatcctcaccgtcatgggcgtctccaagtccacctccaagtgcgccaccgtcggcatccagggcatcgcctggtccttcggcggcatgatcttcgccctcgtctactgcaccgccggcatctccggcgggcacatcaacccggcggtgaccttcgggctgttcctggcgaggaagttgtccctcaccagggcggtgttttacatcatcatgcagtgcctgggcgccatctgcggcgcgggcgtcgtcaaggggttccagcaggggctgtacatgggcaacggcggcggcgccaacgtcgtcgcgcccggctacaccaagggcgacggcctcggcgccgagatcgtcggcaccttcatcctcgtctacaccgtcttctccgccaccgacgccaagaggaacgccagggactcccatgtgccgatcctcgcccctcttccaatcgggtttgccgtgttcctcgtccacctggccaccatccctatcaccggcaccggcatcaaccccgcgcggagccttggcgccgccgtaatttacaaccagcaccatgcgtgggctgaccactggatcttctgggtcggccccttcatcggcgctgcgctggctgccatctaccaccaggtgatcatcagggcgatcccgttcaagagtaggtcttaaaggagccgatgctgctgcttcgagatgctgccggtcttgaaaggatggattcgtggctgtttcaaatgatcccctactatgttacgtggagttccattcctctttcaaagttcggagctgcttttatccgaacccagacttgtaattcatctgtaccaattgtgtaatatgccgcgcctctgttatgtgcaattcaaaattatgagacagcgagtcaagctttaagagttcc

SEQ ID NO: 24301 - DNA, 750 bp, Zea mays
  Clone ID: LIB3608-025-D1_FLI
ggctagctaatcacttgtcaagaacaagagctctctacctgcattggctagcgtgatccgcgaggtagctggctgcttgttgtgatcgagcaatggcgtccaaggcattcgcgctgttcctggccgtgaacctggtggtgctgggcgtagccaacgcctgcacgcccaactgttcgggcccctcgacgacgccgacgcccacgccgtcgtcgttcggtaggtgcccccgcgacgcgctcaagttgggcgtgtgcgccaacgtgctgggcctcatcaaggctaaggtgggcgcgccgcccgcggagccatgctgcccgctgctggaggggctcgtcgacctggaggccgccgcctgcctctgcactgctatcaagggcaacatcctcggcatcaacctcaacctgccggtcgatctcagcctcatcctcaactactgcggcaggaccgtgcccaccggcttcaagtgctgagcgcctctccgtctcatcgccttgcgctgcctcccttccattccatgcatattgcatggttccgtttcagtgacgcatggttccgtttgattgctttcccacgtacgagaggtactgcatgcatgcaacacatggccgtaccgtacgtgctctcgatttgtaatttcccagcctcttccgtccttgtgtgcatttgttgtaaagggctggcgatcacttctacgccggtgctaataagttccaatcaagtttcagtgttttgcatgcaggctctgcctac

SEQ ID NO: 24302 - DNA, 1308 bp, Zea mays
  Clone ID: LIB3608-025-E3_FLI
cgcacattcttggcagctactctactcaatggcgctgtcctcctccggccacccggcgacgacccgcctgctcttctcgcttctgctcgtgggctcggcggcgggcttgccggagcgggcggccatcgacagggtcaaccggcgaggcccttccctcggcctcgtcatgtcctacgtcgacgaggccaccgcgctgcaggcctccggctacttccagccttggcgtgccctccctttcgttgacctctacggacggcggtatcacatcggcagcattcggggcgtgaacgtgatatacgcactgacagggcaacgcaggctgaacgccgccgtcacagtacagacgctcatcgacgtcttcagcgtgtccggcattgttcactacggcacggcagggagctgcaacgactccatctccttcggcgacgtcagtgtccccaggctcgtcgcctacacgggtgcctggacatggaagaagttcagatcaccgagagagtcatcggcggaattgagcttcggcgaatacaacgtcccagacggaggaggaggggagaatctgctcggatccctcaagtacagaaacgaggagctttactcggccggcaagcccatggaagaggtcttctggctgcctgtgcattcggcatggttcagaactgcagaacagctcacggtggaacttgaaagatgcaacgacactttctgcttacccacagctccacggattgtctacgggctgaaggggtcgtcggctgacatgttcctcgacaacgcggaatacaggaagttccttttccaagagtttggggtgtctacaatggacgaggagagcgcagcggtggtgatgacagcaacgtcgcctggcatacctgtgatcgtgttccgaggagtgtctgacttggctggaggggagccgacatggtcgtccacaagcctgatgaacctggcgtccattaatgcattaaaagtggcggtagagttcatcgctgcagttggcaagcatagttcaaccgcatcagtaaaaagatgatcgccatcctcgtccgttgctgctccaaaataggcctgcggcagtaaccggaagttacttatgttcagaatgatgtcaaaccttgtggcttcaagtcataatataatacgtcctctctaataaagcggtaggaagattgacgtacatatccacattactttgctctcagttgcgttgcgtcgatcccctgctttggggatgtgtacccattctcgaggctataaaatggacctctaaatgtatggaacaacacatcaaacattctaagagtacattat

SEQ ID NO: 24303 - DNA, 991 bp, Zea mays
  Clone ID: LIB3608-026-E1_FLI
gcggccgcgcgccacggccacgagatgccgttcctgcggggggtggacgtgaaccgggcccctgccggggagaccaggaggggtagctgcagcgaggacgacgaggagcctggcggcgcgtcgtcgtcgccaaacagcacgctctccagcagcctcagcgggaagcgcgcagcgccggcgaggagcggcggagaggtggccgaccacaccccgagagccggaggcggcagcgacgacgaggactccggcggtgggtcgcgcaagaagctccgcctgtccaaggaccaggccgccgtcctcgaggagagcttcaaggagcataacacactcaaccccaagcagaaggcggcgctggcgaagcagctgaacctgaagccgcgtcaggtggaggtgtggttccagaaccgcagagccaggacgaagctgaagcagacggaggtggactgcgagttcctgaagcgctgctgcgagacgctgacggaggagaaccggcggctgcagcgggaggtggcggagctgcgcgcgctcaagctcgtggcgccacaccactacgcgcgcatgccgccgcccaccacgctcaccatgtgcccctcctgcgagcgcctcgcctccgcgtccgcgtccgccgaccaggcgggccgtgcagggccctgctggggccctctccccgtgttcgtcgacggcccagcccggaggccgtgatccacgaccacgatatggcatgagatggatgcgcttgctaatcgctaccgctagctaagtagctagtgctaattagggctggatcttctttttttctttgtttggttcttattatactcgcaggctattacagcttagtagtgtttattagtccgatatgataaaaatcttcgttgtttggcagtgttttatttgctaaaaatagataacgatgtcttatgtctttgtactcataagtgatgcaaaattgtcttactactactttgcatatataaggtttcagttgttt

SEQ ID NO: 24304 - DNA, 1001 bp, Zea mays
  Clone ID: LIB3608-026-F8_FLI
cgactcgctcgggccgcccctcccgtcgtccccgttcgaaggtgcggcagccggcaggcgagcgatttcattcgacatgaatcccgagtacgactaccttttcaaacttctgcttattggtgattctggtgttgggaaatcatgcttgcttctcagatttgcagacgattcttatttggacagctatatcagcacaattggggttgatttcaaaattcgcacagtggagcaagatgggaagaccataaaacttcaaatttgggatactgctgggcaagagcgcttcaggacaatcactagcagctactaccgcggagctcatggaatcattattgtatatgacgtgacagaccaagaaagcttcaataatgtgaagcaatggttgaacgagatagaccgttatgcaagtgataatgttaacaagctccttgttgggaacaagagtgaccttactgccaacaaagttgtggcaactgagacagcaaaggcgtttgctgatgagatgggcatcccattcatggagacgagtgccaaaaacgccatcaacgtggagcaggccttcatggctatggctgcatccatcaaggataggatggccagccaaccagccgcggccaacgcaaggccagcgaccgtgcagatccgcgggcaacccgtcaaccagaagacgtcttgctgctcgtcctaagattgcctcatttctttggttccttgtgactatttctacggtttgtgcgcgcacgcaaatgtatttgcattattcctgatagcatctattcgttggccagatgattagagagctgaaaatatgttaagaacaataccatagagagaagttcctcagtgctctcgcagcttaaggagcaaacagcaacactttacttcgttttttatactttattatagccgcactgtttattactcgggctacatttgtgaacagcgactgtaatatttttttactctatattcgtagtgagatgaaatcctgtgtgggcaac

SEQ ID NO: 24305 - DNA, 1429 bp, Zea mays
  Clone ID: LIB3608-026-H3_FLI
tgcccaacccaaccgctgcttttatttatacacctcctttggcctcttgcatcatcagctagtttacttgcgctgggcaagtctctagtgccagcttgtttacttgtagatccaggctctctcctctccaagcctttagcacagcaaagtcccagtgccatccctgttctgccgttgtatgtgaaccctcctatgcaatagcaagatctccatctctctcagctctctccagtttcatttccactcaagagttgagcacggatgaagaggccgaccagcagaggttcttcaatggtcagcgggcaagcaaccacagatctacaagaagatagctgcaggtccatggagccgcacggagtggacggcgatgctacggccgcggctgagcgcgacgacgtggacgccggggcgtacgacgaggaggaggacgaagaagaggagctcgcagggtcccgcggcggcctcggggagaagaagcggcggctggcagcggatcaggtgcgcgcgctggagcggagcttcgaggtagacaacaagctggacccggagcgcaaggcccggatcgcgcgcgacctcagcctccacccgcgccaggtcgccgtctggtttcagaaccgccgcgcgcgctggaagaccaagcagatcgagcgcgacttcgccgcgctccgcgtgcgccacgacgcactccgcgtcgagtgcgacgcgctccgccgcgacaaagacgccctcgccgccgagataaaggagctgaggggcatggtggaaaagcagatggaggtgaagctggagtccgcggcggaggagctgctgccggtggcgacgaggtcagcagcagcagccgctgtgtataacaaggacgggtcgacggacagcgactcgagcgccgtgttcaacgaggaggcgtcgccctacccttactccggcgcggccttagaccatcagcagcagcaagaaaccagccacccgctgggcttcacgggtttcacctccttcttgacgtcctctttcccttccgtataccatggggattcgcatttggaccaggaagcggacggcttcttcagcgccgccgccgccggcgacggattcttcgccgaggagcagagcgcaggcatcggcagctggtacggcggtgagggttggtagaacagcaacagctaagctgttggctgcctggaggctggagatcactcttggtatcgtatctaccattcttgtaaaatatggcgctgtacattatattatgcatgcatgggtccgggacgcggtaactatatactactatgtagagttaatttatatggagtagttaatttctgtatttttcactggcgggctgaaagcctgaaacacgggctacgagaggagataggccgggtaatacggttattgttctataaatcttggttgacatgcagttaatttttag

SEQ ID NO: 24306 - DNA, 1344 bp, Zea mays
  Clone ID: LIB3608-027-A7_FLI
tccgttggtgctgctggtgccttgtggtcgagcgatgtcgaacgccgccgacgtggaggcgggcgcccaggcgagggcggcgccggcgacgacggggatcaagccgcccccggggcggtacaacaacatgaccagcaacgggccgtacacgccaccgtcgccgttctactacgaccccgcggcggcgcacgggcggcaccactggtcgtggctggtgccgctggtggtcatcgccaacgtgctcatgttcgtgctggtcatgttctacaacaactgcccgcgcagcggcggggactgcgtcggccgcggcttcctccgccgcttctccttccagccgctcaaggagaaccccctcctcggccccacggccgccacgctgcagagatacggagccctcgactggtacaaggtcgtgcacgggaaccaggcctggcggctggagtcgtgcacctggctgcacgccggcctcatccacctgctcgccaacatgatcagcctcatcttcatcggcgtccgcctggagcagcagtttggattctggaaggtgggcctggtgtacctcgtctctggcttcggagggagcgtgctctccgtcttcttcatcaggaagggcgtctccgtgggcgcctccggcgcgctcttcggcctcctgggagcgatgctgtcggagctcatcaccaactggtccatctacaccaacagatttgcagccatgctgaacctgatcatcatcgccgccatcaacctggcgctcgggatactcccgcacgttgacaacttcgcgcacatcggcgggttcgccacaggcttcctcctcggcttcgtgctgctgatccagccccagttcgggtggctggagcagcccttcggtgccaagaccaagtccaagtacaaggcatatcagatcatcctcctgcttgctgccctcgtcttgctggctgcagggttcgctgttggattggtaatggtgttcagaggagagaacggcaacgatcactgtagctggtgccactacctgacctgcgtgccgacgtcaagctggaagtgtgacaattgaactgatcagagattagtgacgggttagcatgcttgcgtcgtacagaagagaacatgcgtccccaccacgagagacaatgtcaagatagatacgtgcccctcaccttctatgacattgtcaatgtattgctttcaagtttgatttttaaagtctgcattgtacagaattctcctgcctccattggatccaaatgaggagtttattggtattttttcttgtatatgttaaaaaaaactctgtaaatcactctgcctgtgttctggtttatggttttattcattgatttc

SEQ ID NO: 24307 - DNA, 2761 bp, Zea mays
  Clone ID: LIB3608-027-C9_FLI
agcaaagggcgatgggcaggcagacccgcgcggccatcctcctctagaaccttccacggccccacctcctccttcgttcctccgctcaccccaaccctcctcggcgagtcggctcctccctccacgcctctcctcgtcgacgagcggacccggtccacgcccccgacccccacccccgtccccgacccctccccgccccgctccctcccgatcccagatcccgccctccgatccggccgcgaccgtggtgggttcggtctccctctcatcggggcatcagccatggatcagagccggcgggcggtggattcgtactggcgatcgcggatggtggacggtgtcacggccgacgacgacaaggtcgcgcccgtctacaagctcgaggagatctgcgagctcctgcgcgcctccgacgccagcatcgtcaaggaggtcgccgatttcgtcctcaagcgccttgacaacaagagccccctcgtcaagcagaaggctttacggttgatcaaatacgcagttggaaaatctggtactgatttcaagagggagatgcaaaggcactcagcggctatgcgccaactagttcattacaaaggccaccctgatcccttaagaggggatgcccttaataaggctgttcgcgaaactgcgaatgaggctatagctgcaattttctccacagaggaccctaaacctgctgttgcaaccgaaagtcttggcaagcgcatacagggctttggaaatactaattacgagccatctagagatgacaagaagtctttccttagcgagcttagcgaggtagtgggtattggaagtgcatccattaagcaggggttgagcaactttgctgcagcgcatgcaatgatgacaaatgacaatggtagcacatacaggagccctaatctccgtagatctttgaccacggaatctgaaagatatggtcggtatgatccaagtgaaattcaacgtgagagccgagcctcatctgatgcttcaaagaatgcaccttctggtccttggggtccaacttccagttctacaccaactgatgaaactagctcaagtcaaccagggattaagactcgtgaagaaagacttctagagacaattgttactgcaagtggtgtgcgattgcaaccaacgcgagatgctctgcaaatttttttcgcagaagcttccaaattggatgcagttgccttgagccgtgcacttgagggcaaactgaattctccattatggcaggttcgcatgaaggctatttgtgtgttagaagccattgtaaggaaacaggatactgatccttactctatcatcgcttcatatttcactgagaacacagcttctgttgttaaatgctctgagctgccacaggtttctctcagagagaaagcctcaaaggtcttgaatatgctgattggggaacaacctaccggaaccgcagcaacaaaagctgcgatgcccacacctgttcagatgcctgatttgatcgatacaggtgatcaagatgatctggcaacaagttctggacatgcaagcattgaacagaattctgggaacagtgcatatgtttcttcagttgatgatttgcttggtggtgaacctatttctgatacaagtgtcactgctgatagtaatggaagcgacccatttgcagatgtatcattccatgaggcagagactaaggagactaatgatctgttctcagggttgacagtagaagagaaatcatcaactaccatgcatgatagttcttcggacaaaaatgaattaccagatatctttggcagctcccctgattctttcatccagggtagtgttactgaccaaggaactgtcaatgatttgattgctggcttgaaccttaatggaacaggccatgctcagtctgcagttaaagcagaacccaatagcaacagtggttcacagttctttgatacaaaaaatgagtccggccatgtgccaagtgctgcaacattgaatgacattcttggtcaaaactcgctttaccaacagcagcagactccattgcagtacagctttcctcaacatatgatgctcaatcaatcatttcctggacaacaattaaattatggtgccatggggattcttcttgctcagcagcagcagttactgcaaagttttggaaatttcaatgctggacttgggaattcttctttcaattcgatgaacggtgggaatacatctgtgcttccagatattttcaattcaagtaatcaacctcaaaatcatgttgcagtgatgagcagttcgaagaaagatgacaataaagcttttgattttgtttcggatcaccttgcagcagcacgtggttcgagaaagtgaaacaggaagcaatgaacatgtccagatgctggaaagagctcaagtgcttgatggacataaaagatgggaattccaaaaactgcatctcgtcacagcctcgcagattggatgcgtgattcacacggctggtttggcattgtttgaacacatgagaaggaagggttgttccatacggttggaagacgagatgttgcgttgtgtactatgtatttagacgaagactgttcttttttacgctgaaaaataaattgcatcttccgtctttctttgtgttgtgctccttttctctatcctttttcttttctagaaaaaaagagtgagacactatacgtgtttgttacctgcaggttttatgtttcttttctgtacaagtatatggaggatttttttggtggcaattgtaaagctttggaacgtg

SEQ ID NO: 24308 - DNA, 1475 bp, Zea mays
  Clone ID: LIB3608-027-D2_FLI
ttccccactccaactccaagcatgcagccccgctcggcttccgttgccaggctgccacgccgtcgccgtctcgccgcctaaaacctccctcccccccctcgcaccactccgctcacctctcttcacgccgccgtagccggcgagtagcagcgggtacgtgcctttgcggtgtaccttattggctgagccttccctttgccgaggaagagcacagaagcagggaggtcggcatggcggaggtgcatctaggtctgccaggtccctgggcggcggattacagggagatggccgaccactacaccactaagatcggtggagtccctgattggccaactggtgatatgggcttcaagcccgagactcttcagtgcagcttatgtgggaccaagctttgtcttgttgctcaggtacatgcgcctgtggcaaagctaaacattgaggagaggataatctatgtgcttgtttgcccgacaccagaatgtggacctaaacctcaaagttggaaggttctaagagttcaaaaatgccataatgttatgcaaacagaaggtggtggtgatgaattaggtcaaccgaatggaccttcttctacaagtcttccagaagaacagaatgataaaaataaaattcctgagacaaatgatgacgattttgatctagatgccttagccgaagcacttgaacaagctgcaactttggcatcaaactcaaagaagaagaacaaatcgaagcatgctaatgctcctgtaaaacgtcctgtattgaaggagcaagcatgtgatctgagcatacctgtccttccttgtttttacatacattataataaggaactatatgggggcaaaggcgctgtgggttcaagtagcagtgagttggttttggacaaagaaatcatggatgccgcaaatgacgaagaagaaaaatgggaaggagaaaagtatgagtacgatagagctattggtgctgacagaacttttttaaaattcaagaaacggctggatgcatatccccagcaatgctttaggtattcttatggtggcaagccactgttggctacaacaaaattacaagatcctggcacctgtaggctgtgtggttcaccacgccagtatgaactgcaattgatgtctcctttatcatactttctccatgaagctggagacggttcctcaaattatgcacccagcagctggacttggctgactgttataatatacacctgccccaagagctgctgcccgtcctcatgcggtggaaagccccagagctgttgttggggagcagcggaggaggagatcctgattcaggaggatgaagtcctttaggatctaaccagtgctggttgagaaactattcccgatttgaacatgtaatatgcagtttttttttgttctccaatggttagagttgtaaagctatctgaaattttgaagtgtgttttgttattgtgccctggtatactgcagaactgtcat

SEQ ID NO: 24309 - DNA, 917 bp, Zea mays
  Clone ID: LIB3608-027-E10_FLI
gtcagaccaagcggcacgcacaagcgcacagccacggtgagcagagaagaaacgcatccacagaagggacaaacgtccggagcggattccacattccagtctcggtctcggtccatgggcgcgggaaagggaggagacggcggcgaggcggcgcccgaggccgcgcagcccgtcgtgctgaagatgaaactgcattgcgccggctgcgcgcacaaggtcaagaaggccatcaagcgcgttcccggtgtggactccatagtcacagacgtcgcggcgaacacggtcgtcgtggtggggacggccgacgcgggcgcgctcaaggcgcggctcgaggccaagaccaacaagcccgtggagatcgtctccgccggcggcgcccccaagaagcctcccgccgcggagcccaagcaggacgccggcgccggcgtcggtgagaagaagggggtcaaaagcgcgagccccaacgaggaggagaaagagaaggggaagaagcaacaggcggaggagaaagagagagagaaagagaaggggaagaagcagcaggtggagtcggtgctgctcaagatccgcctgcactgcgacggctgcgcctaccgcatcaggcaacgcatcggcaagatcaaaggcgtcaaggatgtggtgctggaggccaatgccaaggacgaggtggaggtcacgggcaccatggacataccgaacatggtctcctacctcaaggagaagctcaaccgcgacgtggaggccgttgcgctgcccgtaaggaaagacggcggcggcggcggcagcgagggcgagggtgagggcaaggacgacaagaagcacagcggcggcggcaaggacaaggtcgtggccggggcagccggcgacgacaggatggacaagggcaaagggatcgaggcgtcggcggccggtccgtc

SEQ ID NO: 24310 - DNA, 601 bp, Zea mays
  Clone ID: LIB3608-027-F6_FLI
gacaagagttctcctgatatggcaaacaaaaggattcagaaggaactcatggatctgcaaaaggacccaccgacatcatgcagtgcagggccagctggagaggatctattccactgaccatatcaaaggtcctcctctccatcagctcgcttctgactgaccccaacccagacgaccccctcgtccccgagatcgcccacatgtacaagaaccagaggccgcgctacgaggaaaccgcacgggcctggacccagaagtacgcgatgggctagctgattctgtctcgccgaacaatactgtcactggcaagaagatcatcatcacgatgttgtaagaattaagttgaaccggtttccccgtcgtgtgatggtattaagaccaaagttcttgtgcgtgtacagtacttttgaagctggatagtctgaatcctgtgccagaaccaaaggtcttcgctttgttccctgaagagcgtttgtgaccatagaatctgcatgcgtaaccttgccagccaagaaaacagtagctgcttgtatgatgtcgagatgatatagttcagatgggtggaaccgtgcagatgaaacagtccagtggtcttgcgttc

SEQ ID NO: 24311 - DNA, 1115 bp, Zea mays
  Clone ID: LIB3608-027-G12_FLI
atgactgcatctctgctgcatgtgtgagctcaagaaccgggccaggagcgacgcgagggagggagggagcaccgtgatcctcactcagccttcccttctgaccagcggccagtagtgcatctcatcagggaaccaaaagagaagagaagataatataagatggggtgcgtgtcgtccaagatcctagcgaaatcagggagctttcaggagaaggtgagcggcctgggccacgcccacggcttccagaggagcagcgccatcgaggagatcatcctgtccacctccaagagcagcggcgaccagttcatggcgctcctccgcacatcatcccgcgccagctcgtcgtcggccgaggcgcatagccccgcgccgccgccggcagctgctgctgctgctgccaggatcgagacggtcgacgtggccgagctgctcgccggcctggaggaaggcagctgcggaacggcaggcgaggctcaggctccgccgcggccccgcgcgtcggccggtagggccaggagcttccgcacggtggaggagctggacgcgatgctgctactgacgcaacatcagcaggaggacgagaagcttgctacagccacggagggggcagaggcagcacgcgtgtcggagggcgccaagcggagggggcgcgcgcggcatcttggcgagctgcaagtgccgccggcggcggcggcgttcgacttctccaagtccgggagcctgcgggactggctgcggcagggcgggcagaccttctcgccgggctcctacgtcacgcccaggttcggaacgccggcggcggctgagcgcgggggaggcgagcagcagcagcaggaggcgctgctgttcgacccggagctggtggcgcagttggagcgcgccatggagcagctgtcggaggacaggggccgcgtcctggaccagatcctgggctgtaagtgaaggggtccacgtacgtacgtacggcccgctagaaatgagggcgaacgggccgcgaagccgtctctctcctctcgtggagggaggaggctgttgggctgggactgaagattttgtgtgtttattagttggtcgtcgttgtatagatagattaaataaaaaataaacataacaac

SEQ ID NO: 24312 - DNA, 2649 bp, Zea mays
  Clone ID: LIB3608-027-H4_FLI
cgtgggatttgcttgtccgctatgggacgctggttcaagcccctttctcacccgccacactccatcacttgtcgctactcaccagattgccccgcgcccatgctgctgtggccgcctagctcgtgatcctgttctcctacccacaagttgcgattcgcagatctctggcgcagccatcgaatccatcctttgtccttgagtcatacttctgttgcaatttgcgtgctggttcctccggtggtgcatgtgcacgggccatgttcgacgaggtgggtttgagaagttctgttacatggtaatccccgtccttgggcttgtcatggtcgattgggaacagtaggattggttgctgagcatggctggaccggagaagactgttgtttggttcaggagagacctcaggatccaggacaacccggccttggcagcggcggcgaaagggggctctgtcctccctatcttcatatggtgcccctcagactacgggcagtactaccctggaaggtgctcccggtggtggctcaagcagtctcttgcccaccttgggaagtcattagagctgctcgggtgcccactcgtgctgatccgtgcggaggacagcactcttgcagctcttttggagtgcgttcgttccatcagtgccactagagtggtttacaatcgtctctacgaccctatttcacttgtgcttgacaacaaaatcaagaatgagcttccagcccatggaatttctatccaaagtttcaatggtgatttactttacgagccgtgggatgtttatgatgagaatgggcaggcatttacaacctttaacaagtactgggagaaatgtatgagcctacctattgagatatcacaatatcttgcacctacaaggctggtggcagcgccaggtctagcaaatgttcgctgttgttcgattgatgatctaggtcttgaatctagtaaggatgtggaatcaagcaatgctttgctaagcagggcctggtctcctggctggcgcaatgcagagaacatgcttgaggaatttgtgtcttatggtcttccagaatattcagaacatggtatgaaggttgggggaagtactacgtcattattgtcaccgtatctccatttcggggagttgagtgtaaggatgatttatcaacttgttaaaatgcgtcaagtcaagtggcaaaatgaaggaaaatctgaagctgaggagagtgttcgattgttcctacgatcaattggttttcgagaatattcacggtacttatgctttaactacccattcacacatgagagatcatttttaggtaacttgaagcattatccttggctattggatgagggccgtttcaaatcttggagacagggaatgactggatacccattagtagatgctggcatgagggaactctgggctactggttggacacataatcggataagagtgattgtctcaagtttcgctgtaaaatttctacagataccctggatttggggaatgaagtacttttgggatgtgcttctggatgcagacctagaaagtgatattcttggttggcagtacatatctgggagtttgcctgatggacatgagctcagtcgtcttgataatccagaggttcagggtcaaaagtacgatccggacggtgaatatgtaagaacttggattcctgaacttgctagaatgccaacagaatggatccatagtccatgggctgcgccaaactctatattacaagttgctggagttgagctgggctttaactacccaaagcccatagtagaacttcatatggcgcgggaatgtttagatgacgccatctccacaatgtggcaattggacacagctgcaaaacttgctgaactagatggtgaagttgttgacgacaatctgaataatatcaggaattttgatatcccaaaggtggttttgaacaagaaattatcaccaagcacttcatccatggagcacagggtgttgtctactaatggcaaggacgaaaagtcgcagcctactgaagtgaaggccctgtacaaacagattattcgagatgatatgatgaatgactcaaacatggatgacacatgctctactgctaacttgaaagtgacaaggaaaagatctagcagtgatagtgcgttcaatgttccctcatgttcatcctcattagtcatggaatcacggattcatcataatgaacctagttctgttctgtattcaggctacttccagaagacagcagacagagatggcactagtaaggttgaagataatgacagtgaagatagtggtacgagcatctctaggccatccaagaaagctgcttagcattagcgcattgaagatgttgcaaatcttcaatgagaaatatttaccgtcacatgtaatttagttggtgcgtttgtagtgatcatgcaaaagctgttctgtgaattataattagttttacacggcctatccttattccgatagaaggcaatttttgtttggtgaaaaaacatcgctcacggacaggccatagtttgctgtcgctgctgaacagcctaatgcctggtgtaaatgactcatcaacgttacgacactattagcgctggttggttttgctatcaatccgtattcatggattgggtaagattgagtagatttaaatatcaaat

SEQ ID NO: 24313 - DNA, 732 bp, Zea mays
  Clone ID: LIB3608-027-H9_FLI
ggcttctcctccccctcttaccaagtcctcctcgggttagggttccttagggttttgtggaggggcgatggcggcggctgatgtggagtaccgttgcttcgtcggcgggcttgcctgggccaccagcaacgagtcgctggagaatgccttcgcctcctacggcgagatcctcgactccaaggtcatcaccgaccgggagacggggaggtctcgcggcttcggcttcgttaccttctcctccgagaactccatgctcgacgctatcgagaacatgaacggcaaggagctcgacggccgtaacatcaccgttaaccaggcccagtcccgtggcggtggcggtggcggcggtggctacggcggcggtcgcggcggcggcggctatggtggcgggcgccgtgacggcggttatggcggcggtggcggctacggcggtcggcgcgagggtggtggcggcggctacggaggcggtggcggctacggcggtcggcgcgagggtggtggtggcggctacggcggcggcggcggcggctggagggactgatgtgtgggcccatcctggcttcggccgagttatcttatctatctatagtatcgtgttaccgttcgcttctgtcaccgtgttagtgtccgttctacctttggattaggtgttggtacccctgttgttccctttgtttgctcccgctatgaaacgagacgagagaagaatgagcaaggtttttgttcgcagct

SEQ ID NO: 24314 - DNA, 740 bp, Zea mays
  Clone ID: LIB3608-028-A12_FLI
gctggcttctcctccccctcttatcaagtcctcctcgggttagggttccttagggttttgtggaggggcgatggcggcggctgatgtggagtaccgttgcttcgtcggcggacttgcctgggccaccagcaacgagtcgctggagaatgccttcgcctcctacggcgagatcctcgactccaaggtcatcaccgaccgggagacggggaggtcccgcggcttcggcttcgttaccttctcctccgagaactccatgttcgacgctatcgagaacatgaacggcaaggagctcgacggccgtaacatcaccgttaaccaggcccagtcccgtggcggcggcggcggcggcggcggcggtggctacggcggcggtcgcggcggcggcggctatggtggcgggcgccgtgacggcggttatggcggcggtggcggctacggcggtcggcgcgagggtggtggcggcggctacggaggcggtggcggctacggcggtcggcgcgagggtggtggtggcggctacggcggcggcggcggcggctggagggactgatgtgtggccccatcctggcttcggccgagttatcttatctatctatagtatcgtgttaccgttcgcttctgtcaccgtgttagtgtccgttctacctttggattaggtgttggtaccccttttgttcgctttggttgctcccgctatgaaacgagacgagagaagaatgagcaaggtttttgttcgcatc

SEQ ID NO: 24315 - DNA, 787 bp, Zea mays
  Clone ID: LIB3608-028-B2_FLI
caaacttctttctcgccttgcatcggccgccggccctccatccaccgcaccagctagcaacgacgacacgctagccaggtagcgtagccgaccagcctccgcgcgcgcgggcactcagttcgccatggcgcgcctgctccgcgccgccgccggcctcgcgctcctcctggccgtccttgccccggcggcgtcggcgggcggcgacctggcccagctgggcgccgccgtcgtgacgcggcgcggcggcgggcggacgacgtgccgcggaggcacggtgggcgagtgcatggagtacctggacgtggacgcggagggcgaggccgacgtggcgggcatggccaccggcggcggcaagcgccgggtgctgcagggcggctccggctacatcggctacgacgcgctgcgcagggacaacgtgccgtgctcgcagcgcggcgcgtcctactacaactgccagcccggcgccgaggccaacccctactcgcgcggctgcagcgccatcacccagtgcaggggctgatgcctgcctgatgatttccgttccgtttcgtccccagctattagtcgggtcttcaatttaaagaagaagacatgcatggagcgatgtcgtcgtctttgctgtgcgcgctatagcctttctcgtccgcctgaggcacgcatgactcgtccgtcgattattgtgctgcagtggacatgtgtatgtgctcctgtttctagcatatccccttgctttcaggaagaaagtgaaagtaattatatatatgatgatcgtgtaataattttcgtc

SEQ ID NO: 24316 - DNA, 1255 bp, Zea mays
  Clone ID: LIB3608-028-C1_FLI
gtaaaatatggatatggggagggtgtcaatgggtaatacccattacacccatacccactctaaacatgagagatggtgatggtgaaggagatatgcgggttcagtgaggcggagacggcaaggagaaaaggatggtgcagacaattgctgagtaggcatcagctagtcagccgaggccgggtgatgcacatcggcggcacggaagaatgccagcatcactgcccagcagttccctggcaacaacttatatctcagttctctgtgtgctctccatattgatcttttgttcaattgaatatcttctgttgatgtcaaatgcagcaccttgatcaggaaggtattagtttttgctgtcgaacaacttatgatgataatgctattacaaatgcggttgagatatttaatacctctagtggcgccgttcacttcatggcatcaaataacgactctggtgtgagatactatgacatggagagattccagctattcaagcattttcagtttgaatggccagtgaatcatgcttcgttgagtcctgacagaaaggtggttgttattgtgggtgatgatcctgatggtctacttattgatgcaaactctggaaagacagttcattccataaaaggacatcgggactactcatttgcatcggcttggagccctgatgggcgaacatttgctaccggcaaccaagacaagacatgccgaatctgggacgtgaggaacctttcaaaatccgtccatgtgttgaggggtaaccttggagccatccggtccatccgcttcacctcggatggccagttcatgtccatggctgaacctgctgactttgtgcacatctacgacgtgaagagtgactacaacaaaaggcaggagctggacttctttggcgagatatccggcacatcgttcagcccagacactgacacgcttttcgttggtgtgtgggataggatgtatggcagcctgctacaatttggccgcctgtacaactactcgtatcttgactccctgttttgatgtggatccaaacgggtgttgaactgttgggttttggtgtacctcagtgctctgaatgttgtcagcataaattaggtggttatccctaatcaggatattaagttgcaaagataattgaattaataaatgttgtaccgtgcccgatgtgtatatgtaaaaagaaatgtatacatgtgcctattgagagaccgagttgagatgtgacttaggggttgtttgtttgggattataatct

SEQ ID NO: 24317 - DNA, 979 bp, Zea mays
  Clone ID: LIB3608-028-D9_FLI
ctaaaacccgcgatctgaagcgactagtcgaaggcggcggcggcggcgatggggagcgacctggagacggagaagaagaagaccccggtggcgctgatgcccatcgcgaagcctctcgctggaaagaagctctgcaagcggaccctcaagctcgtgcgacgagcctctgaggccaagtgcctcaagcgcggagtcaaagaggtagtcaagagcattcgccgcgggaacaaagggttgtgtgtgattgctggaaatatttctcctattgatgtgattacacacgttccaatactatgtgaggaatctaatgttccttacatatatgttccatcaaaagaggatcttgcgaccgcaggaaccactaagaggccaacttgttgcgtcctggttctgaccaaaccaaacaagggggagctcagtgacgaggtgaaggataaactgaagtcagactatgaccaagttgtaacggaagttgctgaggctacatctgcaatgttctaaggaccattcagggaccacatcatctgagaatcatgcagctacattcttggcgtactatgtaacctgatccctgtcagtctgccctgcttgcgtgaaccgcaccagtatgctttgcatggtggctggagggatatgactatatgagtttacctatatattatggactatccttgttggcgtattgttttattaacgattatatttagccagttataatccgttaggtgagcagattgtttgcttgggttaccagatcttggtagccagtgggtgcggttccaggtcttctgttgatgacttatcacaagatgtgcttgtgattcccgtgtatgaggaattgcgacatcgtagaggcgtaggctatgttcagtagatcgtgccttgcctcgtgtataataatactgttttgtatcgtagacaatattgtttacagagatgatgatgagtaagctgctggacatagccagtgccttatatc

SEQ ID NO: 24318 - DNA, 1861 bp, Zea mays
  Clone ID: LIB3608-029-C11_FLI
gcgagcgtctctcctcttcctctcccacgcaccgcgccaaggaaggcagagagagatcgccgctcctcttctctccgtcggtggtgcggttgaccgccctcctcgagcgagatctcgctgcagtccctcgagatctggtcacagatctatccgacaagatggtgaagatctgctgcatcggtgctggctatgtcggtggcccaaccatggcggtcattgccctcaagtgcccagacattgaggttgtcgttgttgacatctccaagccccgcattgaggcatggaacagcgacaccctcccgatctacgagcccggcctcgatgatgttgtgaagcagtgcaggggcaggaacctcttcttcagcactgatgttgagaagcacgtcgctgaggctgacatcatcttcgtctcggtgaacacccccaccaagacccgtgggcttggagctggcaaggctgccgacctcacctactgggagagcgctgctcgtatgatcgccgatgtctccaagtctgacaagatcgttgtcgagaagtccaccgtccctgtcaagaccgctgaggctattgagaagatcttgacccacaacagcaagggcatcaactaccagatcctttccaacccggagttccttgcagagggcactgctattgaggacctgttcaagcctgacagagtgctcatcggtggccgggagacccccgagggcaggaaagccgtccaggctctcaaggatgtgtatgctcactgggttcccgaggacaggatcctcaccaccaacctgtggtccgctgagctctccaagcttgccgccaatgcgttcttggcacagaggatctcctctgtcaatgccatctccgctctctgcgaggcaaccggagccaatgtctctgaggtggcttacgccgtgggcaaggacacgagaattggccccaagttcctgaacgccagtgttgggttcggtggctcatgcttccagaaggacatcctgaacctggtgtacatctgcgagtgcaacggcctgcccgaggtggccaactactggaagcaggtgatcaagatcaacgactaccagaagagccggttcgtgaaccgcgtcgtggcctccatgttcaacaccgtcgccggcaagaagatcgccgtcctcggcttcgccttcaagaaagacaccggtgacaccagggagaccccggccattgacgtctgcaagggcctgctgggcgacaaggcccagatcagcatctacgacccccaggtgacggaggaccagatccagcgggacctggccatgaacaagttcgactgggaccacccgatgcacctgcaaccgacgagccccacggccattaagcaggtgagctgcgtgtgggacgcgtacgaggccaccaagggcgcccacggggtgtgcatcctgaccgagtgggacgagttcaagaccctggactaccagaagatcttcgacaacatgcagaagcccgccttcgtcttcgacggccgcaacatcgtcgacccggagaagctgagggagatcggcttcatcgtctactccatcggcaagccgctcgacgcctggcttaaggacatgcccgcggtcgcttaattcgtctgaggtgctccattggattggatccggggaaggaagaggaactggttgaccattcttcattacagtttgttttttgcaggattcttaaaagttggacggcgctgctagtattccatgtttcgtgttttcatattggaggacgtctgtagatgtaaaaaatcctcgggcgcttgtgctcggcttgaggaaatatgcttgtacggttgtaccctggacccgctatagctggttggttcttcaagttgtgttcctat

SEQ ID NO: 24319 - DNA, 1539 bp, Zea mays
  Clone ID: LIB3608-029-C5_FLI
gtttttcttaagtttcttcttgataaggatccaatcaaacaactacttgaagcagatgagagaaaaatcaccacaagttcactgtttgctgctggaacttggtcggtaggttcatttaataatattctaacagactttaaaacccagcagcaaacagtgaacttgtggtgatttttcttaagtttcttcttgataaggatccaatcaaacaactacttgaagcagatgagagaattgagtgtgatatggatactgcaagacatgtagaacagctagtagtttttggaggatttacagacacccaatttttggaaaagagtttggtaaatcaattcaatgaattggaagatagcttgaaggaggctttcttgatgccatttactgctatctcttcgcagatacaatgtcaaggattgcttcctttatatcctgttacatcatcagctaccttgtcatcatcctgctcgccaacatcaatatcattttataaggatgaagattcatcgcatgaggaatcctcctatagcttgactgactatgtatgcttgaagatacctgatggatcattaaataaagtaaattgcatcggtgtgataaagggctctggtaactgttgtactaccctcagcatgatgtcactttcaggttttctgttgcatatacctgacggatatgagtgtgttgacctgtcactttataaggacaaccaggtagttttactactgagtgaaacgtcttgttctgatagccctggaaaatcttggatggtgatgctgcaaatagagaacttttcctttatgccactctcaggaacattccctgcaaatatttacagtttgcaaaaactggtggcactcgatctgcaattggacacagattatgggaaagttcgtagcatacctcacaccgtatctactccatttgcagttagtgcatcgagaggagtagcctgtgtcttttcatcccggaggcatgccttggtttatatccttgatgaggatgaggaagcggagggggatgaaacttccgatatggagtgattattatccgattccttcaccttcggctcagccatttcagcttcaggcttcagcattgtcttatgtcttgttgcaatggaggcagaggcccggagatatcaatatgtacggaaacgtcgtctcattttcacggcaatgcatgcccgggttcagaagctacgtcgcgtggtaacagcctaacaggtcaccacgcacgcgcagccgcttttagagctcatgaaattgtcagtcgtcaccctgatgtgtgtaggccctgcaggttggacttcatcgtggttatttggaaagcgagcaaaattgtacacccatttctgatcgtgttgtgttatacgagtgcttgctagttgtgtaaaaaatctagaggtaacgtcaacgtgcaaaaaaaaagggtctgtcgcaaatcttgacggtcactagagctatcgcatttctaatcgtgtttgtgttatgtggattcattattttattgttcgagctgctaatgtacttggtaaaatac

SEQ ID NO: 24320 - DNA, 592 bp, Zea mays
  Clone ID: LIB3608-029-D11_FLI
gttcaggtttgcatatggatataccttgggataaatgataatgctgtggtcgagctagccagcaaaatattcatcgtagctgtctccttcgttgcgcttcttggcttttcagtatatggtggaaggttatttgtcttgctgagacgtttccctattgaatctaaggggcggcaaaagaagctttatgaggttgggactgtgacagcaatttgtgttacctgcttcctgataagatgtgttgtggttgcattatctgcgtttgatgccgatgtatctctcgaggttttggaccatccagttctagatttcttctattatatgcttgcggagatactgccttctgcgctagttctcttcgtccttcggaagcttcctcccaagcgggtttcggcacaataccaccctattaactagagagttttttttttatgatgttacatgctaagaactccggataatctgaaactactggaaacctacagccggctgtagttggatgcttttgcttgtgctgttatgtttatggaagcatcagtgttggcgatgaatataatgacgatcattctatatggggaagtggtgctaatgaatg

SEQ ID NO: 24321 - DNA, 610 bp, Zea mays
  Clone ID: LIB3608-029-E4_FLI
cagtcttgtcttgatgatacctggttcaaaaagctcgtcgggaagaggagcaaaacaaaccctatctaaaccgcggcggactcttcgtccagcaaggtttcccatccagatccggccacgccacttgctcctcttctccgccacaccgatggtgtacgtggattcctgggacgagttcgtggagcggtccgtgcagctcttccgcggcgaccccaacgccacccgctacgtgatgaagtaccggcactgcgaggggaagctcgtgctcaaggtcaccgacgaccgcgagtgcttgaagttcaagacagatcaagctcaagacgcaaagaagatggagaagctcaacaacatcttttttgctctcatgacacgtgggcctgatgttgatatcagtgaagtttcagggaaggaacaggcagagcaacagcaagcgaagaaaggtcggggaaggaggcaataatgcggtctgatccttatttgttacagaaaattcacaactggaatgatggattaacatttcattgactttttgtactctgaagaaagtttttccagtacagaaccgagaacaaactaaatgcactctatcatgaatgaatgcatgattgag

SEQ ID NO: 24322 - DNA, 976 bp, Zea mays
  Clone ID: LIB3608-029-G2_FLI
tccctgccgttccccttcttcagttctcccgctgctgctgccgccgccgctctccgtccgcgtccagatcccgccaccccaaccgatctgccggcctccagcatggcggcgggggcgggggcgagggcgaaggcagcgggagccctggcgctggcgctcgtgctcgcgctagcgggggccaactccgagggcgacgcgctctcggcgctgcgccgcagcctcagggaccccggcggcgtgctgcagagctgggaccccacgctcgtcaacccctgcacctggttccacgtcacctgcgaccgcgacaaccgcgtcacccgcctagatcttggtaatttgaacttatctggtcatctggtgcctgagcttgggaaattggagcatctgcagtacctggaactttacaagaacagcattcaaggaacaatcccttctgagcttggtaatttgaagaatctaataagcttggacttgtacaagaacaacatttcggggacaatacctccttcccttggaaagttgaaatcccttgtattcctgcggctcaatggcaatcatttgactgggccgatcccaagggaactttctggaatatctagtctcaaagttgtcgatgtttcaagcaatgatttatgtgggacgattcccacatctggaccatttgagcacattcctctgagcaactttgagaagaacccacgcttggaaggtccagagctacaaggcctggccatatatgacaccaactgctagaaggggcaccacgaacaaaagaatcgctagaaagtaatgggcgaacaaggttaccatatattaggtctggttctgctgccactctgtaatcccccctgcatagctcttatttgtaacttgctgtctgcacgaaagttggtggatgttttagcagaatgctttctgcccgtgaaagtaaacttgaaactgcttattatgagtgaaatgatgatgttatttccct

SEQ ID NO: 24323 - DNA, 771 bp, Zea mays
  Clone ID: LIB3608-030-A11_FLI
caactacccccagtctcggaagagaactatccagaagcgcaagactccaaagccgtcgccttcctatccatcccttcctcgccgcgggggtcgcctgagatcacataaacaatggtgaaggctgttgctgtgcttggtagcagcgatggtgtcaagggcaccatcttcttcacccaagagggagatggccctaccactgtcaccggaagtgtctctggcctcaagcctggcctccatgggttccatgtgcatgcacttggtgacaccaccaatggctgcatgtcaactggaccacactacaatcctgcgagcaaggaacatggagcaccagaagatgagaaccgccatgccggtgatcttggaaatgtgacagctggagcagatggtgttgcaaacattaatgttaccgacagccagatcccactgactgggccaaactcaatcattggcagagctgttgttgttcacgctgaccccgatgatcttggaaagggtggacacgagctcagcaagagcaccggaaacgctggcggccgtgttgcttgtgggatcatcggactccagggctgaactgaaacaaatggtcgctggacttcgggggcgcctgagagtgccgtcaccagcaggctagaataacatcccgaagacatcgtgaaataataataagagcgcctgatatgtgatcagtggtgtacttgccattaagcacctgtggcaaccgatgagctgaactgtgttggactgttggctaaaatgctggttcgcctgagc

SEQ ID NO: 24324 - DNA, 1572 bp, Zea mays
  Clone ID: LIB3608-030-B3_FLI
ccgacagcgaatctccactggcactactgctccgagcccgagacgaataatggcgggggcggcagcggcggcagtagctgtgctggtgctcgccgcggcgcacggcgcgctctgcgggtgctgggaccaccgccgcgcagcgccagcgccgtcgccgtcctgggaccaccgcgggacgaacagcacggcggcgctggagggttgcgggtgcgagccgtcgccgccgccgccgtggaggttcaggaacgacaagctgagggcgctgtacccggtgatccaggcgttcaagcagacgatcacgtgcgacccgctgggcgtgacggcgacgtggacgggcacggagctctgcgacagcttcttcaacaacggcagcaccaccacgtactacaggggattctactgcgactacccgccggacgcgccgggcgtgctgacggtggcgtccatcgacttcaacgggttcgggctgtgcgcgccgtcgctggccgggttcatcgacgcgttcccggacctggcgctgttccacgccaactccaacaacttctccggcgacgtgccggacctgacccagctgcgctacttctacgagctggacctgtccaacaacaacttctcgggcgcgttcccggaggccgtggtgccgctgggcgggctgctgttcctggacctccgcttcaaccggtacgcgggggaggtgccagcgccggtgttcgcgctcacggtggaggcgctcttcctcaacaacaacggctttggcgggcggatcccggacacgctcggcagcacgggcgcgcagtacctggtggtggccaacaaccagttcacgggccccatcccgcgctccatctacaacgcgtcggccacgctgtcggaggtgctgttcctcaacaaccgcctgtccgggtgcctcccctacgagatcgggctggtggaggggctggccgtgttcgacgccggcgggaacgagatcacggggcccgtgccgctgtcgttcggctgcctccgcgacgtggaggagctcaacctggcggggaaccagctgtacgggcaggtgcccgacgtggtgtgcctgctggcgcggacggggaagctgcagaacctgtcgctgtcggacaacttcttccactcggtggggcaccactgcatggagctggtgcgcagccgtgtcctggacgtgcggcgcaactgcattctggggttccccgaccagcggcccccgctcgagtgcgccgccttctacgtcgaccccagcaagcactgccccttcatcccgcacatcccctgcgagctgcctgggtacacggcgcacggccatcctcaccaaggccatgggggtgggaactgatccatggccacccatggtgatttggtagcctttttggggggaggaataagttccactgctgcattcatgacactgggtggggctcgaaaaactccatccgtgacaaataatattatccttttaataagaggtactagttatttacagcggattcatggaacggtaacagtacttatacaaacatatagataatctatgaaatcttgctcttggtgagtcagaaaagc

SEQ ID NO: 24325 - DNA, 875 bp, Zea mays
  Clone ID: LIB3608-030-B5_FLI
gctctcgtccgcccgccccctccgtgaaaccaacgcccctccctccccgcgcgaatggaagttgctcctgcggtgaagcaactcctccccatggcgcagggccccaactccccgtcctcctccaccacctcgccctcgcccgccgcgccgtccccgccgccgcgccagcagcagtcgcaggcgcccgtgccgcgcatcatcgacaccacgcccttccccaccaccttcgtgcaggccgacaccgccaacttcaagcaggtcgtccagaggctcaccggctccgacacgccgccgcctgcccagaagcccgccaagacccacggccaccaccaccaccacggcggcggcggcgtcgggcccaagaagccggccttcaagctctacgagcgccggatcggcaagaacaacctcaagatgatcgcgccgctggcggggccgtcgccgtcgccgcggaaggcggcgccggaggtgctgtcgcccagcgtgctcgacttcccttccctggcgctcggtagccccgtcacgccgctgctggccgaccccttcaaccggtcggcgtcggcgtccccgggcgagcaggacgaggccgaggccgcggccatcgcgcagaggggcttcttcctgcacccctcgccgaggggcgccgtcgagccgccgcggctgctgccgctgttccccgtcacgtcccccaagatggcgcagtgatcggggcgggcccccgctgccggagaattcctagtactgccgcttgagatactacttgttcaattaactacttggtgcgtcatgtattttttttttgtttttttttgctcatggtattcaactcttgagcgatcgcgaaggaacggaaagaatgatcacactcttgagct

SEQ ID NO: 24326 - DNA, 1619 bp, Zea mays; identical to SEQ ID NO: 24202
  Clone ID: LIB3608-030-D7_FLI

SEQ ID NO: 24327 - DNA, 1057 bp, Zea mays
  Clone ID: LIB3608-030-G2_FLI
gtcgtgaccagagcgcgagagctagctagagggccgtgaaaatgccgatcaataggatcgccctggggagccaccaggaggtgtaccacccgggcgccctcaaggcggcgttcgctgagttcatctccaccctcatcttcgtcttcgccggccagggctccggcatggccttcagcaagctgaccggcggcggcccgacgaccccggcgggcctgatcgcggcggcggtggcgcacgcgttcgcgctgttcgtggcggtgtctgtgggcgcgaacatctccggcgggcacgtgaaccctgccgtgaccttcggcgccttcgtgggcggcaacatcaccctgttccgggggctcctgtactgggtggcgcagctgctggggtccaccgtggcgtgcttcctgctccgcttctcgacgggcgggcaggccacgggcaccttcgggctgacgggcgtgtcggtgtgggaggcgctggtgctggagatcgtgatgaccttcgggctggtgtacacggtgtacgccacggcggtggacccgaagaagggcagcctgggcaccatcgcccccattgccatcggcttcatcgtgggggccaacatcctggtgggcggcgccttcgacggcgcgtccatgaaccccgccgtgtccttcggccccgccctcgtcagctgggagtggggctaccagtgggtgtactgggtcgggcccctcatcggcggcggcctcgccggcgtcatctacgagctgctcttcatctcccacacccacgagcagctcccctccaccgactactaaaagccgaagccgaccgacctaggggtgcgcagcgcagctagcgcatccagctctctctccccgctcgccgccgtttagtttctctcgtgcacgtgcatgcatcgtcgactgtctcaggccgccgctgcgccggcgccgctcgcatcgtttgcttccttggaccagcagtcgtcgccgtcaggctgaactgcttgtaaccgtgaattccggacccgtttgcttctgtaagatttgtgcatttgcctgagtacacctcgatctgc

SEQ ID NO: 24328 - DNA, 1664 bp, Zea mays
  Clone ID: LIB3608-030-G3_FLI
gccttctgcgcctccatttcggcctctgtcccttgcaagttcaatctcacctccaaccatgggtaaagagaagtcccacatcaacattgtggttattggccacgttgactctggcaagtcgaccaccacaggacacctgatctacaagcttggaggcattgacaagcgtgtgatcgagaggtttgagaaggaggctgctgaaatgaacaagcggtccttcaagtacgcatgggtgctcgacaagctcaaggctgagcgtgagagaggtatcaccattgatatcgctctgtggaagtttgagaccaccaagtactactgcacggtcattgatgcccctggacaccgtgacttcatcaagaacatgatcactggtacctcccaggctgactgtgctgtccttatcattgaccccaccactggtggttttgaggctggtatctccaaggatggccagacccgtgaacatgctctccttgcgttcacccttggagtgaagcagatgatttgctgctgcaacaagatggatgcaaccactccgaaatactccaaggcacgttatgatgagattgtgaaggaagtctcatcctacctcaagaaagttgggtacaaccctgataagattgccttcgttcccatttctggttttgagggcgacaacatgattgagaggtccaccaaccttgattggtacaaaggcccaaccctgcttgaggctcttgaccagatcaccgagcccaagaggccttcggacaagcccctgcgtctgcccctccaggatgtgtacaagattggtggtattggaactgtaccggttggtcgtgtggagactggtgtcatcaagcctggtatggtagtcacctttggtccaactggcctgactactgaggtgaagtctgttgagatgcaccacgaggcgcttcaggaggctcttccgggcgacaatgttggcttcaacgtgaagaacgttgctgtcaaggatctcaagcgtgggttcgtggcctccaactccaaggatgaccctgccaaggaggctgccagcttcacctcccaggtcatcatcatgaaccaccctgggcagattggcaacggctatgccccagtgctggactgccacacctcccacatcgccgtcaagtttgctgagctcattaccaagatcgacaggcgatctggcaaggagctcgagaaggagcccaagttcctgaagaacggcgatgctggtatggtgaagatgattcccaccaagcctatggtggtggagacattctccgcgtatcctcccctgggtagatttgccgtccgtgacatgaggcagacggttgctgttggagtcatcaagagtgtggagaagaaggacccaaccggcgccaaggtgaccaaggcggctgccaagaagaaatgatgcgataccgtgtctgcttttgcagtgcctggataacttgccactaaagttgtgtatgcggttgttgctgttattgcgtggactgtttgctgcggtgtctcctgtttgtttgggtagcgcagcgtcggcctcttcaggttactgttgtctgttgtctttactatcagtaatgctcctgagacttgtatttctccttttggcgccgctaaatggaattttcgaacaatgattttcgtgttattattttacaaccttttcgaac

SEQ ID NO: 24329 - DNA, 970 bp, Zea mays
  Clone ID: LIB3608-030-H12_FLI
ccctctcgtcgccgtcctctcccgttcgcaacgccacgctccccaccgccgaaatggccccgaagcgaggtggcagggcaccggtgccggccaagaagaagacggataaagtgacgaaccctctgttcgagaaaaggccgaagcagttcggcatcggcggcgcgttgcctcccaagaaggacctgcaccgattcgtcaagtggcccaaggtcgtgcgcatccagcgccagcgtcgcatcctcaagcagcgcctcaaggtgcctccggcgctcaaccagttcacccgcaccctcgacaagaacctcgctaccaacctgttcaagatgcttcttaagtaccggcccgaagacaaggctgccaagaaggagaggcttctgaagagggcccaggctgagaatgaaggaaaaactgttgaatccaagaaaccaattgttgtgaagtatggccttaaccatgtgacttacctcattgagcagaacaaggctcagctcgttgtcatcgctcatgatgtggatccgattgaactggttgtttggcttccagccctgtgcaggaagatggaggtcccatactgcattgttaaaggaaaggctcgccttggatcgatcgttcacaagaagactgcatcagtcttgtgtctgaccactgtcaagaacgaggacaagcttgagttcagcaagatcttggaggctattaaggcgaacttcaatgacaagtttgatgaagtcaggaagaagtggggaggtggcatcatgggctccaagtcgcaggccaagaccaaggccagggaaaagttgctggccaaggaggccgcccagcggatgacgtagattatccactgttgagcttgcccctgtagtttgacgtggaagaaccgatgagcattgtgcactcgtattgtgtttttttgaatctactttcatatgtttctgtccatcagaccgtgtttagaaactttgaaagacagttc

SEQ ID NO: 24330 - DNA, 621 bp, Zea mays
  Clone ID: LIB3608-030-H7_FLI
tgaacgcgctggcgaactggctggcgaacccgcgccgcaacccgctggcgcgcctccacatgcacgccgtctcctcgcgcctcaggaaatacggactgaggtacgacgacctctacgacccctacttcgatctggacatcaaggaggcgctcggtaggctgcctagggaggtggtcgacgcccgcatccagcgcctcaagcgtgccatggacctctccatgaagcaccagtacctcccggaggacctccaggcacagcaggttccattcagaggatatttgagtgacatgttggcgttggtgaaaaaggaaagcgccgagcgtcagtcactgggagcccttccactataccagaggacacttccctagggtgctggatagacatggtcgcaagtattctacctctttaccgcaaatcagaacgcatcaaataaaatgcagtggatgaaactgttttttttttgttccaaccaaagtctaattttacttgttcatgccatggtgcattaaccatgggctgtagctgttgttttcagcaaatttgtcttcaaccattattaacctgtgaaatcttcgatcgtgagtgccgttatgacaccgggtgaccggaaatgtcttgact

SEQ ID NO: 24331 - DNA, 1887 bp, Zea mays
  Clone ID: LIB3608-031-A9_FLI
agctgctttagctagctagcaagagagagagagagagagaaaaaatatggctccactcgtcgctactgccacgatgaaccacgctgtggcccatctgctaggacccaatcatgagagtttctcacggcaccatctttcttcctcgctgcagcaaaacagtaagcgaaggtgtaatcttagcttcaggccacgagctgctgagagtcagaatggaagccaaacgctgagcccctcggaagtccctaaaagagactggttcccctctgacttcatctttggtgccgccacttcagcgtaccaaattgaaggtggatggaacgaggatggaaagaagccaagcacatgggatcacttctgccacactttcccagattggatagcggatcacagcaatggggatgttgcagcagattcgtaccacatgtacaaggaggatgtcagattactgaaggaaatagggatggactcctataggttctccatctcttggtccagaatactgccgaatggcacactcgaaggaggtattaatccatatggcatcaagtactacaaaaatctcatcaacttgttggtagagaacggcatagagccatttgtgacaattttccactgggacacgcctcaagcactggtagacaagtatggtggctttttagatgagaggattgtaaaagattacacagacttcgctaaggtgtgctttgagaacttcggtgataaagtaaacaattggttgacctttaatgagccccaaacgttttcttctttttcatacggaaccgggctatgcgccccagggcggtgcaccccaggacaaaaatgtgctaacccaattggaaactcgctcactgagccatacactgttggccataaccttctccgagcccacgctgaggctgttgatctttacaacaagtattacaagggtgagaatggacgcatagggcttgcatttgacgtaatgggtcgtgtcccatacgaaaagtcggcgtttacggatcaacaggccgaacaaaggtcctgggacattaacctaggatggttcttggagccggttgttcgtggtgactatcccttctccatgagatcattggcaagggaacgactacccttcttcactgacaaagagcaagagaagctagtgggttcctatgacatgttggggttaaactattatacctcaaggttctctaaaaacatcgatatctcaccaaactactcgccagtgctcaacactgacgacgcatatgccagtcaagaaacgaatgggcctgacgggaatcccattggtccttggatggggaattcgtggatctacctatatcctgaaggcctaaaggatctgcttatgatcatgaagaacaaatacggaaacccacccatctacatcactgagaacgggatgggtgacgttgaccatggcgatctacccatggaagttgccttggatgaccacaaaagagtacattacctccagcgccacatcgcaactcttaaggagtcaagagacttgggagcgaatgtgcagggctacttcgcttggtctctattggacaacttcgaatggttctccggctacacggaacgttacggcatcgtctatgttgaccgcaacgatggctgcaaacgctacatgaagcggtcagccaagtggttcaaagagttcaatgctgcgaagaaagcggctgccaagaagattcttacgccagcttagaaatcgttgggcctgatgtatggtatggtgccacgcatgaaagaccgggcacgtttttctttgcactatctgaggaggcagcatctgttctctccagcaccgtggattgttcccgccagttcagtatttccttattatgcaataaatgaagtgatcgatttccccttttc

SEQ ID NO: 24332 - DNA, 275 bp, Zea mays
  Clone ID: LIB3608-031-B2_FLI
tccggtgaacccaaagggagagatgaaaggttctgccatcactgggcccatcggaaaggagtgtgctgatctctggcccaggattgctagcgcggcaaatgcgatcgtctaaaggaagcagtttgtcgaagtttcatttaaaatggggacttgagaagggagttcttagttagacgagcttttgattgccctgaatgtgtttccccggctaatgcttgtgctgctggaccgtttcctgatagctttgctttgatgacatcctccccgttatcgat

SEQ ID NO: 24333 - DNA, 861 bp, Zea mays
  Clone ID: LIB3608-031-C8_FLI
tgcggccatggaggacgaggagcacgaggtgtacggccaggagattcccgttgatggcgaggacgtcgacatggctgccggcgacgatgccaccaagctgcaggaacttgacgatatgaagcgccggctcaaggaaatggaggaggaggccgccgcgctccgcgagatgcaggccaaggttgccaaggagatgcaaggtgtagatcccaatgcaaccacatctgaaaacaaagaggagatggattctcgctcagtattcattggaaatgttgactatgcgtgcactccagaagaagtgcagcagcacttcaattcttgtggaactgtcaacagagttacaatcctgactgacaagtttgggcaaccaaaaggttttgcttacgtggaatttgttgaagttgaagctgttcaggaagctatcaagttgaacgagtcagagttgcacggtcgccaactcaaggtggcaccgaagaggactaacgttcctgggatgaagcaaccccgcggtcgaggtttcaatccgtaccatggccacccctacatgaggccgtatggttatagtccttatggttatgggagattccccagattccgccgcccgcgaagaccttatttttgaagctcggttcccatttggcagaacatgggcgataatcggccgcgttctgttatttcatagcttattcgggacgttcccatgcatgtttctgtattgacgatgcttaagctttgtactgtattgtatcagttatgcaagacgattatgatttagttacacgaaatgcactgttgtgatgctacttggggtgcgccacttttgggcctcgaatatgattgtataagctgatgcattatttattc

SEQ ID NO: 24334 - DNA, 718 bp, Zea mays
  Clone ID: LIB3608-031-E1_FLI
cgacatcgtctcttcgtccccacgagcaaccgataatccgccggcgctgagatgttggtttatcaagacctcctatctggcgacgagctcctgtcggattcattcacctacaaggagctcgagaacggcgtcctgtgggaggtcgagggaaagtgggtcacccaaggtcctgttgatgtagacattggtgccaatccatccgccgagggtggtgaggatgaaagcgttgatgacacagccgtgaaggtggttgatattgttgacacattccgtctacaggagcaacctccttttgacaagaaatcatttgtctcttacataaaaaaatacatcaagaatctcactgctgtgttggagccagagaaagcggatgagttcaaaaagggtgtcgagggtgcaaccaagtttctccttagcaagctgaaggaccttcaattttttgttggtgagagcatgaaggacgaagcgtccgtggtattcgcctattacaaggatggtgccactaatccgacattcctctatttctctcatggtcttaaggagatcaagtgctagattagttacccatgttgggtactatatatgttctattgttatagccacaactatagctgccctgcctgaactgaactcaggttttttttaagaaaaaactgtccaagattggattgcttgttaaagctaaatattgttattgacgtgttattgcttagttgtc

SEQ ID NO: 24335 - DNA, 914 bp, Zea mays
  Clone ID: LIB3608-031-E2_FLI
tcgaagcagaagcaagcggctgggcgccaagctgaggtgcgcgggcggcagcagccagcagggatggcgattgtgggcgcggagtactgcgaccccgaggaacgcgtgctgacggtgcgcaagacctcgcacttctcccccggcgacgggttcgcggcctacgaccaccgcacgggcgggctctccttccgcgccgacacctacgggcggggccacggcgggggcgcggcgtcggcgggcgagctcgcgctgctgggcccggccggggagcctctgctcaccgtgcggcgccgccgcccgtcgctgcaccagcgatgggagggcttcctgggcgcccgcgccgacggccagaaggcgatcttctcggcccggcgcccgtccatcctcggcggcgccgcggccggcgccgtcatcgagctcctcccgccggcgccggccgccgcccccgtgctgctccgcgtggacgggtccttcccgcgccggtgctgccgcgtggtgctggcgcccagggccgagggggagaaggccaaggtggtggcggagatcgggcggaaggtggacgagggggcaagggtcgtcatgggccgcgacgtcttcgtcctgcgggtgagccccggcttcgacgccgcgttcgccatggggatcgtgctcgtgctggaccagatcgtgggcgacgagtccggcggcgtcgacgctggggcggacgtcatcgacgccaagcccaaggtttggtgacccatgctatgggttgccccccggccttatcgcgcgcttcttggtttcgctgtgtatagagagcctggcatgcgagatcttgtttccttcccccctttttttaaacgttcgcgtatgagctttgctccggagaactggcaatgcataaatacatggtacatgctcgaggcttttgctgt

SEQ ID NO: 24336 - DNA, 933 bp, Zea mays
  Clone ID: LIB3608-031-G8_FLI
cggcgaagggagcagaaacgttggcgtgttggttgggtggcgtcggcatggacgaggcaacgaagaagaatgtggaggctacggtgctggagatcctccggggctccgatatggagtccgtgacggagtacaaggtccgcgccgctgccagcgaccgcctcggcatcgacctctccatacccgaccgcaagctcttcgtccgcggcgtcgttgaggaatacctactttcactctcctccaaggaggaggcgaaggcggaggaggagggcgtcactggcagggagagcaagggcaaggaacacgaagaggaggacgaagaggatgacgatgaggaggaggatgaaggtaagggtggcgggaagagagagtacgatgaccaaggtgaccttatcctgtgccgcctttcgagcaagaggagggtgactttatcggagtttaagggcaggtcgttggtgtccatccgcgagttctacgtgaaggacggcaaggagatgccctccgccaaaggtatcagtatgactttggagcagtgggaagcattttgcaatgctgtacctgcaatagaggatgccatcaaaaagcttgaagattcagactgaactggttttaagagcctcttcttatgcccgtgtcaaatgaaaaagcctgggaagcatttcgcaatgctgtatctgcaatagatgatgcatgaaaaagcttgaagattcagacagaactggtttaggagcctcttattttgcctgtatcaaataaaaaagcctatttctgacccttaacgagggccatatatgtgtcttgcaagagctaagttctgtaaaagatttctacatgtaccatgtgtaggagttaggatagagtgatagacgtactgctgcatacagttcggaatatttgctagtaacaagtaatctaccattaggtggcctggagttc

SEQ ID NO: 24337 - DNA, 898 bp, Zea mays
  Clone ID: LIB3608-032-E5_FLI
cgagtcagacaactcttcgtctttgtttcttcttctcttctctactgcacatcctcctttcttcttctcctcctcgatcggcaagaagctaaggaggcaccattgcttatcgtctgatccccgcggggcgcgtgtcgctgcacaagatgacgacggcaacagccggtggcagcgtcgccgaccgcatcatgccgcacctcctcaacatatatggatcgtccgcgacggcacgggacttcgagatttacgcgccaaatgcgacgtttgaggacccgctcatgcgagctcacggggttaagcagatcaaatcagcgttctacacgctgccaaaggtgtttggggaatccaagatcaccgagtacaccgtacaagagaatcccatggggccgggcaaaaccgaggtggtgatccagaacaagcagcactacaaggtgctgggcaagccggtggatctgacgtcgctcatcaggctgcagctccaggacggcaaggtggtcaagcacgaggactggtggcacgggaagcctctcaagaacagggacacggtgggcgtgccgctggtgggccgactcgcagaggccagccgccggggcgccatgctgctcacccacgcactcatgggcttcggcaaagacccaacccagcctcctcctcctccgacactttgaattcgtcagactcggtagtctgatcaatccaaccaatcatatatgtttgtatatctatctgtctgtctgcttcgcaatgctactctcacgcataacacctgctggacattcttttgttgcgtgcacaaaacttagaacacctagtttgggaactcaggccccctccagttttgagttaattttcaaattagctctaatttcttctgcataaagaacctatatcatcgatt

SEQ ID NO: 24338 - DNA, 2799 bp, Zea mays
  Clone ID: LIB3608-032-G6_FLI
gcgcgagtgagtgagctccacattttcttagcgtctcgtagaccagatcgtccctgttgagatgcccgcatgcgcatggggggcaagactgccctgcacttcccaaatattctagcctggtgggcagtgggaggggagatcgaggtggacgattgcagcttttggattattcatgaaccgatggcgcgagacccgaccaatcatggccgctgatcttatccacagcgacattccaactgattgatgccgctcactcatggtgctgcgttccacgagcctgagagtagtggtggaggtcgagagacgaccgtctgctcagccgtcgttggcgacggctcgtttcagggtcccccactactaatcacgaccctggcctctctcgattctgttgccttgccattgccatcatccaccctcatgcatgtcggtgcaacgcccatgggcatccactggtgcttataagaggaataatccggcttccgttcctctgaggacatcctcggccttccagggcagcaaccacgaaagccttctgcgcggggtgctttcctcgcagcaaatattcctgccttttgcattccggctttgcaagttccttgctttgggcatatatattgtgaggtctctatatatataggtggttcgaggtgatcggcagaaccacacaggcaaagatggcgagcgtgcacaaggccaccacccttgttctcatgttctgcctgctagcgctggggagagcggagtacctcaagtacaaggacccgaagcagcccgtcgctgttcgcatcaaggacctgctgggtcggatgactctcgctgaaaagatcggccagatgacgcagatcgagagggaaaacgccacggccgacgcgctggccaaatacttcataggtagcgtgctgagcggcggaggcagcgtgcctgctcctcaggcgtctgctcaggcttgggccgccatggtgaccgagatgcagaagggcgctctttctacgcgtctgggtataccgatcatctacggtatcgatgcagtgcatgggcacaacaacgtctacaaagctactattttccctcacaacgtcgggcttggagctaccagggaccctgacctcgttaagagaattggagaagcaactgctcttgaagttagagctactggaattccttacgcctttgctccctgtatagcggtttgtagagatccaagatggggacgctgctatgagagctacagtgaggatccaaaggttgtccagtcactgacttcactcatctctggcctgcaaggtgacgctcctgcagattccgcgggaaggccgtatgttgggggaagtaagaaggtcgctgcgtgcgcgaagcactatgtcggtgatggtggaacgcataacggaatcaacgagaacaacacgatcatcgacacacacgggctgctgagcatccatatgcctccttactacaactctatcatccgaggtgtctccacggtcatggtctcctactccagctggaacggagtgaagatgcacgcgaaccatttcctagtcacggattttctcaagaacaagctcaagtttaggggttttgtgatttccgactgggagggcattgatcggatcactactcctcctcacgccaactactcttactcaattgaggctggtgttggtgctggaattgacatgatcatggttccattcaggtacacagaattcatcgacgacctgacgacacaagttcagaacaaggtcatccccatgagcagaatcgacgacgccgtctacaggatccttcgtgtcaagttcaccatgggcctgttcgagaacccttaccccgactctagcctcgccggcgagctcgggaagcaagaacaccgggaactggcgcgcgaagccgtcaggaaatccctggttctcctgaagaacggcaagtcctcctacgctccgttgctgcctctcccgaagaaggccggcaagatcctggtcgccggcagccacgccaacgacctgggcaaccagtgcggggggtggacgatcacgtggcaaggaagcagcggcaacaccactgccggcacgacgatcctctccgggatcgaggccaccgtggaccccagcacgcaggtggtgtactcggagagcccggacagcggcgtgctggccgacaagtacgactacgcgatcgtggtggtcggtgagccgccatacgcggagacgttcggcgacaacctgaacctgacgatcccggcgcccgggccgagcgtgatccagtcggtgtgcggagccgccaagtgcgtggtggtcctcatctccggcaggccgctggtggtggagccgtacctgggcgacatggacgcgctggtggcggcgtggctgccagggtcggaggggcagggcgtggcggacgtgctgttcggcgactacgggttcacggggaagctgccgcggacgtggttcaagtcggtggaccagctgcccatgaacgtgggcgacgcgcactacgacccgctcttcccgttcggcttcgggctcaccaccaagggcacgaagtgagtgagtttgaggcgctctgatgggatgtggatgtggcctgtgagtgagctgtgtattcgtggggggcgtgaggctttggctttcgaattggttgggggtgacgggcgagtcgtgtacgccgcacacattgcgcagcgtacgttgggttgggatgtttgcgtctgggtaataacagtgatgcattcttgagatggttgctgttagtgtgggttgtttggaatgaacaataagatgaggcgcgttacattggcacgct

SEQ ID NO: 24339 - DNA, 609 bp, Zea mays
  Clone ID: LIB3608-032-H11_FLI
cgttcttctctccgtagtagctaacagtatagtgtgggcgtgtggccccgcatggagactttccctcctcgctggccccgcatctggcccggattaaccgccttcggctccctccccagattgccccacccaccgtcagcctcgtcagggtcctcccaggacaaaccatgctccggagacagaggcggcagagctggggcaggagcagagccatcacagaaattcttgtctccagccgcgagaggtctcagacagataagatggtcgacggcatggacttcgaggagctctgcagcgacttcgaatgcataagcagcccctacgtggagtccataatgaggcaggtcgcgcgggacatctttgagcttcgcgaggataaccgcgcattcagctgctacgccgtccccgtgaagtatgaggtgttcctctgctatgtgaaatcttttacattttgtacattaattggctctttcaggcttttggtttgagtcctcttagatcgatatttcactttggattttgcacttgaaaacttgcaggcggttacactatgttgccacggttatcagtttctatgcgtttttatcatttatgttatatgacattttc

SEQ ID NO: 24340 - DNA, 1543 bp, Zea mays
  Clone ID: LIB3608-032-H12_FLI
cactttctcctcctcaccgagtcacaaagccaaaccctaattcacggccgccggagatgggacaaggttctcccggcgggatgggcaagcagcccggccttccgggcgaccgcaagcagggagacggcaagaaagagaagaaatatgaaccacccgctgccccttcccgtgtcggccggaagcagaagcggcagaagggctccgaggcggcggcgcggctccccgccgtggcgccgctctcaaagtgccgccttcgcctactcaagctcgaacgcgtcaaggactaccttctcatggaagaggagttcgttgccagccaggagcgcctgcgccccagcgaggataagacggaggaggaccgatccaaggtcgacgacctccgcggcactcccatgaacgtcggatcgctggaggagatcatcgacgagacccatgccatcgtctcctcgtccgtcggtcccgagtactacgtcgggatactttccttcgttgataaggaccagctcgagcctggatgtgccattctgatgcacaacaaggttctgtcagtggttggtattttgcaagacgaagttgatcctatggtttctgtgatgaaagttgaaaaggcacctttggagtcttatgctgacattggtggcttggatgctcaaattcaagaaatcaaagaagcagttgaacttcccttaacacatcctgagctatatgaggacattgggatcaggcctccgaagggagttatactatatggggaacctggaacagggaaaactctactcgcaaaggctgttgccaattctacttcagcaacgttcttgcgtgttgttgggagtgaattgatccaaaagtaccttggtgatggtcccaagcttgttagagaattgttcagggtggctgatgatctttctccttcaattgtctttattgatgagattgatgctgttgggacaaagaggtacgatgctcattctggtggcgagcgtgagattcagagaaccatgttggagttgttaaatcagctggatggttttgattcaagaggagatgttaaagttattctagcaacaaatcgtattgagagtcttgatccagccttgcttcgcccaggtcgaattgacagaaagattgaattccctttacctgatgtcaagactaggcggcgcatcttccagatacacacatcgaaaatgacactggctgatgatgtaaacctagaagagtttattatgtcaaaagatgagttttcaggtgctgacatcaaggccatttgtactgaagctggtttgcttgctttgagagagcggcggatgaaggtgacgcatgcagacttcaagaaggccaaagaaaaggttatgttcaagaagaaagaaggcgtgccggagggcttatatatgtgagactcatcagcagcgctattagtcttagtgagagaactggcgtttgtaatctgcttaaatggtccgaaaatgtttgcttacagcatttattttggttggaaacacacaactcaaacaaatagttatcctattatgagtacttggat

SEQ ID NO: 24341 - DNA, 907 bp, Zea mays
  Clone ID: LIB3608-033-B5_FLI
ggcacaagtggtttgtgacttgtcaagtgttcttccggaagaaaaaaacacaaatggacgctcctgcggcggcggcccagggttgcggcggcaagcacatcgtgctcgtccacggcgcgtgcctgggcggctggtcctggttcaaggtggccccggcgctccgcgcggcggggtaccgcacggacacgccggacctggcggcgtcgggcgtggacccgcgggcgctgcgggaggtgccgacgttccgggactacacggggccgctgctggagctcctggcgtcgctgccggacggggagcgcgtggtgctcgtgggccacagcctcggcggcgtgagcgtcgcgctggccgccgagacgttcccggacaaggtcgccgccgtggtgttcctctgcgccttcatgcccgactgcgcggcgcggccgtcgcacgtgctggagaaggacgtgaccctcatgacatctctgcttcggccgagctccatgttcgtggaggacctggtgctccagcaaccctacaccaaggaaaggtacggctcggcgcgcaaggtctacgtcgtgtgcacggaggaccacgccatcgcggaggggttccagcgctggatggtggagaacagccccgtggacgaggtgagggagatcgtggcggaccacctcgtgatgctctccaggcccagcgacctggtgccctgcctcgcggacatcgccgacaagtacgcttgacgacgctacgctgttcagcgcagttcgcccgcgtgctgttctcatttgccgcatttcttcggtttaataatatttccctgctgtttccgaatcgggattggccagaattctcgacgcacggtgtgaaatcgtgtataataataataatgctattgttgcttgctaatatttagcaggtattttat

SEQ ID NO: 24342 - DNA, 1445 bp, Zea mays
  Clone ID: LIB3608-033-B9_FLI
gttccagagtggatattagacaagagcaatggggatgttgcagctgattcgtaccatatgtaccctgaggatgtcagattgctgaaggaaatagggatggacgcctataggttctccatctcttggtccagaatactgccgaatgggacgctcgaagggggtattaatccagatggcatcaagtactacaaaaatctcatcaatttgttgttagagaacggaatagaaccgtttgtaacaattttccactgggacacgcctcaagcactgatggacaagtacggcggttttttagataagagtattgtaaaagactatacagacttcgcaaaggtgtgctttgacaacttcggtgacaaagtaaagaactggtttacctttaatgagcccgagactttttgtaccttttcccacggaactgggcaatgcgccccagggcggtgctcccctgggataatcaccccaacgggatccacaagttgtgctaacccaattggaaactcgctcactgagccatacattgttggccacaaccttctccgagcccacgccgaggctgttgatctttacaacaagtattacaagggtgagaatggacgcatagggattgtatttgacgtgatgggtcgtgtgccattcgaaaaaacggcgtttattgatcaacaggccgaagaaaggtcctgggacatcaacctaggatggttcttggagccagttgttcgtggagactatccattctccatgaggtcgttggtaagggaccgactacccttcttcactgacgaggagcgagagaagctagtgggctcatatgacatgctggggttaaattactacacctcaaggttctccaaacacatcgatatcacgcaacacaacacactaaggctcaacactgacgatgcatatgccagtcaggaaacgaaagggcctgacggcgagcccattggtcctccgatggggaattggatctacctgtatcctcaaggcctaaaggatctccttaagatcatgaaggagaaatacggaaacccacccatgtacatcactgagaacgggatggctgaagttgaccttggcaataacttgaatgaccagaaaagaatagattacctccagagccacttggcagctcttcaggagtcagtgcagtcgggagcaaatgtgaagggctacttcctttggtctctgctggacaacttcgaatggttctgcggctacacccaaccttacggcatcgtctatgtggaccgcaacgatggctgcaagcgctacatgaagcagtcagccaagtggtacaaacgcttcatcgctgcgaatgataaatgaagtgcacccatacgtataactcactaccagaggaggtagtggagaggaccatatgcattgttccagtccagggttaccgtaccttattatatatgcaataaatgaagtgctctaat

SEQ ID NO: 24343 - DNA, 1387 bp, Zea mays
  Clone ID: LIB3608-033-D5_FLI
cgcttgtgtactgtactcgggcctggagcttgttctgatccgatcctgccttcctgctcggcgcccgcccgccccacttattcgattccatctcgtgttcctctgtgctgctgcagggggagggggaggaccaagcgaaagggggaactagagcaagatgggcggcgaactgctgcttgcgctcctcctcgtctctgctgctgccgcccctcaggtacttggagttggcaatggagacaatcacatgagaatcatccaggaggacatcattgagacagtcaacaaccatcccagtgctgggtggacagcctcacgtaatccttacttttcaaactataccattgcgcaatttaagcacatacttggagtgaaaccagcaccacagaatgcactaagcaatgttcctgtcaaaacttattcaagatcactggaacttccaaaagagtttgacgctagatctgcatggtcccgttgcagcacaattgggaacatacttgatcaaggtcactgtggctcttgttgggcttttggtgctgtggagtgcctccaggaccgtttttgcattcacctcaacatgagcattttactttcagtcaatgacctactggcatgctgcggttttatgtgcggcgatgggtgtgatggaggctatcctatagaggcatggcgctactttgttcaaaatggtgttgttacggatgagtgtgatccatacttcgacccggtcggttgcaagcatcctggatgcgaacctgcttatcctacaccaaagtgtgaaaagaaatgcaaggagcagaaccaagtttggcaggaaaagaagcatttcagcattgatgcgtacagaataaattcagatccacatgacataatggcagaggtctacaaaaatggtcctgtagaagttgctttcacagtttacgaggatttcgcacactacaaatctggagtgtacaagcacatcaccggtggcattatgggtggccatgccgtcaagttgattggatggggaaccagtgatgctggagaggattactggcttctggcaaatcagtggaatagaggctggggcgatgatggatacttcaagatcataaggggcaaaaatgaatgtggcatcgaggagggcgttgttgctggaatgccatcgacaaagaatatggttccaaacttcggcggtgccgttggaagagctatagtttaattggttacgtttgcatggcctcaaatgctgttggaattaactaaagtaattttaaaatgcaattgttaaatggccacgatggtgtatgtattttgtacactagctcattccaaaggtcgttatgttgctgatgccacatcactttggtcaagtggaataatattaataagaactagaatttcgatt

SEQ ID NO: 24344 - DNA, 1423 bp, Zea mays
  Clone ID: LIB3608-033-G2_FLI
ccggatcgttcatccactggtcgagaatccagatctctcgccttctcgctaccaaataccaaccacgaagaacaggaagaatgcccaaactgtcgtgtcgggtgctctttgcggctcttctcatcgcttcgctagccgctctgctcgtccggttcccgatccacaggctcctcaacccccacgccgccatggaccctgactccgagctcgagttcgagatgcccggcgtcttgcgtgtgtacaagaccggccgcgtcgagcgcttcgacggcaccgagaccgtcccgccctcccccgacggcgatcccgccaacggcgtcgcgtccaaggacatcgtcctggaccccgccgcaggcatctccgcccgcctctacctacccgcgggagtggatgccgggaagaagctccccgtcgttgtgttcttccacggcggtgcgttcatggtccacaccgccgcctccccgctgtaccacatctacgccgcctccctcgctgccgcggtgcctgccgtcgtcgtctccgttgactaccgcctagctcccgagcaccgcatccccgccgcctacgacgacgcattcgcggccctgaaggcggtcatcgccgcgtgccgcgcggatggggccgagacggaggctgaggctgagccctggctcgccgctcacggcgacgcctcccgcatcgtccttgcgggggacagcgccggcggtaacatggcgcacaacgtggcgataaggctgcgcaaggaaggcggcatcgagggttacggcgatatggtcagcggcgtcgtcctcctgtacccttatttctgggggaaggagccgctgggcgcggagcccacagatcccggctaccgtgcaatgttcgatcccacttgggaattcatctgcggcggaaagttcggcctcgaccacccctacgtcaacccaatggcatcgccggaggagtggaggcagctcggttcccgccgcgtgctggtgaccacggcggaccagtgctggttcgtggagagggcaagggcttacgcagagggaatcaagaagtgcggctgggagggagagctcgagttctacgagaccgagggtgaggcgcacgtcttcttcttgcctaaacacggcagcgaaaaagccgtgaaggagctcgccctcgtggccgaattcgtccggcgctgttgaggtgcctttcgctttgtttgcccggacctggtgagtagttcagcgagaaaaaaaaatcgcacaattagtgacttttattcatattgcaagttaaggacagaggttcagtctcaattcagaatcctgatcttgaatttctgttgtgcatcgaaatttatcctgaacagtacacactgtaattctgaagtgcaggcaagcgagtggctaaatgtattgtatacttgaaaactgtccaatgtattgtatacttg

SEQ ID NO: 24345 - DNA, 1860 bp, Zea mays
  Clone ID: LIB3608-034-A10_FLI
ccaagcggtaccgaacgcacgtgctcctcgtcggtcggaactcggaagggtacgccacgcgagagacgcggggagaagcaggcaggaagccaagaaagcaagcacagagccgagcctacagtccaacaagaggaggggagaactcgtcgcgccgcctccgcctccgcctccggtggttagttcctctctcctcgtcagctcaccgcccgccccacagaactctgccccgtgctttgccaccggtgactgcagaagcagctagccatggcggcggcggcggcggcggcggccttcgatgcctacaccgacaagaacgccatcttccgccgcctcaaggccaagcccgagaacaagatgtgcttcgactgcaacgccaagaaccccacctgggcctccgtcacctacggcatcttcctctgcctcgactgctcggccgtccaccgcagccttggggtccacatcaccttcgtcaggtcaacgaacctcgactcatggactccagatcagctgaaaatgatggcgttcggaggcaacaaccgggcacatgctttcttcaagcagcatggatggactgatggtggcaaggttgaggcgaaatacacatcaagagctgctgaactgtacaggcagatgctcaacaaggaggtcgctaagagtgccattaccgataatgccctgccgtcctcacctgtcactgcgtctgaggcttccaagccatctgatgactttcctgaattcaagctctcagacgcaccagcaccgccggcggagaatctgaatgggaagcatgaacccaagtcccccaaagctgctccacgttcaccaaaagctgctactcatcccacctttgccacttccgtgaagaagcccattggcgcaaagaaggttggaggcaagactggagggcttggtgttcgtaaactcacaacaaagccaaatgaaagcctgtatgagcagaaaccagaagagccaaaacctgctatacctgccttgactgctccaactgcaaaaggtggtccatccttgcattcacgttttgaatatgtggataacgaacaatcatctgtttcaagaaccgggggatctggatctcgtgtaaccggtcatgtagcaccaccaaaatcatctgacttcttccaagagtatgggatgggtaatggattccaaaagaaatcaagcaacgcctcaaaagctcagattgaggaaactgatgaagcaaggaaaaaattctctaatgctaaggcaatttcgtcatctcagttttttggtactcaaaacagagaagagaaagaggctcagctatcccttcagaaattcgcgggttcttcatccatttcaagctctgatctttttggccgtaccaatgtggacgattctaacctggacctaagcgctgcagatctcatcaacagaatatctttccaggcgtcacaggatctgtcttcactcaaggacatagctggagagactggaaagaagctgacatctttcgcctccaatttcatcagcgacctggacagaatcctttgagcaggcgaggccatgccagcaaagcatttttcctaccttgcaccagaatttcccttctagcttggattgggtcacggactcgcgggtgcatcaccgacagttgaaagtagttcttgcacagctacagctttgtagaggattcctattacgcatttgtattttgatctttgttgtgagaattgaaggtatttttattcgtgaatacttcacaacggtgaagcatacactacagtttacatacgttgaggttgcttgtatcttggaaggaaggttcatactatgtcctgtgcgtgtggtaaatgaaagatactcttgtcaaggttgactgtc

SEQ ID NO: 24346 - DNA, 1477 bp, Zea mays
  Clone ID: LIB3608-034-B12_FLI
ggcgggaagctaaccaccgcgaaagcgcctctgggggagtcagacgaacgaagcaatccaaccgaacgaaccgacctaggtcgtcgtcggctcgtcccctccgcaggaccggttcgccgtctcgtcgcgatctcgccgcctgcccgccgcgccctattaccgccatggaggcgctgtggaagcaggcctccaggctcaaggaccaggtctctcggcagggtgtgttcaagcagtttggctacgggaattctgataatgcgtttacagatgagtcagaggttaaactgcatcagagattggaaaagctttacttatcgactcgtgctgctaaacattttcaaagggacattgttcggggcgtggagggctatatagtcacaggatctaaacaagtcgaaatagggaataaattgtctgatgacagccagaaatacggtgttggaaacacatgtacaagtggtgatactttgtccaaagctgctacatatttcggaaaggcacgctcacagatggaaaaggagcgtggcaatatgttgaaagcatttggcacacaggtggcagagccactgcgggcgatggttatgggtgcacctttagaggatgccagacatatggcccagagatatgacagaacgaggcaagaagctgaagcacaggctgtcgaagtatcaagacggcagaacagggtgagggaatctactgggaatggcgatatggtatcaaaattggaagctgccgagtacaagcttgaagaactgaagtcaaacatggtgggattagggaaggaagctattgcagcaatgtcggctgttgaggctcagcagcaacggttgaccttacagcgtctcattgcactggttgaggctgagagaacttaccatcagagagttctggagatacttgacaaattggaagaagaaatggtgtctgagcgccaaaaaattgaagcacccccgactccagcagctgaaaattatataccaccaccagcaccaccatcttatgatgaaattaatggagcatttgcatccacttctgttaacgagtcagtccaatctgtcgatttcttccttggagaggcccttgattcatttaatgctgaaagtgagtttgagcttaccttgtcagctggtgacattgtaattgtccgaaagatctcaagcaatggttgggcagaaggtgaatgcaagggcaaagcaggatggttccctcatgcttatatcgaaaggcaggaacgtgttctagcaagcaaagttccacatatattttaggagtttctggcagtcgcattacacggttttcatttctattgttgggagctggaactgtatccatgttttcacttcctcttagtttccgcgatgtaattactggctgtcatgtgcatagattaaatttacttccctttttttagtctggaaaaggttttggatgtaacatatttttgagagaccaattggatatgggttaccttgat

SEQ ID NO: 24347 - DNA, 996 bp, Zea mays
  Clone ID: LIB3608-034-B9_FLI
cccagacccagcagctattgtggtcgtccctcagccgcgtcgcaccgcatcgcattctacgattcgaagctctctctgctcgcagccatggcgaagaattacccaaccgtgagcgccgagtacagcgaggccgtcgagaaggccaggcgcaagctccgcgccctcatcgccgagaagagctgcgcgcccctcatgctccgcctcgcgtggcactccgcggggacgttcgacgtgtcgtcgaggaccggcggtcccttcggtactatgaagtgcccggcggaactggctcacggcgccaacgcggggctggacatcgcggtgcggctgctcgagcccatcaaggaggagttccccaccctctcctatgccgatttctaccagcttgccggagttgtggccgtcgaggtcaccggtgggcctgagatccccttccaccccggcagggaggacaagcctcagccgccacctgagggccgtcttcctgatgccaccaagggttctgaccacctgaggcaagtctttggcaagcagatgggtttgagtgatcaggacattgttgccctctctggtggccacaccttgggaaggtgccacaaagagcggtctggttttgagggggcctggactacgaaccctttggtctttgacaactcttacttcaaggaacttctgagtggcgacaaggagggtcttcttcagctcccaagtgacaaagccctgctgagcgaccttgtcttccgccctcttgtggagaaatatgctgcagatgagaaggcattctttgatgactacaaagaggcccacctcaagctctccgaactggggtatgctgatgcttaaatgtccatatcctggagcgggacacaaactgctgcctgtatggactcgtgcgattcagggtgaaccatcagattgtctagtgtcttctttgtaataaatttatctgttcttggtactttgtctatggttgaatcggaacccattttccgtttgcct

SEQ ID NO: 24348 - DNA, 769 bp, Zea mays
  Clone ID: LIB3608-034-C12_FLI
gttttgagtctcttcttccacccggcggcagcgggcagcgcaggcgagcagaccaagtcgcctgcagagtgcagactgcagatacagtccgtgctctgacggagcaacaggagaagcagagcgagccgaggcggagtcgacagcttggtgccttatcatggaggaagcggggaggggctgcggcttgctcaaggtggttgtgacgcacggccggaacctagccgtccgggatttcacgtccagcgacccctacgtcatcgtccacgttgccgacaagaccacaaaaacaaaagttatcaacagttgcctcaatccagtttggaatgaagagatgacattctccatgaaagaaccagtaggaataatcaaatttgaggtgttcgactgggaccggttcaagtacgacgacaagatgggccaggctttcctggacctgcagcctgtggcggcggcaaccaagctgcggagggcgctgcggctcacagctggcgagaccaacctgcggaaagtgaacccggacgccgacaactgtctgctctcagatagcttcgtgacgtacgccaacggggaggtcgcgatagatgctaggctgcggctgcgtgaggtcgagtccggcgagctgttcgtcactataaagtggattgaacctgacagcgccaacactggaaagcaagcggatcactagctagcgatgcattttgcttgcagcactgcaaatatgtaatatgacctgatgtgggctgatttatgaggattttttttaaatcgt

SEQ ID NO: 24349 - DNA, 1299 bp, Zea mays
  Clone ID: LIB3608-034-D7_FLI
ggagaaagtagcagtatcagcgtatcatatggagctcagccccaacaacagcacggaccagagcttgctcgatgcgcagctcgagctctggcacaccaccttcgcgttcatgaagtccatggcgctcaagtccgcaatacacctccgaattgccgatgccatccacctccatggcggtgccgccagcctatcccagatactaagcaaggtccatctccacccgtccagagtttccagcctccgtcgcctgatgcgcgtgctaacaaccaccaatgtcttcggcacccagcagccggctggtggcagtgacgacgacagtgagcccgtctacactctcactccagtgtctcgcctcctcatcgcctcacagtcgtcgcagctggcccagactccgttggcggccatggtgctcgatccaaccatcgtctcccccttcttcgagctcgccgcgtggttccagcacgagctcccagacccgtgcatcttcaagcacacgcacggccgaggcatctgggagttgaccaaagatgacgcgaccttcgacgccctagtcaacgacgggttggcttccgacagccagctcatcgtcgacgttgccatcaagcagagcgcagaggtcttccaggggataagctcgctcgtcgacgtcggtgggggcatcggtgcggcggcccaagccatctcaaaggcgttcccgcacgtcaagtgtagcgtgctggaccttgcccacgtcgttgcgaaggctccaactcacacggacgtgcaatttatcgctggcgacatgtttgagagcattccaccagcagacgccgtactgttgaagtcggtcttgcatgattgggaccatgacgactgcgtgaagatactgaagaattgcaaaaaggctattcctccaagagaagccggtggaaaggtgataataataaacatggtagttggagctgggccatctgacatgaagcacaaagagatgcaggccatattcgatgtctatatcatgttcatcaatggcatggaacgagatgagcaggagtggagcaagattttctccgaagctggatatagcgattacagaataataccggtcttaggtgttcggtctataatcgaggtctatccataaccatttgtgtaagatggttcatatatagtggcatggatcggagcttgtgtggtgtggacatgtaatctaaataagtgggtaccccgctgtgatgctgatctatatcgtgctctctgtcgagatatctattcagtaaacgtatattctatatgcacctatatgaagccgtgtacttt

SEQ ID NO: 24350 - DNA, 1740 bp, Zea mays
  Clone ID: LIB3608-034-F8_FLI
ctttgataccactcgctgcctggttatggactccaccaggagcaaccaggtcgccggcagatgcagcagcaccatcgcgtcaagggctgccacggtcccgccgtcgctgaccatgccgcgcggcgaactcgctgacgccatcgtgggcggaggcggaggaggaggagcggacggggacccccgggccgccctcctccgtctgtctgctctcggggaccgcatggccgccgtccggggccgtatctccgcttctatctcgggcgaagcccggcctctctcctacgccgacatccaatctgtctcctccgagatctccgccgctgtccagctcgtcgtcctcaacgccgccgagctcctcgcttcctccgtcccctttcccgccccacctccacctcctccttccgccgctcccgctcccgtccgagagatcccagttgtggccgcttccgcccaagagcaacccctggaggccgccaaggacgacggcggctacgaggtcgtggagctcgacgccgccgagctgctagcggagcacgtccacttctgcgagatctgcggcaagggcttccgccgcgacgccaacctcaggatgcacatgcgcgcccacggcgaccgcttcaagaccctagacgcgctctcccgccctggtcacggccagccgaagccgcccgttggcagcaacgtgcgcttctcctgccccttcgcgggctgcaacaggaaccgcacacaccgccgcttccggccgctcaagtcggcggtgtgcgcgcggaaccacttccggcgcagccactgccccaagctctacgcctgcgagcgatgtggcggcaagaagcgcttcgctgtcctggcggacctccgcagccacctccgccactgcggcgaggaggcacagtggcgctgctcctgcggcaccaccttctcccgcaaggacaagctcttcggtcatctagcgctctttgaaggccacacgccagcagttaataagccaaacaaggatgtggtgacagggcctacagagtccaccattgatgctatggaggaagggggatttgaagaaggcattcctgaccgggaggaggatgaagagggcggttatgatccagagttcttcaaggagtggatggatgagctcagaggtggtgctggtggctccaattggcctggaccagcagcagatggacattagcaatgttgcgagggttaataggatggtttgacaagggacatctgcttacatcaagtgaccaggaggatcaataaagactgaataaaggtgatagtaaagaaaagaggtgctttgggatagtttgtaggatttctctttaccattgtgtttgtgcgttcgttctaaccagtagcttgtatggtatggtgtgcgtgtgttgtttagttgctgttcactgggcctctcccttgccattctcggttgctttcatgttatcctgtgaatttgtgatctaccaggtaatacagtggagaaatgtgtcatgctctgtaagcgttctccttggctgtgtgggtcatggagttgccggttacggaggaagaaggatagcttgcaggaaaacggtggcaccagttccctgtgcgctgctgaggatgcgaagtattcgggggagttttagaaaaatactttggttttgtgaaacaatttggttttagagtgtcttgatgtgtttggacgcaacaaactttgtagttttgaaaatcatagtattgctaaattgtaggcttccttct

SEQ ID NO: 24351 - DNA, 2109 bp, Zea mays
  Clone ID: LIB3608-034-H3_FLI
tcgcaagggtctgttcgttttattcgtggccacgaacatgggagcgccctgcgcctacaagcctccacgatctaatttaattgatgtgggcgattcgcaacccaacgaagaggaacaacatgctgaaccactaattgaaaacaatgtaaatttcttcccactatttttttctattgtactccaggacgttaactgtgtatatgttttaaattcctaaactttatttgcatgcatgtttttaattttgagtagaatgaagttatgacaaagcagcttggacttttgagaacactagagggttttgtgaaatttgtatccaagaaatcaatgctggtaataggtcgaatgacatcatgactacccgtggtcacaacaacatagctgaaaagtacaagatagcaacatgactgcaccattcaaggcttcaattgaagaataaattggacttactgaaaggtcgacatgaataatattcgagatcaaattgctgcattgtttgctagaagactgtaattttatttatatatactttcttttggccaaataagatgtaccaactggcacaattctattttcgtatctttaaatgtatgatcgttacaatgccataattgcaaaaaatcaaataaacaaataagggcattttttattttgtgtcttagataagactaatctacgtttttataatttaggctacgaaacaactatatatagactacgaaatagttaaataagttactttattgagtggattcaaactgtctaaaataaagagatccaaacggggcgtaagctgaaacaaatagaaccaaagaagctatacgttgtctagccaacttaaagtgattattcggcgtttgaaagcgataaggccagttgggtgtgcgtgtgtgcggtggaggtggggggttcgtcactggggaggtattgaggatgccttggctatctttcagtttcagctactttcaagttgagatgttgtcaaagcaccaacgacctgtacgctgagatgttgtcaaagcaccaacgacctgtagcaaatgtgtctgaaactactactaagatatatgagaggcgtggtatggcgcttactaattttgcgtatatggttctaaatgacgggcatttccttgatagagctgttaatccaaagtaagtcaagtgcaagtgtgagtttgctgttgttgtcgaggatcagagacactgcatatccattgtcaattctattgaagtcaagattttgcgatttacatcagaccaacagcttatcggcattctttttctttctttctttctttctttctttctttctttctttctttctttctttcttttctgaagcttatcaccagcattctgaagtggattcactcaaataccgaaacttcagtcgagcatcaagctgcagagatgttactaatagaataacatgcatcaaaagcaaactgcaagttccatgggatagatcatccaggtgatcgatatcccaatgctattgggtttttcgacatcggttcaatatctaattgtggctcctgagtcagcttggggacaagccaaatttcaaggagggaagggtgtcatatggacctactgagctagtggttagtgcactggatgaagctaggctatacatggggtggggtggaccatcaggttcgatcgactcaaggaagcaagctaccaagtgaagtacaaaaagagtagcagccaaatgatttgagcctgaactcggaggcggcgagcaagagctcgaggtgagcatccgctcgatctacctcttttgcttgttctacctcctgtgtatgggtttccttgtatctagaaccttccgtaagcctatcatatgctacacagcggtcactgctgcttgattgactcaatttatcagcatacatgggccgaagaatcaaatattgacgctgactgaccaacaatggcggaaacagggggacaacaagagcccgtgccccctccctccggattgagatcctctgcagtccctatgaatgtttcggtttacagcaacacatcaattcacctgtttttttttcataatatattatcattgttgttgttgttgttgttattattatgaatactaactac

SEQ ID NO: 24352 - DNA, 557 bp, Zea mays
  Clone ID: LIB3608-035-A10_FLI
gagacgctggcaatggcggacgtcgactgggcgcggtacgacgaccgcgccttccacgacgacgaccaggacacgccgccggagcacctgcgcgccttcgaggccttcgttgagacggtggtgccgctggacatggtgctggcgttcgggcgcgagcagagcacgagggcccggcgcccaggccacggccgggaggacgacgtcaaggagaagctcaagctctgggccaaagccgtggccgccaaggcgagacgacaatacatcaccaaacaggacaacgacgaccagaatgcctgaatgcacagtgtctgctagggcatatatgcttgttttaaaacaagcattctaagcattttctaactgttttgatcaaatccagctctttgttttttactagatagatcgatggcagtctctcggtccttccagcagctaaccggatctttaatgtattttcaagtttgctcgtagatctcttgcttaattagggttaatttccatctaaagagaggcatattggttgtaattttattataataataatatcagtttacggc

SEQ ID NO: 24353 - DNA, 1912 bp, Zea mays
  Clone ID: LIB3608-036-A1_FLI
caaaaaccctagccgccgccggcgccaagcccctgcccgccgccacctccacgtccgtctccttcccggccacccaccagcccgcgtgcctgctctcctcgcccgcgcccgggtctctgcgccgccgggacgtcgccgccatggtctccgcgccgccggccgtcggcaccgccatgccgtcgctcgacttcgacacctccgtcttcaacaaggagaaggtctccctcgccggccacgacgagtacatcgtgcgcggcgggaggaacctgttcccgctgctttcggaggcgttcaagggggtcaagcagatcggagtcattggatggggctcgcagggtcctgcccaagcccagaacctgagagattcactggctgatgccaagtcagatattgttgtgaagattggtctccggaaaggatccaaatcttttgaggaagcacgtgccgctggattcaccgaagagagcggaaccttgggcgatatttgggaaaccgtctccggcagcgatcttgtgttgctgctgatatccgatgctgcacaggctgacaactatgagaagatcttctctcacatgaaaccaaacagtatccttggtttatctcatggatttcttctgggacatttgcaatcactcggactcgatttcccaaagaacatcagtgtgattgctgtatgccccaagggaatgggtccatccgtccgcaggctttatgttcagggcaaggaagtcaatggcgctggcatcaactctagctttgctgtgcaccaggatgttgatggaagggcaactgatgttgctttagcatggtcagttgcacttggttcccccttcacgtttgctactactttggaacaggagtacaagagtgatatctttggagagcgaggcatcttgctgggtgctgtccatggtatcgtggaggctctgtttaggaggtacacagaacaaggaatggatgaagagtcggcctacaaaaacactgtcgagggcataactgggatcatctcgaaaaccatctcaaagaaagggatgcttgaagtgtacaactctttgagcgaggaaggcaaaaaggagttcaacaaggcttatagcgcatcgttttacccgtgcatggatatactctacgaatgctatgaagatgtggcctctggaagtgaaatccggagcgtggtgttggctgggcggaggttttatgagaaagagggcctcccagcttttccgatgggcaacatcgaccaaactcgcatgtggaaggttggtgaaaaggtgcgctcaacccgtccggaaggtgatcttggcccgctccatgccttcactgctggagtgtacattgccctgatgatggctcagattgagatcctgaggaagaaggggcactcctactctgagatcatcaacgagagcgtgattgagtcggtggactcgctgaacccgttcatgcacgcccgtggggtcgccttcatggtggacaactgctccacaacggctcgcctgggatccaggaagtgggcgcctcgcttcgactacatcctgacgcagcaggccttcgtggcggtggacaaggacgccccgatcaaccaggacctcatcagcaacttcttgtcggaccctgtccatggtgccattgaggtctgcgccgagctgaggcccaccgtcgacatctctgtgcctgccaacgccgactttgtgcgcccggagctccggcagtcttcctagattgaggcagtgagcggagagggagagggagagagaaagagaggatttcgtgtcccgagttagaacagagtgctgtatgttttgtgcgactgtttgtaagtcaagtctgaactgtgaacctatgtgagcttctatcagaggacccggagaaagcctggccatctgtttccggaataaaatgggtccttcggaat

SEQ ID NO: 24354 - DNA, 1353 bp, Zea mays
  Clone ID: LIB3608-036-C9_FLI
gagacacaaacctagcgcaacaagcaatcgaaaaagagatttggctacaaccaattaaccatattggccagcagtgtacgtgggaacgatggccctcatgcaggagagtagtagccaggatttgctccaagctcacgacgagctcttgcaccattccctgtgcttcgccaaatcgctcgcgctcgccgtggcgctagacctccgcatccccgacgcgatccaccaccacggggccggcggcgccacccttctccagatcctcgccgagactgcgctccacccaagcaagcttcgcgcccttcgccgcctcatgcgcgtgctcaccgtcacgggcatcttcagcgtcgtcgagcaaccaccagcaggtggtggtgatgattcaaccgtccacacgtcggacgacgaagctgtcgtcgtctacaggttgacggcagcctcccgcttcctcgtcagcgacgacgtgagcacggcgaccttggctccctttgtgagtctggcgctccagcctatcgctgcctgtccgcacgccctgggtatctccgcgtggttccggcaggagcagcacgagccgtccccgtatggcctggcgttccggcagaccccaacgatctgggaacatgctgacgacgtaaacgccttgctgaacaaaggcatggccgcggacagccgcttcctcatgccaattgtgctgagggagtgcggcgagacgtttcgtgggatcgactcgttggttgacgtcggtggtggccatggtggcgccgccgccaccatcgccgccgccttcccccacctcaagtgcagcgtgcttgaccttccgcacgttgtcgccggtgctccgtctgatggcaacgtgcagttcgtcgcaggcaatatgttcgagagtattccacctgcaaccgctgttttcctcaagaaaactctacatgactggggtgacgatgagtgtgtcaagatattgaagaattgcaagcaagccatatctccacgggatgcaggagggaaggtaataatcttggacgtggtagttgggtataaacagtcaaacataaagcatcaagagacacaagttatgtttgatttgtatatgatggccgttaacggagttgagcgtgatgagcaagagtggaagaagatcttcactgaagctggattcaaagactacaaaattctacccgtcattggtgacgtatcggtcatcatcgaggtctatccttgaatgctttgtgaacaaaggcctccataataaactgaagaccatgaaggtgttgatagtatattatgaattgttatttgtcctgtacacttgattctttgcgtatttgtaatgacaagctgagtaattgtgtttttgtt

SEQ ID NO: 24355 - DNA, 1384 bp, Zea mays
  Clone ID: LIB3608-037-F2_FLI
gactagttctagattccgccacccgcctctcacctctccagtccccacccccgcccccgtccgctcccctatcctgttcgttcccctcctctccacacgatcccctcccttgtcggcttccgcgcgggcgggagtggccgcggccacgactccaccgcctcctgctcgcgccaccacccctcggcccctcgcggcgccgcgcgaccggcgcgtggtgcgcgtttgcctgcccgtcgtcggccctttcttattagttattattaggcggaggagaggctagctctgcggggggtcgccgcgcgccgccgaatcggatcacacgcctccccttcccgccaggccagggggccatggccacgctcccgcgcgccgcgccgcccacgcccgccgcgctgctcccgctgccccgcgccgcgccgccgctgctgctcgccgggagggccgccgccgcgcgccgctctcggctgcgcgcgcggggcccgtccgcggcggcgcgccggagctgggtcgtcgcctccgccgcttcctcctcctcacgggccgtggtcggcggcgtcgcccgccgggaggcccctcccgcgccgcagaagcccacgcagcaggtacgcatggacatgcgagcccgatcggtatgggttattgttctcgtgactctcgccgttactggtgatgtgttgttggaactgtgacgtgggtgttagagagctcgagagaggtagtgcgcgttttggtcagttttttttgtctacgaaatcatcggggcctttgtgggtgctagattcttcagttttctctacgacatcatcgacgatcgcatggttcgatcgtttatgatttttgggattggttttgccgatttgctgggattgaaatagttgtaccattaccgatgatgctgagcgattggtgaaaacaggaacattagcgcaggcaggcagttgacgagtccaatttgttttgacatcctgatcagtgcattttattaggctaattgttgaagtggtggttgcttgcaactgcaagtttttaaattcgtggctgatcgccatgcgctgctagttgtcgcttttgatctgttcctttcatggaggttttaaaatgcgctgtgcaacaagcgaacgaagcacaccatatgcagggttgataaacaattgagggtgatggaaagacaggtggcagctgtagtggtaggtactaataacggtcgagtgtccaggagtgtcagtgcatgacatttgtgtaaagcatcggtataatatatgtaatatgtatactagtttaccatgcccccttctggaatgtgtttgaatgggttgcaatagctacgacgttgtaagttaggctctgtatttaacgctggttaacacaggaattcctttgttcc

SEQ ID NO: 24356 - DNA, 874 bp, Zea mays
  Clone ID: LIB3608-037-F5_FLI
cctgcattcactgttttggtgtcaaagttcctccttggggagacgtttccagttccagtctatctttctcttcttccaatcattggtggttgtgctctagctgctgtcacagagctgaactttaatatggttggatttatgggtgctatgatgtccaaccttgcatttgttttccgcaacatcttctcgaagaggggcatgaaggggaagtccgtcagtggcatgaattactatgcttgcctgtcaataatgtcgctggtcatactgactccatttgctatagctatggaaggttctcagatgtgggctgctggttggcaaaaggctgttgcagaagttggacccaatgttgtctggtggatcgctgcacagagcgtgttctatcacttatataaccaggtgtcctacatgtctctcgatcagatctctccattgacgtttagcattggcaatacaatgaaacgtatatcagtgattgtttcatctataattatcttccacacgcctgtccgccctgtcaatgcactgggagctgccattgccatccttggcacattcctgtactctcaggcaaaggcgtgaggctaaagctttggccaaaggatcggagccagtagcaggcactggatccagttttgcttgttggagtggcatgtagatataaggttcggttttcgtgagagagagggtaataatggatcagtggctctgctgttccgttcttgtttgttgaccagattgaaatgcacaggccgtgacatgaaccgtcgtcaagtgtacctgaataacaccgtaacgaaattcaccgatgctgtttctttatgggtatgtaatccaaaccggaatcctggtttcaatagaaatagtttctgct

SEQ ID NO: 24357 - DNA, 1743 bp, Zea mays
  Clone ID: LIB3608-037-G3_FLI
ctctcgttctcgcccagtcgcaccgtcccgtctccaacccgactctgaaatccacgagctcttccccctcgtcctcaccccgcccctccctgctctccgcctccccgtccccgtccccgcccccgtcgctacccacaagcacctccggaggctccaggcacccacctcctgcacccggcgtacctcgcggcggcggcgcgcgaacgtcccgctccccggtgagtaacggagagacggagccatgagcggaggggtggagccggataccccgcccggtagcagcagcagcagcagcaggagcgggggcagcacgcccgtgggcggcaagccgccacgccaccacctcacgtccatccgccactgcgccagcagcgcccgcatcgccgctgcctccgccgaattcgtaagcaagctcgctgccgcccaagccatctatccctaacacgaatttgatgtctgcccttctgttctcctgcaggggctggagtcggggacgctcagcttgatttcacctaccgcagacatccgtccgggcttcttgcctgtgttcaggtcggggagtttcgcggatattggacccaaatccttcatggaggacgagcatgtctgtgtggacaacctcgtcgagcaccttggactccgtggcccgggcatccctgcaccgggtgccttctatggggtgtttgatggccatggtggtagtgatgctgcctgttttgtccggaagaatatactgaagttcataaccgaagattgccacttccccaacagcatcgagaaggcaatcagaagtgctttcgtaaaggctgaccatgcgattgcggattctcagtctcttgaccggaattctgggaccacggcgttgacggtccttatatctggcaggacactgcttgtcgcgaatgctggtgactgtagagccgtattaggaaagcgaggccgagcttttgaactctcgagagaccacaaacccagctgcagcgttgagaagctcagaatcgaaaaccttggcggtacggtcttcgatggctacctcaacggtcagctggctgtagcaagggcgatcggtgactggcacatgaaaggctccaaaggctctgcgtgccctctcacaccggaacctgagtttagggaggttaggcttaccgaggaagacgagttcttgataataggctgcgatggcctctgggacgtgatgagcagccagtttgctgtctccatggtcaggaaagagctgatggaacacaatgacccacagcggtgctcgcgggagcttgtccaggaagctcttaggcgcgactgctgtgataacctaaccgtagtcgtcgtgtgcttctcagatgacccgccccctcagatcgaggtcccgagattccgggtacggagaagcatctcaatggaagggctgcatacgctgaggggagctcttgacagtaacgtttgagctccgaaagtgtaccttcgcctgcaacttgtgtcgtggaggatttttctctcttctttgttgtttggtctgttggaagttttgctccgctcggctcatcggtgttttgcgatatagatctcggaataagttttgtagaattattttggaaggaaatttttgttgaggtgtaggctaattaatcttcctttgttgaggccaccattttgttgttggttgctcacaatgtaatcgagcaattaaccggcacgttgttctggtacgaatgagagttatagcagctgatcgtttttggtctt

SEQ ID NO: 24358 - DNA, 886 bp, Zea mays
  Clone ID: LIB3608-038-F11_FLI
tcgatcctcatctccctctctcgagtcaagagcagagcagctaccaaacaagctctcctttcgcttccgatccatggagctcgatgccgacaacctgagcgccaccgagctccgcctcggcctgcctgggaccagcagcagcagcagagacgactggcagaagaagccgtcgccctccgtcggggccaagcgcgttctggacgacggcaccaagagcgaggcctcggggaccagcacggccgccggagacctcgacttcgaccacgacaccgccgcgcctcccaaggcgcaagtggtcgggtggccgccggtgagggcgtacaggaagaacaccttccaggcggcggcggccaaaaaggtcgagcagaagcagcagcagggaggcctgtacgtgaaggtgagcatggacggcgcgccgtacctcaggaaggtggacctccggatgtacaaggggtacagggagctcagggaggctctggacgcgctcttcaccaactccttctccgcggcggcggcagagggcggcggcgaccaccagcacgccatcgcctacgaggacaaggacggcgacctcatgctcgccggagacgtgccctgggatatgttcatctcttcgtgcaagaagctgaggataatgaagggctctgcctctgaggccaggtgatcgctgatccatacataaacagaggctacagacacgccacctgggaacgcggatccaagagcacacacggatcgtacgtgacgaggaaggagggaggagctgtgtggcttgagctctccagtgttgtacaaaggcatgtttctttctgaacccaaaagggagaaagatgtatgaagcgtgtatataaaatcttagctagcagtttgttttcaaactgtgttt

SEQ ID NO: 24359 - DNA, 1450 bp, Zea mays
  Clone ID: LIB3608-038-G5_FLI
aagaaacaaaccttctgaaaaaaaacttgaaacgaggtggtgcgcaacgaagcttggaagttggttccctctgcaagtctgaaacacactttccagctctcctccgacagagagactcagccggccggcggcatgctcctcctcgacggcgaccttgtcctctcctcctccggaggcaccggcgccggcgccggcgccgcctctcgcacgagcgacagcgggagggggctcgtggcggcgctcttggagagccccgggatccgccacgcggtcgaccggctgaaggtcgcaccggagaggcggatctcggcagggcaggagggggcgccgaggcacgtctacgtgttccagcgggagtacgccacggtggatccggcgcgcgtcgagttagtgggcacagatgaggctactacatgcattggtgttgtaattcgcaacaacaagactggaatgacctctgttagccatatggattttccagaaattgtggagggagggatcaagcagatgttagaattacttggtgatgacaatgcaccatttgatgttcaccttattggtggctttgctgatgcttccacaaaggttgttcgttcctctggaaagaaacacatcaaacaggaagggtattcctatccactatgttgcaaaatagttgaagtgctgcataagtcccagctacaattcaaccttcgatcattttgtgtccttgagaataacacgaagagtgactcatttggaaatgcactaccaataattggtggatttgtggttgaaacctcatctggagttgtgataccagcaacctttgacatggattcaagatgcccagatgaagttgtcaggagaattcgtgtgagcgttagctcttatgatccaacttggcaaggaaggttgctggagacttacgatactcaggacgatgttttccaaattgcacctgcctgctggatgccagattgggccgatatagcgtcctcactcaaccagctctcggactccgaagtcctgctgcggtgctccacctctccagccgcagaaccacctcacttcgtggaaaacgaaagaaggatctggaaatacctgatcgataacccggactgggaagagacgttcccaaaacacaagccccgggtgttccatagggctagtgacggaagctggtcaaggtactcgtagtgcaagccaagggcttccatcgtctgctgttatcgtcggtgctcccacacatggaacgaaccagaagggaaacccccctccgttgatttgaacagtggcatattaagtttgagtgcaaagttttctgcgcactgcgattagcacatccgtggacgcttggagatgggagtaaattttataaagtctcttggagatggcagctgctctaaggaccagctaaaaactaaaaaaaaacgcatgctcttgggccgaaaatgatgagcgattcctc

SEQ ID NO: 24360 - DNA, 1172 bp, Zea mays
  Clone ID: LIB3608-038-H6_FLI
gcgcagctgcggcatgccatgtccgaatctgacggcgatggcgccatggagaaggttctgggaatggattggagtaggaagcccggagatccggtcaactcggccgttgacgcggagtggatcgcggggatagctaggctggggctcgacactaacttcgtcgttgtgcacggggccgggtcttttggccactttcaagcaagtagatctggagttcataaaggagggttacattcgacactggtcaaggctggctttgttgctacaagaatttcagtgacatctctcaaccaggaaattgttagagccctagcaagagaaggaataccatctgttgggatgtcaccatttgcttgtgggtggtctacccaacaaagaaaacttgcatcagcaaatgcttctcaaataattcagtcactccatgcaggttttgtcccagttttgcatggtgatgcagttcttgatgaattattggactgtaccatattgagtggggatgtcattatacgacatcttgcacagcttctaagtccgaaatatgtagtatttctgacagatgtccatggagtgtacgatcgccctccaactgactcaaatgcagtacttctgagagaaatagaggtggatgacattggaggctggtcgattgtaaaacctgcattgctgcaaggcaacactaaaggagtggagatatcagttgcagcacatgacaccaccggtgggatggagaccaaaatactggaggctgcagtgatagctaggcttggaatagacgtgtatattaccaaggctggaacagaacactcgctgagggccttgaagggagatgtgagcaccgactcggaagattggcttggaactattatacgctcttccaaatagatttcttgttgcaaaaacattcggactggtttactggcgattttcccgatgttatatgagcagtgatgagccttgggctttcgatgatgatccagcacgggtctattccctactgtggtcgtagtttggtttacaagcgtcagcctgatgttacaaatgccgttcagtaaatttgttttgttttctgaaaagataagatgcattggtcgcaagagaggaaaaaattgatttttgggacttgtcattcctaatattgacttcacagaaagaaacatgactcaaaatatgtc

SEQ ID NO: 24361 - DNA, 1253 bp, Zea mays
  Clone ID: LIB3608-040-B5_FLI
gatcgagaaagtcgccgggtttgcctcccacgagcctgccctgctgcctggggccgctggtgaagcggaagcacatgacgaaccaggacgtggtcgtgtcggagatgggcattgcggccgggaccgcgctgccgggctcaagcccggccctcctggcctgccggggcgcggcggccggcgccatgtccctgcggtacctcgacctggcagcggcggcggcgcgctcggccagctgcacctgggtcgaggccatgcgcgcctcctcgcccacccgctcccgcgccgccgccgacgtcgacgagctcacggcctggatgaggaagcacccgtcggcgctcgggaagttcgagcagattgccagcgcgtcccaggggaagaaggtcgtcatgttcctagactacgacggcacgctcgcccccatcgtcgccgacccggacgccgcctacatgagcgacgtgatgagagcggcggtgcgcgacgtcgcgaagcacttcccgacggcgatcgtgagcgggcgctgccgcgacaaggtgcgcagcttcgtcgacctgtcggagctctactacgccggcagccatggcatggacatcgaaggaccaagctccaatcccgagtcagttctgtgccaacctgcgagcgagttcctccccgtgatcgacgaggtgtacaaggcgctggtggagaagacgaagtccacgcctggcgccaaggtggagaacaacaagttctgcctgtccgtgcacttcagatgtgtagatgaaaagagatggaacgcattggccgagcaggtcaaggcagtgatcaaggactaccccaagctaaagctcactcaaggcaggaaggttctggagatccgtccgagcatcatgtgggacaagggcaaggccttggagtttctgctcgaatcgctcggattcgccagctgcagcgacgccctcccggtgtacatcggtgacgaccgcaccgacgaggacgccttcaaggtgctgaggaagaggggccaaggcgtcgggatcctcgtgtccaagtgccccaaggagacgaacgcctcctactcgctgcaggaccccggcgaggtcatggacttcttgctccgcctggtggagtggaagcggaaatccacgacgactcggccgccggtgtagctcttgttcttggtcgactagtcaatcgatggaccgaccgatcgatcgaatgggcgtccaatcatgcgcgaaaacataccccaccactgcaagaccaatttttttttc

SEQ ID NO: 24362 - DNA, 1605 bp, Zea mays
  Clone ID: LIB3608-040-B8_FLI
ctcttgccggtcccgaataaagagcagcagcgcaagaggtcggtagagcgagaagaaggcaatggcggccgagagcttccttttcacctcggagtccgtgaacgaggggcaccccgacaagctgtgcgaccaggtgtcggacgccgtgcttgacgcatgcctcgcgcaggaccccgacagcaaggtggcctgcgagacctgcaccaagaccaacatggtgatggtgttcggcgagatcacgaccaaggcgaccgtggactacgagaagatcgtgcgcgacacctgccgcgagatcgggttcacctccgacgacgtgggcctcgacgccgaccgctgcaaggtgctggtgaacatcgagcagcagtcccccgacatcgcgcagggcgtgcacgggcacttcacgaagcggcccgaggagatcggcgcgggcgaccagggccacatgttcgggtacgccaccgacgagacccccgagctgatgccgctgagccacgtgctggccaccaagctgggcgcgcgcctcaccgaggtgcgcaagaacggcacctgcgcctggctgaggcccgacggcaagacccaggtgacggtggagtacgtgaacgagggcggcgccatggtgcccgtccgcgtgcacaccgtgctcatctccacccagcacgacgagaccgtcaccaacgacgagatcgccgccgacctcaaggagcacgtcatcaagcccgtgatccctgagaagtacctcgacgagaagaccatcttccacctcaacccgtccgggcgcttcgtcatcggcgggccccacggtgacgccggcctcaccggccgcaagatcatcatcgacacgtacggcggctggggagcccacggcggtggcgccttctccggcaaggaccccaccaaggtggaccgcagcggcgcctacgtggccaggcaggccgccaagagcatcgtggccagcggcctcgcccgccgctgcctcgtgcaggtgtcgtacgccatcggcgtgccggagcccctgtccgtgttcgtcaactcgtacggcaccggcacgatccccgacaaggagatcctcaagatcgtgaaggagaacttcgacttcaggcccgggatgatcagcatcaacctcgacctgaagaagggcggcaacaggttcatcaagaccgccgcctacggccacttcggccgtgacgacgccgacttcacctgggaggtggtgaagcccctcaagttcgacaaggcatcggcttaaggttgggagtgtcactgtggacatgaggactaccttcctctggctctgctgttacctgcaagcattgctgctgctggatgtgtgtgtttgatcagtgactggctgctgctccatagaagatgaacggagagaaggatgatgaagggctttggcaatcgccgctgcaactgcaacccatgccatgccggcttagtgattgggtataatttggcttggcagcagccagcattattatgtgctgatctgttatcttttactagtttggtcgtccgatatctttctttctttttccccccttttcgactctgtactgaaactgctgagagattcgcagtattgttgtatcgtattcatatgct

SEQ ID NO: 24363 - DNA, 847 bp, Zea mays
  Clone ID: LIB3608-040-B9_FLI
caaaaaaaacgaactagaaacgaccgcgaagccacaggtcgaaggcggcggcggcgatggggagcgacacggagacggagaagaaggcctcggtggcgctgatgtccatcgcgaaacccctcgctggaaagaagctctgcaagcggaccctcaagctcgtgcgacgagcctccgaggcgaagtgcctcaagcgcggagtcaaagaggtagtcaagagcattcgccgcgggaacaaaggattgtgtgtgatcgctggaaatatttctcctattgatgtgattacacatgttccgatactatgtgaggaagctaatgttccttacgtatatgttccatcaaaagaggatcttgcgaccgcaggaaccactaagaggccgacttgttgcgtcttggttctgaccaaaccaaacaagggggagctcagtggagaggtgaaggataaactgaagtcggactatgaccaagttgtaacggaagtcgctgaggctacatctgcaatgttctgaggaccacattatctgagaatccggcaattccctgtgcacgtctttcttggtgtagtatcctgcccagcttccgtgaaccgcaccagtatgttttgcacggtggctggagcgagatatgactatgagtttacctatatgctatggaccatccttgttggcggcatatgattctaccagtgattagatctagccaattataatcagttctgtgagcagactgtttccttgtgttgtcagatctcggtagctagtgtgtgcgttccaggtctttttgatcttatcacaagatgtgctcgtgatacttgtgttgaaggaactgtggtatcttagcgccttatatc

SEQ ID NO: 24364 - DNA, 1409 bp, Zea mays
  Clone ID: LIB3608-040-C2_FLI
gggagacttcgtccgatgacgattccgaagactgaggtcgacactcgacaccatgtacgtttagcaagcccttgagcaactaggtgttggaggttcgagcgggcgtcgtagacgctcttccttgccacgtctagtaatccatagggatcacagtgctagcgaaaatctgataaagctccactacttcggtccaaatcctgtctatcccgcccacattttccaacgaaggtttcggatgcagcggcctttgttcctgcgtatccttagaggtgtgcagcaagtggacagatttttttactgttaggtgtgatgctacgggtttagcggggctcggtccgttgcaaaaagtctctgctgctttgcgtgtcctcgcatatgggttgcctacggatgctgtcgatgagtacattcaaatcggacaaactaccgctagggactgtctcatccgtttctgccatgcaatcatctcatgctacagccaacgttacctccgtattcctaacagaaacgatgttgctcgcatacttcgtgtcaacgctgataggggtttcccgggcatgcttggctcaattgactgtatgcattgggaatggcgtaactgtccaactgtatggcggggtcaattttgtggccggaactcacgtccaaccatgatattagaagctgtggcgtcgtacgacctctggatttggcatgccttttttggaatgccaggaagtaacaacgacctcaacgtgctccataggtctcccattttcgatcctttacacaacgacgccatgccccccgtgcactacaccatcaatggtacacaattcaatttcggatattatttagcagatggcatatatctgaattggcccacatttgtgaaagctattcgtcacccattcgaagaaaagaagattcactttaccatgatgcaggagagtgctcgtaaagatatcgagagaacttttggtgtgttgcagtcgcgttgggcagtactccgcgggccagcttatggttgggttcgcaatcacctcacggagatgatgattgcatgcattatcatgcataacatgattgtcgaggacgaaggcgaaggagcagaaaatgttgattttgttggtgccaccccacctcctgatctttcgactgcaattccgtaagtccggaacgagtggttgaacacgactgcctggtccgaaatgccaaatgaaggagatattgatatcacctgcaagaacacgtacctatctttgcagtacaaccttgtcgaacatctttgggcaaggcgtggttccatgggttgaagtatggctacttaattaagttgtcgagtatcagtgtaatgtgttggtgtctactttagtgtactttagtcgatgtaagcctccagttgtggtcaagataactgctgttatgtg

SEQ ID NO: 24365 - DNA, 1043 bp, Zea mays
  Clone ID: LIB3608-040-D6_FLI
ccatcacacacaagacacaaccccactcacccggcagggaggccctcttcgtcggcggaggccatggtttccctcaagccgcagaagaggctcgccgcgggagtcctaaaatgtggcaaggggaaggtgtggcttgaccccaacgaggtctacgagatctcgatggctaactcgcgtcagaacattcgtaagctggtgaaggatggattcataattaagaagccacagaaaatccactcaaggtcccgggcaaggagggcccatgaggccaagcagaaggggaggcactctggttacggtaagcgcaggggtaccagggaggctaggctccccaccaagatcctttggatgcgcaggatgcgtgtcctcaggcgtctgctgcgcaagtatcgtgaagcaaagaaaatcgacaaacacatgtaccacgatatgtatatgaaagtaaaaggaaacatgtttaaaaataagagggtactcatggagagcatccacaagtcaaaggccgagaaggccagagagaagactctctcggatcagtttgaggccaagcgagccaagagcaaggcttcccgtgagagaaagattgcaaggagggaggagagattggctcagggcccaagggaacctgcggcagcaccagtatcagctactgctccgtttgcagctgcaccaaagaaggcgaagaagtgaaaaaggtggtcttctagttctaggacctaattttggagcgccccaactcttttgctgttacatatccaagctgtcagatatctgtaataacatcttatctcgtttttcatgttggacaatgtagtagagttgtttgtcccaagtgtatttggaacgaattttcacagaatctgcttaatgcttcggtggaacccagttctggttttgctattttaccttgtagatctggccgctgtggctagcctccgtgcttttttgcttcgatgttccataaccttgtctggtgttgacccgcgatgacgcaggttttgtagtgttctttggtgaattatgagctctgatgtgatattgat

SEQ ID NO: 24366 - DNA, 801 bp, Zea mays
  Clone ID: LIB3608-040-E1_FLI
gattggacaaccctgtcgccctctcggtctccctcgagcttttcttgtgcgcagccgcagccgctgcttttcgttcgtcttcatcctacgcgagggcgaaacccagaaaccctctccctcctgtactccggccgacacatccaggggcgatgacgctgggtagctccggcgccggatcgagcgtcgtcgttcctcgaaacttcaggctattagaggagctcgagcgtggagagaagggcattggtgatgggacagtgagctatggaatggatgatgctgatgacatctacatgcggtcatggactggtaccatcattggccctcacaatactgtacatgagggtcgcatctaccagctgaagttgttttgtgacaaggactatccggagaagccaccatctgtcagattccactcaagaatcaacatgacatgcgttaatcacgagacaggaatggttgatccaaggaagtttggtttgctagcgaactggcagcgggactacacgatggagaacatcctcacccagctcaagaaagagatggctgcctcgcagaatcgaaagttagtgcagcctccagaagggacattcttctaacgaagtgttcacttggcccgtcatgggatccaacagtaattgaaagttttatgggctaaaaaacagcgtctacatctggtgcccctgcctgtctttgtgattttttatgacttttatgttcttgtatcgtgaaccgcagtgaacaacggttgttgcaagttccagggatatctttggaagtggtaaacaaatgcgtcttatttct

SEQ ID NO: 24367 - DNA, 899 bp, Zea mays
  Clone ID: LIB3608-040-E7_FLI
cgagttctccggtgcctttgcaaaggcgcagattgctgcgggacagaagctccccctaagcggcaccgtgttccttagcctgaatgatctgacaaaacggcaccttgctgagatcgggcgtgggttccgggagcttggcttcagcatcgtcgccacgtctggaacagccaaagtgctccagctcgagggcgtcccggtggagccggtactaaaaatccatgaggggcggccaaatgccagagatatgctgaagaatggccagatacagatcatggtgataacaagctcgggcgacgcgctcgactccaaagacggcctccagcttcgtcggcttgccctcgcttacaaggtgccgatcaccacgaccgtggacggtgcacgggcctccatcgatgccatcaagagcttgaagaacaagtcgatcgagatcctcgccttgcaagattacttccagactgctgatgcttcggaggatttacaggcggtggcacgaaccaccccttagtggtgtctcttcttttcccatatataatgtgagcctagctcaaagccaaaaccacatcccaaatgaaaattttgtttatggttgcacctgcagcatgcatgcgcaaagacaggcatccagattgtatcggtcacaggcatggctggacagaatcggtgttgggcgaacgtagttgtagtttgtcatgttagaagggtgatagcatccatggaaataaggcttcttcccaactgcggttttgatgatgactaccataccatatcatatcccttgtggaggtttatttacattgtatcattgtctcacaaaaacgaaaatgtgcgacgtacatgtattgttatgcttatgcatgttataatcagattctttgatgagtagacaggcattttactgt

SEQ ID NO: 24368 - DNA, 1408 bp, Zea mays
  Clone ID: LIB3608-040-F3_FLI
ctgctctctctctctctcgcctctggtgcgcagagctagctctcttgaagcctcgccgctgctctgctccccagctctgccgctgcgtgcctgcgtcagctgttccattgcagccagcgagccttgagctgctagctctctcttcaccacacttctcacgcatggagttcgaggatcgctgccacaaggtccaggagcccaagttcgactgtctgctcttcgacctcgacgacaccctgtatccgctgagctccgggatcgcgggccatgtcaagaagaacattgaagattacatggtcgagaagctgggtattgacgagagcaagatcgagaacctgggaaatctgctgtacaagaactacggcaccacgatggctggcctcagggcgatcggctacagcttcgattacgatgagtaccacgccttcgtccacgggaggctgccgtacgacaacatcaagcccgaccctgttctcaagcacattctcaagaacctgcgcatccgcaaactcgtaagcgtcctcctcactcagacgacacgaatttctcctccttcggacaaggatcgagttgctgaaccatacgatacctgtggtgtggtgtggtgtttcagatattcaccaacggcgacaaggtccacgccgtgagagccctggagaggctgggcctggaggactgcttcgaggggatcatctgcttcgagaccctgaacccgccgtgcccgccgcagggagaccgggagcccgagatcttcgacatcgccggccacttcgcccgctccggcgccgccgccgagcttcccaagacccccgtcctgtgcaagcccaacgtcgacgccatggaggaggcgctcaggatcgccaacgtcaacccgcacaaggcgattttcttcgacgacagcgtacgcaacatccaggccgggaagcagatcggccttcacacagtgctggtgggcaagtcgcagcgggtgaaaggcgcggaccacgcgctggagagcatccacaacgtcagggaggcgctgccggggctgtgggaggaggccgagaaggcggaggacgtgctctacgccgagcgcgtcgccatggagacctcggtcaccgcgtaaacccctctctcgaatcctccggtgcaccgtcagcccaaccttctcgacatccaggaccgggacgatcgcataccactctctctcccgagccaggtctggtggtctcacgctggaactgaatccagccatggccgggccgagaatttccgacagcaggaaggggtgcagcatgtaaaggggggagcagatgagatcatgtaaaggggggagcagatgagatcatgtttgggatgctcccaaatatgtatagttatgtatcagccagttgtttgtaaattaccaataaatattagaagtaataag

SEQ ID NO: 24369 - DNA, 955 bp, Zea mays
  Clone ID: LIB3608-040-F5_FLI
ggaaatatttggtccagtgcttctcttaatgaaggcggagagcctagaagatgccatccaaatcataaacagaaacaagtagtatctttctccccgatgcttgtagatctgaagcattcattgcaatctggtataaatatctattcgtccatgtctgcaggtatggcaatggtgcttccatatttacaacatctggcgtctctgccaggaaatttcaaacagacattgaagctggccaggtgggcatcaacgtgccgattccagtccccctgccgttcttctccttcacgggcagcaaagcttcattcgcaggagatttgaatttctacggtacacccttctcatcctaacaccgcctgatccttcccaaacagttcgtgagtgactaacacgatggcatgggatgggatgtcaggcaaggctggcgtgcagttcttcacccagatcaagacgatcacgcagcagtggaaggagtcgccggtgcagcgggtctcgctctccatgcccacctcgcagaagtgagacgtcaaaggacgctcacgccactctccaaagctccactcctctggacatagacccacgcatggccacaagagaaggataattggtaggcatggcgacactccatgcacggccatgatactagtgtgtgctcgctttgcttttttgtctggacatcttgcatgcgcattcagaacatccaatgacgaaggtttagatatatgtgagcgctgcccattatgctgttaggattactgtaaaagccccaggtcctttgatcgagtgtcatgtgtaaacccacaataagaggagaaataaaaatgtcgccgtgctggtttgtggcatctctcacacccatttccgttcatctctttggcttccgtcctgttgtcgggtggctggtgtggtgtgtgtgtggaccaaatttattcataagcataaaattcagttttcc

SEQ ID NO: 24370 - DNA, 1205 bp, Zea mays
  Clone ID: LIB3608-040-G3_FLI
gcctgtcttcctcgccggctgatttttgccctcgcgcgatccaatcctctcagccgccgctcaacttcgagaataaaaatcctcgcgcgcgcccaggatcttcttcctccctgcttccagcgccgaggctccctcccccagctctctcacggtcgcccctgctcctccggtcctcccctatggcgccctgcttgctccctgtgccgcagtccctcctctctcctccctccatttctccttcacgcgcccaggctcgccgtggagtttttcgcgcgcagctccctcagctccgtactcagcgctcgtttctgctcggattcctgctctcatggacgcgtccagcggtgctcctctgatgcgcgcgctccagtcgtctccccgagctcggctctgccgctcctatggtgtccggccagctctcctgctcttctcggttgcctgcgtgcctagtgtcgcacgcatgctcccaggtccgcagcaccagctgcctgttctgcttgctcgtgtctgcgcgccgctgttgcccagctcggatccccctcgctgcgcgctgagctcttcgttgttgtccgtgcgcgcgccgctcgtcgacctctctgcgcacgtatagctcgctcttttcttatttgcggcgcgcacgaattttatctgctcgccgcagcgtgtcgagttcctgcaccatcatcgcttctgtcgcaagctcgttggccacagttatcttgatcgcgtcagcacgcgactgtggttgttggggaccttcggcttccgaaggtcctcaaaaacatgatttaacaatgtttctggagtataatatgtgaacaggtatcttcggacttgtatcagaaagggagaagctcaaaagatacgaaggttgacacagtgccgaagctgtgaagcaggaaagcttcggcatgttcgcagaaaagggaaccgacttaaagatgaaaagaccatttagacctcgatagattgctatggaattatcaccaaatgtaaagggcatatatgtaattttgtatgggttgtaccccgtgcctataaataggtgaacagtacccccgtactgttcacgctgacttggcatttgcttttgcgtcacacttgtattttcatctccttccaagccgaaggtacatttataattcgatattgtttctatttctctatgatgatataaaaaagttaaatgaataatgttatatgat

SEQ ID NO: 24371 - DNA, 826 bp, Zea mays
  Clone ID: LIB3608-040-G7_FLI
cagagagttgcgcccggaccccggaccgcgccgacccggctcgcaaactcctccacaaccctcgtcgccgccggctgctccacccccgccaccgccatgggtaaattccgcaagcttggccgcgattactcccaacgcatctgcatgctcaggacgatggtgtcgcagctggtgaagcacgagcgcatcgagaccaccgttgccaaggcgaaggaggttcggcggaaggcggatcagatggtgcagctagggaaggagggtactcagcatgcagcaagacgtgctgctgcctttgttcggggtgatgatgtcgttcataagctatttactgagctggcctttcgctacagagatcgagctgggggctacacaagaatgttaagaaccaggatacgtgttggtgatgctgctccaatggcatacatcgagttcgtggatagggagaatgagcttcgagaggccaaacctgcaacgccgccgcctcctcaacgagtccctcttgatccatgggccaagtcacgtgctagccaacagtgggcaggacctaaaatcaccaagagctcggaaacggacggcttatgagctagtatacctatgttccatagaaagtttcagttattttgcttaagagatttttttatctagagatatctgccgatagaataattcaaactttattgtcattttgtatgcttctaattcaccgagtgaagattgcaaggctgtgtccaaacaggaggaagtttggaacgagagagatgtatctctgctttgcttattggagttgtaacagatccaactacatgatcaaattcgtgtatgcatc

SEQ ID NO: 24372 - DNA, 1724 bp, Zea mays
  Clone ID: LIB3608-040-H4_FLI
ccccttttccccctcccttcgtctcccgagtcctgcgatccgcatccgccccacctgaaccctactccacgtcgcctcgcctcgcctcgcctcgcctcgccggttgggttgtggctgagccgatctgacccgatcgggtcggtccttgcgccgccgctgcgtgggttcatctcggtcgcccgcctgctcggctcgatcggccggggacggcggcggctagatctgcgatggagggcaacaaggacgacgcggccaagtgcctgcgcatcggcaagggcgcgctcgaagccggggaccgcgcgcgcgccatcaaatttctgtccaaggcaaagcgcctcgacccctcgctgcccatcgacgacctgctcacctcccttctcaacgcgcaagacgactccccggcttcctcatcatcatcgccgcctccaccaccgcaaactgccgcagcaggggcatcggaggcagctgaggctgatgggctgagagagaggaagcacaagggcaagaagagggaggaggaggaggcgactcctgctgccagggagtacaccgcggagcagctcgaggttgtgcgccaggtcaagaagcacaccagggactactaccagatcctcggcctggaaaaggactgcagtgtcgaggacgtgcgcaaggcctaccggaagctctcgctcaaggtgcaccccgacaagaacaaggcccctggcgcagaggacgccttcaaggccgtctccaaggccttccagtgcctgagtgatgcggagagccgcaagcgctacgaccttgttggctcggatgagccagtagcacaccacaggagggcctccactgcccgcgcatacaatgggttctatgaggatgactttgacccagatgagatattcagaaacttcttctttggcggtatggcgcctgcaaccaccaggcagtttggacagtttggaactttccattttaggactggtgggatgcatgcccatgcccatgcccatgcccaacaaaactctggtggctcaactgtcaggatgcttattcagctgttgcctgtcctactgctgctgttgctcaacttcctgccatcctctgagcctgtctactcgctgtcccgttcatacccttatgagcataagttccaaaccccacgtggagttgcatactatgtcaagatgtctaatttcgaggagcagtatccacaccaaagcactgagcgagcgacgctggagcggcatgttgagagggattattactccataatcacacagaattgcagggctgagctgcagcgtcgccaatgggggctgtcataccagacaccacattgtgatatgcttaaaaattttgaggctgcagcaaagtaataactcatccaattctgtaaggttgacatggggagagagactgctggccactcatgtaaaggtgctgccttagccgccagcttgaagtttgaggggacattttagtttggcttagtagtaaattttgtggaataagtgcctttgataactatacaccactgtccagatgctccctcttagtattggcaaggagtgcgttaattagttacttcaaaaagatatgcaagcttcataggggttgatcacatgcaaaccagtgtatgtatatgaagtatatctatctcattcttttaacttttttgaagtgaagactgtagttaaaacagaaatgcaactataacacaaatgtgatattcattttatatt

SEQ ID NO: 24373 - DNA, 839 bp, Zea mays
  Clone ID: LIB3608-041-A10_FLI
cgtccgtccccactccccaatccacctgccgccgcccgcaagcaccaaacctccatccgccccaagcaccgccgccgcgccatgaggcctctcgacgagaaggagacgactcaggtattcgagaagctgttcaagttcacggggcccaacctgaagcacctcctggagcgccccgcagtggagggccccgacgcggagcccggccgctactgcctccgccttcaccgcaatcgcgtctactacgcctccgaggcgctcgtgcgccgcgccaccgccgtgtcccgaccgcgcctcgccggcgtggggacgcccatcggcaagttcacccaccacggcgcgttccaccttacggtccacgcgctcgacctcctcgctgcgcacgcgcgccgccgcgtctggctcaagcccgacaccgagcgttcctttctctttggcaactctgtgcccaagtcttctctcgctcgcatcaccgagaacaccaaggccggggacggggtggtcgtcatgtccatggctgacgtcccgctcgggttcggcattgcggcgaggtcggcgcaggattgcaggaaggccgacaccaacgccgtcgtcgtgctgcaccagtcggacgccggggagtacctccgcaaggaggaggagctcatgtgaggtgagcgcataggcttggctggttaggtcatattcatgagtgaattatggaagattgtgccctactgttgtgtgttccaaggcttggggcatatatatatgtactgaatgattaatcactggttatgagatgcgattatcgctgttgccagatttgacctttagcagctggaggaacaggattgttcttg

SEQ ID NO: 24374 - DNA, 1124 bp, Zea mays
  Clone ID: LIB3608-041-A7_FLI
acacgaacctcctctgccacgccaacgtcgacaccttcatagtcttcagatccctgaccccgctcctggtcgccatcgccgacacgacgttccggaagcagccatgcccttccaagttcacgttcctgtccctcgtggtcatcctgggcggagcggtcggctacgtgacgacggattcggcgttcagcctcacggcgtactcgtgggcgctcgcgtacctggtgaccataacgactgagatggtgtacatcaagcacatcgtcaccagcctggggctcaacacctggggcttcgtgctctacaacaacttcctctccttgatgctggcccccgtgttctggttccttacaggcgagcacaggtcggtcttcgcagcgatggagtccaggggcgaaggctggtttcaactggacgccgtcgtggcggtggcgctgtcgtgcgtcttcgggctgctcatcagtttctttggcttcgcagccaggagagctgtatcggcgaccgcgttcaccgtgaccggggtcgtgaacaagttcctcaccgtggccatcaatgtcatgatctgggacaagcatgccagtgcgtatggttcggtctgcttgctgttcaccatcctcggtggggtgctctaccagcaatcggttacggtgaaaggaaacggtgcagttgtggcacagcgtgagctggtgcccgagcaacctgaggaggttgacgaggagaaacaaagcttagtttcttcagctaaataatacggtgcaacggatcacttgcaatgataggatccgtttgcaggtttattctttggcctttgaatgggctcgtttatgtgtctgcgaaacaaacatgagggaatactatactagtggaagtagcacttccgtcaatggaagccctgctattgtttgaatttgcatcaagattgcaacgttttgttcactgcgaatgtgtactttagctgataaaggtggttcttgatattgcatatttttttcctttacaaaaaaatatttttatgtgtctaatgcctcagtttatctagcgcaaatgtccgcctttcaaatttactttgtaaaattacttaagctacctccagcaacttatttatcctcgtaccaatattcaaactc

SEQ ID NO: 24375 - DNA, 1661 bp, Zea mays
  Clone ID: LIB3608-041-E4_FLI
ggtggcatcgccaattcaactccgcatctgaatcggcactcggcagcgcgccagctccatagtgtaggaggagatggcgctcacaagaatcggtcttgctggccttgcggtcatggggcagaaccttgccctcaacattgcagagaaagggttccccatctctgtgtacaacaggacaacctccaaggtggacgagaccgtgcagcgtgccaaggcagaaggaaaccttcccgtctacggcttccatgaccccgcgtcctttgtgaagtccattcagaagccacgggtggtgatcatgctcgtcaaggccggcgcgccagttgaccagaccatcgcgacgctcgcagctcacttggagcagggcgactgcatcatcgatggggggaacgagtggtacgagaacacggagaggagggagaaggccatggaggagcgcggcctcctgtatcttggcatgggtgtctctggaggagaggagggtgcccgcaacggcccgtccttgatgcccggaggctcgttcgaggcttacaagtacgtcgaagacattgtcctcaaggtggctgctcaggtccctgacagtggcccgtgtgtcacgtacattggcaaaggtggatcgggcaactttgtcaagatggttcacaacggaatcgagtatggcgatatgcagctgatttccgaggcatacgacgttctcaagtcggtcggtaagctcaccaacagtgagctgcaccaggtgttctccgagtggaacaagggcgagctcctgagcttcttgatcgagatcacggccgacatctttggcatcaaggacgagcatggcgatggctacctggtggacaaggtccttgacaagaccgggatgaaagggacagggaagtggacggtgcagcaggccgccgagctgtcggtggccgctcctacgatcgaggcgtccttggactcgaggttcctgagcgggctgaaggacgagcgggtggaggcctccaagatcttccagggtgactactactccaccggctcgccggtggacaaggcgcagctggtggaggacgtgaggcaggccctgtacgcgtccaagatctgcagctacgcgcagggcatgaacatcatcaaggccaagagcgcggagaaaggctgggggctcaacctcggcgagctggccaggatctggaagggcgggtgcatcatccgcgccatcttcctggaccgcatcaagaaggcctacgacaggaacccgggcctcgccagcctgctcgtagaccccgagttcgcgcaggagatcatggacaggcaggcggcgtggcgcagggtggtgtgcctcgccatcaacaacggcgtcagcaccccgggaatgtccgctagcctggcctacttcgactcctaccgcagggacaggctgcctgccaacctggtgcaggcccagagggactacttcggggctcacacctacgagagggtcgacatgcctggctctttccacaccgagtggttcaagattgcgcgcaacatctccaacaactgatgagctgctcaacggatggcatgcccggtgttgactactccagtcggtaatgagatttcctgcaggaacttgtctattgatctttgtaagttaattatttatatgaataaaataagagcagacatgcttgtgtttgggc

SEQ ID NO: 24376 - DNA, 1879 bp, Zea mays
  Clone ID: LIB3608-042-A9_FLI
tctaaataaaatataaaataaaaggctcgacgtcgtcgtcacctctctcgccgtccacgagtcacggcgggcgggcggcggcggcggccgggggtcccggctgcacacggctcgccaccatgcctgaccccaccaccaaactcccctctccacgcccccgccggcgccgcaggctcttcagcctctgcctcggcacagcgctcctcgcgctcatcgtctccgcgctcgtccacgtcgtcgcccagccgccgggtcccgctcccgcctccgcgcgcttctccgtcatcatagacggaggcagcacgggcacccgggcccacgtcttcgcggcggggcccgacggccgcccggatctggcgcgctccaccgtgatgcgcgtctccccgggcctctcgtccttcgccgccgacccggcgcgggccggggagtccctgaagcctctgttagattttgcgagggataagattggcggcgccgttagggaggcggaggtgcggctcatggccaccgcagggctgcgcctgctcgaggagcgcgcccaggaggcgatcttagcgtcttgtagggacgttctacgagcctctgggttccggttcgaggacgcgtgggccaaggtgatcccaggctcggatgaaggtgtctatgcttgggttgcggcaaattatgctcttggaagacttggaggggatcctaacaaaaccgttggaataattgaacttgggggcgcttcagctcagcttacctttgtttctgatgaagtacttccacccaaactgtcatataattatacttttggtgaaacaacatacactctctataccaacagctttttaaactttggtcaaaatgcagctcaagactcattccatgaaatgctgaggtcaagaggctctttcaaaaatggtacacttgctgatccttgtgctcccagaggatattcacgcaatgaaggtgcttcaaggtcaacattagagaaccagtatgttaataatgggactggaaactttacagagtgcatatcttcttcacaacttttactgcaaaaaggaaaggattagtgccacatgtatctcatataaatgcagaaaagtgccagtatcaacaatgtcacctgggatctacttttgtacctgagctgcgtggatacttcttgggaactgaaaatttctattttacttcaaagttctttggacttaagaagtcttcatcactatctgatttcatgtttgctggagaacaattttgcaatcagcatttgtcgagtcttagaaaaaaacatcccaataggtcagatgaggatttttcacggtattgcttctcgatggcatacattgtggctctactgcatgacagtcttggtgtaccactggatgacaagaggattgagtattcaaaccaggttggagacattcaggttgaatgggctctaggagctttcatcacactgatgcaaaatacgagtttaaagccattacacaccaccgcagaatcaacccatagcaatagaccattgtttgttgtgctgggaatgtttcttttatgtggagtactctttgtatcaagatggaggaagcccaagacgaaaatcatatacgacttagagaaaggccgatacatcataacacgcatcagttgacgctaaatcttgtgcagaagaacaaaattatacgacatgaatagatgctgtgttgtgcaacgatgtacgagttcaattctttgtgttctatctttaggtagcagagctgggtgggtggagcaggaagatagctcatttgtgcgtatagaagaatgatgtgtagaacaaattgtcatgtgttaattgaattatttgatgaataattatagttgctttgttcatctaatgaggtcgatatttctc

SEQ ID NO: 24377 - DNA, 1154 bp, Zea mays
  Clone ID: LIB3608-042-B7_FLI
cacagtcgcaactcagatcgcaaaattaaacccgcagcaaaccaagcggcaagacaatccgcgtgctagctagctccctttttctgattcttacgtacgtgcccgtactcgtagcaagcaagcaggtcgtcgcgcagtcatggcgcccaggatgatgctggttctgtggggcgttctggctgcagcgtcgtccaccgtcgtggcgggctggtcggcaggcacggcgacgttctacggcgggtcggacggatccgggaccatgggcggcgcgtgcgggtacggcaacctgtacagcgccgggtacggcgtgaacaacgcggcgctgagccagaccctgttcaacgacggcgcgtcgtgcgggcagtgctacctcatcacctgcgacgcgtcgcgcgcgggcgggcagtactgcaagcccggcggcgccagcgtgaccgtgacggccaccaacctgtgcccgcccaactacgcgctccccagcggcggctggtgcggcccggggcgcccgcacttcgacatgtcgcagccggcgtgggagaacatcggcgtcgtccggggcggcatcgtcccggtgctgtaccagcaggtcaggtgctcgcgcagcggcggcgtgcgcttcaacgtcgccggctccagctactttttgctcgtcagcatccagaacatgggcggcagcggctcggtcgccgccgcgtgggtcaagggcaccagcacggcgtggatccagatgtccaggaactggggcgctaactggcaggctctctcggggctcactaatcaggcgctcagcttcgccgtcaccagcaccggcgggcagtacatacagttcctcaacgtggcgccggcgtggtggcagttcgggcagacctactccaccaaccagcagttttactactgatgatcctccttccataagctttctgatggactctggttctgtctgttcatcgtcttcctatcctagtacgtatattaattgccgacgtgctgtctcgtggttttgggcggagttacagtgcccgatcgacgaaccgtggccgtggcatgcatgcttcctgttcatagtgccatttttacccagctgccataatggcatcatacatgtgtgcaaaattgtctgcaccacttcaatcaatatgcaaattacattaatt

SEQ ID NO: 24378 - DNA, 1405 bp, Zea mays
  Clone ID: LIB3608-043-B10_FLI
gtctcagttgcgttcgagcgttgtggacttgtggtggtttccttcctgcgccggagaaggtagacgatgggaaggggaagcgaagcagtgccggacgcccgtcgagctgcgctgctcttgatcgtctgcttggcggctcgagcggcttctgcaatccaggatggcctgttgccgaacggcaacttcgaggaggcgccgcccaagtcgcagctcaacggcacgagggtgatggggcgcaacgcgataccgcactgggagatctccgggtacgtggagtacatcgggtcgggccagaagcagggcgacatgctgctgccggtgccggagggcgcctacgccgtgcggctggggaacgaggcatccatccagcagcgcctcgccgtgacgccgggcgcgcgctactccatcaccttcagcgcggcgcggacctgcgcccaggccgagcagctcaacgtgacggtcgcccccgagtcggacgtactcccgatccagacggtctacaccagcagcggctgggactcctactcctgggccttccaggccgcgggcagcgtcgtgaccctgatcgtccacaaccccggcgtcgccgaggacgcagcctgcggccccctcatcgatctgtttgccattaagaccatgccgactcctcggagcagcaagaataatatgctgaagaacggggacttcgaggacggcccgtacatcttccccaacacgcagtggggggtgctggtgccgccgatggacgaggacgactactccccgctggccccgtggatggtcctgtcgtccaccaagtcggtgaagtacgttgacgcgccgcaccacgccgtgccgcacggcgcccgcgccgtggagctggtgtccggcatggagacggcgctggtgcagaacgtgaccaccgttcccggacagctctacaggctccagttctcggccggggacgccggcaacggctgcgtgggctccatgaccgtccaggcgtacgccgcgcggggcagcgtcaaggtgccgtaccagtcccagggcaagggcggccacacgcgcggcgtgctggacttcgcggcggtcgcggaccagaccagggtggtgttcgtcagcatgggctacatcatgaagcccgacggcacgctgtgcggacccgtcgtcgacgacgtctcgcttgtctccacgcggaaccatcctgctcgccgcttgcttctgtgatgctaccgacaagattcgttcatgggttaatgtgaatggctgtgagtgtgctcgaactcgaatgctcgggcttcatttaaccagatctgggtagagtccacggccatcacatgtatttgcatcgttgttttgtctttcttggccaaatgtacttgcttcgttgtagttgtatagactatgtatgcttcgacgggtgtcc

SEQ ID NO: 24379 - DNA, 705 bp, Zea mays
  Clone ID: LIB3608-043-B2_FLI
cgactcgaccgccgccgtcccagttcgcttcgcgtcaccgagagctcgtcggcctccgtccccgcgagaagcgagagcatggacacccaggtgaagcttgctgttgtggtgaaggttatgggcaggaccgggtccaggggtcaggtgacccaggtcagagtgaagttcttggatgaccagaaccgtctcatcatgaggaacgtcaagggccctgttcgtgagggtgacatcctcaccctgctcgagtctgagcgggaggccaggaggctgcgctgaagccctggtggccttggatgtaattctgttaattttgttctatgtttgtcgaacttgccgtgtcccttgcaacatctgctttgagatttactgagcctggattgcagttttattttatgttcctgctggaaagtacacttgccgagacatagttatcattggttatctataatagctcaatcgacgcgtgcaatctgaaggctttgttatatgtggtaaggtcgtctatgtagttttgtcatagttgatgtcggttggctcaaatctgaaggttttgtatatgtggtaagttcgtctatgtggttttgtcatcgttttgtctgtatgatctctctgggcatgctaggtctgttgtattcagttcgatatcctcaaattctgtaagcgggcactgatcggatgtggacatgtggttatagaacgccaaat

SEQ ID NO: 24380 - DNA, 1187 bp, Zea mays
  Clone ID: LIB3608-043-E6_FLI
cagagctgggcgcacggagagaccaggttccaagcgaaggcagtgcaggcaggacgagtggagctagcgtgaccttgcgttgccttcgccgctttgcttgtgtcgagaggagaagcagagcagcgggacacgagcagcgggttggaggttgacaatggctgatcaccagaggatccacccagcggacctggaggccggcaaccggccgctgatgccgggaggctcgttccggtcggacaagggcgacccggcgcagcgcgcgaagcagcagcaacaacaaggctacgttcccggggccctgcctccgccgccgcgccgcgtcgcgccaccggcgccgctgccgccgccgaagcggcggggccggggctgctgctgccggctcctctgctgcgccgtgatcagcgcggcagtgctggcggtgctcgccgcggcggcggcgggcgcgctgtacctggcgctggaccccaaggcgccgcggtactcggtggaccgcctctccgtgtcggcgttccaggtcgacccggcgacgctggcggcgcgggcccggttcgacgtggcggtggcggcgacgaaccccaactcgcgcatcggcatccactacgagcgcgggtccagcctgggcgtgtggtaccagtcgtaccgcctggcgcggggcgcgctgccggccttctaccagggccaccggaacacgacggtgctggcgctggccatggccggcgaggcgcagctgggcagcgccgccgtcgtgtcggggatgcaggacgcgcagcggacgggcgccgtgccgctcgtgttccgcgccgacgtgcccgtgcgcgtccagctcggcaccttcaagctctggaaggtcacggccagggtgcgctgcgacctcgtcgtggacaggctcatggacgtcaccagtctcatcaagatcaaggccggcaactgcaagttcagcttgaagctctgattcattgggttttcagttttctgttctctcttttggagcgagttcagagtcgttgcgttggattctcttggcagagtgctggccgtgcacaggtgcatacgtgcagtgcagtgcactcccgccaacctcgttggcgttcatctgggccgacgtgtacaggtggtagtatataattgttgttagagagggacaatacgcatggctagaattttataattctagagttacttctatc

SEQ ID NO: 24381 - DNA, 924 bp, Zea mays
  Clone ID: LIB3608-043-H8_FLI
gaaaaggtcccttggagaagaggaaagaaaaataccgacaaaacgagaagtcgaagtaccctagaggcccagacgaaggcatctccaatctcctcgccccccacggacctgaaccgagaacctttaccgccgccgcctctcgcctagccgccggagaagcgccgctcgctcaggaggacagccatggcgccggagccggaggatgatattatgaacgagaagaatccccgcccgctcgacgaggatgacatcgcgctcctcaaaacctatggactggggccgtattcgaccagcattaagaaggtcgagaaggagatcaaggaaatggccaagaaaatcaacgacctctgtgggataaaggagtctgatacagggctggctccacctagccagtgggatttggtttcagataagcagatgatgcaagaagaacaaccgttacaagtagcaagatgtacaaagattataagccctaatacggatgatgccaaatatgttataaatgtaaaacaaattgcaaaggtagcaagatgttcaaagattataagccctaatacggatgatgccaaatatgttataaatgtaaaacaaattgcaaaggagctgatataaggagcgtttgcacagaagccaggatgtacgccattcgtgcccgcaggaaaacggtgacagaaaaggattttctcgatgctgtcaacaaggtcatcaagggctaccagaagttcagtgcaacacccaagtatatggtgtacaactagtcggcgtgtcttcatgggatctgttgtttctagaaactctggatctttttcatggttgtatcatcatgagattctctatgcaaaggttgttgtttgtttagcaaattggatgccgagtgatttgtgacctgtaccgcatgtttttaagataacaaggttcttcgct

SEQ ID NO: 24382 - DNA, 727 bp, Zea mays
  Clone ID: LIB3608-044-C12_FLI
gaagcaatcatgggagccacctcgctttcatccacaacggcagcagccatcctccacctcgccctcctccttgcagcagctcgacggcacggcgcgacggactacaccgtcggcgactccgccgggtgggccatcggccccaactacctcatctggtcgcagaaatacaacttcaccgccggcgacaccctcgtgttcaactacgtgaaggagcagcacaacgtgtaccaggtgacgcaggacgagttccggacgtgcgagccgccggcgaaccagtcgacgcgcgtgtgggcgacgggccacgacctcgtcaacctcaccgtgccgggggactactacttcctctgcaacgtcgccggccactgcctcgggggcatgaagttctctatcgccgtggccgcgccaccccctccgcccccgccgccgccgcccccgccggccctgacgcccccgccaccgccgccgccgagctcgggctgcgtgccgaggatttcacggcggcgcgcgtgggcggaggtggggcggattccattcctcgcggcgatcggcctgctcgttctcacttgattgtcgtcgtcgttggtaggtacggtggttaccaatacttttttttgtgatggttaggaggttgacctgcacgttttcttggaattgatggttgggatgaactattgctatgcaagtaatggcgtgcgcatgtatgtctaattgtctacatttgattgat

SEQ ID NO: 24383 - DNA, 990 bp, Zea mays
  Clone ID: LIB3608-044-E10_FLI
cccacgtctcaagctgcccctttctcaccgccgcggccgccacgcgcagcagcaaccgagcaggagcgcagccagcaagctcaggcccgagccctactgcaaccgcccctgctaccgcactgaacaccatggccgacccggcggagcaccgtccagcggaggaggacgaggaagccgcggcggccggcgaggatgaggacaccggcgctcaggtcgcgcccatcgtgaagctggaggaggtcgccgttaccaccggagaggaggacgaggacgtacttgtcgacatgaaggcgaagctctaccggttcgacaaggaggcgaaccagtggaaagaacgtggcacaggcactgtgaagctgcttaagcacaaggagaccgccaaggtccgcctcgtcatgcgtcaggcgaagacgcttaagatctgtgctaaccatcttgtggtggcgacgactaagatgtttgctatccgttttggatctgtcgagaattgcaagaagttcaaggacattgttgaagagatagctgaagagcaaggaaagaccgaggtgaaagaaaacgaggaagtctccattgccgccgcagatttggtacagaagttaacagtgacagaggctagcaaggagggagatgcagaggaagaggaggctcctgcatctgaccataagaaggatgctaaagggtaaagattgaaggcaaacaaggccaaatgattatgattccattcatttcgttgtcaaggttcatcttccccacaaattttcattacaaagtttcattgcattttctcctgagatgatttgtgtgtgtgtgtgtgtgtgtgtgtgtgtgtgttgggtgaaatctgagttgtcagtcatctacatgtctttcttggttgttagacttattctcagtcgcctgtttatctgggatggctaggtacatcatgtttgtacaattatttggggttgattttggaatggctctaaagctcgagatgagatagatggt

SEQ ID NO: 24384 - DNA, 600 bp, Zea mays
  Clone ID: LIB3608-044-F1_FLI
tggagctagctagctagtagaggtcaatcaccaaaatggcgaggcagctcgttgtgcttgctctgcttttcgtgatcgccggtgtggcgcatggcgcgggggagtgcgggagagcctccgccgacagggtggcgctaaggatggcgccatgcatctcggctgccgacgacccgcagtccacgccgaccagcagctgctgctccgctgtgcacaccatcgggcagagccccagctgcctgtgcgccgtcatgctgtccggcaccgccagggctgccgggatcaagccggaggtcgccattaccatccccaagcgctgcaacatggccgaccgccccgtcggctacaagtgcggagattacacgctgccctagctgatgaagacgtcattaacgagaccgtgcgagtgaacctgcatgaacgaatgccattatgccatgcaactatgttgtgttgcgttgttggaataataatcgaatccgctagaataaatatgtacgtgcacgacggcctcttgcttgtatcactggactttgcttgtgtgctgtacgtcaaatatgttccgtttctctcatataagaaaaatctgcaatgcttgttatt

SEQ ID NO: 24385 - DNA, 1931 bp, Zea mays
  Clone ID: LIB3608-044-F9_FLI
gccaactccggcgacgggacgcctccgtcgccgcgcgagctctacaccatcccggcatcatccggttggttccggtgggacgggatccacgagacggagcggcgggcgctgccggagttcttcggaggggcaggcggcgctgggttcgggacggcgacgcggaacccgcggatctaccgcgagtaccgcgacttcatcatcgccaaataccgggaggacccggcgcgccgcctcactttcaccgaggtccgcagggcgcttgtcggggacgtcacgctcctccggaagctctttgccttcctcgactcctccggcctcatcaacttctcggcctcctcgtcctcggtccccgcgtcgcggcagcaggaggtgggggtcgtcgtggaggcgcccgtgggtctgcaggtgacgccgcgtcctccagcgtcctacttcgccgaagagaagcgtgtagcggcgggcggggagaaggagaacgaattccggttgccgccgctgacctcctacagtgatgtgttcggggaatgggcacctgggaaggcgcctatatgcggtttttgcggtgaggagtgcaatggtgcggatgttgagacgctgcaggatggttttaaagtatgttcaaaatgttccaaaagcaataatgataatatcaaggaagaggcgaataaatgtcctggtgacaaaaaagagaatatggaaaatcatgcttccagtgcatggacagacactgagacgttactccttttagaaggagtcctaaaacatggagatgattgggatcttatcgctcagcatgtccgcacaaagaataaatcagaatgcatagcaatgcttattcaattaccttttggcgaacatatgctgggcacaataaatggtaaattcgttagcaggctccacataaaccagacagatgatggaaaaacgaaccagcacattatggagtcttcaagtcactcaaccgaaatggctgatggcatgcagattgatggaagtgaagatagtgctgataaatcagttgaagaatatcctacaaaacgcagacgattgtttttttcaatggatgctaccacttcattgatggagcagttagctatcctgaccacagcagctagcccagatgttgctgctgctgctgctgatgccgcaattaaagcatttggcaatgaaaacccgcaagcaaggaaagcctttcgcctcaacgagcaagaatataagactaaggcttttgcttctaatcatgtccaacagattgaccacaaagttagcaataaggatacggcgatgcatggccagagtggttctgataagcaggaaaagaagttcattgctagcgcatatcaattgagggcagctgttgctactgctgttggtgtagctgctgcccgtgctaaaatgcttgcagaccaggaggagcgagaaatggagctcctaatggcgtctgtaattgaaactcagctaagaaagatgcaatacaagatcaaacactttgaggagctagattcactcatggatcaagagtacaccgctatacagcaaatgaagggatccctcatgaatgaatggataaaggtccttgagcatgcattccgggctggagtgtctctaccgagagatgaattgctcaccaaactgttgctgaactagccgcccatcccatgaggacctggctgtagtcgagtagttctctgatatgcgtcacccccttgactgttgctggtagatagcttcctgcgtgggtgcgtctgtaaaggtgccgattgtgctttcgatttctcagaattttggggatcagaacaacccttcgtaactctttgccctgttgtaccaaactaggttagatggcaaaattgctgaaattttcttgtagctgttgacatgtatggtttcgttcgtatggatgtgaaaatggtacctcagttttggagttt

SEQ ID NO: 24386 - DNA, 1223 bp, Zea mays
  Clone ID: LIB3608-044-G12_FLI
gagcagacgaagctagctaacaattaagcagctcgatcgagcacacacacacttgatcactactagacagtaaacacattgcgcaaaggccgccatggcttaccgcgcctttgctacgctgcttgcagtgctagcatttgtgggcttcgcttcagttccccgtggtctggcaactgacccgacccagctccaggacttctgcgttgctgataacaagaaccctgtgctggtgaacggggtggtgtgcaagaacccgaacatggtgaaggcaaccgacttcttctccacgatagtgccggtggcgccaaacgggcagggctccgctgtgacgccggtggcggtgaacgagatcccggggctgaacacgctgggcatctcgctggcgcgcatcgacttcgtccccggcgggcagaacccgccgcacacgcacccgcgcgggtccgagatcctgacggtcatccagggcacgctcctcgtcggcttcgtcacctccaaccagctgctcaacaacacgctcttcaccatgcagctgaacatgggcgacgtcttcgtgttcccgcaggggctcatccacttccagctcaacaacggcaagacccccgccgtggccatcgccgcgctcagcagccagaaccccggcaccgtcaccatcgccaacgccgtgttcggggccaagccgcccatcctggacgacatcctcgccagggcgttcatgctcgagaaggccaccgtcgactgggtccagcaggcgttcggcgcggcaccagtggccggcggcggcggtggcctgcccggaggaggtggctatcccggcagcggtggtggcctgcccggaggaggtggctatcccggcagcggctttccgggctaccccggccgtagctgatcggtacggtggtggctccacggcggcgccgcctagctagcatgctgcacaagtgcagccgcgcgcgcggatcaggccgtcatacacaaagtatacttatatatagtacctcaaagtcctcaagcattaagccacgtgaagtgaaggctatacgtattaagttcggttgtaatggtcaggtgtaccaaacacccaccaacacctagctagtgagcaggcgcaatgcggcgtctgtgttgatcgagccgtagctctagctctagctcgatcgggttgaataatttgcggcaaaacttatagatatatatggaataaaatcgaaaagtttcatcgtttt

SEQ ID NO: 24387 - DNA, 1136 bp, Zea mays
  Clone ID: LIB3608-044-G9_FLI
ctgctgagtacatcagtactcagatagcccgagtcggaccacactgcttgcacagtagaagatgataggcgatgaactggattccgatgtggttgtacgctacttcagaggcaagagcatcctgatcactggatcaacaggtttcctggggaaagtgctcgtggagaagatactgagggttcagccggacgtgaagaagctcttcctcctcgttcgagccgccgatgacgagtctgccaagcagagggtcgagaccgaggtgacaggaaaggagatctttcaggttctgaaagaaaagcacggtaacgggttcgaaggtttcgtccaagaaaaaatctgccctctgccaggagacgtcatgcacgagaacttgggcctaggccctgccaaactgagacaagtgtgcaaggaaatagacatcgttgtaaacggagctgcaactacgaatttctacgaaagatacgatgtggctttcgacacaaatgtcatgggagccaagcacatatgcgagttcgccaagaggtgcagcaaactcaagatgctgctacatgtttcaacagcttatgtagctggtgaacaggaaggggtggtgctggagaagccattccgtttgggcgaaaccctgagggaaggcacgcacctggacatcgagtccgaactaaacctgataaaagagacgaggagagaactgaaggccagccgttgttcagaaaaggctgagaggagaagcatgaaggagcttggcctcaagagggcaagggagttcgggtggcccaacacctatgtgttcaccaaggcaatgggggagatgctgctgggcgcccacctccggggagacgtgccggtcgtcatcgtccggcctagtatcataaccagcatcctcaaggagccattgcctggatggatggaagggatcaggacgattgactcgttcatcatcggctacgccaagcaggctctgtccatcttcttagttgacctcgacctgatcatggacgtgattcccggggacatggtggtgaacgccatgatggtggccatggcggcgcactcggaggagcgggggcagcagactagcatctaccacctgacgtcgtcggtgcggcacccggcgccctacgccgtcctcgcggagt

SEQ ID NO: 24388 - DNA, 880 bp, Zea mays
  Clone ID: LIB3608-045-D2_FLI
gtttcggttcgcgttcccgatctgatctggctccgtggcggtgctagggattgtgaggtaaagcgtgatggcagcgccaccggcgagggcccgagccgactacgactacctcatcaaactgctcctcatcggtgacagcggtgttggaaaaagttgtctcctgttacggttttcagatggatcattcaccactagcttcattaccactattggcattgacttcaagataaggactgtcgagttggatggcaaacggattaagttgcagatctgggacactgcaggccaagaacgtttccgcacgattactactgcttactacaggggagcaatgggcatcttgcttgtgtacgatgtcacagacgagtcatctttcaataacataagaaattggatcagaaacattgagcaacatgcttcggataacgtgaacaaaattctggtggggaataaagctgatatggatgaaagcaaacgggctgtgcccacttcgaaggggcaagctctcgctgacgaatacgggataaagttttttgaaacgagtgcaaaaacaaacctgaatgtcgagcaggttttcttttccatagcaagggacatcaaacagagactttcggagaccgattccaagcctgaggatcgaactatcaagatcaaggctgaaggggaagctgaggcagcggcggcggcgcagaattcagcttgctgtggctcctgagcacttgtcaccgcaagatagtggcgttctcgcgcatgtaattttcatcgtttcattctttgccagcgactctctccttgtgcttcttgagctatcgcagttgctgtggcctggacaaatgggtgttaactgttaagtcagagcagttaattgctgtattgtggg

SEQ ID NO: 24389 - DNA, 368 bp, Zea mays
  Clone ID: LIB3608-045-D7_FLI
gcatcgaatcgcttctctccctcaagaagctttggcttctgtacctgcacgcggagtttagaacgcagtggctaacgaacgggatgcaccagaagatgcagcatgttcctgagattcgtgtctaggacacaggacagccagatggttatttctacagtactatgctggactaaactattttttgtaccttttcttcccttaagtcctgagttgttgtatctgggcttcacttgcagacacaaacgctcgccttgggtagcttcgttagacccatatatgtgttgtgttggttcagttgctttaagaatacttgtttgttcgaggcatttgccttctgtattgaacttcatgcaaatgatgttatgatc

SEQ ID NO: 24390 - DNA, 2114 bp, Zea mays
  Clone ID: LIB3608-046-A11_FLI
gttccggaccccgtgagtcgctgccacgatcgaggcagggcgccaattgcggtggccaccacttccaatccactccccgcgttcgcctcgccgagctgttcttgctctgtcctctctccaactccacgatttgttccacacccggttcccgagcctccgcagcgcttcttgctgaaaaagggaactccgagttctccagctctggatcggcagagagcggtggttccttttgcggactctgagtcgggctgcaggcttagagctggaaggaataatttgactagagaaatggggcagtgttgcagcagagctacggccccggactctggacggggaggtgccaatggttatggctattctaaccaggcaaagccggcgcaagcacctccgagttacaaccctcctcagcaggcggccgaggtgaggtacacaccatcggcgacgaactcttcggcagtcccacccgtggctgtgccgccgaagccaacggcggacacgattcttggcaagcagtacgaggacgtgcgctctgtctactccctcgggaaggagcttggccggggccagttcggggtgacatacctctgcacagagattgcctctggtaggcagtacgcctgcaagtccatctccaagcgcaagctcgtcagcaaggcagacagggaggacattcgaagggagatccagatcatgcagcacctgtctgggcagccaaacattgtcgagttccggggagcatacgaggacaagagcaatgtccatgtggtgatggagctctgcgcaggtggggagctcttcgatcgcatcattgcaaaggggcactacacagaacgtgcggctgctacaatctgcagagcagttgtgaatgttgtcaacatttgccacttcatgggtgtgatgcatcgtgatctgaaacccgagaacttcttgcttgcgaccaaggaggagaatgcaatgctcaaggccactgattttgggctttctgtcttcattgaagaaggaaagatgtacagggacattgttggaagtgcttactatgttgctcctgaagtccttaggcggagctatggaaaagagatagatgtttggagtgcaggtgttattttgtacattcttctcagtggcgtgcctccattttgggctgaaactgaaaaggggatatttgatgctattctgcatgaggagattgactttgaaagtcaaccttggccatcaatttctgagagtgctaaagacttggtgagaaagatgttgacacgagatccaaagaaaagactgacttcagcccaagttcttcaacatcagtggctcagagaaggtggggaggcatctgataagcctatcgacagtgctgttctttctagaatgaagcaattcagagcaatgaataagctgaaaaagatggccctaaaggttattgcttcaaaccttaacgaggaagagatcaaggggctaaagcaaatgttcatgaacatggacacagacaatagtggcacaatcacatacgaagaactcaaagcaggattagccaaacttggatcaaagctgtcagaagctgaagtaaagcagttgatggaggctgctgatgttgatgggaatggatctattgactatgtggagttcatcactgccacaatgcatagacacaagctcgaaagggacgagcatttgttcaaggcattccagtactttgacaaagataacagcggcttcatcacaagggatgaactggaatctgctttgattgagcatgagatgggcgacacgagtacaataaaggagatcatatcagaagttgacacagataatgatgggaggattaactatgaggagttttgtgcaatgatgagaggagggatgcagcagccaatgaggctcaagtagcctgttcccttaatagaaacggtgtaccactagttactgttcactttttttcttcatgtttggtacttggtagtcggataaagcttacaatgggtgttgcttttgtattgttgagagatgattgtctatacctttttttccctttttgctcgtgcttgttgcattgtagtatcttgaacgtcccttcctttttttaagtttgtttatgcaagtacatctaatacaaagtg

SEQ ID NO: 24391 - DNA, 1249 bp, Zea mays
  Clone ID: LIB3608-046-G11_FLI
cctcctgaccagcagcggcttatcttcgccggcaagcagcttgaggacggacgcacacttgctgactacaacatccagaaggagtcaaccctccacttggtgctgcgccttaggggaggcatgcagatctttgtcaagaccttgactggcaagacaatcacccttgaggtggagtcctcagacaccattgacaatgtcaaggcaaagatccaggacaaggagggcatcccacctgaccagcaacgtctcatctttgccggcaagcagttggaggatgggaggacccttgctgactacaacatccagaaggagagcaccctccacttggtgctgcgtcttaggggtggtatgcagatctttgtgaaaacccttactggcaagaccatcactcttgaggtggagtcttcagataccattgacaatgtcaaggccaagatccaggacaaggagggcatcccgccggaccagcagcgtcttatctttgccggcaagcagctggaggatggacgcacccttgcggattacaacattcagaaggagagcaccctccacctggtgctgcgcctcaggggaggaatgcagatcttcgtgaagacattgaccggcaagaccatcaccttggaggttgagagctccgacaccattgataatgtgaaggccaagatccaggacaaggagggtatccccccggaccagcagcggctgatcttcgccggcaagcagctggaggatggtcgcaccttggctgactacaacatccagaaggagagcaccctccatctggtgctccgcctgaggggcggtatgcagatctttgtgaagaccttgactggcaagaccataaccctggaggttgagagctctgacaccatcgacaacgtgaaggctaagatccaggacaaggaggggattcccccagaccagcagcgtctgatcttcgccggcaagcagctggaggatggtcgcacccttgcagactacaatatccagaaggagagcaccctccacctggtgctccgtcttcgcggtggttattaagccatcagtcgttgaagctgctgctgtatctgggttatctagtgtctctgccattgcccatggatggtgctgtctttcaaagtatttgtatggtttgtgtcgtgagtcgtgactgagctggtttcatggaccagttgtgttctcgttacccaaaactatcgtgcgaccgcatatggcttaatcatgaataaatgttgtttgaatttaaact

SEQ ID NO: 24392 - DNA, 1276 bp, Zea mays
  Clone ID: LIB3608-046-G12_FLI
ttatatgcaatcgcaagcgagcagaatggcgaggtccagtggtagtagaccagtggccctcgtgctgctggcgctgtgcgccgccgccctctcgtcggccacggtgaccgtgaatgagcccatcgccaatggcctctcctggagcttctacgacgtttcctgcccgtcggtggagggcatcgtgcgctggcacgtcgccgaggccctccgccgcgacatcggcatcgccgcggggctcatccgcatcttcttccacgactgcttcccgcagggctgcgacgcgtccgtcctcctgtctggttccaacagcgagcagatcgaggtacccaaccagacgctgcgtcccgaggcgctcaagctcatcgacgacatccgcgccgccgtccacgccgtctgcgggcccacggtgtcctgcgccgacatcaccacgctcgccaccagggacgccgtcgtcgcgtccggcggccccttcttcgaggttcctctcgggcggcgcgacggtctggcgccggcgtcaagcgacctggtgggcaccctgccggcgcccttcttcgacgtgccgacgctgatcgagtcgttcaagaaccggagcctggacaaggcggacctggtggcgctgtccggcgcgcacacggtgggccgcggccactgcgtctccttcagcgaccggctgccgcccaacgcggacgacggcaccatggacccggcgttccggcagaggctgacggctaagtgcgccagcgaccccagcgggaacgtggtgacccaggtgctggacgtgcgcacgcccaacgccttcgacaacaagtactacttcgacctcatcgccaagcaggggctcttcaagtcggaccagggcctcatcaaccacccggacaccaagcgcgcggccacccgcttcgcgctcaaccaggccgccttcttcgaccagttcgccaggtccatggtgaagatgagccagatggacatcctcaccggcagcgcgggagagatccgccgcaactgctccgtgcgcaacaccgccctcggagatgtctcatcgtcagcccaccagctcgagaccaccgccggcgacgaggggctcgcggccgacgcgtgaaatgatgattagctgctgttgttttttctctggtctccttcgattctgttgaaataaggcttgctgcatcatcggtatagtttgcattcttctacccatcaatatggtatatcttcctgtgtcagccccgtgattaccatgcagaccaacgcgtgagcatctatatgtcttaacaat

SEQ ID NO: 24393 - DNA, 1043 bp, Zea mays
  Clone ID: LIB3608-047-A1_FLI
tctgacagcaaggggtcctgatttctgaacctgatggcaggcggtgagacaactccctctggaggcagcgaggacctccttgacggcgcccctcgacggcgtaccggcggttccacctccatttggcggcgcgcggggggcagcacctcctttgggcggcgtgcgcgaacaagagccgcagccgctcccgcttgtctttgagcggtcaccgaatctgaggtctgagcccagcgggccgcggcggctatgtcctcatcctcctccttccccaactcccgcttccccttcgcagccggcgccggggcctccggcggaagcgggagcagcgtgcggccgtggggttcgagcggcgggacatcggtgtcttcatctgggaaacggatacagaaggagctgctggacctcaacgcctccgactgctccgcggggcccaagggcgacaacctctaccactggctctccacaatcatcgggccccaaggatcgccgtatgaaggagggatatttttccttgacatagtgtttcctcctgattatcccttcaaacctcccatggtaacattcaaaacaaggatttaccactgcaatattgattccactggtaaagtgcatttggacattctgaaggatggctggagtccagctttcactatttctaaggtgttattggccatcaaagacatcatcagcaatccagatccatactccccacttatgatgagcatttcacgtcagtatctgactgatagagctaaacacgatgaaatagcagctgagtggacaatgagatttgcaagataggggatttgtttgtatctaagcatggttgacattgtaaaaaaacaactcttaatgtggcctgagatggtgaatgttggcaaaggagccatgtttcgtttgatgtgatgtgacataaatgtgtactttatgcttgagtattatttaactgctccttttaggtgaagaataatcttttagattttgtacttatgccaagttgtacaagcatctattcagaacctgctatatgagtttatttcttg

SEQ ID NO: 24394 - DNA, 1709 bp, Zea mays
  Clone ID: LIB3608-047-A9_FLI
ctgccttcccaatcaatcgcattctccgtccgcgacccaatccaggtgccgacagaccagataccagagcaaacaagaagccgtctcactccacgtcgcaagggaaatggccaccgcctcgctcgcactgctcgatcagacgctgctgccgtcccctctggcgtacaacggcggctccgaccgcctcagccaggagatcttctccatcctcgagtccaacttcctattcggcgcgtcgccgctggagggcggcgcgtgctccgcgggccgcgtccgcgtgctgtccatcgacgggggtgccgacggcggcgcgctggccgccgcagcgctggtacggctcgagcgccgcctgcaggagctctccggcaaccccgccgcgcgcgtcgcggacttcttcgacctggcggccggctccggcgcgggcgggttcctcgcggcggcgttgttcgcgtgccggatgcccgccgaggcggcgcgcgacgtcgtggccaagaaccggaaggtcctgtccgggcgtggcgggggcctgatgtcgttccggcgccccgaggccgcgttccggaaggtgttcggtgacctgacggtgcgcgacgccgccaagccgctgctgatcccgtgctacgacatggccaccgcggcgccgttcgtgttctcccgcgccgatgccgtggaggccgacgcgttcgacttcccgctgtggcaggtgtgcgcggcggcttgcggcgtgggccccgcggaggtggcgtccctggacgggcgcaccaggctgcgcgccgcgtcgggggcgggggcaggcgggggcggcgcgtcggccgccgtggccaacccgaccgccgtggcgctgacgcacgtgctgcacaacaagcgcgagttccccttcgccgccggcgcgggagatctcgtggtgctgtccctcggcgggcgcgccgcagcctcgctgggccggctctcgtcctccagcctcctgcgcatcgccggagcctgccaggccgacatggttgaccaggccgtgtcgatggtgttcggggagagcagagcgaccaactacgtccgcatccagggcaacggcattgcgcccggcgagacggcggaggcggcgctggcggagcggggcgtggagtcggtgctgttcaggggaaagaagctgatggcgcagaccaacggcgagcggctggacggcgtggcggagcagctggtccgggagcaccaccgccgactggagagcaagacccccgtggtgctggtgaagccctccgccacgccgcggacgtcttcgtcgtcggcgtccacgctcatcaccgtgtccaccaactcgtcgtcggagtcgccctgagaccgagacgacgagcgaccgaccgagcgagccgtcaacagacagacagaagcagctcggctttaactagcgtggccttgctttgttttcagcttttttatttattggttcgtttgggtttctagtttagcgcggcgccggcgccggtgctcggggttttgacttttgattgcctgccggcgccgcctgcgcgctcgctcccggtcccggccgcctggcgcggccgggaagaaagatcgaggagggctgtcgagcggcgaaggcgccagagatttgtgtacgtagctagaggaaggagatgtgcctgtatgtgtgcgtgtgctgcaaacgcagtgtatgtacgtgcgtacgtagtagagtgcccggagcttggatg

SEQ ID NO: 24395 - DNA, 749 bp, Zea mays
  Clone ID: LIB3608-047-B3_FLI
gaaaccgccaattggcaaggatgaagcttgtgaccgccttcgttgtgctgctcttttctctcctccccgactcgtccaccgcggaggacttcgatttcttctaccttgtccaacagtggccgggctcgttctgcgacacgcggcagggttgctgcttcccggacggcgcgggcaagccggaggcggcgttcggcatccacgggacgtcgctgggccggagctggccgacgctgtcgtgcaagaaccggcgcagcttcgagttctggagctacgagtggaagaagcacggcacctgctccaacctggacccgcacgactacttcgcgcgcgcgctgcagctcagggagcggcacgacctcgcggcggtcctcgcggacgccgggatcgtgccgtccgacaccgacacgtacccggtggaccgcgtcagggacgccatcgcgcaggggaccggcttcgtggccaacctcgagtgcaaccgcgacgcggacggcgaggcgcagctgttccaggtgtaccagtgcgtggaccgcgaggccaaggacctcatcgactgcccgctccccatgcccaccaagtgcaccgatcgggtcaagttgcccgtcttctgattccgagcttctggctgtcgtttgcaattgtaaaaacgggccgggtgcagatcgatcgatacgacgatacatgcatgtttgcgtatgtgatttcgaaagcggatttgaataaatgtgtgtttaccttttatttgcgtatgg

SEQ ID NO: 24396 - DNA, 1345 bp, Zea mays
  Clone ID: LIB3608-047-B6_FLI
cccaatcaaccaaatactcaaaagaacagagattgctgaaaatttaattctcgagaaaacatcatgtcctttgggtgtcctattggttatttttgagtccaggcctgatgccttggtccagattgcatctttagcgattcgaagtggcaatggtcttctcttgaaaggtggaaaagaagccatgagatcaaacaaagtattgcataaggttataactggtgccattcctagcaacgtgggtgaaaaacttattggccttgttacaagtagagacgaaattgctgatttactaaagcttcatgatgtaattgatcttgtcattccaagaggcagcaataagctggtttcacaaatcaagacatcaactaagatccctgttcttggtcatgctgatggtatctgtcatgtatacatcgacaaatcagctaacatgaatatggcaaaacaaatagtgatggatgccaaaattgattacccagcagcctgcaatgctatggagacattgcttgttcataaagatcttataaaggctccaggtcttgatgacttactgctatcactcaaaacaaaaggagttgctatttttggggggcctgttgcacatgaagtattgtgcattccagaagcaaattcattccatcatgaatatagttctatggcctgcacaattgagtttgttgatgatgtacagtcagcgattgaccatatacattgttatggaagtgcacatacagattgcattgtcactacagatgataaagtagcagaaacttttctgcgtcaagttgatagtgctgctgtgtttcataatgcaagcacacgattctctgacggggctcgttttggattgggtgctgaggttggcataagcacagggcgtatacatgctcgtgggcccgtgggtgttgaaggtctcttaacaacgcgctggatcatgcgagggagcgggcaagtggtgaacggtgacaatgatatcgcatacacccataagaaccttccattgccatgaggccgtttttgtgcttcatcaggattcgtgtctatccagtgatgtttgatagtgtcgtcagacaggagcagagagtggtgaatcttttcgatgagggacggtgaactgcaatgtccacttatccagtcatttttatctagaacattctggtgagacacccaccaccccgataaagcagtgctgggagtagtagagcactaatgtaccgaggctgtgtctagtctaggttaaacaagagaattcggttatattgttaatttttttgggtctgattgaacatatatgttgtcagtttttgtagtgatacatatatttctttaaatcctacttgatcgc

SEQ ID NO: 24397 - DNA, 1007 bp, Zea mays
  Clone ID: LIB3608-047-C2_FLI
ccgaattccctgcgattcctctcccctcgcctcctcgtctccccctaggggatcgtcggagaggaatcgcaaagagggccgtctcatccgagttaaggaagccatggagcacaaggaggctgggtgccaggcccccgagggacccatcctctgcatcaataactgtggcttcttcggcagcgcggcgaccatgaacatgtgctccaagtgccacaaggagatgataacgaagcaggatcaggccaagctggctgcctcctctatcgacagcatcgtgaacggcagcgacgccgtcatggagccggttgttgctggcagcaacacggtagtagctgttgcccaagttgagttgcaaacaatgaacgtgtagcagcccgctgatgttgccggacccagcgagggggtggcggcgatctccaaaggggggaaggtagggccgaaccggtgcagcgcctgcaggaagagggttggacttacgggattcaactgccggtgtgggaacttgtactgcgcactccaccgctactccgacaagcacgactgcaagttcgactaccggactgctgccagggacgccattgccaaggctaatccggtggtgaaggcagacaagctcgacaagatctagggggggttccctacggttgggtatcaggaagattgtaaaccgcggtaactcgtcatgcggaactgctgccttgccccccgcgcctttctcttccatgtttgctgctacaatcttgttgttgggcattgcagtgcacggtgcacacttgtgtagcccgcctcgagaattcctgcctctgcatctggtcagttctaaaatgatttgcatgttggctatgttgtgtaagctctatttatggtggtctcgctgagacgggtatttggcttcgcagttatctagctatgtgatgtactgttgtcttgtccctgggtattatatggtacactgcagccagtaatagtaatctgcaactgtgcgttaaatggtccgtcgttttcct

SEQ ID NO: 24398 - DNA, 1267 bp, Zea mays
  Clone ID: LIB3608-048-A10_FLI
gtgggcaacacgtaggccaacccctccgctgagtcgctgaccgcctcgcacccgtcgttcccctccttccggcacaaccagcacgcgagcggcacgagaagactagggttccggcgaggcgacggcgagagccatggcagggattcgatggccgccagaggacccggagatcttcccttccaggatggtcagcggcggggcttgggtccccgtcgcgcccccaggagagatggcgtcggacgacgaccggtcggtggccgcggactcgtggtcgatcaagagcgactacggcagcaccctcgacgacgatcagcgttactccgacaccgccgaggtcctcctagcctcctcctccgcctcctctgttgccgcgccctccacgacggttgccgtccacccctcctccgacttcagcttcgacaaggatgtccatgactccagctacgttgagcctcccttgctgggcttgcagaattttcaggatggtgcttacgctgaggatcttgcaaatttccatgaacgcagccacgctgatgactggtttggcactgatatcatggatatccgcgtaggttggaccaaaaatttgtgctcaagtagagatttacccagctgcagcgtacttgacattgggactgggagtggcagactcttgcagcagcttgcgaagcaggggttttctgatctgactgggattgactatagtgaaagtgcaattgagcttgctcgtagccttgcaatcggtgatgggtttgagcacattaatttcttggttgatgatgttttggagtcgaagttggagagaagatttgaacttgtcatggatgaagggactcttgatgcgattgggctccatcctgatggacctgtgaagagaatgatgtattggcagtccgttgatagcttggtttcccgtggtggtatattggtcatcacatcatgcagcagaaccaaggatgagttggtgcaggaggtagagaacttcaaccaaaggaagcttggtgctgtgggctcaggctcagaaggattgccggctagtgaagctgcggtgttcagctacctggaccacgtccaaagttaccctagtgtggatagttcttgcataacgaccgttgctttacttcataagtgaaaaacataattgtattgtatgcttggtttattggccctagaaagttaccgtatacctgctacgatattaactatgtacccagtcacttgtgtatctggacaatattctactagtattttaccttgtcgggttggt

SEQ ID NO: 24399 - DNA, 1737 bp, Zea mays
  Clone ID: LIB3608-048-G4_FLI
ccagcaagctcatgcccttcaaaagcctccggcagcccagcgccccagccagctagtggtgatctctcatctcagcagcgcgcctgaacgtgtgctccctgctaagctctgcgcctcgataggcaaaggaaaatcaaaccgatcgtcgtcagattaaatggccggtagcagcgcggagcagctcctctccaggatcgccgccggcgacggccacggcgagaactcgtcctacttcgacgggtggaaggcctacgacatgaaccctttcgacctgcgccacaaccgcgacggcgtcatccagatgggcctcgccgagaaccaactgtcgttggacctgatcgagcaatggagcgtggaccacccggaggcgtccatctgcacggcgcagggcgcgccgcagttccggaggatagccaacttccaggactaccacggcctgccggagttcagagaggcgatggccaagttcatggggcaggtgaggggcggcaaggtgacgttcgaccccgaccgcgtcgtcatgtgcggaggagccaccggcgcgcaggacactctcgccttctgcctcgctgacccgggcgacgcctacctcgtgccgacgccttattacccagctttcgaccgcgactgttgctggaggtcaggagtgaagctgctgcccatcgaatgccacagctcgaacaacttcaccctcaccagggaggcgctcgtgtcggcctacgacggcgcgcggaggcagggcgtccgcgtcaggggcatcctcatcaccaacccctccaacccgctgggcaccaccatggaccgcggcacgctggcgatgctcgccgcgttcgccacagagcgccgcgtccacctcatctgcgacgagatctacgcgggctccgtcttcgccaagccgggcttcgtgagcatcgccgaggtcatcgagcgcggcgacgccccgggctgcaacagggacctcgtccacatcgcgtacagcctctccaaggacttcggcctcccgggcttccgcgtcggcatcgtctactcctacaacgacgacgtggtggcctgcgcgcgcaagatgtccagcttcggcctcgtctcgtcgcagacgcagcacttcctggcgatgatgctcgccgacgcggagttcatggcacgcttcctcgcggagagcgcgcggcggctggcggcgcgccacgaccgcttcgtcgcgggcctccgcgaggtcggcatcgcgtgcctgccgggcaacgcgggcctcttctcgtggatggacctgcggggcatgctccgggagaggacgcacgacgcggagctcgagctgtggcgggtcatcgtacacagggtgaagctcaacgtgtcgcccggcacgtcgttccactgcaacgagcccggctggttccgcgtctgctacgccaacatggacgacgacaccatggaggtcgcgctcgaccggatccgccgcttcgtgcgccagcaccagcacagcaaggccaaggccgagcgctgggcggccacgcggccccttcgcctcagcttgccgcgccggggagcaaccaccgcttcgcatctcgccatctccagccccttggcgttgctgtcgccgcagtccccgatggtccacgccagctaggtagtcaccgagcgttcggtaagactggctgtaggttgtgccctcacatgactgcaaacaagtggacaaaaaaaaaagacaagactaataaagggcgtacgtagctagcttgacattac

SEQ ID NO: 24400 - DNA, 1004 bp, Zea mays
  Clone ID: LIB3608-048-H7_FLI
tcattccacccccgtctcctccgatcggaccaccgggccagcagcggggcggatcgtgacgtcagcaggcatggtgaaggcctaccccacggtgaacgaggactacctcaaggcggtcgacaaggccaagcgcaagctccgcggcctcatcgccgagaagaattgcgccccgctcatgctccgcctcgcatggcactccgcgggcaccttcgatgtggccaccaaaacctggggccccttcggcaccatgaagaaccccgccgagcaggcgcacggagccaacgccggactggaaattgccatcaggctgctagagcccatcaaggagcagttccccatcctatcctacgctgacttctaccagcttgctggagtcgtggcagtcgaggtaaccggcggacctgatgtccccttccaccccgggaggcaggacaagcctgaggctccaccggaaggccgccttcctgatgccacccaaggttctgatcacctcaggcaggttttctccacacagatgggtttgagcgaccaggacattgttgcgctttctggtggtcacaccctgggaagatgccacaaggacaggtctggatttgagggagcctggacgtccaaccctttgatctttgacaactcttacttcaaggagcttctgagcggagagaaggaaggccttctgcagctaccaagtgacaaagccctcctctctgatccatccttccgcccacttgttgacaaatacgcagcggacgaggacgctttctttgctgactacgccgaggcccacctgaagctttcagaattgggatttgctgaggcgtaacgaaccagaagagtgtggtggctgtcgtcggccggccggccttgtgtttttgttgtctgcttttctcttgaatgaagatgtgatgaactcagctgaagatgtagtgtgtatgttgtcatggtttatttttctattttatttatctatctataatatctatcggagaaggtttgataaaaac

SEQ ID NO: 24401 - DNA, 1454 bp, Zea mays
  Clone ID: LIB3608-049-B1_FLI
ctcgcaaagctctaaacccctctgagagaacctatccgggccaccacaaccgccacccatggacggcggcgacgctccggcggcgggaggcgggaaggtggcgtgcgcggcgtggatccggcgccgggaggacaagtcggcggcggcgccggcgcgggtgttcgcggcgtacggccgggcgggggcggccggctccccggccgctctcgaggtgcttggcttcgacgccaaggagtgctccctctccccctctcccctggcgagggccgtgatcggggacggcggcgcgggtgacgcgccgcgcggcatcgcggtgcaccccgccggtgacgagctcgtctgcgccacggcgaagggctgcaggttattcaaactgatatttgatgagttcacagtacgcattattccaagagatgctcctctactagaatctgttggaccacaaaagtgtcttgctttcagcacagatggtgcaaaatttgcaattggtggagaggatggacatctcagaatattccattggccaagcataaaagtgcttttggatgagcccaaagctcataaatccttccgagacatggatatcagcttagactcagagttcttagtttcaacatccattgatggatctgcgagaatatggaagatagatgagggcgcaccactggtcaatttgactcgatcctcggatgagaagatcgagtgctgccgcttttctagggatggcatgaaaccgttcctgttttgcactgttgcaaaaggtcccaaagttgttacagttgtctggaacataagcgattgggagagaattgggtacaaaagacttctggggaagcctatctccacactctcagttagcttggatgggaagtatctggcattaggaagccacgatggtgacttctgtgctgttgatgtgaagaaaatggaagtttcccactggagcaagaaggtccatcttggctccccagtcacctccattgaattttgtcctagtgaaagggttgtaatctccacatcacatcagtggggagcagagctcacgaaactgaacgtgcctgccgactggaaagaatggcaggtctggctcgtactcctggcgctcttcctagcctccgccgtcctgttctacgtgttcttcgagcgatcagacacgttctggaactttcccatggggcggcaccagccggcgaagccatggaacgtgctcaaggagtctcctccggtccccgaggaccagactccatggtgatggtattgcttccatcgcgtcatctgtgaagagaagagcgatactgtcccagacccaacaaagccaccgcgtgctgtttatcttgttacaattataaatcgtccatgcttgttctaccactctcagccagtgaccacgcaagtttgtaaccctggactgccataaaccaggtgatagtaattgaacattctgtcttcgtgcg

SEQ ID NO: 24402 - DNA, 973 bp, Zea mays
  Clone ID: LIB3608-049-C7_FLI
gtcccaaatactagcaggcggcaggcggccaagaccggtgtccctcgacgacctgccgagtgccgaggcaagcaagacgcgaggaggctgtaagcctgccatcagcagcggcgatggcgggcgccgaggtgggagaagacaagtaccgctccttcatccacggcgagggcgagagggacaccgtgtggaggtacggcgccccgcccaactacgacgtggtcaacaagctcttcgaggaggagaggactcaggtgtggcccgagggctcgctggaggagaaggtgcagcggttgctcaagagctgggagatggagctggtgcacaaggtgcggcccgaggaccagaagaccgtcaactcggagaaatactctgccagcaccaacgggatgagcgctctgacccgggccgaggtgatggccatcggcggctacaacaacttcctgcgcaccaagctgcccccggagcaccgcatctacgacccggacagcgagaccgtggagtccgccatggccaccttcaccacggccttcccgcggggcttcgccatcgaggtgctcgacgtctacagcggcccgcccaggatcgccttcaagttccgccactggggctacatggaggggcccttcaagggccacccgccgcacggccagcgggtcgagctcttcggcgtctgcatcttccatgttgacgaagacatgaaggtggacaagtcagagtacttctacgagcgcggcaacttcctcgccggcttcttgagtgcccctgcccctgatggctcaggcggttgccccgtgatgcgcgggaactgaatgggcctgcaatgggacattggaagactaggcattggaacattgggattattagcattagcgatcccgaatccgcttttattacggtttaataattccatcatgtaacatgacacttgcatttgtgtttgaataaacatgtcgttgcttcgacatattagcag

SEQ ID NO: 24403 - DNA, 973 bp, Zea mays
  Clone ID: LIB3608-049-G1_FLI
gggcggacgctggggaagcatatgctctgctcagctaaaagacaagtactacatatatatatatacgctgtgtgtcaattaatgggttctaggctgctgctgatgcggctgctgcttactagttcttgaggtgggctaccgcagatcagatcacactcgtagagagaaggaaaaatatccccaaaccctagctcccgatctcgatggcgaaccctcgcgtcttcttcgacatgaccgtcggcggcgccccggcgggccggatcgtgatggagctgtacgccaacgaggtgcccaagaccgcggagaacttccgcgcgctgtgcacgggcgagaagggcgtgggcaagtccgggaagccgctccactacaagggctccaccttccaccgcgtcatccccgagttcatgtgccagggcggcgacttcacccgcggcaacggcaccggcggcgagtccatctacggcgagaagttccccgacgagaagttcgtgcgcaagcacaccgcccccggtgtgctctccatggccaacgccgggcccaacaccaacggctcccagttcttcatctgcaccgtcgcgaccccttggctcgacggcaagcacgtcgtcttcggccaggtcgtcgagggcatggacgtcgtcaaggccatcgagaaggtgggcacccgcaacggctccacctccaaggtggtcaaggtcgctgactgcggacagctctcctagatctctctgatctggtctgttcggccgccctccctccgtcatcgtcgactccccctgcgtccgttcctttggatctgaataagatggtggtgatctgagtggtggtcttagtttatcatgtatcgctcgcagtttaatttagcggtttaggtgtggatctgtgaaccccatggcgcctctgcttgattcgtgtttcacctgttatgttctgagattcatgataatgctatgagaactgaaattcccgtttc

SEQ ID NO: 24404 - DNA, 1106 bp, Zea mays
  Clone ID: LIB3608-049-H6_FLI
cttttggctaagatcaagtgtaatatctgtttttatcagtttaatatctgatatgtgggctatgtgcctacttcgatattaaatttatttttttgtgggagagggtccattgccggtggcttgcccttcggggctctcatgcgccgtccagctacagctattgcactctgctggccggacctggcgcaccccaaccaaaacaaaggttttaggtggtatacaaggcagcttagtatggatgaagacggcgacgtggctgatgagttcttggatgaaattatcccagaaggctcagtcaacaacgccaaaagcccagtcggaaggttccaagtgaaatataacacgaaacgaactgctctagcattgaggaagcatgtaattgctgtcgatggcgacatccgccatagcttggaacaccaagggcaactgcggtgggtgtgaccgagtctgttgagcccatatgaaagtgcaggttgggcagaggcaggcgcgcccatgggcgaagcgaatgacctaggttacccgtctttgaagtggacctagaggtagttcattgctaatttatccatcgttctccgctcagtgtgttggtacgcctgatctcgaggttattcagacaccttgtaccactagtagtttgtcacgatatacctgaggatagcttccaggccacgaagggaaagcatgcccaataggagaatttctgggccagaatgggtcctgtaagcggtgcagtggagggtttttctttttctgttggcagtagtgaacgggtttattatatatatgggagatggttcgtgtggatgagactaggctgggaactgaagattgaaccggctgcctccgggagaccgggaggggcagtgattcgtgagaggaaacgaacaccgggagcggtgttcaagcccagattcctaccgagttcttacatagttgtacattattgaacagctaccgctggacaagttgaatgtgcttggctggcaatggagccaccgaatccgtgcatcagatgatgttggttagccattcattcatgtatgctgttcggccaatctgcaagctgacagactgatggaaaaaaaaatagaatgtgtgaatgt

SEQ ID NO: 24405 - DNA, 331 bp, Zea mays
  Clone ID: LIB3608-050-A7_FLI
cgagttctgggacatgaacgcgatccaggagaaccaaggtgtcgtgaacctcatgtccgggagatgactcctgtccctgtgggctgtggtatatattattgtacgtcctacctgccttcccctgggcaattgtacattagggctcatttgtacggcccgttgacggccagagaggagggccactgtaggtatttacaatgtaatatcttgtcactcaagggttttctcccgtgtttaggctccctttggaacaaaaaggaaatttcctgaacctgtgttttttgctgtattttttaactaatttctatgaaattcttatagcattcatgtt

SEQ ID NO: 24406 - DNA, 1660 bp, Zea mays
  Clone ID: LIB3608-050-B4_FLI
gcgagaagatctgcaaccagagagtgagaccggatcggacggaaatggagagagcaacagcggaccctcacttcctgctgcttccatggcaaggagccatcagccacatcatccccatgaccgacatcggccgcctcctcgcctcccacggcgcggcggtcaccatcatcacgacgcccgccaacgcgctgctcgtgcagagccgcgtggaagacctcgccgcggcactgcaccgtccgcacgggcacggcgcggcagggacgatcacggtcaccgcgatcccgttcccagcggcggaggccggcctgcctgagggcagcgagaggctcgacctcctccggtccccagccgacgtgccacgcttcttccacgccaacagactgttcggcgaggcggtggcgcgctacttccgcggcgaggctctgccgccgcgccgccgcccgagctgcgtcgtcgccgggatgtgccacgcgtgggcgctcggcctagcgcgcgagcttcgcgcgccgtgctacatcttccacgggttcggcgcgttcgccctgctctgcgtcgagtacctctacaagcacaggccgcacgaggcggtttcgtcggcagacgagctcttcagcatcccggccctgccggcgtttgactgcagggtctcgcgcgcgcagctgccgcagcatttcgcgccatccacttccatgggcggcgggacgctacaggagatacgggagttcgacgtggcagtggacggcgtcgtggtgaacagcttcgaggagctcgagcacggctcctgcgagcttctcgcggcagcgaccggcaagaccgtcgtcgccgtcggccccgtctcgctgtgccatcaacatcccatgacaatgacagacgacggcggcggcggcgacaggcgggtcctggagtggctggacaccaaggagaccaagtctgtggtgtacgtcagcttcggcagtgccgggtgcatgccacccgcgcaggtcgtgcagctaggcatggctctagcgtcgtgcgcctggcctgttgtctgggtgctcaagggcgccgactccatgcccgacgacgtcaaggagtggttgcgtgagagcttggacgacaagcagtgcttgctggtgcgaggctgggctccccaggtcgccatccttgctcaccgcgccgtcggcggcttcctcacgcactgcgggtggggctcgactctggaggccattgccgccggcatgcccatggccacctggccgctcttcgccgagcagtttatcaatgaaaggctcgtcgtggacctgcttggtgttggggtgtctgtaggcgtgacaaagccaacagaaaacatcctcactgccagcaagctcggagcggatgtcgaggcggaggtgggtatggaacaagtggcgaaggccttggagaggctgatggatcagggtagccaaggggaacacaggaggaggaaggctcaggagctcaaggccaaggcaactggagcattgcaggatggcggatcatcctacatgaatttggagaagctgatagtccaatcttcggtttcgagaccgaatacatgtggcgtttaattagtacagtattatatttgctgaataacgtacatagctggtgctcatccatgtcatgagtgactcacaaataatcaaattcaatttgtttg

SEQ ID NO: 24407 - DNA, 1445 bp, Zea mays
  Clone ID: LIB3608-050-C10_FLI
tcggagctactgcaagctaggcctacagcaatggcggcctcttcgtcgatccaacgaggcgagagacgaggaaggtgggggagccccgagcgcaccgtggtgtggactgaacccaagcccaagccggcgaggaaggtcgccgtggtttactacctctgccaccgcgacggccacctcgaccacccgcacttcctggagatggagctatcccagcaccagcagtcccactcctcccgccctgctcccggcctctacctccgagacttcaaggcccgcctcaacgcgctccgcggcgacggcatgcccggcatgtactcctggtcctccaagaggagctacaagaacgggtacgtgtggcaggacctcaccgaggacgacctcatccaccccgcccacggcaacgacgagtacgtcctcaagggctccccgctcctcctcttccctcagccaccgccgcagcaggaggatgccgacaagtgggccggccgtcaccgcaagaactggagctccttcgacctgggggactgcgatagtaagctggtcgtcgtggcccaacaccaacagtctgcggccacgcgggtcgaccgggacgacgccgacccgtcgtcgacggagctggccatcgacgagatctcgccgccgccgtcctccagcagcccagacgagccggagagctgcggcagggaggtcggcgtggtcgccggcgggcggatgtgggcgtcggccgtgctgatgcagatcttctcctgcgggtccacggcggccgtgaggcggggccgccacgcgcgcacccgctctgaccttgtgatgtcaagtgcgagcaacaggcgggccaagaaggaggcggatgcggacgcggacgcggacgcgtcagcaagagcggctgaatgcctgtcagtgtcaggcgtcgtggagcgggactacttcagcggcagcctcattgagagcggcaagaagcgcggcggggatgacgcccttcttctcaagcggtcatcctcctgcaacgccgacaggggcgccgcgaagctgaagttgccgccggtgccggcgacggcgaaggaggtccgtgccgggcgccttacctcccgagggagccccgcgcccaagaaaagtatgactaaatccacggtggcccagagcagggacggaggcgaatgcaatggcgcgacggcggacgcggcggggagcacgtagcagtgtgcagtccatgaagcgcctcggtcgacttgcatagttgcattgcaggtggcgagacgggcacgacacggtgtcgcgcgcgggcgagtgctccgagatgcggatggacgagtcaactcaaagtcagctgagatctgctactagtaggactagaattagcatgcaagtgcttgtaagttgtaacggcacagacttgtacttttactcagtcactatatactatatagacaataaagatacggttttct

SEQ ID NO: 24408 - DNA, 1658 bp, Zea mays
  Clone ID: LIB3608-050-E11_FLI
gtaccaccgtgacagttctattaacttgacgagacaaaaggggggaaagttctcctcctacaatcctacctccagtgatgtcagtaccaccgccggccggcggcggcgccatcatcaacgaggtcctcaccgacgacgagctccgcgcagtgctcaggcggctggggcccgaggcggagcgggacgcgttcgggctcgtgtgccgccgctggctccggatccagagctccgagcggcggcgcctgcgcgcgcgcgccggcccggacatgctgcgccgcctcgctgcacgcttccctggtgtcctggatctcgacctctctcagtcgccctcccgctccttctaccctggggtcatcgacgacgacctcaacgttatcgccagcagcttccgcaacctgcgtgtcctcgcgctgcagaactgcaaaggtatctctgatgtcggagttgccaaattgggagatggactgccatctctacagtcccttgatgtttctcgctgcataaagctgagtgacaaaggtttgaaggcggttgcactagggtgcaaaaaattgagtcagctgcaaatcatgggatgcaaattagtaacagataatttattgactgctctatcaaagagctgcctgcaattggtagaacttggagctgcgggatgtaacagcataacagatgctggtatatctgctctggctgatggctgtcatcacataaaatcactagacataagcaaatgcaacaaagttagtgatcctggagtctgtaagatcgctgaggtttcttcatcatgcttggtgtcaataaagctattggactgcagcaaggtgggagataagtccatctattcgttagctaagttttgcagtaacctagagactcttgtcattggtggatgtcggaacattagcgatggctccatacaagcacttgctcttgcctgctccagtagcttaaggagcctgagaatggactggtgcttgaaaataacagacacatcattgcaaagcctgctgtctaactgtaaacttcttgtagccattgatgtcggatgttgtgaccagataaccgacaatgcattcatggacggggaaggatacgggtttcagtctgaactgagagttttgaagatcagcagctgtgttcggctcacagttgcaggggtcggcagagtgattgaatccttcaaggctcttgagtacttggatgttcggtcatgccctcaggttacaagggacagctgcgagcaagctggagtgcagtttcctgctggctgtaaggtgaatttcgatggcagtttgctggaatctgatccatctgctgagatgttcttctaaaatgtgatctcggttgaaatcagatttagtgtgaactgcaaaactaagatttgaagagctcggtcatggaggcgagtgcttgacattgctgctgatctttcactgtcaaaatctatgcaagaacctgagaccacaacggatgcaagccatgatcatattcagtacccaattcaatatgcatgtgatttaatctgtagaaagtagcgcaaaagaccatgaaataagttgtctgaccaaagaacgtatttgcattatgtattgtgccagtgcagcgggtgtattaaaaaaatgtgcattttaatagactggtttcagtggattgtacgc

SEQ ID NO: 24409 - DNA, 745 bp, Zea mays
  Clone ID: LIB3608-050-E12_FLI
ggcagcagcttcagcagccgcggcctcagtgggcggatgagatcacgacggtgtccgagggccggcgcgacgacgccgacgccgatcccctcgtccgccgtatccggtctctcaccatagctcctccgctattgagctcccaatctgaagcggaagcagagagcagcctcacggatatcctcgtcgggaagccctctaactcctcagccacctctggaaatctgaacccaaatgtcctagctgagcttttcgccatgtaccgcgaatggcaagaagagaatgccaagaaaattagccgaaaacaggaggagatagaaaacaagatagaaacagctgatgcattggcagttaaacttctccagcggttcaattattgtcttacttacatgagatccacctcccacaatcttgctgaagtgcatccgctgcagatcgaagttggtgagtcaaagggcaggttaactgaagtcataagcaactgcgatgcattgtgtaagagaattgctgcagaaggaccagaaagcctacgatcatctgttcaacctttcatggctgctagagcggaggcagaagggagtggttcacttgacccaaaacaagagtcctgaattgtacaatctaactgctgacagcatgcgcaaagaaacttcagaggatgattagtttgtcctgaacaaatatattatataaacacgtttaggaattgttcggttattctcaatacatatggattggatgagattgg

SEQ ID NO: 24410 - DNA, 992 bp, Zea mays
  Clone ID: LIB3608-050-F4_FLI
cttctccatcccacgcgcgcgcaggccaaggccggatcggcggcctctcagatctcgccggccgccgtgagacagagaccgaagggggggttgaccggtgctcgggaggaagatgtttagcgggacgcagcagaagtgcaaggtgtgcaccaagacggtgtacccgatggaccagctctccaccgacggcgtcgtcttccaccgctcctgcttcaagtgccagcactgcaagtctaccctctcactgagcaactattcctcgttcgaaggagtgccgtactgcaagacccatttcgagcagctgttcaaggagaccgggagttacaacaagagcttccaatcacagtcacctgcaaagattactccggaaaagttggcccctgagctgaccagatcaccaagcaaagctgcaaggatgttttcaggaacacaagacaagtgtgcgacttgtggtaaaactgcgtatcctcttgagaaggtaacagtcgaagagaagtcctaccataagtcatgcttcaaatgctcccacgggggctgcgcgattacaccttccaactatgcagccttggagggcatcctctactgcaaacaccatttctcccaacttttcaaggagaagggaagctacaaccacttgatcaagtgcgcgtccgtcaagcgcgctgctgaagcacagccagaacaaccggcctctgattcctcctcctgaccacgccatttaaacagtgggggtttggaggcgagagagttgggaagcctcctgtttctacttaaaaccgcgtgatgtatgttattccatctatgccccgaggatactagactactactctattttggtatcctctgctgtgctagctggatcatatcagcgaaccatggaattgctgtcattttcaatgaaactgttgtgcatcaagtagtgaaatcttcactgaaatcgggtatcttgcctttattgatcaatatattatctatgttgttttgttgtcttt

SEQ ID NO: 24411 - DNA, 1346 bp, Zea mays
  Clone ID: LIB3608-051-C10_FLI
ctctaccttgtctcttcacgtgcacacgacgcctcccccaatggctgcggtggcggaggaggaggtgatcgtcgtcggcgcggggcagtcggggctagcggtggcggcgtgcctgtccctgcgcggcgtgcgggcgctggtcctggagcgcgacgactgcgtggggtcgctgtggcggaagcgcgcctacgaccgcctccacctccacctcaccaagaagtactgcgcgctgccgcacgcgccgcacccggccgaggcccccgcgtacctgcaccgcgacgacttcgcgcggtacctggacgggtacgccgcgcggttcgccgtccgcccgcgcctccgccgcgaggtccggtcggcgcggtacgaccccgcgagcgcgcggtgggaggtggaggccgtggacctcggcacgggccaggccgagcggtacgcggcgaggttcctggtggtcgcgtccggggagaacgccgagaagttcctgccggaggtgcctgggctggaggcgttccccggccaggtgatgcacgcagtggagtaccggtcggccgaggggatgcgcgggaaggccgtgctcgtcgtggggtcgggcaactccggcatggagatcgcctacgacctcgccgccgccggcgccgtcacctccatcgtcgtccgaggcgagctccacctggtgaccaaggagatctggaacgtggcgatgacgctgtacccgtacctgcccgtgtgggtcatagacaagctggtgctgctcatgtgcgccgtggtgttcggcgacacgtcccggcacggcctccgccgccccgccatcgggcccttcaccatgaagctcaccaccccgggctaccccgtcgtggacgtcggcacctacgccaagatcaggagcggcgagatccgggtgctccccgccgccgtcaagagcgtccgcgggaacgtcgtcgagttcggggacggcagccgccaccctttcgacgccatcgtcttcgccaccggctaccggagcactgtcaggcggtggctcaagagcgaggacgggctggtcggtgacgacgggatggcggcgcggagctacccggagcactggaagggggaccacgggctgtactgcgcggggatggtgcggaggggcatctacggcagctgcgaggacgcggagctcatcgccgccgacatcagcaagctgctgcaccccaagcaggagcagggcaacggcgtctagctgcagctagcatttcgctttgttggttgcgatggaaacaagctctattgttgttgggttggttgataataatggttgcgtgaataattaaacgtgcttaattgagatggcctggccagcctattcgttc

SEQ ID NO: 24412 - DNA, 1092 bp, Zea mays
  Clone ID: LIB3608-051-C3_FLI
cccacaccccccgagctcagcttagctccactccagctccaatcacagtcgtgaccagagcgcgagagctagctagagggccgtgaaaatgccgatcaataggatcgccctggggagccaccaggaggtgtaccacccgggcgccctcaaggcggcgttcgctgagttcatctccaccctcatcttcgtcttcgccggccagggctccggcatggccttcagcaagctgaccggcggcggcccgacgaccccggcgggcctgatcgcggcggcggtggcgcacgcgttcgcgctgttcgtggcggtgtctgtgggcgcgaacatctccggcgggcacgtgaaccctgccgtgaccttcggcgccttcgtgggcggcaacatcaccctgttccgggggctcctgtactgggtggcgcagctgctggggtccaccgtggcgtgcttcctgctccgcttctcgacgggcgggcaggccacgggcaccttcgggctgacgggcgtgtcggtgtgggaggcgctggtgctggagatcgtgatgaccttcgggctggtgtacacggtgtacgccacggcggtggacccgaagaagggcagcctgggcaccatcgcccccattgccatcggcttcatcgtgggggccaacatcctggtgggcggcgccttcgacggcgcgtccatgaaccccgccgtgtccttcggccccgccctcgtcagctgggagtggggctaccagtgggtgtactgggtcgggcccctcatcggcggcggcctcgccggcgtcatctacgagctgctcttcatctcccacacccacgagcagctcccctccaccgactactaaaagccgaagccgaccgacctaggggtgcgcagcgcagctagcgcatccagctctctctccccgctcgccgccgtttagtttctctcgtgcacgtgcatgcatcgtcgactgtctcaggccgccgctgcgccggcgccgctcgcatcgtttgcttccttggaccagcagtcgtcgccgtcaggctgaactgcttgtaaccgtgaattccggacccgtttgcttctgtaagatttgtgcatttgcctgagtac

SEQ ID NO: 24413 - DNA, 661 bp, Zea mays
  Clone ID: LIB3608-051-C8_FLI
gctctcgaccgatcggcgccacgagtgctttgctttctggctgctgggagcgcgccatggggaggtcgccgtgctgcgagaaggcgcacaccaacaagggcgcgtggaccaaggaggaggacgagcggctggtggcgtacgtccgggcgcacggcgaggggtgctggcgctcgctgcccaaggcggcggggctgctgcgctgcggcaagagctgcaggctgcgctggatgaactacctccgcccggacctcaagcgcggcaacttcaccgacgacgaggacgagctcatcatccgcctgcacagcctcctgggcaacaagtggtccctcatcgccgggcagctgcctggccggacggacaacgagatcaagaactactggaacacgcacatcaagcgcaagctcctcgcccgcggcatcgacccgaagacgcaccgcccgctcggcgccggcgccgacgccgccgcgccacccggcgtggtcgcgcaccgggcgctgctgcaccgcgcagccctcgtcgagctcgccgtgaagccggcgccggcggagtcatccgacgacggcggccggagcagcggcaccagcagcggcggcggcggcggcgccagcgtggaggagccgcggtgccccgacctcaacctcgacctgtccgtgggcccgcc

SEQ ID NO: 24414 - DNA, 591 bp, Zea mays
  Clone ID: LIB3608-051-E3_FLI
ggtagcttcttccccattcacattcggccattctccaccgtccaaccaaccaccggcggcggcacaagggaagcgaagaggaatcaacgcgatgtctgcgaccacggcggcggtgcccttctggcgggcggccgggatgacctacatcggctactccaacatctgcgctgcgctggtacggaactgcctcaaggagcccttcaagtccgaggccgcgtcccgcgagaaggtccatttctccatctccaagtggacggatggcaaacaggagaagcccactgtccgcacagaatccgatgaataaagctctggtgccatagtggcatagtccttgctacagatgatttgaagtgttgttgcaagtttccggaacatgctatttagctggcttgattttatagtcaatgctgaataataaatactttttacgacaattgtctttttcgttgctaattgcactcgccctacctgaatcagtcatgtgaacatcatggaatgcttcagttttgtacaaactaaatttgttgtgctgtccgacagattctatgtctggtccttaaaaataaaggaataatgaatgtagtgtttttg

SEQ ID NO: 24415 - DNA, 930 bp, Zea mays
  Clone ID: LIB3608-051-H5_FLI
tagtcactactcacccatccactgcaaacacgccaaacggccggcacacaagctggcaaagatggcttcctccttggtcctcgtcgcagcggccctgcttgcgctggcctcgtcgtggcagcaggccatcgcctacgatcctagccctctccaggacttttgtgtcgcagacaagaactcgcctgttcgcgtcaacgggttcccttgcaaggacccgatggcggtcaccccggacgacttcttcaacgcggcgatgatcatcgacaagcggagggacacgaacaacaaggtggggtccaacgtcaccaacgtgaacgtggagagcttcccggggctgaacacgctgggcatctcgctggcgcgcatcgactacgcgccgctcggggtgaacccgccgcacatccatccgcgcgccaccgagctgctcaccgtgctcgagggcaccctctacctcggcttcgtcacgtccaaccccaaccgcctcttctccaaggtggtcaagaagggcgacgtcttcgtcttccccaaggctatgatccacttccagatgaacctcgaccacgacaagcccgccgcggcgctctcgtcgctcagcagccagaaccctggcgtcatcaccatcgccagcgccgtcttcggctccaagccacccatctcggacgacgtcttggccaaggcgttccaggtggagaagaaactcatcgactggctccagtctcagttctgggataccaactactagctgcctagctagctagtaatatacttgcttgcttatttgttgcatgcatgcaccaccaacacaagccttatattaattacgtatgtacatctatgtataatatcgaataaatggccggtatgcatgtggaggagtgaaacttattactgtgcgtgattaataatatttaatgtaaacttttcattatt

SEQ ID NO: 24416 - DNA, 696 bp, Zea mays
  Clone ID: LIB3608-052-A3_FLI
gcagcaccaagaagcaccattttttccttaggattaacttagaacaaatcctgacaggagtaacagcatccatcgatccacagtccatgctggttgatgcatgggtctgctggagccgaggatgaacacagcactaacaactgacacagagcgaccttgcaatcaaaaacacagatgggcaacaacaaacgagacgaacgaagataaaccctctggactagggtaaacatcacggtagcgaacaggataacttggccgcgcgggccccaccgctcagttcctccggaagcacgagcagcatatgtcacagagggccagcgtcccacactcctcctgcatagccttcgcgctccattcccatctcctggtctccagtgagatgtgccccagctcctattggcagcaatagctattctccgccttcctttttttcttcttcttcttcctttcctcccgtctggatttcgtttccgtttgatcgagctggctctcagcttccgtttttagttttgttggcatctttgctctcggatccgtctctccctaactcctgaaacccaaaaggagagaagaaaccgggcaagcaagcgatgggtgtcaagggattcgtcgagggcggcatcgcctccatcgtggccggctgctccacccacccgctggacctcatcaaggtccgcatgcagctgcagggggagg

SEQ ID NO: 24417 - DNA, 696 bp, Zea mays
  Clone ID: LIB3608-052-F1_FLI
cgccggcgttgagatgttggtttatcaggatctcctatctggcgacgagctcctgtcggattcattcacctacaaggagctcgagaacggcgtcctgtgggaggtcgagggaaagtgggtcacccaaggtcctgttgatgtggacattggtgccaatccatccgccgagggtggtgaggacgaaagcgttgatgacacagctgtgaaggtggttgatattgttgacacattccgtctacaggagcaacctccttttgacaagaaatcatttgtgtcttacatcaaaaaaatacatcaagaatctcactgctgtgttggagccagagaaagcggatgagttcaaaaagggtgtcgagggtgcaaccaagtttctccttagcaagctgaaggacctccaattttttgttggtgagtccatgaaggatgatgcgtctgtggtattcgcctattacaaggatggtgccactaatccgacattcctctatttctctcatggtcttaaggagatcaagtgctaggcgtgcggcgaaattagttacccatgttgggtactatctatgtactattattatatccaaaactatagttgtcctggctgaattgaactcaaaagggtttgtttgagaaaaaattgtcccaagattggattgcttgttaaagctcaatattgttattgaagtgttattgcttagttgt

SEQ ID NO: 24418 - DNA, 1268 bp, Zea mays
  Clone ID: LIB3608-052-G9_FLI
agtcaagtagaacctccaggccccccagcccccaggtggtcaagagacagagagagcatggccgctgctcccacggtggtgccgcgcgtgaagctgggctcccaggggctggaggtctcggcgcagggcctcggctgcatgggcatgtccgcctactacggccctcccaagccggagccagacatgatcgcgctcatccaccacgccgtcgccgccggcgtcacctcctcgacacctccaacgtgtacggcccccacaccaacgagctcctcctcggcagggcgctccgggcggcaggcggggtgcgggagaaggtgcagctggcgaccaagttcggcatacgcgcggacgccgacgacggcgcctgggagatccgcggcgatcccgcgtacgtgcgcgcggcgtgcgagggcagcctccagcgcctcggcgtcggctgcatcgacctctactaccagcaccgcatcgacaacagggtgcccatcgaggtcacggtaggtgaactgaagaaactagttgcggagggcaagatcaaatacatcggcctgtccgaggcgtcggcgtcgacgatcaggagagcgcacgcagttcacccaatctccgctgtccagctggagtggtcgctctggtcaagggatgttgaagctgacataatcccgacttgcagggagcttggcattgggatagtagcctacagtccactgggcagagggttcttgtcgagtggtcctacgatggtcgacaagttgtccgatcaagatttccgcaaggagctgcccagattccagccggagaacctggagaagaacgccgtgatattcgagagagtcaacgcgatggcggcgaggaaggggtgcacgccgtcgcagctggcgttggcctgggtacaccaccagggagccgacgtctgccccatacccgggacgacgaaggtcgagaacttcaacagcaacgtggcggcgctttcggtggagctcacgcctcaggacatggctgagctcgagtcttacgcgtcggcgggcgtccagggcgatcgctaccatgacttcctcaacacttggaaggattccgagacacctcccctgtcgtcatggaaggctggtgaataacctacggcttcacacacgtgacacgttgttgaggtgaccagatggaataaataagagccaataaaaattctccgcacaatataattttagcttgcttgctaaaaatctttatccaatcttttaaaactataaaactctcaaatgagatgttcatgagcc

SEQ ID NO: 24419 - DNA, 456 bp, Zea mays
  Clone ID: LIB3608-052-H6_FLI
gtgcgttccttgcctgccacaactccagcacttggagtcttcgacgacgacgacgaggacgacgacggcaggggaggagaaagagaaacaggcgggcgggtcatccatggagacggaggaggagacgacgcccaaggcgaagaagcggtcgcagtcgctgctcgggagcctgcgggaggcgatcaccaaggtccggttcctgctctcctccagcgcgacgcggtggatgctgctcaggtccctggcccgcggcggcggcggcggcggcgccccggcgcggcgcctcagcttcgacgcgcggccgggcctgctcgacaccatcgccgcgtcgccggactcctcctgcagctccaggacctccaggtcggccagcctgggcacggcgaccacccggaccctgtcgcgggccagcagcgccgcgtcgccggaggccctgacgagggcctcgtcgtcgtc

SEQ ID NO: 24420 - DNA, 1241 bp, Zea mays
  Clone ID: LIB3608-053-B3_FLI
gaacccggcctgctctttcctctcatctctatcagctcatctccattctccaccggcctccatctatcgtcgtcgtcgtcgatccatccatggcggagcagctggacctgccagggttccggttccaccccaccgaggaggagctgctggagttctacctgaagcaggtggcgcacgggcggaagctcaagttcgacatcatccccacggtgcacctgtaccgccacgacccctgggagctcccgggcctggcgcgcatcggcgagcgcgagtggtacttcttcgtgccccgcgacggcggccggcctgccaagcagcaccaccaccagtcgtccggcgcccgccccagccgcaccacggagcgcggcttctggaaagctacgggctccgaccgcgccgtgcgctgcgcccacgaccccaagcgcctcatcggcctcaagaagacgctcgtctactacgagggccgcgcgcctcgtggcaccaagaccgactgggtcatgaacgagtaccgcctccccgacgcctgcaataacaacagcaacaacaataatgccgtccccggcgactcatccgcggcggcggcctcttccaccaccaccaccaacaactcgcccaaggaggacatcgtgctgtgcaaggtctaccggaaggccgtgtcgctcaaggagctggagcagcgagtggccatggaggagctggcgcgcgccacgccgtccgcgtcccacaacgccgggtcgcccgccgactccatgtcgtcgtccgaccaggaccaacaaacccaacttgttgggcagggagtggagatcatgatgacgatgcccgtcggcggcatctcaccaccaccaccactaccaccgcctgtgatgatgagcatgaagcaagaggaggaggtggccgagcccgaggcgccgctgccggcggtgctgatgaggccgtcgacgctgagcctgccgcagctggaggtggcgaagcagcagcaggagtggatgcaggaccccttcttgacgcagctgcggagcccatggatggagagctggtctccctactaccccagcgtcctcaacttttaaccaatgcaatctcagaatctcagatcgaccgtcgtcctcgatcaagtagctatatatatatggtcattgttccacagacctatactaatagctagcatgcatactgctgctaggtatcttttggttggcattatcatatatacatactgatgacgagctagtaccgtaccc

SEQ ID NO: 24421 - DNA, 924 bp, Zea mays
  Clone ID: LIB3608-053-H2_FLI
gctgacacaagagagcacgctactactcatcactcgccaacgtgcagagatcagggaagcggcactccatccactgactgaccgctcatggcgaaggtccacctctacgtcgccgcggcctgccccgtcgtcctcgcgctcgccaccccggccctcgccggtgaccccgacatgctgcaggacgtctgcccggctgactacgcctccccggtgaagctgaacgggttcgcgtgcaaggcgaacttttcggcggacgacttcttcttcgacgggctgaggaacccgggcaacaccaacaacccggcgggctccgtggtgacggcggccaacgtggagaagttcccgggcgtgaacacgctgggcgtctccatggcgcgcatcgactacgcgccgggcggccagaacccgccgcacacgcacccgcgcgccaccgagatcatcttcgtcctcgagggcacgctcgaggtcggcttcatcaccaccgccaacgcgctcttcaccaagaccgtcaccaagggcgacgtcttcgtcttcccgcgcggcctcgtccacttccagcagaacagggggcacggccccgccgccgtcgtcgccgccttcaacagccagctccagggcacgcaggccatcgccatgacgctcttcggcgccgtgccgcccgtgccctccgacatcctcgccaaggccttccgcatcagcagcggcgaggtggaccacatcaaggccaacttcgcgcccaagtagagatccaacgtctgcattcccttgattttctcaataataaatccccgcggtgtgcagttcgatttgttcgtcttcgcttggtttggttcgagacattgctgaccacgcttgttactgctaatttgtgcggaccggagggagttgcttgtgctccgataaataagataaataatcaattct

SEQ ID NO: 24422 - DNA, 2051 bp, Zea mays
  Clone ID: LIB3608-054-F7_FLI
ctcgggatctcgcgtcgcaccgcaatgcagcacaagtgccgctgatcccgtggccgcctccttcctttcctcctcctgcggtcctgcgccgcctctgctgcagcgggcagccgccatggcgcggcgccacgggtggcagctccccgcccacaccctgcaggtggtggctataacagtgtactctgtgctttgtatagcattctatgctttcttctctccatttcttgggaaggacttgtatcaatatatcgctgtcggtatttatagttttttggctttatctgtgctgattctatatgtcagatgtactgcgattgatcctgctgaccctggcatcctgatttccatggatgacatactaatttataaatcagaagcacatgtagacactcaagatgaagctggtaagccaggattgaggaacgatgaggatatccgaaagcataaatcatgctttggaagggtttgtttttgctgcgctatttttacaactggggactgtcgcggaggggatgaagctaaccatcaagaagattatggtgaagaggcactcttttgcaccctttgcaacgcagaggtgcgcaaacatagcaagcactgtcgaagttgcgacaagtgtgttgatgggtttgatcatcactgccggtggctgaacaattgtgttggaagaaaaaattatatcacatttttatgccttatggctgtgagtctggcttggcttgctgctgagtgtggagttggtattgctgtttttgttcgttgcttcactgacaagacagtcatagaagatcagattggggaaaagctgggttatggtctttcacgtgcaccctttgcaaccattgtggccctggctacagctctttcaatgcttgcttcagtaccactaggagaactatttttcttccatatgatattaatccggaagggcataacaacttatgaatatgttgtggccatgagggctcagagtgaacctcctggaccttctgtcaatgatgaccaacaaagcttggcatcttctccaatgagttctgcaccaacagcttttagtgggagctcgtttgcacggcactacaaaggcgcatggtgcactcccccacgtatcttcattgaccaggacgaaatcatcccacacctggagcctggccgagttccttcaactgttgatcctgataccacagacccaatggaaagaaccaaaacccatcctaaacggccagtccgcatcagtgcgtggaagcttgcgaagctcgattcaaatgaggccatgaaagcagcagcgaaagccagagcctcttcgtccgtgctgaaaccgatcaatacccgcaaccagtatgaggcagacagtgatagcctcagtagcagaaacagtgtcataagtgctgataccggacaccataggtaccctcggtcttgcgggaattcgcagtacaagccctcttatccaccaagcagagcaagtgcagatgacatcgagttgtacccccagacaccgagcagcttccagagcaactcacggacttcaactcccatagccgagcaccatccatccaagcatttcaacccaatctaccagacatcagcaaacaggtctccattctcagcaaaagcaagtgtcagtgaagctcctgtctctgaaatcaccaatgcagggaggtcctaccccccaccacaagcggacagatcctcccggtcatctgtttactgggatcaggaagctggcaggttcgtgtctgctcaggcaaaccagggatctagctctcgccctggctatcctgatcttctatacaccgggcagaatatattctttggtggacctctgattgcagatcccgcagcaagaagcttcagagatcctggtggctcgagccaaaggtctgccgggcctcggtcgcaccagctcccggtgttcgttcccagtgacccccagaaagatcagctgtccaggttaccgtgaaatgctatatcttttttttggggggggggggggtcggggtagtagtcttccgaaacacatgttgccctgccgggttattaatgtatagtta

SEQ ID NO: 24423 - DNA, 910 bp, Zea mays
  Clone ID: LIB3608-054-F8_FLI
cttcatctttatcctcgtctctgttcgtcatctccatctcccttaccgatccgatcgtcaagcaagctaagccaccctgacatggcatcttcacccccctcctccgcctcgctacggcagaggccagccgccgcggcggcgacgcccgatcagcagcacgagccaccacgtctcgaagacggcctcctcccgaaccaaggcggatccccggcgacatcggcgctgtcccaggcgctgtcctccacggcaaacctggccaacctgctcccgaccggcacgctgctggccttcaacctgctggcgccgacgttcacgaaccacggcgcgtgcgacgccaccacgtcgctcctcacgcggggcctcctggcgctcctcgccctcgccagcgcgctggcctgcttcaccgactccctcaagtccccgcacgacggccgcgtctactacggcgtcgccacccgcacgggcctctggctcatccactacccgccgggcgcgccgccgctgcccgagggtgccaccgggcgctacaggctcgcgttcatcgacttcgtgcacgccgcgctgtccgccgccgtcttcggggtcgtcgccgccagggacagggacgtcgtcgtctgcctgtacgggcccacgccggacagggccacgcaggacctgctcgacgttctgccgctcggcgttggcgtgctctgcagcctcctcttcgtcgccttcccaaccaccaggcacggcatcggataccccgtcgtcgccaatgccgtcgccgcagccaccgccacttcctcctaacaatagtttaatttaatttaatttcttcgaggctttaatgccttaatgtaactgcgttcgtatgtactattcatattttttttcatcaatcaaaacgacaacaacacacgttcacggaggg

SEQ ID NO: 24424 - DNA, 683 bp, Zea mays
  Clone ID: LIB3608-055-E4_FLI
cttctcctcccccaccggttcgtgttcaggttctggttcgtgggcgagagggaagagatggcggcgtcggacgttgagtaccgttgcttcgttggcggcctcgcctgggccaccgacgaccactccctcaacaacgccttcagcacctacggcgaggtcctcgagtcgaagatcatcctggatcgggagacgcagaggtcccgcggcttcggcttcgtcaccttctccacggaggacgcgatgcgcagcgccatcgagggcatgaacggcaaggagctcgacggccgcaacatcaccgttaacgaggcccagtcccgcggcggccgtggaggcggcggtggcggatacggtggcgggcgccgtgatggaggcggctacggcggtggcggtggaggctacggcggtggtcgtggaggctacggcggcggtgggggatacggtggtgcaaaccgcggcggcggctacggcaacaacgacgggaactggaggaactgagcggtggggtccgctgaggcctagttatcttgttcgcttctgctaccgtgttcaccctagtctagagggggtttatcttcgtctgtggtcgtctcgtgtccgtatgtttcgtttcgtgttcgttgttgttgttgcccatctgtgtttttgaccgcaagctcgctcctctgatgttgttagtgatgtct

SEQ ID NO: 24425 - DNA, 650 bp, Zea mays
  Clone ID: LIB3608-055-G11_FLI
gcacgccccgtccgaaccccagagcagagcaaagcctcctcgacctccctgtccccagccttccccgatggcccgcacgaagcagacggcgcgcaagtcgacgggcggcaaggcgccgcggaagcagctggcgacgaaggcggcgcgcaagtcggcgccggcgacgggcggcgtgaagaagccgcaccgcttccgcccgggcaccgtcgcgctgcgcgagatccgcaagtaccagaagagcacggagctgctgatccgcaagctcccgttccagcgcctggtccgcgagatcgcgcaggacttcaagacggacctccgcttccagtcctccgccgtcgccgcgctgcaggaggccgccgaggcctacctggtgggcctcttcgaggacaccaacctctgtgccatccacgccaagcgcgtcaccatcatgcccaaggacatccagctcgcgcgccgcatccgcggcgagcgcgcctaggcggttcggttgcggcgcctgctcgctactgctggaggtgcttagtttagcccgtcatggttgtgttataggtgtgcgttgttttcaagagtaggcttcttgctatgtgctgatgttaacggaggattatgattagcagttctgaaaaaatgcaatggatgtgatctgctct

SEQ ID NO: 24426 - DNA, 1719 bp, Zea mays
  Clone ID: LIB3608-056-B4_FLI
cgctttctctgcacgcctcacacactcacgtgagggccctggttgaccctctcttcctccctccctccccctcctcctccccctcttgcctcaccttgcctcacgcttctccctcagcaccatccgcctgcccaccgtgcccctgctcgcccttcccgtcgcggtgctcgtccgccctgccgcgccctgcccgccgcgtcgtgaggggatgtgtctagggttattgggagagcaccccttcctatggcgtccacgacaagcactagggcgtcgccatagacgcctcgcggatgccatacacccagttggcaaggcgtggactgtggcgttcggcctggagcaccgcttaagagacactgtacggacgccataacaattaacaagcatggctctagtgcaggtgcgatttactcgtgcagaagctccgacaactatttccgaattacccgggctggtttgtgatgacatctctggagggcaagaaaatattcctattcctgctactaacttggttgatgatccacctgttcctccatctggtttcaagtacttgaaatctctacaaattccaaaggacatcaagattccgtctagtattattggctgtgattgtgaaggaggttgtgctagcaacaaaaaatgtttgtgtgctcagcgcaatggttctgatctgccttatgtatcatataagaacattggcaggttggtggagccgaaagcagttgtatttgaatgtggggctaactgcagctgcaaccatgattgtgtaaacagaacatctcaacaaggtttgcagtaccgcttagaggtatttaagacagcttcaaaaggatggggagtcaggacttgggacactatcctccctggggctcccatctgtgagtacacaggggtgttgaggaggaccgaagatttggatggttcacagaacaactattgttttgacattgactgtcttcaaaccatgaagggtttggatggaagggagaaaagggctggatccgaaatgcacctgcctaatcttcatcctgagaatgattcagatgcacaacctgcacctgagtactgcatagacgctcactctattggcaactttgcaagatttataaatcacagctgccaacctaaccttttcgtccagtgcgtcttgagctcacacaatgatgttaaactggcgaaagtgatgcttttcgctgctgacaccatacttcctcttcaggagctatcctatgactacggttatcgattggacagtgttgttgggcctgatggaaaaattgtgaagctggcctgccactgtggtgctcctgattgccggaagcgcctctactaacctgcagtgtgtttatttctatttggatttttgaggaaacagcttatattgtaggaaaaacagtcatggtacctatgtagttgacatgctcttgatcatatatagcaaaagaggagcaatttatggggtgttcggtttaagaatgagttagtatatcatcttctcatttactatttttgcttggtttatgtaataaaatgagtcgatctatcaccaccttattcctcatagttagttagttagcactaacattagaaatgaagtcatcttatcaaatttaaggaatgagcttatgatgtaccaccttaatttggatgaagtgattcatcaaacaaacaccctattgatataatatagcattcttgttttgtgataattagagattt

SEQ ID NO: 24427 - DNA, 762 bp, Zea mays
  Clone ID: LIB3608-056-B7_FLI
gtaaaaagcccaacgctgggctccgctcccggtctctggagtctggactcgcctccggcgcgcctccaccatgtatcccaaggcggcagacgaaggtgcgcagccgctggccacgggcatccccttcagcggcggcggcggctactaccaggcgggcggcgcgatggcggcggcgttcgcggtgcaggcgcaggcgcccgtcgccgcctggtccaccgggctctgcaactgcttcgacgactgccacaactgctgcgtgacgtgcgtgtgcccgtgcatcacgttcgggcagaccgcggagatcatcgaccggggctccacgtcctgcggcaccagcggggcgctgtacgcgctcgtcatgctgctcaccggctgccagtgcgtctactcctgcttctaccgcgccaagatgcgcgcgcagtacggcctccaggtgagcccctgctccgactgctgcgtgcactgctgctgccagtgctgcgcgctctgccaggagtaccgcgagctcaagaagcgaggcttcgacatgagcataggatggcatgcgaacatggagaggcaggggcgcgccgccgccgccgtgccgccgcacatgcaccctgggatgacccgctgacgctctgccgctcgcctcacttctgctgaggaaatcaagtgatttggtattggtccgctcccagcaggcagtatcaactactgtaaccaatccatgatctgtatgcggtatcgggctgaactgatactttatggacttgttgcttc

SEQ ID NO: 24428 - DNA, 1729 bp, Zea mays
  Clone ID: LIB3608-056-C8_FLI
tgaaaaaggagaagatggttactgccacgaagaagggagctgcagtgctggatcagcacattcccgatcacataaaagtgaactatcatgtcttgcaagtgggcgatgaaatctatgatgccaccttgaaccagactaatgttggagacaacaacaataagttctatatcattcaagttttagaatctgatgctggtggaagctttatggtttacaatagatggggaagagttggggtacgaggtcaagataaactacatggtcccttcccaacacgagaccaagcaatatatgaatttgaggggaagttccacaacaaaaccaataatcattggtctgatcgcaagaacttcaaatgttatgcaaagaaatacacttggcttgaaatggattatggtgaaactgagaaagaaatagagaaaggttccattactgatcagataaaagagacaaaacttgaaactagaattgcgcagttcatatccctgatctgcaatattagcatgatgaagcaaagaatggtggaaataggttataatgctgaaaagcttccccttggaaagctaaggaaagctacaatacttaagggttatcatgttttgaaaaggatatccgatgttatttcaaaggcggacaggagacatcttgagcaattgactggggaattctacaccgtgattcctcatgactttggtttcagaaagatgcgtgaatttattatcgatactcctcagaaactaaaagctaagctggagatggttgaagcccttggtgagattgaaattgcaactaaacttttggaggatgattcaagtgaccaggatgatccgttgtatgctcgatacaagcaacttcattgtgatttcacacctcttgaagctgattcagatgagtactctatgataaaatcatatttgagaaatacacatggaaaaacacactctggttatacggtggacatagtgcaaatatttaaggtttcaaggcatggtgaaacagagcgatttcaaaaatttgctagtacaagaaataggatgcttttgtggcatggttctcggttgagcaactgggctgggatcctttctcagggtctgcgaatcgctcctcctgaagcacctgttactggttacatgtttggcaagggtgtttactttgctgacatgttttcaaagagtgcaaactattgctacgcctctgaagcatgtagatctggagtactgcttttatgtgaggttgcattgggcgatatgaatgagctactgaatgcagattacgatgctaataacctgcccaaaggaaaattaagtaccaagggagttggtcaaacagcacctaacatggtcgagtctaaggtcgctgacgatggtgttgttgttccccttggcgaacccaaacaggaaccttccaaaaggggtggcttgctttataatgagtacatagtgtacaacgtagaccagataagaatgcggtatgtcttacatgttaacttcaatttcaagagacggtagatgttgcaaagagctgaaactgttgctgagatcttagcagaacatatgtggacttatagcaccaggtgccctcagcctcattttctgagcaaatttggtagcctttgcatttcgattttggtttcaggcttctagccccattgatgattgatactgagtgtatatatgaaccattgatatccaccttccatgtacttaagtttttttaacatgtcccatgc

SEQ ID NO: 24429 - DNA, 1340 bp, Zea mays
  Clone ID: LIB3608-056-D5_FLI
gccaacaaccatcccgctcctcctccctccgtcaggctgtcactgtccccctcaccgccgccgtcctcgtcaccacacctcacccgttgctcccactccttccagaaccacctcctcgccaccgtggctgcctgccctgcccgctataagactcttcactcccgctgcgacgcagtcctcacaagcaccagaccaattaactagcttcttctagctctagctaggctcgtctgctgcaagaaggtaacagcgcaggcatggaggggaaggaggaggacgtccgcctgggcgccaacaagttctcggagcgccagcccatcggcacggcggcgcagggcacggacgacaaggactacaaggagcccccgccggcgccgctcttcgagcccggggagctcaagtcctggtccttctaccgcgccggcatcgccgagttcgtcgccaccttcctcttcctctacatctccatcctcaccgtcatgggcgtctccaagtccacctccaagtgcgccaccgtcggcatccagggcatcgcctggtccttcggcggcatgatcttcgccctcgtctactgcaccgccggcatctccggcgggcacatcaacccggcggtgaccttcgggctgttcctggcgaggaagttgtccctcaccagggcggtgttttacatcatcatgcagtgcctgggcgccatctgcggcgcgggcgtcgtcaaggggttccagcaggggctgtacatgggcaacggcggcggcgccaacgtcgtcgcgcccggctacaccaagggcgacggcctcggcgccgagatcgtcggcaccttcatcctcgtctacaccgtcttctccgccaccgacgccaagaggaacgccagggactcccatgtgccgatcctcgcccctcttccaatcgggtttgccgtgttcctcgtccacctggccaccatccctatcaccggcaccggcatcaaccccgcgcggagccttggcgccgccgtaatttacaaccagcaccatgcgtgggctgaccactggatcttctgggtcggccccttcatcggcgctgcgctggctgccatctaccaccaggtgatcatcagggcgatcccgttcaagagtaggtcttaaaggagccgatgctgctgcttcgagatgctgccggtcttgaaaggatggattcgtggctgtttcaaatgatcccctactatgttacgtggagttccattcctctttcaaagttcggagctgcttttatccgaacccagacttgtaattcatctgtaccaattgtgtaatatgccgcgcctctgttatgtgcaattcaaaattatgagacagcgagtc

SEQ ID NO: 24430 - DNA, 702 bp, Zea mays
  Clone ID: LIB3608-056-F1_FLI
cgctcgccgccagcctccctagggtttccttccccgtcgaccatcagcgcctccccagatttggacctaagccctcgcggacgtgcgcgccggccgcctggttgccggtcgaatccgccctccagccgctgccaacgtcgatctgctactgacgcaccgcaagggaggacaagggctgggatttcaagggctgaccagtattattcctcctaccctgctggtactgaactactaactgacactgcaaagctttacaaggctgcattgggcaattgttttgaagtagatgaatggggcccaatagagttctccatcatggcaaaacattttgaccggcaagggaaaccaccatatgcctaccatgctcaatatctggcacaccttctctcccatgggcagctcgatggaagcggttaaatgcaggatgtattgttgataactgcatcaacgcaactagaatttcactatatcttgtataaaaatgttgcctttgctagaacaatgagttcagactgcaccagtttagaagttacagaactggcatcagaaacaagttctgaatttttttggtcattggctggtacgatatcagtgttgaatttgtgcgatcgctcgctgaacaatttctgaaaaaaaaacatgaccttgtcttgttggaacatttacactgtccttttattgttgaataaaccactgaatgtt

SEQ ID NO: 24431 - DNA, 1685 bp, Zea mays
  Clone ID: LIB3608-058-A9_FLI
cccacggtccggccctcgctacttgcggagcgtcgttggtcaaaccctagcacacgtacgagcaggccagccccgcccgctcccattcccaggccctcatccatggcggcgctctccgtgcccctccacgccgccgccggatcccgcgccgccgcggccgaccccgtcaaggttccgtgcgtgaggagcactggttcagcccatttcggccgcgccttcccctccgtcgcggtctcctctttggctgcgaggcacatcgagccgatgagagcgatagctacacaggcgccccctgccgtgccacaatatttgagtggcgagaagacaaagatcggcatcaacggctttgggcggattggcaggttggtcctgcgaattgcaactagcagagacgatattgaagttgtggctgtgaatgaccctttcgttgatgctaagtacatggcctatatgttcaagtatgactctactcatggcccgtttaaaggttctatttgtgttgtggatgattcaaccctggagatcaatgggaagaaggtcacaattacaagcaaaagagatcctgcagagattccatggggtaactttggggctgaatatgttgttgaatcttctggtgtctttacaacgactgataaagcatcagcacacttaaagggtggtgctaagaaagtggtgatatctgcaccatcagcagatgctcccatgtttgtagttggagttaatgagaatagctatgattcgaagatgaatgttgtttctaatgcaagttgcaccaccaactgccttgctccacttgccaaggttgtacatgaggaatttggcatcgtggagggccttatgacaactgttcatgccacaacagccacccagaagaccgttgatggtccttcaatgaaggattggagaggaggacgtggtgctggccaaaacataattcctagctccactggtgcagcaaaggctgttggaaaagttctgcctgagctgaatggaaagctcactggcatggccttccgagttccaacaccaaatgtctctgttgtggacttgacatgccggattgagaaaaacgcctcctatgatgatgtgaaagcagccatcaaggcggcatcagagggtgcactcaaaggtattcttggctacacagacgaggacgttgtttccaatgattttgttggtgattctaggtcaagcatctttgatgccaaggctggtatcggactgagctcttctttcatgaagcttgtgtcttggtatgacaacgagtggggctacagcaaccgggttctggatctgatcgcccacatggctctcgtcagtgccgccgccaagctctgatgtccgtactcgtttctccagtagtagcttagaaaaaaagactgcaattttgacggccattttctgttagctgttgtttggaataagatcaaatgctggaacacttcgaactcgcgcgagactggactcagatccatggcctgtattttagttgtagaagtgggcaaatttgcaccgtagtaccctggcatggttatatgcggaattgttgattgatgagtcgttgtacggtttgtcgacttgatgatatgttgatgtgggagcccctgaatgaggcggtattaatggaaatataggatggcaatggcaatccgtcgacttgcaccctatttttctttgtttgc

SEQ ID NO: 24432 - DNA, 1780 bp, Zea mays
  Clone ID: LIB3608-058-G5_FLI
ccatattttatcccttcggagctcggatcagacgcttgtgaatcctggtcatcattcatggagaagaaggcagctactacagaggaaccccttctcgcgccgcggtccgagcacacggtcgcggcggaggccaagcggctgctgagcctggcggggccgctggtggccagctgcatcctgcagaacgtggtccagctggtttccgtgatgttcgtgggccacctcggcgagctgcccctcgccggcgcgtccctggccagctcgctcgccaacgtcaccggcttcagcctcctcgtgggcatggcgagcgcgctggacacgctgtgcgggcaggccttcggagcgaggcagtacggcctgctcggcctctacaagcagcgggccatgctggtgctggcgctcgcctgcgtcccgatcgccgcggtctgggccaacgccgggcggatcctcatcctcctcggccaggaccgcgacatcgccgcggaggccggcgcctactcccggtggctcatactgtccctggtcccctacgtcccgctcgcgtgccacgtccggttcctgcagacgcagagcatcgtcgtgccggtgatggccagctccggcgccaccgcgctgggccacgtgctggtgtgctgggcgctggtgttcaaggccggcatggggagcaaaggcgccgcgctgagcggtgccatctcctactccgtcaacctggccatgctggctctctacgtcaggctctccagcgcgtgcaagaggacgtggaccggattctccacggaggccttccgagaccttctccggttcaccgagctcgccgtcccgtcggcgatgatggtctgcttggagtggtggtcctttgaactgcttgtgcttctctctggtctgctgcccaatccgaagcttgaaacctcagtactgtcaatatgtctaaacactggcgccttgctgttcatggtgccgtatggtctttgcacagccataagcacacgtgtttcgaatgagcttggtgccggcgagcctcaagcagcgaggctagcagctcgagtggtgatgtgcatcgccctgtctgcaggcttgctgctcggctctaccatgattctcctgcgcagcttctggggctacatgtacagcaacgaacctgaagtcgtcacgtacattgctaggatgatgccggtcctggcgatttcgtttttcacggatgggctccacagttgtctatcaggagtgctgactgggtgcggtcggcagaagattggcgcgcgcgtcaatctcggtgcgtactacttggccggcattcccatggccgtgctgcttgcatttgtgcttcacctgaatggaatgggcctgtggcttggcatcgtttgtggcagcctcaccaagcttgtgctgctcatgtggatcacactgcggataaactgggagaaagaggcaaccaacgcaaaagaaacggtgttcagttcatctcttcccgtagcattatagagctgtatcctatatatgtgcagctggacgtaacaacaccacaacatgaaaaggctctattgctgcatgctgctacactaccttcccaattgagagacaatatgagttctatgcgttctctaatacgttacttagtatacatattttgttattaaatatccatatcgtcagggatattatatgatattgattatctctattcatcatagaggatccgttagttaaacattgtagcttgtcaaaatcattattactccctccgttttaaaacgaagagggagtataacttaatatcttt

SEQ ID NO: 24433 - DNA, 1497 bp, Zea mays
  Clone ID: LIB3608-059-D4_FLI
gtgctttgtgtgaggtgtcagctgagggatttacggggcctcaccagctcacctccaccaaaaaaagatccctagtagtagtaggatatagtggagaaattcttcgacagaactgaagaactgaacgaggagagacaccaaaggaggagaggcatctctcaggcatggagctcaatccgaccgaagactctgtgatctccgagttcgtgatcgttcagagatgaaacgtatagtccactctttctgtcatgtgagtgaacaatttagcccccaaaaatttactctctgaaacatgggtgatcttcccgagccagaagctgccatggccgtgccggagccgtcgtccagcctagcactccgagtcttctacctgcgggtgagcaggtgcgaggtcgacgagtccatgctggatactctcgccctcacccacaccccgctcacccctgacaccatcctggacgtgagcggcgccgagcaccagccaggcatgggcaaaggcaacggcagcgtgtccttctgcctccgccgagaccgcgtcgacaagagatcgggggaagccaccttcgtctgcacggcgaccgtcagggtgtcgggcagcgtgcggttcgaggtccagagcaaggacgagaggatcgtcgtcgggatcctggaggcgtgcgacgtggacagcaagggcaccaagagctgggcgatgaagtgccaggcggcgacgcagcgcggctcggggttcctcaggtgcggcggggagaagagggacacgaagccgccggtggtggaggtgtacgttgcaggcgtgttccggggcacgcccgtcgtgttcaccaaggccacgcagctgcggttcaggcggcggcggcaggtgagggcgttcatggacccgatcccggagtgccgcgagcaggtggaagaaacgcatcacccagaggaatcgggataccggtgctacaagcccgatccgaactgggacgacgacgacgtcgacgacgacagcctctacatgagatccgacgggaccgacgacggcgaggagtacagcgagctgtcatggttcaccgccggcgtgagggtcggcgtcggcatcagcctgggcatctgcctcggcgtcggcatcggcgcgggcctcgtggtccgttcgtatcagtccacctcgaggaccctgaagcggcgcctcatctcaaacctgctctgaaacgaccacactgtgagcgcttatccggtggttcgaaaactttcctactgatgatgatgaaaaatatatgtatgtagatgctgcaacgttgtgcgctgtgccgaatgcatttgatttatagatcgaggaaaacaatctcttctccctgtaaactgttgatacggaggtgttgagcactaaaaatgccaccagaaagtccgcggtccggatgatccgcgttgccaatacgaacggttcatgcgtgcacaaaattagttaggttttatgtatttgttactgcaggattaattgtgaaactgacttttaat

SEQ ID NO: 24434 - DNA, 423 bp, Zea mays
  Clone ID: LIB3608-059-G10_FLI
cgacggaaacagtagtgctgccagtagagctctcagaactcgggaaaaaaatgtcagaggccgccgtgcgtgtgatcggcctatggccgagcccgttcgtgatccgcgtcctgatcgccctgaagctgaagggcgtcgagttcgagttcgtggaggaggtggtgggcaggaagagcgagctgctgctgatcgtctgtgtgcccacccggccgtggtcgacgccatccctgacgcggacaagttcgttgagttcagcgtcacctatggctccttctccaagcctatcaatgctcccgccaagtgagcaaaaagggtccgtgcatgcttcgtcattttcactttcactgcgccccttccaaggggaatcgacgcatacactagtggctctgtattctttagtgcaaagcttactgttctgaactc

SEQ ID NO: 24435 - DNA, 941 bp, Zea mays
  Clone ID: LIB3608-059-G2_FLI
gtctaggaggcttcttccgctcgctcaggtccctccgcctccgccgtatcggagggagaggaagcggaaggcttggaaggagaagagaatggcggggcggcgcgcggaggaggagtacgactacctgttcaaggtggtgctgatcggggactcgggcgtcggcaagtccaacctcctctcccgcttcacccgcaacgagttctgcctcgagtccaagtccaccatcggcgtcgaattcgccacacggacactccatgttgagggcaagatcatcaaggcgcagatctgggacacggcaggccaggagcggtaccgggcgatcaccagcgcctactatcgcggggcgctgggcgcggtcctggtctatgacgtgagcaagcccaccaccttcgagaacatcagccggtggctcaaggagctacgcgaccacgccgactccaacaccaggatcatgctcgtcggcaacaagaccgacctgaggcacctccgggccgtcgccaccgacgacgctcggagcttcgctgaggcagaaggcctgtcctacatcgagacgtccgcgctggaggccaccaacgtggaggaggcgttccagctcatcctgggcgacatttaccgggccgtcagcaagaagcctgtggcgtccgacgaggttggcgccggccagggaggcgtcaaggaaggtaagaccatcgatgtggcgactggtgctgatgccgccgctcacaagaagcagtgctgctcggcttagaagttagaagaacccatgctggtggtctctcgttcagtggcgtatgtgttgttgtgatggttgtcgttgttgttttttttctcttcttccagtccaaaagtttgttgattcgttttgccagatagtacctttgttggagggataatcatgctcacatatatattctctaaagcaagcagttatatatgattat

SEQ ID NO: 24436 - DNA, 3614 bp, Zea mays
  Clone ID: LIB3608-060-C1_FLI
aacacacgcgctctctccccttcccatctccttcctccgccccagatccgagcccggcgcccgagttcatggcgagcgacagcgacgtcgacgaggacgagctcctgcagattgcgctgcaggagcaggcggcgcgggacctcagccaccagcgcccgcccgccgccaacaagcccgttgtcaacctcgtccgcccacccgcccccaatgcccgcggcggcaacgccagggccgggggcgccgcagcgaaggcgcgccagcccagccgcggcggcgacgaggacgacgactcggaggtcgagctgctctccatctcctccggcgacgaggacgacaatccccgcgcccgtggcccgccgccgccccgcgggggcgggggtggacgcgccggagcgcggagggccgcgtcacgggacgatggggacttcgacgatgaggagcccagaagctggaagcgcgtcgacgaggcagagcttgctcgcagggttcgagaaatgcgtgaagcaaaggtggctcctaacattcaagaacttgatcagaaagcagcagctgctgcagcagctgctgctcgaaaggccttcacgagtgtacagactttaccaaaaggagttgaggttttagatcctttgggccttggtgtcattgataataaatccctgcggttgatcactgacgcttcagtaagttctccaatttcaagggagaagtctcaaggtttggaccccaatatgcgagacaaagttatctattcatctccaaattttgatcccaaagttttcctttcgtgggtccacaaagacacgagcgctgctgacttagaggctggtgctctcaccttgaaaactgatctcaaagggagaacacagcagaaaaaacagttagtcaaggagaacttcgattgttttgtctcgtgcaaaactacaatagatgacattgagtcgaaattgagacagatagaggaagatcctgaaggtgcaggtactgctcacttgtattcagtgacacaaaaaattagtggtgtggcaaatcgtgcatttgagcctctatttgagaggcaggcccaagctgaaaagatcagatctgttcagggaatgcttcaaagattccgaacactatttaacctaccaagtgcaatccgtgggaacattagaaaaggagaatatgatcttgctgtcagagagtaccaaaaagcaaagtcaattgttcttccttctcatgtggggatactaaaacgtgtactcgaagaggtcgaaaaggtgatgcaagaattcaggggcatgctttataagtccatggaggatcctcatcttgatcttgctgagattgagaacattgttcgtctattgttggagttggaacctgaaacagatccagtgtggcattatttaaatattcagaatagcaggattcatggattgtttgaaaagtgtactcaagatcatgactcgagaatggaagttttgcaaaataaaattcgtgaaaaagtgctctctgattcgaagtggaggcagctgcaacaagattcaaataaatctctggaagttgattctaccattggtgattctcctcgaattgatcagttgtcaacaaactttatggctgaggaagctgatagtttaagggccacctacattcgtaggctaacttctgtactgatccagcatgttccagctttctggagattagctttatctgttttcagtggaaaatttgccaaggcagcttctggtaacgtagtttctgattttgatgtgaatgcaaagccgactgcaaataagaatgatgaaaaaggtggagaagtaaagtacacaaaccacactcttgatgaagttggtagtatggttcaggctactatatcggcttttgacactaaggttcagagtaccttccgtgattttgaggaatgcaacattctttgtccatacatgagtgacactataaaagaaatagctaaggcctgtcagactcttgaagggaaggattcgtctccaactgctgtaaaaatgttgcgcacacttcattttgaaatgacaaagctttacattctacggctttgttcatggatgcgggcaacaacaaaggagatatcaaaagatgagacttgggttactttatccacccttgagagaaacaagtcccagtatgcgatttcatgcttgcccctggagttccgtgacataacagtttcagctatggaccgaattgatactatgattcttaatctgatgagcgagactgcgaagtcatatgacatttctcaaccacttcaggaaatcaatgagtctgttagacttgcatttttgaattcctttctggactttgctggttatctggagaggtttggaggtgaactaaccgagaacagaccaaacaaagaaaacaattatgtctcaaatggatacataaatggtactagagaaacatttgctaacacagatggagatttgcacaaaaagctgctggttgttttgagtaacattgggtattgtaaagctgaactttcagaagaactttacagcaaatatagacacatttggtctccagtcaggaataatgaggagcgaagttctgacatgcgagacctgaggacttctttctctgcacttgaagagaaagtcctggaccaatatacttttgcaaagtcaaacttgatcagaagtgctgcacaaagttatcttttggattctgggatttattggggagcagcgccaatggtaaagggcattcgagatgcaactcttgacttactgcacatccttgtagcagtacatgcagaggtatactctggcgctcggcctctgttggagaagacaatgaaaattttggttgagggtttggtcgacatctttcttagtgtttttcatgagaataagaccaaagatattagattgttggatgcgaatggtttttgtcaactgatgcttgagcttgagtattttgagactgtactgcacacgtacttctcacctgaggcgcaacaggctatgaaatctttacaagagaatttgttggaaaaggcctgtgaaagtgttgcagaagccatggaaaatcctggacaccaacgtcgaccaacccgtggcagtgaagatacagcatcggatgacagacagccatcagtatcacctgatgatttgcttgtgattgctcagcagtgcagtagtgatcttctgcaaggggagttggagaggactcgattgaacatagcctgtttcatggagtcgacccttcaaccaacagctgcgccagcaggcccaaagcctgccgcacattcttcttaccaagcacagcatgctcccgtccaaacgtcctcgcctagttttagaaggcagcagactggtacaagttcccctgtagtctccaggcggcgccggtgagcttagtgcatcttcccatcattggcgtagcctcttcccggagtttccttccttttcccccctcacatgtgtgtttttttttttaatctgttgtaattgtcatcctgttgtcatgtgttacgaatttcgatccattcttttggtgttgtataagatgaaaaggaggagtacagtactggtgctgctgcacgggatcatggaattgtataatatcgacgagtcaaatattattgctgcctg

SEQ ID NO: 24437 - DNA, 2384 bp, Zea mays
  Clone ID: LIB3608-060-F2_FLI
cgaaaagaaaatgaaggaagtagaagaggtggagggccacggttatggcgccgccactcccatgacgccgccgccgtcgtcgctcggtcttccttccccctcggtctcgacattgacctccgccgctgccgctagggttttggcgcggccaatgcccgcctcggtcccaagcttgcgggcgccttcccccttcgtgcgggccatgcgcacccgcgttgatccgccgccgccacagccgctcacggcccctcctcttcttcgtcctcgtccggtgctaccgccgccgccgataccagagaagcagcggcgggggcgcccgcgcaactgcgaccgactcctcccgccgccgccgggcttccacctcgctccgtccgcacgggcaccgctgcctgcccgcggccaaccttcatctagggggcttccctttcgcggtcaattgggtgggctccagttgcacgtgctcaaaatacatgtgggagaggatatcgtatcaaagattgtgcaggtctcgaaaataactgggaaggctgtctgtgttctctcagtgtttggggccgttcaggattgctatctgctccactctgctgtcatcttaaatcacaagggtcctttagaaatcattcatgtgtttggatccattttgacatctgatagtcctggatttgggtgcttatctgcgactcttgcttgtggtgattgttctcttgtcggtggcattgcagttggacctctcatagctgcaacaccggtgcaggcaattgttgggagcttccacaatgatgctttccaagcaaacaagaaacctaagctcgttgcatgttaccccagttctcatgttaccgctggcactgggggcatgtgttgcgtcaattctaagattaccattggcagtttgagaaaacatgataccagttcttggtttcccattggcaatggaagcacaaatcaccccaattctcatgttactgtcagcaatggaaacacacatcatcctaattcacaggtgaccattgacagtaggagcatgtgttgcctcagttttgaggatggcattggtagttggagtaaagatgatccaagttcttggtttcccattggcactgggagcacagatcactccaattttcaagttactgttggcactgagagcacacaataccccagctcccaggttcccactggcattgggagcgcatatcaatctgattttcatgtcacattgggtgacagaagcgcaagtatccccgattctcaggctactgttcactatgggattaaacatcaacccaattcctgtgtcagtgttggcaacgggagcacaggtagcgtcaattctcaggatattgttggacacggaagcacatataaccctgaatctctgcctgccattggcgacaggagcatgcataacaccaattttgaggtcgtggtaggagttgggagcacagacaagggcaattcacaggacacccttgttgatgggaacctgaatcgccccagttctatggtttctgttgacaacggaagctcctgttaccccaattgtaaggatgctgttggcgatacgtgtgctccatcctctgaaggctctaatccagaatatgcatcctgcactgtagtagtggaacagagtagattgagcagagacagatgtgaatctctcgcaagtgatggcttcttaacgtagcaacactttaggtgattgtttatgttttttctctgaagacagtagccaattacatgtccttggacagcgagggtgactccagcagttcatccaaagtttatccataagcattgttttgcattggagactgtactgtcgcagagtggagtttgaatatagctatgtgtatgggtaagctgttggagatagtcttatgcttttgtggatgaccgccaaagtatccttttgggatggtaggaagttttgaagtccagcagtagttgcgttctttgcagggacatggcagtgttgagaattgtggtgcagtctgttgtagctttagttgctaacagtgttggatttgtgctgaggtctgtcagatgagaaatcctaacatagcagaagggttcgttgagctttcaatatatatgatactgatgagattttatgaggcaagttgtcgggtatatctcgtgcagtaaagcagaatcaaggctccactgcaacagaaactgatcatgtgagtgtatgatagatgtcatggcgttagaccaacgatttgaaattgaaatgttgctaccatgtagaaagatgtgatatgtttagctagatggtctccagcagctcttctattacattatctattctacctcctatttcaaacttcaatctatctgcagttgcacgaccataaatacgatctgtcaaacttcgctct

SEQ ID NO: 24438 - DNA, 900 bp, Zea mays
  Clone ID: LIB3608-061-B4_FLI
cctcacgcaatttgctgtggaccttggcattccatttgagttcactgacatcaatcttgatgcgtttgatccggcagaattcattgctcctagccccaatgaggttgtggctgtttgcatccctgttggttgctctgcacgcacgccaccgctccctatgttgcttcagttggtgaaacagcttgcgcctaagattgctgtggctattgaccatggcagtgaccggggtgacctcccattttcacagcacttcatgaactgcttccagtcttgtatgttccttctcgactcacttgatgctgctggcactaacgcggatgctgccagtaagattgagaggtttctgattcaaccgagagtagaggatgcagtacttggccggcggaaagctgaaaacgcaatggcttggcgggcagtgtttacatcggccgggtttgctccggtaccgctcagcaacctcgcagaagcacaagctgactgcctgttgaagcgcgtgcaggtccgaggattccatgtggagaagtgtggaatgggtctagcactctactggcagagcggcgagctcgtgtctgtctcggcatggcggtgctgatcatacggaccccatccatcaaccatcatgacacctacaccaatttgcaggcatgtttaaccctggtaatgtgcattttgtcttgcaatttcaaacatcgtgaagaaaactattgtatttgttgttacacgcctctgattgctttgctgatgttggagtaccgcctctctaaaatgtaacatgttggtctagggtctcataactctgttcttgctctcttcttggttagccagaggataatttggcaaatctgtggcaatgatgttgttattttactaggtaattcagatgaaaactgacatggactg

SEQ ID NO: 24439 - DNA, 974 bp, Zea mays
  Clone ID: LIB3608-061-C5_FLI
gctcatctcagatcaagctagcgcacctgacacccaccacctccctcccagatccaccaccccagccatggccaccgcctttgactccccgacctcctcccccgccgccgcgcccttccacgacgaccctttcctccatttcgacggctcggcccccgccgccgccgacggcttcccggcctccccggacgcctacgcgccctctgagtggtggtggcagtagctatggtggaggcaggtatgaagatgatgaatatcggaagaagccgagtggtggtggctatggcggaggaaggtatgaggacgaagatgattataggaagaaacctagtgctggtggatatggaggtggaggaagatatgaagacgagtacagcaagaagccagctggtggtcatggcggagggaggtatgaggaagatgatgagtacaggaagccgagtggtggtggatatggttatggagcttccagtggtggaggtcatggaggaaggtacgaagaagaggactacaagaagaagcctagtggacactcagggggacgctatgaggaagaggaggggaacaagaaggctagtggctatagtggagggaagtatggcaaggaggaagatgacaagaagaagaagcatggcgaggatggatcagagagtggtggtattggagattacctgaagttggcacagggtttcatgaagaaacaggatggggaaggggacagtgggggcggcatgggagactacttaaagcttgcagaaggtttcttgaagaagcgctgattaatcttccatatcatgattcaggaaggacttgtttggttagtcacttgtcctgtttattgtctccaagtagtgacattttcgaggtttccatcataggatgtaatacaagtgcattgcttatgttgtctgtgtgttgtgacatgaatgcttaatgtgctgctgggataataaaagcttggatgctctgctatt

SEQ ID NO: 24440 - DNA, 1629 bp, Zea mays
  Clone ID: LIB3608-061-E11_FLI
gcgcgaccgcatctctctcgccccttccaagttcctaatcgccaccgctgtccccaaccagcaaaccctagccctcatcgccggcggccatggccgagaccgtcgacgacaagatcagttacttccaggctgtcaccggcatctccgacacggacctctgcacggaaatcctcgccgcgcacaactgggacctgcagctcgcggtgtcctccatcaccgccaacccctcctcgccctccgccccggtttccacctcctcacgcgacccggccccttccgcccctttggcagatgcggagttcgtcgcgccaccgccgccgataccgccgccgcctcagcagcagccggggatcgcgtggaagctggtgacgctccccttctacgtggtctcgggtggggccagcctcgtcgccggctccttccgccttggcgcctgggtcgccgggggcgtgctgtcccgctccctctccctcctcggcctcgcggggcaggccggcagcggcgaccgcctgctagagctgccgccgtcagctgccgaggcggctgacttcgtcgccgagttcgagcgcgagtgcggcgctggccgcggcccgcgcttcgtggccgaggggttcgctgatgcgctgcagcgagcgcagcgggaattcaagcttctgttcgtgtacctccactcccctgatcacccggatacccctgccttctgcggcggctgcctctgtgctgaaccggtcgcggcctttatagatgagaacttcgttgcgtggggtggtagtatcagaaggaccgaagggttcaagatgagcaacagcctgaatgcgtcgagattcccgttttgtgctgtggtcatggcttctacaaaccagagaatcgtgctattgcagcaggttgaagggcccaaatcacctgaagagatgataacaattcttcaacgtgttgttgaagaatgtgctacatcactcgttgctgccaggattgaagctgaagagagactaaacaaccagcgtttgcgtgaggaacaagatgctgcttacagagctgcacttgaagctgaccaggccagggaacgtgaaaggatagaggaacaggaaagacgtgaaagggaggctgtagaggctgagaaaaagcgtaaagaagaggaggaagctgtagcaagggcagcccaagaagcagctgaaaaggaagctgctcttgcaaggaggaggcaagagaaggccatggctcttggagctgaacctgagaaaggaccaggtgttactcgggttctcataagattcccaacgggagagcgcaaagagcggagattccatagttctgcaaccgtcacttccctctatgactacgtcgattctttagactgcatgaaagcagagaattacagcctagtttcaaatttcccacgggtcacatatggtccagagaagcactccctgacactggaggaggcaggcttgcatccgcaggcgagcctgtttatcgagatagagcaatgatgctatagaaaaaccggaacttggaagtataggtgctcctttttccgaatttgtccagtaacagttaaggatttccagatgtattacacaccacaggtgcatgcttgttcatgaaataaaattcgccctcaccaagatc

SEQ ID NO: 24441 - DNA, 611 bp, Zea mays
  Clone ID: LIB3608-061-F10_FLI
ccagcacacagtggagctagctagctagtagaggtcaatcaccaaaatggcgaggcagctcgttgtgcttgctctgcttttcgtgatcgccggtgtggcgcatggcgcgggggagtgcgggagagcctccgccgacagggtggcgctaaggatggcgccatgcatctcggctgccgacgacccgcagtccacgccgaccagcagctgctgctccgctgtgcacaccatcgggcagagccccagctgcctgtgcgccgtcatgctgtccggcaccgccagggctgccgggatcaagccggaggtcgccattaccatccccaagcgctgcaacatggccgaccgccccgtcggctacaagtgcggagattacacgctgccctagctgatgaagacgtcattaacgagaccgtgcgagtgaacctgcatgaacgaatgccattatgccatgcaactatgttgtgttgcgttgttggaataataatcgaatccgctagaataaatatgtacgtgcacgacggcctcttgcttgtatcactggactttgcttgtgtgctgtacgtcaaatatgttccgtttctctcatataagaaaaatctgcaatgcttgttatt

SEQ ID NO: 24442 - DNA, 697 bp, Zea mays
  Clone ID: LIB3608-061-H10_FLI
gaactgcctgcggcgggggcgagaggacgtgggtcgaggcgggcgatggccgggctggcggggaggcctggttcctggggcggcctggtgctgcgggtggggcaggctctcttcgccgccgcttgcatcggcgtcatgggcagctcgctcggattcgccagctacaccgccttctgctacttgattgcgtcaatggggcttcaaatgctgtggagtttcggacttgcatgtcttgatggatatgccattagagccaataaagatctcaccagtcccattctattgagcttgtttgtcgttggagactgggtaacagcaatcctgtcattcgccgcatcaagctcagctgccggtgtagtaatcctatttcaaaaggacgtgctcttctgcagaaggtatccccagctcccctgcggaaaatacgagctcgccacggcgttcgccttcctgtcttgggcgctcagtgcgacatcagcattgatcatgttttggctcctggctgcgttctgattttgtgtaaaaattttgtgacagcgatgttcatagtgcccacttcgctgttctctcatcgcattcttttacgaccatgtcacatatttagagccacatagccccccccccccccccaaaaaaaaaaggaatgttgggatcatgtaaagtccttgaagtgaacagttactaatggaagaaattcact

SEQ ID NO: 24443 - DNA, 1001 bp, Zea mays
  Clone ID: LIB3609-001-D8_FLI
cggcaagcaaacatctccggcagccatggcgtccactgtaacagccgccaatagcagccatggaagcgccctgcgtacccgtaccgcctccccaaggccggtcgcgggctggagctgcagacgcacgctttccacgcctgcacaccaccaccacgggcggtcgtcacccagagctcgggttgtcgccgtccgagccgccggcactcagcgggcgacctggttgcccggactggacccgcccccatacctcgacggcacactaccaggtgacttcggcttcgaccccctgggcctcggcgaggagcccgaagccttgaagtggtacgttcaggccgagctcgtgcactgccggttcgccatggcaggggtcgccggcatccttttcactgacttgctccgcgtatcagggatcagggatctccccgtgtggttcgaagcaggcgcggcgaaattcgacttcgcgaacaccacggcgctcttcttcgtccagctcttcttgatggggttcgctgaaaccaagaggtacatggacttcaaaaatccaggatcgcaagcagaggaagggacattcatagggttagaggctgcactcgcaggtcaacagccaggctaccccgggggcccactgttcaatccactaggactcgcaaaggatatagagaatgctcatgacgagaagctcaaagaaatcaagaacgggaggttggcaatggtagccatgcttggcttcatggtgcaagcatctgtaactcatgccggccccatcgacaatctcttgacacacctttcggacccgttcaacaaaaatataattcacacattctcctcttcctaagtactcgtcccaatgcccggatgctatggcggcacaaaaaggtcacaatgtttttgaacacaacagaacaacatgattattgatttacgtccttctccccaccgaataggggaaggaaggttagggaagcgttcaatcaattcaatgagatagtgtaatctatagc

SEQ ID NO: 24444 - DNA, 792 bp, Zea mays
  Clone ID: LIB3632-001-C11_FLI
gccagccgcacgggatagaacccgggagccgccgcactgccctgccttccgctgccgcgcccgcagtttccaaattcgtcttgctccgctcaatcacgcgaatacctgacctctccgttccttcgtcgtcgctcccggtcgcagtcgacctagcgaaggagcagcgcaacatgcaaacagtacggagtgcggtgctgcagcacctccggctccgcgcggcggctcctattgctgcacgtggaggcggcggcgggttcgctcggaggatgagcgcgccggcgggccaggaggacagtagcggcagcagctccgaactggagagggacatcaggacgcgcgtcgttaacctggtcaagaagttcgacaagatcgacgccgacaaggtgaccgagactgcagacttccaaaaggacctgagcttggacagcttagaccgggtggaacttgttatggcctttgaacaagagttctccgttgagatccctgatgacaaggctgacaagctgacctgttgtgcggatgttgccaagtacatcatatctgaatctcaaacgagtgatacaaatgccggtggatcctgagggacagatgaaaccgagtgcaatgtttcttttgtgtgtgtgtgtttatcataatgagtctgggttacaaaggacgatctgtgcgcatgatttccttttagtttttccagtatggaaaaaaatatctctacctcggttgattgttacaaagtgaaggttttttttatatgtcgatcatggtcatggatcatgttcatgattttccaatgct

SEQ ID NO: 24445 - DNA, 3941 bp, Zea mays
  Clone ID: LIB3632-001-C3_FLI
gcgctagacctcaaagactcgatcgcaccgcatcttctctctctgctcctcgttcgcttcgtcgccggcgaccccgccgccagcttccccttccgctggccgccctttgcctcgcccctgaggcgtcggtttccactgcataggagtggggcggcgatccgactggacctagggttgcgagaccccatagggtgaccctaggagcatccgcctccacgtgggtgaggcggaggagggaggatgtcgtcgctcagccgggagctggtcttcctcattctgcagttcctcgatgaggagaaattcaaagagaccgtccacaagcttgagcaggagtccggattctatttcaacatgaagtactttgaggacgaggtcgtcaatgggaattgggatgaggtggagcgctaccttggtggattcacaaaggtcgacgataaccgctactccatgaagatattctttgagatccgcaaacagaagtatctcgaggctcttgataagcatgatcggtcaaaggctgttgaaatcttggtcaaggaccttaaggtatttgcatcctttaatgaggagttgtttaaggagatcacacagcttctgaccttggagaactttagggaaaatgagcagctttctaagtatggcgatacaaaatctgcaagagcaataatgtttgttgagctgaagaagctgattgaagctaaccccttgttccgcgataagctacaatttcctagcctgaagaattctaggttgcggacacttattaaccagagcttaaactggcagcaccagctttgcaaaaatcccaggcctaatcctgacatcaagactctatttgttgatcattcatgtggacaaccaaatggtgcacgtgctccatcaccagcaaacaatccattactcggatctatgcccaaacctggaggtttccctccattgggtgcccatggaccttttcaaccttcaccaacacctgttccacctctggctgggtggatgtcaaaccctccagcagtaacacatcctgctgtgtctggtggtgccattggatttggcactcctacaaatcctgccgctttgttgaagcatcctagaacacccacaactgctaatcctggtatggattatccatcaggagattctgatcacatctccaagagaactagaccagttggcatgtctgaggaggtgaatcttccggtgaatatgctgcctgtgacttatccgcagagccataattaccaacaagatgatttccataaaactgttgcacggaccttgagccaaggatcaacaccgatgagcatggatttccatccacttcaacaaactcttcttcttgttggtaccaatgttggcgacattggattgtgggatgttggtaccaaagacagactcgttgtaaggaacttcaaagtctgggacctcagtaaatgtacaatgattctccaggcatcactggttaaggatccagctgtgtcagttaatcgcataatatggagtcctgatggaaccttgtttggtgttgcttattcaaggcatattgtacaaatttattcctataatggtggcgacgatattagacaacacttggagattgatgcacatattggtggtgtaaatgacattgcatttgctcatccaaataagcagttatgtataattacatgtggagatgataagacaattaaggtatgggaggccaccagtggagctaagcaatttacatttgaaggacatgaagctcccgtttattcagtttgtccacattacaaggaaaatattcagttcatcttctcgactgctttagatgggaagatcaaggcatggctatatgataatatgggatctagagttgactatgatgcaccaggtcattggtgcactacaatggcatatagcgcagatggttcaaggttattttcatgtgggactagcaaggatggtgaatcacatctagtagaatggaatgaaagtgaaggagcagtgaagagaacatatcagggatttcgtaagcgatccatgggtgtcgtgcaattcgataccacacggaacaggtttttggccgctggggatgaattcatgattaagatatgggacatggacagcacgggtcttctaactaccattgatgcagatggtggcttaattgcaagtccacggatacgcttcaacaaggaaggaactcttttggctgtctctaccgttgacaatggcatcaagatcttagcaaatgctgatggacttcggttgctgcgcacgctggaaaatcgttcttttgatgcttctcgtaatgcatctgaggctgtaacaaagcctctaataaatcccttgactgctgcggcaaatgcagctgcagcaagcagttcaggagctggtgctccgtcagctgtaactgcaatgaatggggataccagaagtttggttgatgtaaaacctagaatagctgatgagtcactggacaagtcaaaggcgtggaagcttatggagataactgagtcaactcagtgcagatcaattaaactggcagacaacatgagaacgagcaagatctcgagattgatttacacaaattctggtcttgctatcttggctttaacttcaagtgctgttcatctactctggaaatggccacgcagtgatcggaattctggaaaggcaagcgcgagtgtgtctcccacactatggcaaccaccaagtggcattttgatgactaatgacacgactgacaacaatcctgaagaagctgttcactgctttgctttgtcgaagaatgattcatatgtcatgtccgcttctggaggaaaaatctctctgttcaacatgatgactttcaagacaatgacaacatttatgcctgcaccgccggcagcaacttttcttgcatttcacccccaagataacaacataattgcaattggaatggatgactcaaccatccaaatctataatgtccgaattgatgaggtcaaaagcaagctcaggggtcactctaagagaatcacgggtcttgccttttcaaatgtgctaaatgtcttagtctcttccggagctgatgctcagttatgtgtttggaacacggatggatgggaaaagcaaaagaacagatttttgcagataccgtcaggtcgccaatctaatatcttggacactcgtgttcagttccaccaagatcaaatgcactttcttgttgtgcatgaaacccagattgccatctatgaaactacaaaactagaaccagtgaagcagtggcctgttcgagagaattcacctccaatcacacatgctgcattctcgtgtgacagtcaactgatctatgcaagctttatggatgccactgttggcatatttaatgcatcgagtttgagacttcaatgtcggattcttccagcttcgtatctccccccaaatatcagtccgagtgttcatcctgttgtggttgcggcacacccttcggaagcgagtcagtttgctctagggctgactgatggtggtgtttttgtgttggaacctttggaatcagatagaaaatggggaaatcctccaccggtagaaaatgggtctgctagcaacttgtccgcaccgcctcctaatggagcttcaagttctgatcaacctgaaagatgattgagaagatggaactggtagatttttcgtggcatgagtctaaccaagatgggcttcaaaaggtggtgcaactaaccttggcagatcggttccaagggactcggacaatgggctcaataaaaacaagctcaacagcagtttatccgttgcttatatatatttctattgactgtatcgagtgaagaggatagttctagtatttcattttgctttgtttactgtgctgtgaaaaggagttcttatcagtagataagctgtagacaactatcagtttggctcctacattttatgacttagtgaaagtatcttgtttc

SEQ ID NO: 24446 - DNA, 2047 bp, Zea mays
  Clone ID: LIB3632-001-C4_FLI
ggagcagagggttcaagggaggggacaggtcgagcagctcacctttctctgctcgagaacgagaggagctcccgtcttttgcttgctgtgccgggcgctgctgaaggttcagctcagtccgatggcgttgagcggcagagctctgctcttgttcaagctgctgctgctgctgctggcgtgcctgctcttcctcttggagctgtcccgaggcaaggaagaagcattcagcctgaggaacctcccgcccttccacaaggccagcagctaccccgcggggtgcccgacgacgtacgactacatcatcgtcggcggcggcaccgcggggtgcccgctggcggcgacgctgtcgcacaggtacagggtgctgctgctggagcgcggaggctccccgtacggcgaccgcaacgtctcctacatgcagaacttccacatcgggctcatgaacatggcgccggactcgccgtcgcaggccttcatctccaccgacggcgtcatcaatgcccgggcgagggtgttgggcggtgggacctgcatcaatgccggcttctacagccgggccagcccaagctttatccaggaggccggctgggatgaagacctggtgaacaaatcatacccttgggtagaggacaagattgtccagtggcctaagatcgcgccttggcaggcggcgctacgggatgggctgctacaagcaggtgtagcccccttcaatgggtacacctacgatcatgtctctggaacaaaggtgggtggcaccatctttgacgagactgggtaccgccacacagctgccgacttactagcagctggagatgctagcaacctgaaggtgctgctccacgctagtgtgcacaagatagtgtttggctcgcgacaaggacgactgaaggcaagagccatcggagtcgaattcactgatgaggatgggagacaccaccaggcattcttgaacagcaacagagacagtgaagtaattgtatctgctggtgcgatcggcaccccccagctgctgctgctcagtgggatcgggcccaagaacgacctcaagaatcataacattccagtggttctccataacagatatgtgggtaaagggatggctgacaaccccatgaactccatattcataccaacaagaagccctcctcggcagtctctcattgaaactgttggaataactgaagaaggcgtgttcattgaggccagcagcgggtttggtcagtcgtcggagagtgtccactgccaccatggaatcatgtctgctgagattggacagctgtctaccattcctccgaagcaaagaaccctggaagcagcccagaaatacgcccataacaaacttaatctgcccaaagaggtattccacggcggttttatacttgaaaagattgatggtccgatgtccacaggccatctggtcctcacagacactgatgtccggaacaatccagcagttaccttcaactacttcagtcatccacaggatctcaatcgctgtatctatggtatcaagaccattgaaaggatactcaagacaaaccgtttctctgaactctctgctgatggtgctgggttatcgatggaaagggtgctcaatatgagcgtgcaggctaatgtgaacctgataccgaagcatacaaatgacacagaatccctggagcagttttgcaaggacactgtgatcaccatctggcattatcatggtgggtgccatgtagggaaggtggttgaccagcattaccgggtgcttggagtttcaggtctccgggtggttgacggctcaatattttctaaatcgccagggaccaaccctcaagctacagttatgatgatgggcagatatatgggagtgaagatcctaagggaaaggctgggacgagcagctggagtgtagtcgattcctggacattagctttttattatgtgtggcctaggaaagaaattactaattttttgtgggatccagaatgaatcgctgaagaaaaacaagccatgtgtttcatctgtacccagtaatcatttgtctaatatgatatcgcagact

SEQ ID NO: 24447 - DNA, 1040 bp, Zea mays
  Clone ID: LIB3632-001-D12_FLI
gagtgccccctttcccttccctagaccagatcctcgccccgttttccacttttgcctccaccgccggcccaattcggataacaagctccctccgcctcgccgcgtctcctcccagccgcaggagccgccgccatccgatccggaagagggaggaggggggagggaggaggatctgtgtcccgattcgattggagctctcgtccccggcggtccaggatggtgcggggcaagacgcagatgaagcggatagagaacccggccagtcgccaggtcaccttctccaagcgccgcaacggcctgctcaagaaggcgttcgagctctccgtcctctgcgacgccgaggtcgcgctcgtcgtcttctccccgcgcggcaagctctacgaattcgccagcggaagtgcccagaaaacaattgaacgttatagaacgtacacaaaggataatgtcagcaacaagacagcacatcaggacattgagcaagtaaaagctgatgctgagggcctggcaaagaaactggaagcacttgaagcttacaaaagaaaacttttgggtgagaggttggaagaatgctcctttgaagaactgcacagtttggaagtgaaactcgaaaagagccttcattgcatcaggggaagaaagactcagctgctggaggagcaactccataagctgaaggagaaggagatgaatctgcgcaagagcaacgaagatttacgtgaaaagtgcaagaagcagccgccgccgccgccgcctatgctgatggctcctccgccgcctccagcgccggcagccatcgatcacacggggccgaaggatgtcgggatggacgtggagacggagctgtacataggattgcccggcagagattaccgctcaaacaacaaagacatgactgcacagtagctgtcaggtcaggtcaggtcaggctagccagcagtgcagagaataatcttagatctgtggtgcggagaactggagatgcaagccaagcccaagccaatcaacatgataaggatcatgagtgtcgcgtcgtgttttac

SEQ ID NO: 24448 - DNA, 1066 bp, Zea mays
  Clone ID: LIB3632-001-H3_FLI
ttcccaaaggaaagccccacaaaacctcggttgctccccttggcccttgccatcctcgttcctatcgccagttcgccacctcctttgctctcgcctcgcgcgcgctcccccccgcgcatcgtgccgttcgccaccgcaccgcgccgatggaggtcgccgccgtgcccagatccgccgcggcctgccgtgcggcgcccctgctcccggccgtccgagccgctgcgtgccacctggccctgccccggcgcgcgttctccgcatccgtcgcggcggcaccggcgccgcgccgcctcgccgctcgtcgcgctgcggatggtgacagcgtggagacggcgccggaggcggtccccattgagaaaaggttccctcccttcccgagcgtcatggacatcaaccagatccgcgagatcctcccccacaggttcccattccttttggttgatagagtaattgaatacaaggctggagaatatgcagtggggatcaagaatgttacaataaatgataatttcttcccaggacattttcctgaacgccccataatgcccggtgtcctcatggtcgaggctatggcccaggttgggggtctggtgatgctgcaacctgaagttggtggatctcgagacaacttctttttcgccgggattgacaaagttaggttcaggaagccagtgattgctggcgatacactgatcatgaggatgacactgactaagtatcagaagaggtttggactcgccaagatggaaggaaaagcttatgttggtggtgacctagtttgtgaaggggagttcctcctagtcagcgcaaccgagtagtgcaaagacacttcatgattctctgggaagaatcattggttggaatcagatctggttggatgtttgaaagaaccgagttttgaactaattatacaatcggcagttgaggcgatcctttacctgttcttaagcatgttgttgagtccatgtggtgatttctatcggttaccaagggcccaaggctgaatccacgccatgttatgttgcaattgaggattacaatatattgggtaattgtttgatggaat

SEQ ID NO: 24449 - DNA, 1768 bp, Zea mays
  Clone ID: LIB3632-002-A6_FLI
caagaaccatccctccccctaccgctgctactcatgcacgcgcgcactgcctcctggtgccgccgcgtatgatccagacatgaatagggcgcacagcagcagctccaagctcatcaacgagaagctcgtggaacaccggatctccactgcgaagcactgcccccactgcggcgagaaaatcgacagcaaaccggattgggtggggctgccggcaggcgtcaagttcgatccaactgaccaggagctgatcgagcacctcgaggcgaaagtgaaggatgaaggctcgagatctcaccctctcatcgacgagttcatacccacaatagatggggaggacggcatatgttacacccaccccgagaaacttccaggtgtgacgagggatggcctaagcaagcacttcttccaccggccgtccaaggcctacacgacgggcacgaggaagaggaggaagatacagacggagtgcgacgtccacaagggggagacgaggtggcacaagaccggcaagacgcggccggtgatggtgaacggccgtcagaaggggtgcaagaagatattggtgctgtacaccaacttcggcaagcaccgcaagccggagaagacgaactgggtcatgcaccagtaccacctcggcgacctagaagaggagaaggagggggagctggtggtgtgcaagatcttctaccagacgcaacccaggcagtgcagctggtcctccgaccggggcgccgccgccactgccttggcagcaacggcggcggcagcggcggcgcaggagcagcataggagggatagtggcagtggcagctgctcgtctagggaccacgaggtgtcagccacatcgttcccagccggatacacagtcaccacggccgtcgagatgcagcagcatatgaagcagcctgcggaccatttcagcttcgcgcctttcaggaaaaccttcgaccaggaggttggtataggtggtgatcaggtgccatctaatcagcttggacgttcagagccgcatcatgccggcctggggcagcagccacacggcccggtgctcgcgacgaagacggctgtgcctgctacagctttcctgatcagtaggccatcgaaccctgtctcgactatagtgccacctgcaatgcagcacgcatcagttgttctcgatcatgatcagttccatgtgccagcaatccttctccatcaccatgacaaatttcagccacaacaaaagcttgaccgcagatctgccggcttggaagaactgataatgggctgcacgtcgtccacaagcacaaaaggagatgcttccattgctcacccccaagagacagaatggccttacacgtactggccacctgacaaccaagatcatcatgggtagtagcaacagggacctggtaaatagtggcgatgtgaatgctgaaggaacactaaccgcaaccactttcactggaatggtttttgtctgcttgaatatgcagcgttgctttcttggagaatgtacacctacaatagtggggaaagaacagagaaaaaaaacgtatctctgtagatctccctcaataaagaaatgaggataaaactagttaacagtgtgagctctccaagacagaagagacaaaatggccaacgaaaagagaagggggaaagaccgatgggaggaaaggtactgtgtgtgctgacattgaagggatcatgtgtggacagtttagatgtattagaacaccttaatcaagtataactataatcagtttacggtttatcacagtttttt

SEQ ID NO: 24450 - DNA, 1883 bp, Zea mays
  Clone ID: LIB3632-002-B4_FLI
cttctctcttctccatccatgtagataaatagacgccaagcgctctcggcaccggagcaggccggcgggttcagtggcccctgcaagtgcaagctaaggctcacagcatccgttcggttccggctccgagggactcgctcccgtcggggacggatatatatccatcatggaggcggcggcggcatcttctctgtggggcggcctcaactccggcatcatgctgagcctcctggccgtggtgtgggccatgctgtggcaggcgctgcagggcctccagctgcagcagtacttcgggcgccactcccgccgcctgtcgcgccgcctcgcgtccatcctggacccggacctcaccgtcaccgtcgccgagtacgacggcgggcgcatgcgccgcagcgacgcgttcaaggaggccaaggcgtacctggagcgcgccacgcgggaggcccgcggcggggtgcgccacctcaaggccgagcccgacaaggaccccgaccgcctcctgctcagcatggacgacgacgaggagatcaccgacgagttcaggggcgccaccgtcacgtggcgggcctgcacggcgccgccgcgcgaggacagcgcgccggcctacttctggggccgcgccccgcgcgccgaccgcaggttctaccgcctcttcttcgccgagcgccaccgggacctcgtcctgggagactacctcacccacgtccgccgcgaggggcgcgccgtcatggtcaagaaccgccagcgcaagctcttcaccaacatctccggcgacggctcctgggactcggacggtgtttggagccacgtggtgttcgagcaccccaagacgttcgcgacgctggccatggacccggacaagaagaaggaggtgatggacgacctggacgcgttccgcaacggcaaggactactacgcgcgcgtcggcaaggcgtggaagcgcggctacctcctgtacgggccgccggggaccggcaagtccaccatgatcgccgccatggccaaccacctcgactacgacgtgtacgacatcgagctcacgtccgtgcgcaccaacaccgaccttcgcaagctcttcatcgagaccaccagcaagtccatcatcgtcgtcgaggacatcgactgctcgctcgacctcactggcaagcgcaagaagaagaacaagaaggaggaggacggcgagaacaagaaggacggtactacgacgaagcagcaggaggaggacaaggagaaggaggacgagaaggcgggcggcagcaaggtgacgctctccggcgtgctcaacttcatcgacgggctgtggtccgcgtgcggcggtgagcgcatcatcgtgttcaccaccaaccacgtggagaagctggacccggcgctcatccggcggggccgcatggacaagcacatcgagatgtcctactgctgcgtccaggccttcaagttcctggccaaggtctacctcgacgtggacgaccacccgcgcttcgacgccgtggcggcgctcctgcgggaggtggacatgacgcctgcggacgtcgccgagaacttgacgcccaaggcacccggcgaggacgccgactcgtgcctcgccgcgcttgtcgaggcactggagaaggctaaggaggacgcgctggcgaagaaggccaaggggaaggaggaggccggctccgccgatgagctcgacgacgaggagtagctggtggctgctgttgacttcttgttagttgctagtgctacatatgtagggagcccctgatctggttgctggtctcatctcatgagcgaagaataatgctaactagacgacgatttgattattactttatgttgtcagtcacaacatgctacacttattacttcgaagccacgcagtttagactgtttggatc

SEQ ID NO: 24451 - DNA, 1184 bp, Zea mays
  Clone ID: LIB3632-002-D12_FLI
cccgtccccgatctccgatcccctcgtcgatccaaagatgcagatcttcgtcaagaccctcactggaaagactatcaccctcgaggtggagtcttctgacaccattgacaacgtcaaggccaagatccaggacaaggagggcatccccccggaccagcagcggctcatctttgctggcaagcagctcgaggacgggcgcacacttgccgactacaacatccagaaggagagcaccctccaccttgttctccgcctcaggggaggcatgcagatcttcgtcaagaccctcactggaaagactatcaccctcgaggtggagtcttctgacaccatcgacaacgtcaaggccaagatccaggacaaggagggcatccctccagaccagcagcggctcatttttgccggcaagcagctggaggacgggcgcaccttggccgactacaacatccagaaggagagcaccctccacttggtgctccgcctcaggggtggtatgcagatttttgtgaagacattgactggcaagaccatcaccttggaggtggagtcgtctgacacaatcgataatgtcaaagccaagatccaggacaaggagggcattccaccggaccagcagcgcctgatctttgctggcaagcagctggaggatggccgtaccctcgccgactacaacatccagaaggagagcaccctccacctggtgctccgcttgcgaggtggtatgcagatctttgtgaagaccttgactggcaagaccataaccctggaggttgagagctccgacaccatcgacaacgtgaaggcaaagatccaggacaaagagggcatccccccagaccagcagcgtctgatcttcgctggcaagcagctggaggatggccgcaccctagcagactacaacatccagaaggagagcactctccacctggtgctccgcctccgtggtggtcagtaagccatggttcatttaagctgctgctgtacctgggtatctgcgtcgtctggtgccctctggtgtacctctatatggatgtcgtcgtctaataaacatctgtggtttgtgtgtcatgaatcgtggttgtggcttcgttggtttaatggacctgttgtgtcctctgtgttgtacccaaaactcttctgcagcagtatggcttgaatccttatgaagtttgatgtttgaactt

SEQ ID NO: 24452 - DNA, 1190 bp, Zea mays
  Clone ID: LIB3632-002-H11_FLI
cacagcacacggcacaccaccaccactcacctctccctcttctcgctgccgatctttcttcccttcccttccttccacctcggctagctagctagttattaccttagcatcccaccacatcacaccaaggtcacgcggcggccggcaagaatggcgacgcaccacctggcccagggccacccgcaggcgtggccgtgggggatggccatgtacaccaacctgcactaccaccaccaccaccaccaccagcagtactacgagagggagcacctgttcgagaagccgctcacgccgagcgacgtgggcaagctaaaccgcctggtgatccccaagcagcacgcggagaggcacttccccctcggcggcggtggcggcgacgggagcgagaagggcctgctgctggaattcgacgacgaaggcggcaggccgtggcggttccgctactcgtactgggtcagcagccagagctacgtgctcaccaagggctggagccgctacgtcaaggagaagcgcctcgacgccggcgacgtcgtgcgcttcgaccgggtgcgaggtgccggcgtcggcgccgccgaccgcctcttcatctgctgcaggcgccgcggcgagagcgcggcggcctcggcggcggcgactccgacgccgccacccgtggcgcccgcgcttaacgccggcgagcagcagcagcagcagccgtggagccccaccgtgtgctacagcacgtcggggtcgtcgtacccgcccagccccgctagccccccttacgcctaccacatcgacacgccacacgcaggcgcaggcgaggcggacgccaagagcagcggcggcacgcctactacaggaacagcgccgacgaggaagctccggctgttcggcgtcaacctcgactgcggcccggagccggagccggagacgccgacggcgccaatgtacggctacggatacgtgcaccagagtccctacgcagcagtgcccgcagttcccagctactggtaatgagcaagcacggtcggaaggaacaacaccgagatcattcagtcgcattacacgtactgtactactgctagctgaagctgatagagctaattaaaatggataagcatataagcaaagcgtcagtttcttttctttttttaatgtttgctcaacttgtataggaaattaggaatgaataggataggagtaattgt

SEQ ID NO: 24453 - DNA, 1554 bp, Zea mays
  Clone ID: LIB3632-002-H2_FLI
atcagcattcagcaatagctaatcgagcatcgtcgccttagctcctctcctctcctctccgtcgtcgtggaacttctctccgccggctgtcatatatataaaggagaagaagagaacagcaactctagctagccggccggcctccgtcgtcgccggcgtcgtcgactagctagctaactctcgatctccagttcctgcccccgcgccccacgcccggccgtcgtcgtcagcaatggcaggaggcttcttctccatggctcacccggccgtcaccctctccggcatcgcaggaaacatcatctccttcctggtgttccttgcaccagtggcgacgttcctgcaggtgtaccggaagaagtcgacgggcgggttcagctcggtgccgtacgtggtggcgctcttcagctcggtgctgtggatcttctacgcgctggtgaagaccaactcgaggccgctgctgaccatcaacgccttcggctgcggcgtggaggcggcctacatagtcctctacctggcgtacgcgccgcggcgggcgcggctgcggacgctggcctacttcttcctgctggacgtggcggccttcgcgctcgtcgtcgccgtcacgctcttcgccgtccgcgagccccaccgcgtcaagttcctcggaagcgtctgcctcgccttctccatggccgtcttcgtcgcgccgctcagcatcatcgtcaaggtggtcaagaccaagagcgtcgagttcctgcccatcagcctctccttctgcctcacgctcagcgccgtcgcctggttctgctacggcctcttcaccaaggacccctttgtcatgctgcgtccagatgggcctctacttctggtaccgcaagccccgcccggcggccaagaacaacgccgtgctgccgacgaccacggacggcggcaacgcggtgcaggtgcaggggcaggtcatcgagctggcgcccaacacggtggccatcctgtcggtgagccccatccccatcgtgggcgtgcacaagatcgaggtggtggagcagcagcacaaggaggccgccgtggccgccgagacccgccggatggccgccgcaaacccggacggcgccatgccggaggtcatcgagatcgtccccgccgccgccgcggtgtgacccaacgccaatcaccatgcaccgtacacaccctgctagcttcttattagctagctcggatgacgtacgacagtttggtggcaagtggctggcagctcaagcatgcagatgcaggcatcgtcgtctgctagttgatcgtttagttggttaattgttggattattattgcgtgtctctctcgtgtgcgtagtcttgtcagttcagttcagttcagtgtcgaatcaagtagtagtagctgttgtttgcattggatctgacaatgcatgctaataattatggtggtgtgatggtcttggtcggtacgtgcgtagtcgtctacgtacgccgtgtcaacgtcgtagatctctacgggaagatgataagactgtaacatgcagggcatgcatctatttatacttaacatattctttgtgtgctt

SEQ ID NO: 24454 - DNA, 1850 bp, Zea mays
  Clone ID: LIB3632-003-E5_FLI
ccctccgacttcacccgtgagtcttcttcttcccggtcatgccccttcttccctgagtaggaggcgacagatcagaatcctcctagctcgtgcggcaccgtgcgaggagcacggctcggctccggtgcccccacgcgtggaaggagcgcgggcgaggtgttggcggctccggcggcgcggtgtgcaaggcgagcgcgtctctgggctgaggccaccggaggtcgagcgcgcaggagggctatctgcttccgcgtgcggagctcttatctcagcacgacccacccctcccgacgggatagagtattgaagtacacaagtgcatatgcagctggatttggagtggtaaagacgggaaccgaagagctggtggatcagaggtgtggggagatgtaccgtgggggccttgaccgcttcaagaaggcacagaccttggagcccttctcagtgaagtctgagtcaggcaccaagaaggcacctgcagctgcaggaacagctaaagcactggctccgttgacactgccactgaattctaattttgtgccaggtcagaaccaccaaagtccccaaggaaccatctcaagggtggctgggcaaggtggtgatgctccagggcatgttgggacacaggtcggtggagggcagtcgacgtggcaacctccagactgggcgtttgagccgcgcccaggggtctactatcttgatgtagtgaaagatggggaggtcattgacaggatcaatttggacaacaggaggcatctattcgggaggcaggttcctgcttgtgacttcgtgttggaccatcagtctgtgtcgcgtcagcatgctgctgttattccacacaggaatggaagcatctatgttatcgacttaggatcggttcatggcacctttgttgcgaatgagagattaacaaaagacaacccagttgaacttgaagttggtcagtcacttcgctttgctgcatcaaccagaacctatatcctgcgaaagaacgcagctgctctattcccaactcctagccttccatcggatgttagtttgccatctcctccggaccccaatgatgaagatgctgttgtggcatacaatacagtacttaaccgctatggtataagtaaatctgacatattatccagttctaaagattcttcaggaggcgcctctagtgcaaatgatggtaaacatgcagttgaaaggctcttaaagagaggtaaaaagcgcagagtgtcatttagagatcaggttggtggagaacttatccaagtggttgggatttcagatggtgcagatgttgaaactgaaccgggccccataggtgtaaaggaaggcagtcttgttgggaagtatgaatctcttgtacaggttactgtcataccgaagggaaaggagcaagcatcacgaaaagaatgtacctctacctcaccgagtggggtaacagataagctacaagaggtgcttaaaaaagtaaagagcgcaacaagacctggaatctacgatgacctttatggggattctgttccagcaaaagtgggctcatcttgggcatacaaatcagatgatcaacccgttgaggagaagacacatggcatgaatttaaacatgaattcagccgatgacagtgacgacttgtttggtgactagtgattcagaattgtcagtggatacaaaaaaatatatattcttcagaattttgtggcagggttgtttcatttgctagatgctttttttcttagtttatacatgattgtaccctgctgcaaatcaaggtatgttcttttgcctaatgttagcaacctaaggacatgctttcttgtagtgatgctcttggtgagtttaaccttgtttgcccc

SEQ ID NO: 24455 - DNA, 1590 bp, Zea mays
  Clone ID: LIB3632-003-F9_FLI
ctcacttgcaagccatgggtaaggagaagtctcacatcaacattgtggttattggccacgtcgactctggcaagtcgacaaccaccggccacctgatctacaagcttggaggcattgacaagcgtgtgatcgagaggtttgagaaggaggccgctgaaatgaacaagcggtcctttaagtatgcttgggtgcttgacaagctcaaggctgagcgtgagaggggtatcaccattgatattgctctgtggaagtttgagaccaccaagtactattgcaccgttattgatgcccctggacaccgtgactttatcaagaacatgatcactggtacctcccaggctgactgtgctgtccttatcattgactccaccactggtggttttgaggctggtatctccaaggatggccagacacgtgagcatgctctccttgcgttcacacttggagtgaagcagatgatttgctgctgcaacaagatggatgcaaccactcccaaatactccaaggcacgttatgatgagattgtgaaggaagtctcatcttacctcaagaaagttgggtacaaccctgataagatagcatttgttcccatctctggttttgagggtgacaacatgattgagaggtccaccaaccttgactggtacaaaggcccaaccctgcttgaggctcttgaccagatcaccgagcccaagagaccctcggacaagcccctgcgtctccccctccaggatgtgtacaagattggtggtattggaactgtgccagttggtcgtgtggagactggtgtcatcaagcctggtatggttgtcacctttggtccaactggcctgactactgaggtgaagtctgttgagatgcaccatgaggctcttcaggaggcccttcctggtgacaatgttggcttcaacgtgaagaacgtcgctgtgaaggatatcaagcgtggttatgtggcctccaactccaaggatgaccctgccaaggaggctgccagcttcacctcccaggtcatcatcatgaaccaccctgggcagatcggtaacggttatgccccagtgctggactgccacacctcccatattgctgtcaagtttgctgagctcattaccaagatcgacaggcgttctggcaaggagcttgagaaagagcccaagttcttgaagaacggtgatgctggtatggtgaagatgattcccaccaagcccatggtggtggagacattctcgcagtatcctcccctgggtaggtttgctgtccgtgacatgagacagacggttgctgttggagtcatcaagagtgtggagaagaaggacccgaccggtgccaaggtgaccaaggctgctgccaagaagaaatgatgcgacctgtcgttgatgcagcgtctgcttttccaatacgtagctgagatgttccattttgacataagttttgtatgctgtggttgctgtttaccttgtgaactgttgagctctactattgggtgtccgtttatctgtttatgtagcatcttgttatttcacctattgcaatacaagaatgctatatgacatatatgttagacatttgggcaatgttaaatggatttttact

SEQ ID NO: 24456 - DNA, 2336 bp, Zea mays
  Clone ID: LIB3632-003-H7_FLI
ccgcttgcatttattaaccacctcccctccccagcgacatctcgtgtctctgttgggagctccttcaacatctcgtctctctcatcctccgacgccatccgctcccggcccggccgagccgcgcgttgtgtatggattccaaaagcaatcatacaggggctatggcgaggccttacaaacctaagaatatcctcattacaggagctgctggttttatcgcctcccatgtcgcaatccgcattaccaagaagtaccccgattacaagattatcgtccttgacaaacttgactactgctctaatctgaagaacctgcttcctgtgagctcatcaccaaacttcaagtttgtgaagggtgatattgcaagtgttgatcttgtcaacttccttcttgtcacagagaacattgataccataatgcacttcgcggcccagacacatgtcgacaattcatttgggaattctttcgaatttaccaagaacaatatttatggtacacatgtacttcttgaggcctgcaggattagtggccagatcaagaggttcatccatgtcagcactgatgaggtctatggggagactgacgaggatgcagttgttggcaaccatgaagcatcacagctgcttcctacaaacccatatgcagccaccaaagcgggagcggagatgcttgtaatggcatatgggagatcctatggactgccagttatcactactcggggaaacaatgtctatggcccaaatcagttccctgagaagcttatcccaaagttcattctcttggccatgagaggggagcccctccctatccatggtgatggagtcaatgtccgtagctacctctattgtgaggatgttgcggaggcatttgaggtcattcttcatcatggagaagttggacatgtttataatattggaacaaaaagggagaggacagtgcttgatgtggcaaaagatgtttgcagactcttcaatcttgaacctgacaaagtcatcatgtttgtcgagaacagaccttttaatgaccagaggtatttcttggacgatgagaagctcaagagccttggatgggctgagcgcaccccatgggaagaaggcttaaaaaagacaatggagtggtatgtagcaaattctgattattggggtgatgtttctggggccttactgcctcatccaaggacattgatgatgccagggtgcgaggggtctgaggagattaaaggaatactcagccggtttaataacattcaaacaaaggtcggttcaacatcagataatgctccagaaccgcatgccttcaagttcttgatatatggcaggacaggatggatcggcggacttcttgggaaaatatgtgagaagaaaggaattccatatgaatatggaaatggccgcttgcaagagcgttcttcactcgtcctagacatccaaactattaagccaacacatgtcttcaatgccgctggtgtgactggaaggcccaatgttgattggtgtgaatcgcacaagccggacaccatccgtaccaatgttgtgggcaccttgaatctagcagatgtatgtaggaagcatggcttattgatgatgaattatgccactgggtgcatatttgaatacgatgcacatcatcctgaagggtcaggtatcggcttcaaagaggaagatacaccaaattttactggttcgttctactcgaagacgaaggcaatggtcgaggagttattgaaggagtatgagaacgtctgcactctgcgagttcggatgccgatatcctctgacctcagcaacccgcggaacttcgtgacaaagatcagccgttacaacaaggtggtgaacatccccaacagcatgacgatattggacgaactcctgcccatctcagtggagatggcgaagaggaacctgcggggcatctataacttcaccaaccccggcgtcgtcagccacaacgagatcctagagatgtacaagcagtacatcgaccctagcttcaagtggacaaacttcaccctcgaggagcaggcgaaggtcatcgttgctccgcgaagcaacaacgagatggacgcaaccaagctgaagaacgagttccccgagctgctgtcgatcaaggactcgttgatcaagtacgtctttgagcccaacagaaaggtgcccacagactgaagcccgaagggctggcacagctgataccgtacaacacagcaaccattagtgttagactatgtgtgtgggccagcactactttacttttgggctgtcggtctattagggttagagtcctgtgagtctatatattgtacctcatctcttatacaatacatttttgggctgtgagtc

SEQ ID NO: 24457 - DNA, 1928 bp, Zea mays
  Clone ID: LIB3632-004-C1_FLI
gccattcttccaccatcaacatcaccaaccgatgctcctacacagtgtggccggccgccacaccagtgggcggcggcatgcagctggagcctgggaagacctgggtgcttcaagtgcctggcaacacgcaaagtggccgcgtgtgggcgcgcacgggctgttcgttcgacggccccggaaagaaatcctgccagacgggtgactgcggcggcgtgctggcatgcactaccagcggccaaccgccgatgacgatggcagagttcaccctgagtgactccaacaacatggacgactacttcgacatcaccgtcgtcgacggctttaacttgcccatggactttctgccggtgccgtcgtccaaggggtcgtcggggtgcagcaggggtccacgctgcgccgccgacatcacgtcgcagtgccccgatgagctcaaggtgccagggggttgccgcagcgcgtgcaacggatcttcctgcgacgccagcacggtaaacagcaacacggttttctacgctcggatgtgccccgacgcctatacctacgccactgataatggtcccgttacatattcgtgtccgtcaggaacagattaccagatcattttctgtccccccgtcgatcttgtgtcattgtctccacctccaacttcaccattgtctccgcctccaacttcacctactgcaacaaatggaacaagcagcatcacatcctcatcaaaatccaagaggccaagaatatttggttatgttctaggtggttcaataggtggcttcattttgatcgcatccttggtctttttcttcgtcctgcatagacgacgattgcatcgacgccaagagatgcaggaagaggaggaagcagagtttgggaggctaccagggatgcccagacggttcacatttgagcagctacaggaagcaactgatcagttcagagagaagctgggggaaggaggattcggctccgttttcaaaggacgttttggtgagcaagcaattgcggtgaaacgcttggatagagctggtcagggaaagagggaatttctggcggaggtccagaccatcggtagcattcaccatatcaatctggtgagggtaatcggtttctgcgcagagaaaactcacaggctcttggtttatgagtacatgcccaatggatccctggaccagtggatcttttgccggcaggggcagggcgatgacgacgctcctcgcctgcattggcaaacgcgacacaagattattgctcatgtagcaaagggcctcgcctatcttcacgaggagtgcatgaagagagttgctcacttggacgtgaaaccacagaacatcctcttagatgacaacttcgacgctaagctctctgattttggactctgcaagctcatcgaccgggataagagccaagtggttactagaatgagaggcacgcctggatatctagctccagaatggttgacgtcgcacatcactgaaaaggctgatgtatatagctttggcgtggttgtgatggagatcatcagtggaaggaagaacctggacacttctcggtctgaaaagagctttcaccttattaccttgctagaggagaagttgaggagtgatcgcttggtagatttgattgatatgtgcattactagtgacagtcaggcacaggagcaagaagcaattcagatgatgaagctcgcaatgtggtgtttgcagattgattgcaaacgaaggcccaaaatgtccgaggtcgtaaaagtcttggaaggctctatcagtgtcgaaactgacatagatcataactttgtcgtgacaaatccaccaagctttagcgctcctagaattgtggtcatgtcagctccacctctagcttcagaagtgtcaggcccaaggtgaaattccttgaggcagtttatttgtgtagagaatttagcagtcctctct

SEQ ID NO: 24458 - DNA, 503 bp, Zea mays
  Clone ID: LIB3632-004-C10_FLI
cccgatccagatccagatccaggggcttgtcatggcatccaaacgtatcctcaaggaattaaaggacttgcaaaaggaccctccaacatcatgcagtgcaggtcctgctggtgaggatatgttccactggcaggcaaccatcatgggtcctcctgatagtccatatgctggaggtgttttcttggtgaacattcatttcccgccagactaccccttcaagcctccaaaggtatcttttaagacgaaggtcttccatccaaacatcaatagtaatggaagcatatgtcttgacattcttaaggagcagtggagccctgctttgacaatctctaaggtgctgggacaatttagtactaactttactagtatatacactgttcatattatagcttaaatgacttgtgcacagtaaatgattagcttaaatgcatgctgtgatgtttatattattgatgcgctagcatatacactgttcatattataatcgaatgccaatttggacg

SEQ ID NO: 24459 - DNA, 1306 bp, Zea mays
  Clone ID: LIB3632-005-F3_FLI
atcacgcccctcccctccatttctctcctccctataaagcggcgtcccgaggcaagaatccagcctccactacccccagccgggccagcccccccaagccaagcagaatcctcgccccgcaatgcagcacctggccgccgtgctcctcgtcctggcggctaccaccgcgctgccgcccggcgcggcggcgtggcgcccgtggccgccgcgcgacaacgcgacggctgcggcgggccttggcgcgtccaaggggctggagggctcgtcggagttcgtgaagctggagtaccacatgggcccggtcctggcgtcggccatcacggtgcacccgatctggtacgggccctggccggcggcgcagaagcgcacgatccgcgcgttcctccgctccctgtcgccttctgccgccatcccttcgccgtccgtgtcggcgtggtggcgcacggtgcggctgtacgcggaccagacctcggccaacgtgtcggcgtcggtgtcgctgggcgcggagaagtcggacgcgcgcatgtcccgcggcgcgcggctgtcgcgcatggacatccaggcagtggtccgcgacgccgtgacggcgcgcacccggcccctgcccgtggacgccagcggcggcgtgtacctggtgctcacgtccccggacgtcgccgtggacgacttctgcgggcaggtgtgcggcttccactacttcaccttcgcgtcggtggtcgggtccacgctgccgtacgcgtgggtgggcaactcggcgcgcaggtgccccgaggtgtgcgcgtacccgttcgcggtcccggcgtacgtgcgcgggcgcaggcccgagtccccgcccaacggcgacgtcggggtggacggcatggtcagcgtcatcgcgcacgagctcgcggagatggcgtccaacccgctcgccaacgcctggtacgccggcggcgacccgtcgttccccacggagatcgcagacctctgcgagggcatctacggcaccggcgggggaggggcgtacacggggcagctgctcacggacgcgcgctccggcgcggcctacaacgtgaacggcgtcggcgggcgcaggttcctcgtgcagtgggtgtggaaccccgtgctcagctactgctccggccccaacgcgctcgaccagtagctgtttgatttcggtttcgtttcatttcgtttcatctacgtaccaatgaatcgaatcctctagcgcatttggattttcctctcctctccccggggaaatccatgggatgcttctgtatagagttgttattatcaattaattaatgccactttcggtggaagg

SEQ ID NO: 24460 - DNA, 549 bp, Zea mays
  Clone ID: LIB3632-005-H1_FLI
gtcctgtccctctcccttgtctggttcggatcgtcgttgctagccaggtgctggatccgtagcggcggcggcggccatggacaagagcatgctcggcgacctggacggcctccccgaggaggacaagatgcggatggccgccatgatcgaccagctccagatccgcgacagcctgagaatgtacaattcgctggtggagaggtgcttcacggactgcgtggacacgttccggcgcaagaacctggacaagcaagaggagtcgtgcgtccgccggtgcgcggagaagttcctgaagcactccatgagggtcggcatgaggttcgccgagcttaaccagggtgtggccacgccggactaagaaacacgctgccgctggctggctgctctcgttgcgcgcccgccgccaggtttctggctttcgctggcacagatttgtagccgacaaaaggatttcagcacttcccctgcctgagatatatgcgttttagagccgaacgctgggtgtcagattgaataaaaactgccttgagaagtgttgtatttcgtttc

SEQ ID NO: 24461 - DNA, 1948 bp, Zea mays
  Clone ID: LIB3632-006-G3_FLI
gctccatcttcctcgcagcgccggcgatccatcctccgctccctcccttactcgcgctcggcacgcaggcgacgccggcggtggtcaggctcgggctctaagcgacggcgtcagtgtcttcccctcccacctctcggcagtcgcctcgcgccctcgcctccggtcctccacgcaccagccggctactctgcgctgagctgattgtcccattcaataaagaaagcgaagggcatagataccagaagcaacactgagcccatcttgcttggaattctatctgctgttggaacaacttacaccaatatcatggcaaaccttgctgattcttttctagcggatcttgatgaactgtcagacaatgaaggctatcctgaagaagacaatgctgaggcagcgggtagggatgacgacgaagatgatgatatgcctgaccttgagtctcttaattatgatgaccttgatagtgtctcaaagttgcaaaagacacaacgctataatgatataatgcaaaaagttgaaaatgcacttcagaaaggtactgatttctctaatcaaggttccatcctggaggaggatccagagtaccagcttattgttgactgcaatgctttatcagtagatattgagaatgaaataatcataatccataatttcatacgggacaagtataggttgaagtttcctgaactggagtcccttgttcatcacccaatcgattatgcccgtgttgtcaagaagattggaaacgagatggatttaacactagtagatctggaaggacttttaccttctgcaattataatggttgtctcagtgacagcatcaacaacaagtgggaagcctctttctgaagacaatttggaaaaaaccactgaagcatgtgacagagcccttacccttgacgcgtcaaagaagaaagtgcttgattttgtagagagcagaatggggtacattgcaccaaacctttctgcaattgttggcagtgctgttgcttccaaactgatgggtactgcaggtggtctgggagcacttgcaaaaatgcctgcttgtaatgttcagttactcggtgcaaagaggaaaaatcttgctggattttctactgccacttctcagtttcgtgttggctatcttgaacaaactgaagtatttcagagcacccctccacctttaaggactcgcgcctgcagacttattgctgcaaaatcaactctggcagcaaggattgattcaattagaggtgatccaactggaaaagctggacggaacttgttagaagaaattcgtaagaagattgagaagtggcaagaaccgcctcctgcgaagcttccaaagccactcccagttccggactctgagcctaaaaagaagagagggggccgtcgtcttcgaaagatgaaagaaagatatgcgcagactgatatgatgaagcttgcaaatcgaatgcagtttgggattccggaggagagctcactaggtgatggcttgggggaaggttatggcatgcttggacaagcagggagtggcaagctacgtgtctcagctggacaaagcaaacttgctgctaaagtggcgaaaaagttcaaggagaagagctatggtagcagtggtgcaacatcaggattgacatccagtttggcatttacaccagttcagggaatagagttgtcaaatccacaggtccaaggaaaccttctcggaggcggaactcaaagtacttacttttccgagaccggcacattttcaaagatcaggaggacgcaatagaatcctctttgcaaccatcacatctcatttgcactgcatttgttgatatccttgggatgcactgtagaaaattcaaaagtcaatcttgcaatgttccagagactttagaatggcaattcacagttaacagtgatgcttcgagcacttaatcccaggatatttgcgaccgaacctgacttttgag

SEQ ID NO: 24462 - DNA, 2002 bp, Zea mays
  Clone ID: LIB3632-007-B11_FLI
ggcacctcctgctgccgcgccaccatgctctatgctcacctccaccttcgccgcccctgctccccgttcgcctactgcccctacagcaagctatccgtttccatcccaaccctcaaccctctgccacgcgggccgctttctcgccgcgcctgcgcctgcgcccaccggtacctacgacacgtcgcgtcaccggcggatgaggaagaggctgggtacggggagggcagcgtggagggtgatgatctgggacccgcgtcagcggcggcagtggcagcgaccatccgccgggcctccagcgcgtcgcccgtgcggttcaggtgcgtgcttggagaggcagtggaggaaccgcgcggcgaggagggcttggccgacccaagccccgactttcgccggctctgtgcggagcagcttgagattttccgagtgctcatctcccgtgacgccgtactctctgtgtacgtgagacctgctggcagttatattatggatcagctggaactgcgccgagttgctttatatcctggaattaataatctttctgaaaaagatacccctgtcctagtttgtaatttttctatatcttctggactacgagcagcagaagcttttctagtaaaacaacagatggaagtcataagagaatttggggctatagttcttccaatggtgaaacacccctttgttgttgggttccttgtcgtagagcttccagaattacatggtggacgtgctatgaactcttatactgctgatactgagttaccacctaacacatttatggataaatcatctgatgtaactccacatactgcgtgggatattcaaacttatggtgatcaggcaaagggttattctcagcttgttaatgaatggaagaatagtgcccttatgatttctcgaactctggcaatggcttatgttatggatcagaaagcatatctgcttcaacaaacttcctggcaaaataatgttagaatgagtggcttagtggaacagatttggggccccctctctagcattcgtgctcttgcaaagatgttatcctttcacacaaagagaagtgagatcccctatgatattattgaagatatgctcacccaaggtgatcacatgaaagatgctctgcaacaaattcaagatgctgtatatctgactaaggcaaacatagttagaagcaatgaggagactttaaagacaattcagagatcaccacatccttcaagaactttatcagattataaatcagtacctgggaatgattcacagaagttggatccagttttagccctgagttctgatgggtatgacatggtgatgcctatgccacctctatggctggcacctcttcaacaccaatatgatagaccatgtgatctctgtgatgtgctgaaggatttagttgcaggagcattaccacttgcttataagcagcagcgcacattagatttaacagaaatttcacatccacttcatgttgctgttgaggaatctgctttaagaaaagccttgagtaatctgattgagggagcgctcctacgtacacagcatggtggagtagttcaaatatgtgcagtcgaagcacctgcaggaggcgctctcgtggtcatcgatgatgatgggcctgatatgcaatacatgactcagatgcgctccctggccccatttggatcagaccttgcagatggtatgctcgaagataacatgacgtggaacttcatcgcgggattaacggtcgcacgtgagctacttgaggaatatggatgcgtcctgcgtgtgatatcacctcgaaggactgatgcggttataggcaccggagggagtcgtgttgagatatggttgccatcttttcagacacaagcagccaagactagtcaagaagtgtagtttacatctgaggaagcgaggcatgcttcgttttcccgtacgttttgaaatctgtagatattggcttaccggaatgttactgtaccagtaacatctcatatgttgaatttgcaaaatt

SEQ ID NO: 24463 - DNA, 2175 bp, Zea mays
  Clone ID: LIB3632-007-C7_FLI
tcttcgcatcccgaggcggcgcttttggggtcggaagcgacacgggcgccgggcgggtccgcgggtggtggtgctactgctagcaagcagcagcaggcgacgctaggcgagagccccagtcggagcaggccaccatgtgcggcatcctcgctgtcctcggcgtcgctgaggtctccctcgccaagcgctcccgcatcattgagctctcgcgcaggttacggcaccgagggcctgattggagtggtttgcactgtcatgaggattgttaccttgcacaccagcggttggctattatcgatcctacatctggagaccagcctttgtacaatgaggataaaacagttgttgtaacggtgaacggagagatctataaccatgaagaattgaaagctaagttgaaaactcatgagttccaaactggcagtgattgtgaagttatagcccatctttacgaagaatatggcgaagaatttgtggatatgttggatggaatgttctcctttgttcttcttgatacacgtgataaaagcttcatcgcagctcgtgatgctattggcatctgccctttatacatgggatggggtcttgatggatcagtctggttttcttcagagatgaaggcattgagtgatgattgtgaacgcttcataacatttcccccagggcatctctactccagcaagacaggtggtctaaggagatggtacaacccaccatggttttcagagacggtcccttcaaccccttacaatgctctcttcctccgggagatgtttgagaaggctgttattaagaggctgatgactgatgtgccatttggtgtgcttttatctggtggactcgactcttctttggttgcatctgttgcttcgcggcacttaaacgaaacaaaggttgacaggcagtggggaaataaattgcatactttctgtataggcttgaagggttctcctgatcttaaagctgctagagaagttgctgattacctcagcactgtacatcatgagttccacttcacagtgcaggagggcattgatgccttggaagaagtcatctaccatattgagacatatgatgttacaacaatcagagcaagtaccccaatgtttttgatgtcacgcaaaatcaaatctttgggtgtgaagatggttatttctggcgaaggttcagatgaaatttttggtggttacctttattttcacaaggcaccaaacaagaaagaattccatgaggaaacatgtcggaagataaaagcactacatctgtatgactgcttgagagctaacaaagcaacttctgcctggggtgttgaggctcgtgttccattccttgacaaaagtttcatcagtgtagcaatggacattgatcctgaatggaagatgataaaacgtgacctcggtcgaattgagaaatgggttatccgtaatgcatttgatgatgatgagaggccctatttacctaagcacattctctacaggcaaaaggaacagttcagtgatggtgttgggtatagttggatcgatggattgaaggaccatgccagccaacatgtctccgattccatgatgatgaatgctggctttgtttacccagagaacacacccacaacaaaagaagggtactactacagaatgatattcgagaaattctttcccaagcctgcagcaaggtcaactgttcctggaggtcctagtgtggcctgcagcactgccaaagctgttgaatgggacgcatcctggtccaagaaccttgatccttctggccgtgctgctttgggtgttcacgatgctgcgtatgaagacactgcagggaaaactcctgcctctgctgatcctgtctcagacaagggccttcgtccagctattggcgaaagcctagggacacccgttgcttcagccacagctgtctaaccttatgtttatcacccagcaatgcttgaaacagcaaaggttgtccattgcttgtttcagtttccttccgatcatgtttttagttccatcaatcaagcaatggagacatgcttgtgcttcatacttggcagcatcgtgtttgggttttcactgggcagtactgtttaatttttatggactgaaaagactcagttttgtaaatattcgtcactgtgaccaattcctgtggtggtttatgtgatttgcagattgcagtggttagtgt

SEQ ID NO: 24464 - DNA, 975 bp, Zea mays
  Clone ID: LIB3632-007-C9_FLI
ctcgttgtcatctcacagcttgggctagagaccaaagaaaccaaagggaagcatggcagcaggcctgcaagtgtttggccagccggcgtctactgatgttgccagggttctgacgtgcctgtttgagaagaaattggagtttgagcttgtccgcattgatacatttaagacacatcacaggcttcctgagttcatcaggctgcgggatccgaatgggcaagtgaccttcaagcatggcgacaaaacccttgttgattcaagggacatatgccggtacgtttgcaaccagtttccaaattacggaaacaagagcctctatggatctggtgctctagaacgggcatcgatagaacagtggctccaggcagaagcccagaactttggccctcccagctctgcgcttgtgtttcagctggcgttcgttcctcatctcagtcacctgggcgttcgtcaggaccctgctgttatcgctgaaaacgaggacagactgaagcaggttcttgatgtttacgacgaaatactctccaagaacgagtacctggctggtgatgagttcaccctggccgacctgtctcaccttccgaactcgcactacatcgtaaacaccgagagaggaaggaagctcttcaccaacaagaagaatgtggcgaaatggtatgacaggctctcgaagcgcgagacatgggtgcaggtcgtcaagatgcagaaggaacatcctggtgcgttcaagtaatcgttgtgagtatggcttcatcgtccgtgttggtctggctcatcagtgttaaaagcccatcagtgtcgtcaaccagaataatgtgaagcccaactgtgatgtatggtcttttttttgttttaaaagcgcatttgtaaactattggctatttcttacacgtgccaattcatcgtcacatataaaacaagctgtatctttgaccttgtgtcatgtacgcacaataaataagttttagtgatgtt

SEQ ID NO: 24465 - DNA, 1255 bp, Zea mays
  Clone ID: LIB3632-008-C11_FLI
ctccaagctagctttgctttagcctcggtcttcgccattcttaatccagtgctccccaccacgccaatggaggctccgctcctcctaccaatctccaccgcctcatcctgcatcgagatcgccgagggcgccgtgccatcgggccctcgtgctcgctcgtcctcgtccatgccttcggcccagagcttcgtcctccgcgtggtgaccgtggtcgccgtggcgtgcgcgtccctgttcgcgcagcacgaggccggcaaaggcttcgccgtgtccgtcgcgaacgacctgccgcggggcagcgccgcggcgcggcgcttcgacctcctcctggtgtccaacggccgcgccgagcgcgcgctcctgcgcgccagccgcgccgtggagcgcgcgctgttcccggacccgtcgttcccgcgcaggcaggtccgccgcgtcaccgtccggatggctgcgcgcaacctcaccggcgccgcggtgcactccgcggcgcccggggagtacgtggtctcgctgggccccggcctcgcgtcctccgcgcccgccgccgaggccgcgctgcgccgcgccatcgcgcgcgtgtggctctgggacggccgcggcgccgccccggcgcgcgtcaccgagtccatggttgactacctcgcctccgccgcggccgaggtcgaggtcgaggtcgaggcgcctccatcggctgccgggtgcggcatgtcggcgcggctcctgaggcttctggaggcgcggcgcgagggcttcgtggcaaggctgaaccgggcgatgagggaccggtggagcgacgccgctgtggacgcggcgctcggcgcgccggcccggctcgcctgccacgaccagaagaagggagcgacggcgctgaccggccgcggcaccaccacctctccacgttggacgccggacgccgctcgtgggtccagcgtggcaacgtgaggctggaaagggcagttctggtattggtgtcttagattgaaattaaaactggtcccgcgggtggtaggcgtgggccatggccgcggccctaatggtggctggaggtgagtgagtggtcgttgtcatgcatgtaaaaatggtagatggctgggacggggaggatgagggcccccccggtggcttcatcatttggcttgagcatgagagcatccatccagatccatagtggattgtaaatgacaggtagtgctataaaaatatggttccattccatgccatagcaaacgcgatgtgagaaatagattttttgttt

SEQ ID NO: 24466 - DNA, 2588 bp, Zea mays
  Clone ID: LIB3632-008-G2_FLI
ctgacggctcggcctccaatggcgcccttctccctgtaaacctagctgctctacctacccgcacccccaccccgtggagagcaagtgcagccatggcggcggatcgggagaaggagcgcgaggcggagctggagggcgccatgtacactaactgcctactcctcggcctcgatcccgcggtcctcggctctccctcttcccccgccggccgcgtgggcctatttcgtcactccaacccccgccttggcgagcaactcctctacttccttctctcctcgctccgcggccccgcgcagtccgcgaaggattttgacaaggtctggccaatcttcgactccgctcagtccagggagttcaggaagatcgtgcaagggatcatcagcgagctggaacagcatggggcactgcctcggagcaattctagggtctcgtcacttgccacatgctgcggaccgagatttgttgagcttttgtggcaactatctgtacatgccctgagagaagtccacaagagaacatttgcagctgatgttgtatcaaatccactacctgcagcactaacagatgtttcttatcttcatgctgcttctttactcccagtaaccaaggcaagaatagctctggagaggcgtaaatttcttaaaaatgcaaacatagctgttcagaggcaaatgacatggtcaaatttggcccatgagatgacagctgagttccgaagtctatgtgctgaagaggcttatttgcaacaagagttagagaaactacaagatatgagaaacaaagcaaaactggaaggcgaactctgggacgaacggctctcaggctcatctgggcagaactctcatttggtttctaaggcaactcgtctttgggaatcaatattggctcgcaaaggccagcacgaggttttagcttctggaccaattgaagatcttatagcacatcgggagcacagataccggatatcaggatcacagttactagcagcaatggatatgagttcaagtgttccacattctgagttactatcatctaaagctggtgaaacttctataattttggagaagcaggaagaattttctcagctattccaagaaaaggaagaagcccttacaaggtcagatgataggaatggacgtactcagcaaactgttgatgtagctgaaattcttcgccgctggacccatgctttacaacgtattcataaacaatctcttcatttggccaaagcgaatgatggagaggggcctgaattactgaggagtgcatccagcggagaggccagtactcattctgattcgttaactgcaacattagctgaacatcgccagcatttagtcagtatacagggtctaattaatcaactcaaggaggctattccagcaatgcagcagtctatagacgaactctcagaagaagtgaatagtgtatctattaactcaatggaccaattgaactcgaggctgccactgccagtacaaattgcagggtttggaacatcagaagaaagcagcagtgaagtttcggagatcaattctaagctctcttctacacacttggataagcctgggggcagtcctgctctaaagctaccaccattatttagtctgactccaagttcttctggaaaaggaatacagacacaaaaacggagtgcattggctcgtcaacgtagccaggacatcacatcagaacagaaaacgcttaccatcccctcaactaaggatcaaatgaatggttcaatgcacgaaaatgatgactattctgctcatgacattagacgttctgttcgtgaagctgctttatctaagccattgaagaatacagagagaccacaagataaaaatagtgatgatggttcggaacacttctttattccgctgtcaattagtgctgcgaagaaggaaatggattcggtggcaaatcgatgtaaccaaagattaggtttgtcacctcagatgaagttcccaaagagcacaagctacaatgcagataccccaatcaacaaaagtccaattctgttaagtgaactcaatggacatgattcgatcagtgccatgagtttccttgacccggctggtggtctggcacatcagtcctttatcactgatgatgctctggatcaagtattctctcctctattgatggaatcttcgttgttccatgatgcagatgaggatctacttgcacccttgtcagagactgatgcagcattaatggaatattaagcttcacatgtgcactatgtaatattttgaccactgcagacgcagcctggaggttattgtggcttatgtttgtcttattgactattcggctagttgcttgcgagttgcaaccatgttgagatacagatgcttcatcagaatttgtggggtatatgttgactattgatgcggggagaggtgatattgatgctgttttttccccttctggacaaggctctataggtgccggcgttgtaccaactgtagtggacgcaataggaaagcccaatcttgtatatttagttactatacatcagcagtatttgtgctgtaatacttttttgaattgctgaaatatgtgtttttctgctagttgcgtcc

SEQ ID NO: 24467 - DNA, 1512 bp, Zea mays
  Clone ID: LIB3632-009-B9_FLI
ggcgcagcgaactctgcgcttccacttctctctccaccgtccctttacccaaccaaccaccgcactggtacgctctcgactctcgacaccggcagcagcaggaggtggagctagggcatgtgatcggactccttgcctgcttcctgatctcaacctcttttcaccagcgcgagggcggcgcggtctcaagccgggatggggtatctgccggcgctgggcgggaaggcggcccacctggtgaacgacctcgccactgtcatcctgaaccccgtctccgagcgcgagcgccagccacaccaccccacccacctcccggaggccactgaaggagaagacacactattcgttgacgatgattctgaccaaaattctgatggtcctgacacatcttcattcagagcatttctgatgtcctttgtgccttcctcaactgccagcaagaattcaatggagaccatacctgagcataatctagatgtggaatacccaactttaacacctgttgggaaggcgtgcagtgggaggaaaggcctgtttagtagagggaagcattcccttggtaggattattagcaaagcaggacttggtaatttgagacagaaacagacccacagcattgatggtgaaatcataggccaaaccgaatcagttgcacctagatttgaagtgaagggttcaaaagaatcaactttgcacgataaattgccagctatgtctgaaccttctcttcttctgacagaaatgatgcgagctgttctttatacatctcttcctgtacttgttcaaggaaggaactggatgctggtatatagcacctggaggcatggaatatctttgtctactctgtatcgaagaagcaggctttgtgctggctactcacttttgatagttggggatcgaagaggggcagtttttggtggcttggtcgaggccccactgcaacctatcgtaaaaaggaagtatcagggaactaatgactgctttgtgttcaccaacgtagatggttgtcctgttatatgccatccaacaggtgctaataactattttacattttgctctaccgattatatggcaatgggaggtggtggtcacttcgcactttatctcgatggagaccttatgactggttctagctccacctccgagacttttaacaacccatgcttatcccatacccaggaattcaaaatcaaagatgtcgagctgtggggtttcgtcaatgcttccaagtttgaagagatgctcatgatctgccgcaccgaaaagcaaggaatttggaacctgtgaccgtttggagttcactgagctgttgcttgttggtgtcaaccgatcctctgatgtggcttgtactgttgtacagttttgtagtaaacgtttgtatagcatgtagagagtttccatatggaatcagaagttgagaacatgtagagttttgctttgtagaataccaaatgccatttacagagaaaataccagtcactaacactcaaatgtatatatttcatagaaact

SEQ ID NO: 24468 - DNA, 1451 bp, Zea mays
  Clone ID: LIB3632-010-A12_FLI
gctcccctccgtggcgtgcaacgcgttcctcggctcctgcaggcggcgacctcggaaaggcgggggcgtctcgtcgcgaggcatttgaggccaggattttttggtgctctcattgttagctgactggtgagggtctggatctagcaatggcggaaaacacccacggtagtggtcgccacgtgcttggggacttgacaaatgttatttgcaagcgagcagccacatcagatctggagaagagtacaggtgggataaagatcagacggattgaaaagactgggactaggaaagagtacgatgcaaatgcaaaagctagcagtattgggaaaggaattgtatttggccatttgtttgatgatgttgccagagagaaatttcaaagccattctatctttcagaatagtagggttcaacacatagctgccgaagcagctggactcttatccaaggaagccaatgactcgaagaaccactatgcatcaatcggtccattagatctcagtgataaggagcaggattcttcacttgaatctgaagacgactatgatgatgaagataatgatgagacgaatggtgaattgctgcaccattttttcagctcagagctagctaataaaatgtcaacaaatgatggtgagtgcttgactcaggaggagatagttgggtcatctggaaatcagaaacctctgtcttcattggatgctacgacaggtggtgacttgccaatttctagtgctcagcatgcttctgtgagaactggtggtttggaagaagctgttgccccaaaatcttgtgcttgttctttctgtctcaaggctgcttttatgtggatggatctccattatcaggatgcaagaagccggctttctgtattgaagaaaagcatcaagtttgccaggtcattggaggaaaaatgtagaggaaatgaatatgcggccaatgtagctggatatgaatcaaagcgagctgtgggagtggagtttgaactatctcaacaacagagatcactctttctttatacagaaaatgcccttgtccgtgagtcaacgcagcttcattctgcttttgtgaaactgaaagaattgagagagaactgcaagacagatcttgagacgctcagcaattcttcaatgagaaaatgagtgctgcatgttgcgttgctgaactgttagtttcctgagacttagtatgatcagctggcttgtcttgaagcaagatgtgctgagattgaaccacaacttaggaattatggtgcttaccatcaatttgggacttcaatttggctgtagtgattattcctatcataaagcgttggtctagtatgcttgtagctgatgtaaaaataaccatggtaaggtaggaactgtatgtttgtctcgttgaggcatcgtcatcttcacttgtaccttgcagtgagcttccttcatatgaacattctttccacgttctcc

SEQ ID NO: 24469 - DNA, 1353 bp, Zea mays
  Clone ID: LIB3632-010-E12_FLI
ctcgttctctccgccggcccgctcactctccctggtctctcgtctcctccactccaagagaacaggcgccggcgaaaggcgggagcagcgcgctgcccattcaccgccccctgatttcttgggagttgcggatcggtctccggggcagcgtggaacggctgggcccctcggatcgccggagatgctgccctacgcgacggcggcggaggcggaggcggcgcttggccggcccatgacgcccgccgaggcgctgtggttccggtacaccgcgggggtgtccgactaccacctctactgctgcaacatcctcttcctcttcgtcgtcttcacggtggccccgcttcccatcgcgctcctcgagctccgggccccggccgcggtctcgccgtacaaactgcagccgcgggtgcggctctccagggccgagttcgtccggtgctacaaggacgtcctccgcatcttcttcctcgtcatcggcccgctccagctcgtctcctacccggcggtcaagtttgtgggaattcacacgaagttgcctttgccgtcccttgcggagttggcagcacagctactggtgtacttccttgttgaggactacctcaattactggatccacaggtttctccacggggagtgggggtaccagaatatccaccgtgttcaccatgagttcactgcgccaataggattcgcagctccatatgcacactgggctgaggtgctgatactcggcatcccctccttcgtcgggccagccattgttccaggccacatgatcacattctggctctggattatactccgtcaggtggaggctatcgagacacatagcggctttgatttcccattcaccccgacaaagtatattccattctatggaggagcagaataccatgactatcatcattatgtaggaggccagagccaaagcaattttgcttctgttttcacttactgtgattacttatatggcactgacaaaggttacagattccacaaaacatacctagcaaagctgaaggatctggggcataatgatggccagaaaggagacggcagcggacccagctatgtgaaactggattagattgcaagatatagtgcatcttgagtgtttctatggtcatcgacttcactgtggcatttcgaaatgggatattgctgagttgggctggtcacgtgtgttctcatttctgtagcaggcatacagctttcagctctgccttcttctttctttttttttttctagcgtttatgaaattctatggaacttgtacgctgacgaataacaacgcaactctcacgaataacaacgccaattcttaaagttcatcgagttcgctccgtgctttt

SEQ ID NO: 24470 - DNA, 1306 bp, Zea mays; identical to SEQ ID NO: 24459
  Clone ID: LIB3632-010-F1_FLI

SEQ ID NO: 24471 - DNA, 969 bp, Zea mays
  Clone ID: LIB3632-010-F4_FLI
gcgcccgcagctcttcgtccccggaggaccaagcctgcgcaccagagatgtcgtacgcctacctgttcaagtacatcatcatcggcgacacaggcgtcggcaagtcgtgcctgctgctgcagttcaccgacaagcgattccagcccgtccacgacctcaccatcggcgtcgagttcggggcccggatgatcaccatcgacaacaagcccatcaagctccagatttgggacacggctggtcaagagtcattcagatccataactagatcatactacagaggcgctgctggtgctcttttggtttatgacataactaggagggagactttcaaccaccttgcaagctggctggaggatgcgagacagcacgccaatgctaacatgacaataatgcttgttgggaacaagtgcgatctgtctcacaggcgtgcggtgagctatgaggaaggcgagcagtttgcaaaagaacatggtcttatcttcatggaagcctctgcgaagaccgcacagaatgtcgaggaggcatttgttaagactgctggagcaatctacaagaagattcaagatggtgttttcgatgtatctaatgagtcctatggaatcaaagttggatatgcaatccctgggcaatctggaggtgctggtagctcgtcttctcaaggtggtggctgctgcagctaatctgctaacgccgttaacaaatgcatatctgtcgtgtgtcacataccagctgcgctgtgaaaaatagttattgctgctccagggtgccttgttatttgacgcaccaatggatcctgtgcctgatcgacttgagagattcagtttatttacgtcaggtgtttataaactccctgtaaatcactagattcttcactgttttccgtcattaggcactcaacaatcgtgtgtccgtttgcatgtgtaaataaggcacatctacatattgtttgatatgatattaatttgtcct

SEQ ID NO: 24472 - DNA, 1126 bp, Zea mays
  Clone ID: LIB3632-010-G7_FLI
gctcggctagtcggctggcttccgttctctttggcccaggacgacccagagacagcgtgcgtctaggaagcagcgccgaggatggcggaccacttcgcgttgatgacgggccggctgctgacggagtcgacgctccagtccgccatccaggaggcctttgccgatgccgtagcctcaacagccgccggctacgaccgtacagatccctccgctgttcctgaagatgttcagccgggcatgggcgtgggcaagggcaagggcaagagtggtgtcatggtggagtgcagaatctgccaagaggaaggcgacgaggcttacatggagacaccctgctgctgcaagggcagcttgaagtacgctcaccacagatgcgtccagcggtggtgcaacgagaagggagacaccatatgtgagatatgcttgcagcaattcgaaccaaattacactgctcctttgtttcggcatggaaggagcctaataaattcaaggggagctggagaagtacgggaaaacgtcggtgctagtcatggtcaaacctcggatcaggctgatggtgcatcaagcgttgattctcagaacctccacctgaaaggagtcgtatattgccgagtagttgccattgctttgatgattttgttggtgctccgtgacgcgatcttgcttatgctccgcgacgatgaaatgtgctcagtagagctaatcactctgctgctgttcagaacggctggaattgtcataccagtctacatcatcttggtatcagttaccgcattgcttcattggtgcaatcaacgacggatctttagaatccaggttgtgcacgagacgacggtttcagaacctcgtggagcagggggcctgcagcatatcatcaacattcggtaggaagctgcacggacgcacggtggttcctggtcaggcagcctctgtaaatacctgaaaagtgtttgagattcaggcttgtcgtaatggggtttggaagagacagaaccattgcgagactgtatagtttcatagcatagtttctatgtacaaaagaaattctgaaaacacatccactcaacttcaccaaatgatgaagacgaagttggatcggtgtctgttaagaaaattgagttagagtttt

SEQ ID NO: 24473 - DNA, 1813 bp, Zea mays
  Clone ID: LIB3632-011-A7_FLI
cccgcccgtccccgcatcatcctgaagtcccagcatggagttggaggggccgtgggcgcgggtgctgcacctgcagcacgatgcgtgcgagtggggccgggcggtgcgggcgcgcgcggtggcgccggcgctggaggccgcggcgtgggcgtgcctcgccatgtcggtcatgctcgtgctcgaggtgtgctacatgagcgtctccagcttcgtcgccgtcaacctgctgcgccggaccccacagcggcggtacagctgggagcccatgccctccgggaccgggaccgggaccgcgcggggggacgacgaggaggcagcggtgggcgatggaggcggcgaggcgtacccgatggtactcgtgcagatccccatgtacaacgagagggaggtctacaagatctctatcggagcggcatgtgccctcacatggccgcccgaccgtattataatccaagtcttggatgattccaccgatccattcattaaggaacttgtggagtttgaatgcaaggattgggccagcaagaaaatcaacataaaatatgaaattcgggaaagtaggcaaggatacaaagcaggagccctgaagaagggcatggaacatagttacgcccaagaatgtgattttgttgccatctttgatgcagattttcaacctgatcctgacttccttttaagaactataccgtttcttgtgcataacccgaagattgctctagtacagacacgttgggagtttgtgaactacaatatttgcctactgacaaggatacagaagatgtcgctagattatcattttaaggtagagcaggaatcagggtcatctatgcatgccttctttggtttcaacggtacggctggcgtgtggcgggtatcagctatcggtgaagcaggaggatggaaggatcgcaccactgtggaagacatggacttggctgtgcgggcaagcctcaagggatggcaattcctgtatgttggtgatataagggttaagagtgaactcccaagtactttcaaggcataccgtcatcaacagcacaggtggacttgtggtgctgccaacctcttcaggaaaatggccggggacattgttataagcaagggggtaactgtatggaagaagcttcaccttctgtacagcttcttctttgtccgaagggtcatcgctcccatcctaacgttcctgttctactgcgtcgtgatcccactgtctgtcatggtccccgaagtcagcatccctgcctggggaatgttctacattcccactgccatcaccatcatgacagccatcaggagtccttggtctatccatctggtgccaatatggatcctgttcgagaacgtcatgtccatgcaccgaatgcgcgcggcgctgacggggctgctggagaccacgtacgtggacgagtgggtggtcaccgagaaggtgggcgatcatgtgaaggacaagctcgaggtccctctccttacaccggtgaagccaaccgagtgcgtcgagaggatctacttgcctgagctcctggtcgcgttctacctgttgctatgcgcgtcgtacgatgtcgtgctcggagccgggcactactacccgtacatcttcctccaggccttcgctttcctcgtgctggggtttggcttcgccggcaccgtgacgccctgctcttgttcataggccatcgcgcgcatagcgcccatggctattttgctgcattcttccctgattcgcctcctctaaagtctgtaactagaaaagagaaagcgattctttctgtaaatcgaacagaataaacgctgcacgcgtgtgcagcatttgagc

SEQ ID NO: 24474 - DNA, 1185 bp, Zea mays
  Clone ID: LIB3632-011-A9_FLI
actgcagagcacctggttgcagccaataatgcaaacactctgtgggctccttgtgcttttgctctcctccctcccaaccttctccttataaatacaaaggcgtgtgcaaggcagaaccatcagctaagatagctgcaaaacaagcgagttacttacaaccaaacagaagggtagaaaccacctgaagccatgtgcattgctgcatggatttggcaggctcaccctgtgcaccaactcctcctgcttctcaacagagatgagttccacagcaggcctacaaaagcagtaggatggtggggtgaaggctcaaagaagatccttggtggcagggatgtgcttggtggaggaacatggatggggtgcaccaaggatggaaggcttgccttcctgaccaatgtgcttgaaccagatgccatgcccggtgcacggactaggggagatctgcctctcaaattcctgcagagcaacaagagcccactcgaagttgcaactgaagtggcagaagaagctgatgaatacaatggcttcaacctcatactagctgatctaacaacaaatatcatggtttatgtgtcaaaccggcctaagggtcagcctgcaacaattcaactcgtgtcaccaggactccatgtgctgtccaatgcaaggctagatagcccttggcagaaggcaattctcctcggtaaaaacttcagggagcttcttagggagcatggtgctgatgaggttgaagtgaaggatatagttgagaggctaatgactgacaccacaaaggctgacaaagatagactgccaaacactggttgtgatcccaactgggagcatggtctgagctccatcttcattgaggtgcaaactgaccaagggccctatgggacacggagcacagccgttttatcagtgaactatgatggcgaagctagcttgtacgagaagtatcttgagagtggtatatggaaggatcacacagtgagttaccagatagagtagtaggcattgcacaggaaaagttggcgacctcaaataaatagaaatatgaagcagacacaattgtgaatttcattatttccctgatctctagtcatcttcgtgattatctaagatcctaccataatgccaattacattattcactgtaagcagatttttcacttgacgataaaatgtcaaccaaaactttggtttt

SEQ ID NO: 24475 - DNA, 1777 bp, Zea mays
  Clone ID: LIB3632-011-C11_FLI
caagggaatcccaagcggaagggtctcctcgctctcctatctcccttccatcagctgcggcgggcggcgatgggggcgcggaggaggctgctggcggacacgccgccgccgccggagcatcgccacaggcagggcgcgccggcgtcggactggagcgaggggtacctcaacgggtggctgtcgcagccgacgccgatcttcggcctccgcctctgggttctcgtcggcatcgccgtcggcgccgccatcgtgctcgtgctcctcctcatcttcgtctgcctctcccaccgccgccgccgccgcggcggcgacctgctcgccgccaacctctaccccgccgccgacaccaagctgctcaagcagcacctccagcaccaggccacgcccaccaaggacatccaggagattgtccgccgccagcaggcggagacgccgcctccgccggcggtgcagctcgccaaggccgtggcggagccgaagacgcctcctccgccgccgccgcagcagcacaggcagccggcgcggaagacgcccggcagcggcgccacgaccagcggcgggagcgaacgggacggggccacgcctaggagcacgggaagcgcggggatgcccgaggtttcgcatctcgggtggggccactggttcacgctccgtgagctggaggaggccaccgacggcctcaccgaggagaatgtcatcggggagggtggctacgggatcgtgtacaagggcatgctgcacgactccactttgatcgccgtcaagaatctcctcaataataggggccaggccgagaaggagttcaaggtggaggtcgaagcaattggtcgtgttcggcacaaaaatctcgtcaggttgcttggctactgcgtagaaggtgcttacaggatgcttgtgtacgagtatgtggacaatggtaatcttgaccagtggcttcatggtgatgttggagaagtaagcccactaacatgggacgtcaggatgaacattatgcttggaaccgccaaagggttggcttatcttcacgaggggctggaaccgaaggttgttcaccgtgacatcaaagctagcaacattcttcttgaccagcagtggaacgctagagtatcagattttgggcttgcaaagctattgtggtcagagaaaagctatgttacaacccgtgttatgggaacctttggttacgtggcgcctgaatatgccagcaccggaatgctgaacgagaggagtgacgtatatagctttggcgtactcataatggagatcatcactggtagatctcctgtagactacacaagagcagctggagaggtcaacttggttgagtggctcaagaccatggttgccgagaggaaagcggaggaagtagtcgacccaaagatggctgaaaagccatctcccaaaacgctgaagcgggcgctcctggtcgcgcttcgctgcgtcgaccctgatgcgaacaagaggcctaaaatggggcatgtgattcacatgctcgagatggacgatctcctcttccgagatgataagaagcccgggagagacgttcatccccatggttcagacagatacagctccaaggaggaagggagcatcagcaagcgcgaacaccaccaccaccaccaccatcggcacagatgatacacagcaagcgcgagcatctgaggattgccattagagagtagcgacattaaccatgttccccgcttctttcccctcccgttcaatctcactggtctttgattgtattatatgtgagcatccatcattctgtgacgat

SEQ ID NO: 24476 - DNA, 1124 bp, Zea mays
  Clone ID: LIB3632-011-E12_FLI
cggcgatggctaccggagctggcgaggctgccgacggaatggatacaccacccctgggatgcacctgagtctgtgcttcaggctgcaggagtcgagctaggctccaactacccacgccccattgtggagttagatgcagccaattccaggttgcagggtgccctgtcagagatgtgggagcttgaggcagcctcttgtgctgccatcgagaacgggatggaagaaggcctcggcgattccacagatgagccgccgatcgacttccctcaagaattacggatggaagtggaccgacaaccagctcaacctgctatcatccacacgccggtagtggctggttggagacgagaagaccagagggtgcctagcatgacttcctcgttaattagagctgagaccgaactcactgcagactttggcaacaccagtgaggacagtaggccagaagtgccgtcaaacattcatctgcaggctcgggcggagagggaagaaacagttgacggtgccactggcaatactgtcagggtgaatggcaaccaacagcagcagaatcttcagaacaacatgcaccgcgtgctaggtatcgctccatcaatttcagaggcatcgagcagctggacgggtagggaaggtggattggtaccggtctggtcacctccggcagcttcagtacattctgatccatatactgccgacgaggctgacatttcgagtaggagttatttggacaggcatcagcaatcaaatacgatgatgaactggagtcaactctctcagtcattgacaacaggatgggaagtggataattagtgctgtgtgaccggatttaattgattaggagttcggcagagagaattatattatacatatgtaaattatcacattttgttcgtctatatagccttggtgtgcatgcaagtcatcgaacatgcagcttcttggatgcaataattgttgtgaacctagttgtgtagaaccttgtggtttaggttgctaggtgcccacaagatatgtattattcgtcagataagagttttctagcatcaggttcattttgtatctggttattgtcatattgcagttcttggtgatgggatagtcaacacaggtgtattctcagtttt

SEQ ID NO: 24477 - DNA, 586 bp, Zea mays
  Clone ID: LIB3632-011-F8_FLI
cttcgtggtccgtgtttaacgggcgtagagagagaaagagaacagagcgagagagggggaggacgaagccctccgcgtcgtctcctgctgttccatcccacatctattctgcctcggcttgcaccttcgacctcgctggtgaacatctctggttctattttcatcgtcgggtaacaagaaactaatcagggagtctcttcccatttcttgcagtggaggaatgtttagctacagccgcgcagcatgctttccagagcataaattggtggaagagaagtttgatgctaccactttgccagaagaaccgagccagacacaataacatcaaactgagtctgagatactgcactttacaaattctttcgatattggcagattgaagaccaacaagatttgaagagcagcaagatcagcttgcacctgcagtttgaagaaatcctttcaaagaagactgcttgcggcaatcttgccttcactccacaagcatgtgctgtgttatgcgtaccatgtaatgattgtagtacttgacaactgataccaaagtagtggatgcttttctttcgcatgaagtcatgttgatttttgt

SEQ ID NO: 24478 - DNA, 1076 bp, Zea mays
  Clone ID: LIB3632-011-G4_FLI
ccacaccctggactggagtggctgctgctcgtgcccggcgatgagcggcggcgggcccggaggtgcgtgcgggccggactcccgcgtggagaccatctcccggctggcgcagtggcgcatcgataccttcggcccctgctcctaccgccggtcggacccctttaagctcggcatctggaactggtacctgtcggtggagaagagccgctccatctttgtgcgcctcttcccggagcccggccgggtggccaaggagcagccccctctcgcgcgcttcctgctccgcgtctcctgggccggcccgccgcgacgctcctgcgtctcccctggctacggaatcgtcatcggtgtggccaaacgaaggcatggtgcagaagatcgcgagcaagagcgccctgggctgcctgtcgcacatgctggcggactccatccacgcggacgtgaccatcaacacgacggacggggtgctgaaggcgcacaaggcggtgctggcggcgtgctcccccgtgttcaagagcatgttcgtgcacgacctgagggagaaggagtcgtcgacggtggacatcggcgacatgtgcgtggagtcgtgctcggcgctgctgggtttcgtgtacgggacgatcgagcaggggcagttctggaagcaccggctgccgctgctggcggcggcggacaagtacgggatcggcgacatcaaggactgctgcgaggagagcctgctggaggacataggctcgggcaacgtgctggagcggctccacgtggcgtggctgtaccggctggagcggctgaagaaagggtgcctcacctacctgttcgtgttcgggaagatctatgacgtgagggacgagatgcacggcttcttccaccacgcggaccgcgagctcatgcacgacatgttccaggaggtgctcagcgtgtggaagcccatgtgaatggaagtgtccctttccacgcgagctgtgtgtgtgtgtgtgtgtcgtgcttgttcagtcagcagtgtgtggagagcatgctggttatgcatatttgaaacgaaaaggatgctcagaatttgaatggaagctaaattatac

SEQ ID NO: 24479 - DNA, 1740 bp, Zea mays
  Clone ID: LIB3632-011-H9_FLI
ggcaccttccctgcccgattggcgatttaagtggtgggggagggaaggccgatggtcagtgaaagagaggtaggtggccggacggtggtggcatcgccaattcaactccgcatctgaatcggcactcggcagcgcgccagctccataggaggaggagatggcgctcacaagaatcggtcttgctggccttgcggtcatggggcagaaccttgccctcaacattgcagagaaagggttccccatctctgtgtacaacaggacaacctccaaggtggacgagaccgtgcagcgtgccaaggcagaaggaaaccttcccgtctacggcttccatgaccccgcgtcctttgtgaactccattcagaagccacgggtggtgatcatgctcgtcaaggccggcgcgccagttgaccagaccatcgcgacgctcgcagctcacttggagcagggcgactgcatcatcgatggggggaacgagtggtacgagaacacggagaggagggagaaggccatggaggagcgcggcctcttgtatcttggcatgggtgtctctggaggagaggagggtgcccgcaacggcccgtccttgatgcccggaggctcgttcgacgcttacaagtacgtcgaagacattgttctcaaggtggctgctcaggtccctgacagtggcccgtgtgtcacgtacattggcaaaggtggatcgggcaactttgtcaagatggttcacaacggaatcgagtatggcgatatgcagctgatttccgaggcttacgacgttctcaagtcggtcggtaagctcaccaacagtgagctgcaccaggtgttctccgagtggaacaagggcgagctcctgagcttcttgatcgagatcacggccgacatctttggcatcaaggacgagcatggcgatggctacctagtggacaaggtccttgacaagaccgggatgaaagggacagggaagtggacggtgcagcaggccgccgagctgtcggtggccgctcctacgatcgaggcgtccttggactcgaggttcctgagcgggctgaaggacgagcgggtggaggcctccaagatcttccagggtgactactactccaccggctcgccggtggacaaggcgcagctggtggaggacgtgaggcaggccctgtacgcgtccaagatctgcagctacgcgcagggcatgaacatcatcaaggccaagagcgcggagaaaggctgggggctcaacctcggcgagctggccaggatctggaagggcgggtgcatcatccgcgccatcttcctggaccgcatcaagaaggcctacgacaggaacccgggcctcgccagcctgctcgtagaccccgagttcgcgcaggagatcatggacaggcaggcggcgtggcgcagggtggtgtgcctcgccatcaacaacggcgtcagcaccccgggaatgtccgctagcctggcctacttcgactcctaccgcagggacaggctgcctgccaacctggtgcaggcccagagggactacttcggggctcacacctacgagagggtcgacatgcctggctctttccacaccgagtggttcaagattgcgcgcaacatctccaacaactgatgagctgctcaacggatggcatgcccggtgttgactactccagtcggtaatgagatttcctgcaggaacttgtctattgatctttgtaagttaattatttatatgaataaaataagagcaaacatgcttgtgtt

SEQ ID NO: 24480 - DNA, 904 bp, Zea mays
  Clone ID: LIB3632-012-A9_FLI
caaccctgtatccaaatcccaagctgaagcgcgactgcgtgagtaccaagacgccggtgggagcgacggctacatgggctcctccaaggacaagactgatggaggcggcggcggggacaggggaacaggaggaggtggacgagctgctggccgcgctcgggtacaaggtgcgttcgtcggatatggcggacgtcgctcaaaagctggagcagctcgagatggccatggggaggtgagagatggatctctaccccgcaatttggcgccattgttgggcgggttttccctttccatctcccttcgccattggtccctcgctttgtcttgtgccgcctcatgtttggctgtttctacgagctgggttttagcggcgcacagaggggaagagaaccagcgagagagagagagacggaaagaggaagatgagtcaggagcctgaggatcctggtgaagttcctccatgagacagcgggtcacgtggtgacggtggagttgaagaccggcgaggtgtaccgacggtccactcaagtgcgaggataactagaattgccagctcaagaacattaccttcaccgctaaggacaaaggatcaactattggagttggctgtggtcgtgctgttgcaatgcgtgctcagagttcaaaagttgttcaagatggcagtaatccttacaccttggaagggacagatggctagaaattttagcaaaacttcagcgtacgtatagaagcagatgctaacagcaagacatggggagggaaggagaacggatgcagctactgaatgcatagcttgcagtagtagttgctactgcatctgatccagttcctaatgacatttatttggtcccctcatttatgtgtgatgacagttcatatttttttattgtcaagtacctcctcc

SEQ ID NO: 24481 - DNA, 1447 bp, Zea mays
  Clone ID: LIB3632-012-C2_FLI
cgactcctcttccgtctctctctctatcatctactgcctgtctccttccctctaaacccgcatccgcagcagcgccgctagggtttgctcaggccccgaaccccacccttggattgctctgattccgtggcgactcgttgggaaagatttttgtcggaggcgttgcttgggagacaactgaagaatcattctccaagcattttgagaagtatggggcaataactgattctgtaattatgaaggacaagcatactaagatgcctcgtggatttggatttgttacattttctgatccatctgttatagacaaggttttggaggatgatcacgttatagatggcagaacggttgaagttaagaggactgtcccgagggaagagatgatcaccaaagacggccctaagacaagaaagatcttcatcggtgggctaccaccatctcttactgaagatgaattgaaggatcacttttcatcatatggtaatgtggttgaacatcagataatgcttgatcatagcactgggcgttctagagggtttggttttgtcacatttgaaagtgaagattctgttgaaagggtcatatcagaggggagaatgcgtgatcttggtgggaagcaggttgaaataaagaaggctgaaccaaagaaacatggatctgaccacagcagtaatgggagatcaaaccacggaggtggagcttaccgcaattcttaccgtagtggtggtggagctggtagtggcagcagtggaggcggcggtggttatgggtatggtggtgcttatcgatctgctgcagcaggttatggatatgatggtggcgcaggagcaggatatggctatggtagagggtatggctatggaggcaatgctggctttgggtctagttttggtggtggttatggtggatccatgtatggaggtgctgcctatggtgcatatggtgcctatggtggtggcgcctatggaggaggtgcctacggaggcggtgcctatggaggtggtgctgcctatggtggcgccccaggtggttatggcactggcggatacggcagttatggcggagcaggtagtactggtggtgggagcacaggtgctcggggttctagcaggtatcatccatacggaaaataagcgacgagtttaaactatttttctgggtctcaggtgttcctcttctcctagaagttcagatttcatggcatgtccatctaaacagtgggcattggaacgtagttgggtctaattaagtcaccgtgagaactgtgtaattgctgcagctgagcctccctgcctgccttgtttgcagtacaagctacacataaaacctgtgttgtattctttagtttggtatatgcagagtttagaaccctgagatcgagcattttatggtaggaacagtatttggtgcggtagaactatattccgtgctctaacattgccattgc

SEQ ID NO: 24482 - DNA, 2092 bp, Zea mays
  Clone ID: LIB3632-012-G1_FLI
gctctgtgctatactgctaatctgctatcccctcccccaagccgccaccaccagcagcagcggaacccaccgccctcgttcctcccccgccggcgagagatctacgagatggtgctgtcacacggcgtcggtggctccgatgagtccgtccactcgacgttcgcgtcccgctacgtccgcacctcccttcctaggtaccggatgccggagcagtcgatccccaaggaggcggcgtaccagatcatcaacgacgagctgatgctggacgggaacccgcggctgaacctggcgtccttcgtcaccacgtggatggagcccgagtgcgacaagctcatccaggcctccgtcaacaagaactacgtcgacatggacgagtaccccgtcaccaccgagctgcagaaccggtgcgtgaacatgatcgcgcatctcttcaatgcccctctcggggacgctgaaacggctgttggagtgggcaccgtcggctcgtccgaggccatcatgctggctgggctggcgttcaagaggcgctggcagaacaagatgaaggccgccggcaagccctgcgacaagccaaacattgtcaccggcgccaacgtccaagtttgctgggagaagttcgcgcgctacttcgaggtcgagctgaaggaagtgaagctgagcgacggctactacgtcatggacccgcagaaggccgtggacatggtggacgagaacaccatctgtgtggcggccatcctctcggctccacgctgaacggcgagttcgaggacgtgaagctgctcaacgacctgctcaccaagaagaacgcggagacaggctgggacacgccgatccacgtggacgcggcgagcggcgggttcatcgcgccgttcctgtacccggaactggagtgggacttccggctgccgctcgtgaagagcatcaacgtcagtggacacaagtatggtctggtctacgccggcatcgggtggtgcatctggaggaccaaggcggacctgccggaggagctcatcttccacatcaactacctcggcgccgaccagcctaccttcaccctcaacttctccaaaggttccagccaggttattgcacagtactaccagctgatccgccttggctttgaagtgagttacttcagctcattgcttatatgtaacatttatttcctgaattgtttgtgtacccacttacccacacacacacacaccactgaggaaaatgaataagctttggattgttaagaagccagcatggttgtgatgcagggttacaagaacatcatggagaactgccaggagaacgcgacggttctgaagcaaggtctggagaagacggggaagttcaacatcgtgtccaaggacaacggcgtgccgctggtggccttctccctcaaggacaacagccggcacaacgagttcgagatctccgacttcctgcgccgcttcgggtggatcgtgccggcctacacgatgccccccgacgcgcagcacgtgaccgtgctccgcgtggtcatccgcgaggatttcagccgcaccctcgccgagcgcctggtgctcgacatcgagaaggtgctgcacgagctggacgcgcttcccgcccgtgtccccagcggcgacctagccgcgctcgccgcggccgagtccagcgagagggagatggagaagaagcgccaggtgatctcgctctggaagagggccgtcctcgccaagaagaagaccaacggcgtctgctaagcagccgagccgacgcatttctggccgtattggcatggggtgaaatttgtctgagtacggtttgcagtttttatccggatgaagactgctatgtgtcgaggttgagttttagaggacggaattgctccggctcggtgtatgtagcgagtgttttacgtgctcaacaattctcagacttccctcccctcttgcatgtaagctgtaagtcgatgcaaataatgttgcgtgtcgagcgacgattaatagtatctgattgggtacttgtattagtattgatatttgaattacactatacattatgtgacatactattaatattgctcgacaaggtaatattatcggctcctgtttgattttct

SEQ ID NO: 24483 - DNA, 1124 bp, Zea mays
  Clone ID: LIB3632-012-H11_FLI
caccaggagactctctcagacagcataagctcacatcggcaataaaaaagcatccccgtctcccctgattctctccgcccagctcagctctgctccccgccgctcctctccgcgccccttcatcccggatctcggcatgggcaccgccaccaccaacggctcggcggagcaggcgtccgcgcccgtgccggcgctcaagttcctcatctacggccgcacgggctggatcggggggctgctgggcggcctctgcgccgcgcgcgggatccccttcgtctacggcgccggcaggctcgagaaccgcgcccagctcgaggccgacatcgacgccgccgcgcccacccacgtgttcaacgccgcgggcgtcacgggccgccccaacgtcgactggtgcgagacgcaccgcgccgagaccatccgcgccaacgtcgtgggcacgctcacgctcgccgacatctgccggggccgaggggtcctgctcatcaactacgccacgggctgcatcttcgagtacgacgccggccacccgctcggctccggggtcggcttcaaggaggaggacacgcccaacttcgtcggatcattctactccaaaaccaaggccatggtagaggaattgctcaagaactacgagaacgtacgcacccttcgtgtgaggatgcctatctcatcggatctctccaatcctcgcaacttcatcaccaaaatcacccggtacgataaggtcgtcaacatcccgaattcaatgacagtactggacgagctccttcccatctcgatcgaaatggcgaagagaaacctcacgggaatatggaatttcactaaccccggcgtggtgagccacaacgagatactagagatgtacagagactacatcgatccaggcttctcctggaaaaacttcaacctggaggagcaggcaaaggtcatagtcgcaccgaggagcaacaatgagcttgaccagaccaaactgaagagagagttcccggagcttttgtcgatcaaggagtcgctggtaaaatatgttttcgaaccaaactgtaaggcgtccaaggcttgacaagtggaggtgcgcacagctgtatgttgacgctatttgttccatctgaattgacattactctc

SEQ ID NO: 24484 - DNA, 1004 bp, Zea mays
  Clone ID: LIB3632-013-A1_FLI
gggcggtggcggagcgtaaggcgaaggagtagcagcagcaggcggcgccgagtagcggctccccatctcgagcttgccaccatggctagaggattgaagaagcatttgaagaggctcaatgcccccaagcattggatgctggacaagcttggcggagcttttgctcccaagccatcttctggacctcacaagtctagggagtgcctgccactgatcctcatcatcaggaacaggctcaagtatgctcttacataccgtgaggtcatttccatcctgatgcaacgccatgtacttgttgatggcaaggtcaggacagacaagacctaccctgctgggttcatggatgtcatttccatccccaagaccaatgagaactacaggctgctgtacgataccaagggccgcttccgccttcacccaatcagggatgaggatgctaagttcaagctttgcaaggttaggtctgttcagtttgggcagaagggcatcccttatctgaacacgtatgacggccgcaccatccgctaccctgaccccctcatcaaggccaacgacaccatcaagatcgatctggagaccaacaagattgtggacttcatcaagtttgatgttggcaacgtcgtcatggtgactggcggaaggaacactggccgcgtgggtgttatcaagaacagggagaagcacaagggcagctttgagaccattcacgtggaggactcctgggccaccagttcgccacccgtatgggcaacgtgttcaccatcggcaagggtaataagccgtgggtgagcctgcccaagggcaagggaatcaagctgagcatcatagaagagcaaaggaagcgggatgccgctgcccaggctgctgccaacgcataaatcctctgaatgtgctgtgttgagagttttttctagttgctctgcaaggatatagaacaatgttctaagactaccatgtttttaagtctgcctgatgcttataattcatgaacgatttttgcagct

SEQ ID NO: 24485 - DNA, 1098 bp, Zea mays
  Clone ID: LIB3632-013-B2_FLI
gtcagcagcttctgcttgctctggggggaaggagagagagagagcgagagagagagagagatctagtagagaggctagtaggtggtcctcgaacgaagatgttggcggtgttcagcgggcaggtggtggaggtgccggcggagctggtggcggcgggcagccggacgccgtcgcccaagacgaaggcgtcgcagctcgtggggcgcttcctggccgcgtccgagccggccgtgtccgtgcagctcggcgaccacggccacctcgcctactcccacaccaaccaggcgctcctccgccccaggtcgttcgcggccaaggacgaggtgttctgcctgttcgaaggggtgctggacaacctgggtcggctgagccagcagcacgggctgtcaagcaagggcgccaacgaggtgctcctcgtcatcgaggcctacaagacgctgcgcgaccgcgcgccctacccggccagcttcatgctcgcccagctcaccggctcctacgccttcgtcctcttcgacaagtccaccaactccctgctcgtcgcatctgaccccgagggcagggtgccgctcttctgggggatcaccgccgacggctgcgtcgccttctccgacgacatcgacatgctcaaaggctcatgcggcaagtcgctcgcgccgttcccgcaaggctgcttctactccaacgccctcggagggctcaagtgctacgagaaccccaagcacaaggtcaccgctgtccccgccgacgaagaagagatctgcggtgccactttcaaggtggtggaagggtctactgtcctgacggcgctgcactgatcgatcatcatcaggcggaggcgatgcgacgatacagaactttgtacatgcgtggtgggtgtaacatagtggctggcaacaagccatgctcatgcaaaccgatgaatctatctctgtatcatgcatcgatctcggttgcttgctagtccagactccagactccagacatggctatatatagctggtgctaataaataggagtataatcgtcatatcgatcggttgcgtgtggaatgccaatcaagtgtgtaatctgttccaaataacaaacctatgttcctcc

SEQ ID NO: 24486 - DNA, 1667 bp, Zea mays
  Clone ID: LIB3632-013-F6_FLI
cccccgcctcccatcccatgcccgcccccgcgctcgtcggaggccgctcgcggcggcctcccatcccgccgcgctgacgagagggcctctcggtgggggcgcttcgggtgttcattttgtccgttcggggaaggggagtgcggcgatggggaagcagcaggaggggaagcggcggcgcggggagaaggacgggaagcggaaggggagggggaagacagctgcagcggcggtgccggaggacgcggcgccagtggccgggaaaccaaaccatctactgatgatgcttgccaggaccaatcagtaccaccagcctctggttccgcaacaaccagtaacactggaagtatctcaccttcttccatagttggagaggagctaaaactagctttccaactgcgtagatttacttttagtgaactgaaatgtgccacgagaaacttccgacctgagagtcttcttggcgagggaggttttggctgtgtctttaaaggatggattgaggagaatggaactgctcctgttaagccaggcaccggattaactgttgctgtcaagacactcaaccatgatgggttgcaggggcataaagagtgggtggcagaagttgattttcttggaaaccttcagcatccacatctagtgaaattggttggctactgcattgaagatgaccagaggttgcttgtgtatgaatttatgccccgtggaagtttggagaatcatctttttagaaagtcattgcctctaccatgggccattagaatgaaaattgctcttggtgctgcgaaaggcctcgcttttcttcatgaagaagctgaaagaccagtaatctatcgggacttcaaaacctccaatattcttttagatgcggactataacgcaaaactctctgattttggacttgctaaagatggccctgagggtgataaaacacatgtgtcaactagggtcatgggaacatatggatatgctgcacctgaatatgtaatgacaggtcacctgacatcgaagagtgacgtatatagctttggagttgtactactagagatgatgactggtagaaggtcaatggacaagaacaggccaaacggagaacacaacctggttgaatgggcacgcccttatctgggagaaagacgcagattctataagcttgtagaccctcgtttggatgggaacttctccataaaaggcgcccagaagacggctcagctggcccatgcctgcctcagccgtgaccccaaggctaggcctctgatgagccaggtggtggaggtgctgaagcctctccagaacctcaaggacatggccagctcttcctactacttccagtccatgcaacatgagcgtcgcacagcacttgccaacccatatggcagtcaaagcatgaaagcgcagagcacctttgcgcggaacgggcagcagcccatgaggagcctctcgtatggccctcatgcttccccgtatcgccagtcgccaagacttgacagcaagcggcaatgagtcatggtgcttgtctgtcgaccataacatattttcaagactgaagttgtaaccagaactggtgtatgaactcagccatccaacaagcatctgagctatctattattgtggatgaagcagcaacattgattcgaatttgcatatcatctgcgagtgaatttttc

SEQ ID NO: 24487 - DNA, 1011 bp, Zea mays
  Clone ID: LIB3632-014-B10_FLI
ggcaagcgaagcactccactccactccactccacctgttagaaacaagctagctcaagttctctcaacttcttgccaggaaagcgcgcaggaggtcgacgggaacgaccatggtcagcgccaagagacttgtgcaaatggccaagaagtggcagaggatggccgccacggcaaggaggcggatcgcactggcgccgccggcaaaaggagccgccgagggatcgtcgccgccgtgcagcacctcgcgtgtagctgtagccggcaagggccactgcgtggtgtactcggcggacggcaggcggttcgaggtcccgctgccgtacctcgacaccgccgtcttcggcgtgctcctcggcatgtcgcgggaggagttcgggttcgccggtggcgacggcaaaaggagccgccgagggatcgtcgccgccgtgcagcacctcgcgtgtagctgtagccggcaagggccactgcgtggtgtactcggcggacggcaggcggttcgaggtcccgctgccgtacctcgacaccgccgtcttcggcgtgctcctcggcatgtcgcgggaggagttcgggttcgccggtggcgacggcaggatcacggtgccctgtgacgccgccgtcatggagtacgtcatgtgtttgcttcggagagacgcgtcggaagaggtggtgagggcgttcctgagctccgtggtgagccggccttgcagccactgtggaaatggctcgctggtgcagtccaccacgggagttcgccagcaagctgctgtttctagcttctgagctgaggattaattagcacttagctagattgttttattattattattattattattattattattattattattattattattattattattatccttgagtgatatatgtaaatagtttggagtttggaaatgaaggttagatacaattgttcaaaaagaaatggagcagagattacactgcaacaagttctctcgtatctaccaaccgtcttctgaagcaatttaaagag

SEQ ID NO: 24488 - DNA, 977 bp, Zea mays
  Clone ID: LIB3632-014-C5_FLI
gcacccctctccctctctctctcttcgccgtccgaagctccgcaccccaatctaatcgacacctcaccgagatgggccgcaagttcttcgtcggtggcaactggaaatgcaatggaaccacagatcaggtcgagaagattgtcaaaaccctgaatgaaggacaggttcccccttcagatgttgtggaggtcgttgtcagccctccttatgtcttccttcctgtggtcaagagccagctgcgccaagagttccatgttgctgctcagaactgctgggtgaagaagggaggtgctttcactggtgaagtcagtgctgagatgctcgtcaaccttggtgttccctgggtcattcttggacactctgaaaggagagctctgctgggagaatcaaatgaatttgttggagacaaggttgcgtatgccctgtctcagggactaaaggtcattgcatgtgttggtgagacccttgagcagagggaggctgggtctaccatggatgttgttgctgcacaaacaaaagcaattgctgagaagatcaaggactggagcaacgtagttgttgcctatgaaccagtttgggctattggaactggtaaagttgccaccccagctcaggctcaggaagtgcacgcctccctgagggattggctaaagaccaatgccagccctgaggttgctgaatctactaggatcatctacggaggctctgtaactgctgcgaactgcaaagagctagcagcacagcctgatgtcgatggttttcttgtcggtggagcttctttgaagcctgagttcatcgacatcatcaacgcggccaccgtgaagtccgcttaagatgctacgctgaagacgaacatactttttttttgctcaactgtgctatgtaagctagtagcttttgcgcaggagcagagactgttttgcctgcccccaacttctagcttgagcttgctaataatgtttacctctggacgtatc

SEQ ID NO: 24489 - DNA, 1032 bp, Zea mays
  Clone ID: LIB3632-014-C9_FLI
gagaagaactagcgcggcgggcgagcattgcaagccgagctgcaggggcccggagcggagaccggaggagggagacgtcgcttgcgatgtcaccggcagcatccgccgccgaaaccgccgtcgtcgtcgtcgtcgcaagcgtcccgagccagcagcagagcagccaccgcgccgcggcgccgtccgtcccgtcgtcctacgccgtctgggagaaggagcggtaaggcggctgcagctttacgacgtcgtcgtcgtcgtctgccacctgcctactgctgctgctgctgcaagggaaggaaaaaggaacggaaagggggaaggcatggaggtggaggcggccaagtgcgagtgctgcgggttcacggaggagtgcacgccggcgtacatcgcggctgtgcgcgccgagtacctgggccgctgggtctgcggcctctgcgccgaggcggtgggcgacgagatccggcgcgaggggaccatcaccacggccgaggcgctcgaccgccacgtcgcgttcgcgcgcgcgccgcgctcccggagggcgcccgcggaggacgacctcgtggcggccgtggcgcggctgctccgccgctgcctcgactcgccgcccgcgtcgcctgcgccgccgccacagagccggaaggtggccgcagggcccggctgccccgatggagccgacgcttgaagctgcttgcttaattggcggcaatgattggggggttggttccgctgctggtggattaattagttgtactagtacaagaataaacctccagtggcataatatgatggtacaagtgcatgtgtaggtcgccttccggagaataattcgtgccggtatcatttgacgagagagggggcaaatcacgctccgtgtgtgatcgagcatgaagctattgttaagcatatcactcattggagtacatcaggacaaacactgttccattagttctgcatattcaggttgtaagaatattgtattggagtagtcatgtgctatcttcttgattcaattcaatcgaagtaatttgatac

SEQ ID NO: 24490 - DNA, 1453 bp, Zea mays
  Clone ID: LIB3632-014-H8_FLI
cagcagagaaaggccggcagcgctaatcgtaatagccatgggctccaccgccggcgacgtggccgcggtggtggacgaggaggcgtgcatgtacgcgatgcagctggcgtcgtcgtccatcctgcccatgacgctgaagaacgccatcgagctgggcctgctggaggtgctgcagaaggaggccggcggcggcaaggcggcgctggcgcccgaggaggtggtggcgcggatgcccgcggcgcccagcgaccccgccgccgccgcggccatggtggaccgcatgctccgcctgctcgcctcctacgacgtcgtccggtgccagatggaggaccgggacggccggtacgagcgccgctactccgccgcgcccgtctgcaagtggctcacccccaacgaggacggcgtgtccatggccgccctcgcgctcatgaaccaggacaaggtcctcatggagagctggtactatctcaaggacgcggtgctggacggcggcatcccgttcaacaaggcgtacgggatgacggcgttcgagtaccacgggacggacccgcgcttcaaccgcgtgttcaacgagggcatgaagaaccactcggtgatcatcaccaagaagctgctggacttctacacgggcttcgagggcgtgtcgacgctggtggacgtgggcggcggcgtgggcgccacgctgcacgccatcacgtcccgccacccgcacatctccggggtcaacttcgacctgccgcacgtcatctccgaggcgccgccgttccccggcgtgcgccacgtgggcggggacatgttcgcgtccgtgcccgccggcgacgccatcctcatgaagtggatcctccacgactggagcgacgcgcactgcgccacgctgctcaagaactgctacgacgcgctgccggaaaatggcaaggtcatcgtcgtcgagtgcgtgctgccggtcaacacggaggccacccccaaggcgcagggcgtgttccacgtcgacatgatcatgctcgcgcacaacccaggcggcaaggagcggtacgagcgcgagttccgcgagctcgccaagggcgccggcttctccgggttcaaggccacctacatctacgccaacgcctgggccatcgagttcatcaagtgaatacggctaccaccgtcgccgcgatgagatgcatggctgccacatgcatgcttgcttgcttggtcctcgtatcgtacgtcgccgtcgtcgtcttcttctggttgcgctgctaccttgctgctctcgccctcgcgtatgcatgtacttttgcttaattttctttcttcatatcatgcactctggctggcctagactgcccccgatctatgctggccggtacgtcttgtcgagctcttgcatgtcgtggattctaaattcttcttctgcgtcgaattgtctctgccatgtgcgagtaataacaatcaaggttatacttaccat

SEQ ID NO: 24491 - DNA, 2021 bp, Zea mays
  Clone ID: LIB3632-014-H9_FLI
acgcacttttaccgcccatactagcaaggaatggccggcgccgtctccgtctccgctcaccggcggcaatggcggtacacgtgggaagccctaacccatcttcccctcctccgcctctacctcttaccccgccccgcgctgtccttccgcatcccctcggacctccgcgccgaccttcgactccagggctctctcctccacctgtccttttcgctccccggggacggggctgccgtcgcgctcagggtccccgtcccgagggtgctcgtagacccttccgcccccgtagagtgccgcgccgccgccgcgggggaccacctcgagctccgcctcgcgctcgtcctgcccgtcgaccaccctgtcgtcgccgccgcgttccctccaccccccggcgcggagcctccggcttctctagcgctgcgcgatgatttgaagagtttatctactggagacgttcacttgtattgcaaaaattgttcgtcaaggttgacaaaacagccactaaggaaaatcatggaaatgccatctgtagattgggtagatgtgtctgacaattggtttggtggatgttgcacctcatttggtggtgcaggcgagaaacttgtatctcagtttattagggcatatggtcgtttagaaggaacaagtctactggatgcaacttccattactgtagaaacagacgatcttgaaacagatttagtgtctcaggtagcttgttcagcacttagtagacattttgttgctataaaagaagatatatttaatgttagtgtagaaaaagatcataccactgggaagataaagttgaagaattcagaagagcaagcaaatatcacagctactcatgcacaaccacctattattttggaagaggggcctagtgttagttgtagtgaaacaaacggagtcactcagactaatcagcctggcatttctcagacagaagctgatactgatgcgtactttgagaagtctgaaaatgactgttgtgttgagaaagtggggaaatctaagaaagaggttgatttgttgctggtagatccatgccgttgctgttgtgtcaatggatacagtgagaaagctgaagataacccttcacagttgtccttggtcaatgagaaaaagcagaatatgttggagattaaaagagattacaaattaacaaaaactatttctcttggtagtagcttcattgttaaagcatctaaccttttgaatgattttgagtgggttgaacttctctgtggtcaatgttcatcacctcttggctcatacccttctcagtgttcgcttggtccagctgatggccgcctacgactcttcaagtgctacacatctacagaaattcctgtaacagggcctcatgatgtgtttagggggcatacattggaaagagtttttgtgaatctgttgcttgaagttgcagaagacgaaatatcttttcgcacattagtcagagatttgaaaaccaaaaggcccatgctgcaattagttcttcttagttcaaaagcatggttatcttctggttgctgttatgaaaatgatatcgatggttcacatggaacaacagatctgcagccaagtgttaaactcttgtattctgattatagcaatgcttcagaagcagatttaaggatagtagaagcgtgggcatccaaatatcgggctgaagagctgtacatgatgaagcgtcagatagacgaacttactgaatgcctaagctcaggaatggacaactttccagtttcttgttcttcccttgaagggatgcggctctcatcgcttaggcgctgacttcagtatatgacatggaaattgtgcctggactgatcatatttttgtactgatcaaaggagtctacagcatagaatcctgatgggcatacatgatcatcctcggtgtcttttgagctttcagcaagctccctaataatttcttatttaaaatttaagatgccatgccttgtcctctgctctgaaaagacttggtggcatccgaaatggagcaatggcttatcc

SEQ ID NO: 24492 - DNA, 1102 bp, Zea mays; identical to SEQ ID NO: 12882
  Clone ID: LIB3632-015-A1_FLI

SEQ ID NO: 24493 - DNA, 1411 bp, Zea mays
  Clone ID: LIB3632-015-A11_FLI
ctccaatccgccgctccactccaagtcacacggaggcagccatcgtagcctcgcccgactccgcttcccctgttctttgggcatggagctgatcacaaatgtcaccgagtacgagaagctcgcgaaggagaggctgccgaagatggtgtacgactactacgcctccggcgcagaagatcagtggacgctcaaggagaaccgggaggccttctccagaattctgtttaggccacgggtactgatcgacgtctcccgtatcgacatggccacaaacattctgggcttcagcatttccatgcctatcatgatcgctccttcagccatgcagaaaatggctcatcctgatggagagcttgccacggcaagagctgcagcttccgcaggaacaataatgacattgtcctcatggtctacttccagcgttgaagaggtcaactcagttgggccgggcatacgtttcttccagctctatgtctacaaggacaggaatatcgtacggcaactcgtgaaaagggctgagatggctggcttcaaggccattgcactcacggtagacactccaatacttggccgcagggaagctgacattaagaacaggttcgccttacctccacatctggtgttgaaaaacttccaagcgctggatcttggcacgatggacaagacaaatgattccggccttgcttcctacgttgctggtcaagttgaccgcaccctttcctggaaggacgtcaagtggctgcagacaattacctcgttgccgatcctagtcaaagggatcgtgactgcagaagacactaggcttgcgatcgaatatggcgctgctgggatcatcgtgtccaaccacggcgcgcgccagctagattatgttcctgcgactatcagctgcctggaagaggtcgtcagggaagcgaaaggccggctaccggtgttcctcgacggcggcgtccgccgtggcacggacgtcttcaaggccctggcgttgggagcttcaggagtgttcatcggccggcccgtgctgttctcgctggcggtggacggcgaggccggcgtgcggaaggtgctgcagatgctgagggacgagctggagctcaccatggcgctcagcggctgcacgtcgctgagggagataacccgcgcacacgtcatcaccgacagcgaccggatcggccgctcgcggctgtagaatcattgtgcagttcacctcaggaatgatgttggtctcgactgaactgtcctgattcgggatctatttgtagctcttgtgctctcattttacgttaggcaaataaggaagctgcgtgcgtatgtgtgactgctgctgacgtttgtttgcgccgctgtcgtggttgcctggttggcacttggcagtgttgattggcgttagtggttggtttgggtgaaaggagtt

SEQ ID NO: 24494 - DNA, 896 bp, Zea mays
  Clone ID: LIB3632-015-B4_FLI
gaagggagctctgcatcctgatccacccctccatttttttttgcttgttgtgtccttcctgggacctgagatctgaggctcgtggtggctcactgtagcctcgctacacagttttcttctcctctcctctcctctcctgtgctatttgctgtttctcctaagattctttaggccgtgcttatccgtgctggagctgaacgaagcagcaggttgctgctgctgctgctgccctcgtgccctggtggtggactggtatcggtactcgtacttgcgtcgttttattacactctctatcttcgccggtgaggttccggccgttcggtacaggtagtttatttcaaacgctcgttttatttcttgttatactatattcttctgcttcctgttcgtaccggtggcttgtgcctttgcggtggcgctcctggatctggatgcagcgagcgcccgtcagcttttctccccccggcacctggcagattcgcgtcatgctggctgagcgctcgacccctcgcgctcggcgccgtcgcctgcaggccaggtccggtttcatcgcatgtcgccgcccgctggtgcttccgtgtcatgggagcttcgtttatctttctgaccgacatgtaatgtgcagtgcgaggacttctgctgcaacgcttcgcgatgcaaggacgtcgttccagcaggacgattcaagccgtggacttgggttcttgtttttggactccggaactgcggtttggagctctggaggcaaataggcgataataatgcggtgtaaattgtgacgaaagctgagattctttgtatgaaatacggaatgtatcgcttggacactgtatcgcgaattggtggatgagcatgttgtattccgttgcccttttggttcgaaataatgcccacgt

SEQ ID NO: 24495 - DNA, 1988 bp, Zea mays
  Clone ID: LIB3632-015-C8_FLI
tgctttggcttggcaaacccgattggatcttcagaaaaatcgccatcccctctccctcttctcgtgtccatcgctcctctacccattcttacttgaatcttttctgaagaggaaatctgacttcgggagcggctcctccgcgttgcctggatcgcccgggatcagtattttgcttccagtcagaggtccaaaatatcaaagggatgcagaaagatgtggttgcatgatggagtaccttgcctggaaattggcaggatacacaaacatagttgtactttacttgatctcgatgacattggactgcaaatatatgcacaacaattgcctcatgcacacacacataatggggccgcgagttgtagctcaaccatcgtctctggtttctttctaggtggagatggttaaaattgctggtcacttataattaccagcatcttatacgtcattgttgttcatcgccaacttattcaagtttgaaagtagaacactgagaagatggctgagaaagagaatattctaatgcagagatatgagatgggaaagttacttggaaaagggagttttgccaaagtttaccatgctcgcaatgttaagacttcagaaagcgttgctatcaaggtgattgacaaagataagatcaagaagtgtggtcttatggatcaaataattcaagagatttcggtgatgaagttggtaaaacatccaaacattgtccaattgtatgaggttatggctaccaaaaccaagatatattttgtgatagagtatgtcaagggaggagagttgttcaaaaaggttcaacgtggaaggttaaaagaagatgttgctcgtacatatttccaacaattgatcagtgctgttgacttctgccatactagacaagtttatcatagagatctaaagcccgaaaatcttcttcttgacggaagtcacaacttaaagatttcagactttggtttgagtgcacttccaaactgcaagagaaaagatgggttactccacacaatttgtgggactcctgcatatgttgctccagaagtaattagtcaaaaaggatatgatggtgcaaaagctgacatatgggcttgtggagtgatcctctatgtgttgttggcgggctatcttcctttccaagacaagaacatgatggacatgtataagaaaatttgcaaagcagaactcaaatggccaagttggttttcttcagatgttcgaaagcttttgcggcgcatccttcatccaaaccctaatagacgaatatctattgaagaaataagaacacatccttggtttagaattggtcttgatgcaagattgtttgattctacaacgagagatcatgtgcctagtgacatggatttggctttgaattccttaaatagcaatatggtcgagtgtaattcagcggcagagaaactgactattttgaatgcttttgatatcatctccctgtctaacgggtttgatctctctggtatatttgagaactcaaacaaggagtctaaattcatgtctaccaacacagctatgacaattatcaccaagctaatggaagttgcaaagagcttggatctgaaggttataacaaaaactggtgggttgttgaatatggaagctgccaaatcaggaataaaaggtgtgatgtctataaatgctgagatatttcaaatcacaccaaattatcatctcgtggagatcaagaaaatcaatggtgacatccttgagtatcataactttatgaaccaaagcatgagaccggcactagaagatattgtgtgggcatggcatggtgaacaacctgacgagaagtagactcatcaactttagataatcgtcaacctacaaccttagatattatgacaggtgtaatgctattagaaagtgtatcaggccaaaaaaaatgtcatgggacttaataatattacttctatgttgtttttattctcatgctcatgctgtcatgcagtaaagtgttctttctattgacc

SEQ ID NO: 24496 - DNA, 412 bp, Zea mays
  Clone ID: LIB3632-015-E6_FLI
tttcgcgccgccgccgccgccgcttcgtcgtctccgccgcagcgatgccgtcgcacaagaccttccggatcaagaagaagctggcgaagaagatgcgccagaaccgccccatcccctactggatccgcatgcgcacggacaacaccatcaggtacaacgccaagcgcaggcactggcgccgcaccaagctcggcttctgagcgcgcggatcggccggctcctgcgtcggaattctagggtctctacctttcctttggttttatcgatgtctcttgtgtttctgtaagctagcaaacagttccagaaagcttttgttaagattttgatgacgctaagaggattgatgctactatgctgtactcaggattccatgctgcattgcgatgctaaattaaagaacctctgttacctt

SEQ ID NO: 24497 - DNA, 1409 bp, Zea mays
  Clone ID: LIB3632-015-F4_FLI
gccaggcccaggagcgcgagttctgtgcctgtgcctctgctccacctcccctgcccctgcgccccaagtccacgtccaccactcagcactcacgctgctcgctcgctcgctcgtacacgcgcccgcttcgcgcagggaaggaaccgtgggagggaagcggacggacatgatgcacgccaagtcggagtcggacgtgacgagcctggcggcgtcgtcgccgcctcggtcgccgaagcggggcggcggcggcgccggcaacggcggctactacgtgcagagcccgtcgcgggagtcgcacgacggcggctacaagtcctcgtcgatgcagcccacgccggtctacaacagccccaacgagtcgccgtcgcacccctcctacggccgccactcccgctcctcctccgtcagccgcttctccggcaacctccgcaagggcgccgccggggaccgcaaggtgctcaacgacaaggggtggcccgagtgcaacgtcatcgaggaggagggcccgtacgaggacctcgccggcgatagcggcctctcccgccgctgccagatcatactcggcttcctcaccttcgtcctcctcttcaccgtcttctgcctcatcatctggggcgccgcccggccgtacgagcccgaggtcatcgtcaagagcttggtgatggacgacttctacgcgggtgaaggcacggaccacagcggcgttccaacaaaattggtcacaacaaactgttctctgcacatagctgtctacaaccctgccacaatgtttggaattcatgtcacttctggccccatccacctgatgtattcagagatcccaatagcagtcggtcaggttcggaggtattaccaaccgaggaagagccaccggatggtgacggcggtcatccacggcgagaaggtgccgctgtacggcgccgggggcagcctgatgctgtcgacgagcacgggcggggcggtgcccctgacgctggacttggacctgacctcgcggggctacgtgatcggcaagctcgtgcgggtgacgcacaaggtgcacgtgacgtgccccgtcgtcgtggacgccaagaagaccaagcccgtcaggttctccaagaaggcctgcgccgtgtacagggcctgaacttcaaatgcgttttcgtaaagctgcgatccgacggcgcattagcaacgcgcgtaggatgccgtgcctgtatttagctatcgtgttggtcgtgaagaacaataagctgcacacacatatggtctgtttgagccttttggttctgtcgataaatcgcgctgtacggcgggtgtcctcttgttcttgcgtgtgtgtatctttcttttttcagggcgcgatcctagagacgggacggatggctatttttatttattattttcttaaagttagaaatattttactc

SEQ ID NO: 24498 - DNA, 1435 bp, Zea mays
  Clone ID: LIB3632-015-F6_FLI
caccacctcgcctgcgatcttcgtagcctccgtcgcgtcgagcatcgatcatgtcggcctactgcggaaagtacaaggatgagctcatcaagaatgctgcctacattggcacccccggcaagggtatccttgctgctgatgagtccactggcaccattggcaagcgcctttccagcatcaatgtcgagaacgttgaggagaaccgccgtgccctccgtgagctcctattctgctgccctggtgctctccagtacatcagcggtgtgatcctcttcgaggagaccctgtaccagaagaccaaggatggcaagccttttgttgatgtcctcaaggagggaggcgtcctccctggcatcaaggttgacaagggcaccattgaggttgttggcactgataaggagaccaccacccaaggccatgacgaccttggcaagcgttgcgccaagtactacgaggcaggtgcccgctttgccaagtggcgcgctgttctcaagattggccctaatgagccatcacagcttgccatcgacctgaacgctcagggtctggctcgctatgccatcatctgccaggagaatggtctggtgccaattgttgagcctgagatccttgttgatggccctcatgacattgatcgctgcgcttacgtcactgagaccgtccttgctgcctgctacaaggcgctcaacgagcaccatgtcctcctggagggtaccctcctgaagcccaacatggtgactccaggctccgactccaagaaggtgacccctgaggtgattgctgagtacaccgtccgtaccctccagaggaccgtccctgctgctgtgcctgctgttgtcttcctctctggtggacagagcgaggaggaggccacccgcaacctcaatgccatgaacaagctcagcaccaagaagccgtggtccctgtctttctccttcggccgtgccctccaggcgagcaccctcaaggcctgggctggcaaggtggagaacctggagaaggctagagctgccttcctcgccaggtgcaaggccaactctgaggctaccctcggcacctacaagggtgatgctgccgccgacaccgagagcctccacgtcaaggactacaagtactgagttgcttctctttgcgtgcccgttttggaactcctgcctacgagctaggttgcggagtgtggtttgctcgttagagcttattttcggacatccaaaaaacatgcttcctatgtgggatgatggttatctttatatttgtatgttaattagtctctttgctgttaaatttcgtgtaagttggtcctgccgatggagaatcgagcagctccctttttttgttctatcaactatgctgtaattctggctatgtatcggcaaaaacaattctatatgctgagttggagtcggcaaaaattcatatatgctgagttggagac

SEQ ID NO: 24499 - DNA, 1441 bp, Zea mays
  Clone ID: LIB3632-015-H4_FLI
caaatccccctgtcccgctaggattcccccgaaaccctcccccaaaaccccagagcggagaagagcgcaagatgttcggcttcgggcaccacggccaccacggccagaacccgccggcgcacggcggcgtgcaccagcccaccttcaagatcttctgcaaggccgacgaggggtactgcctcaccgtccgcgacggcaacgtggtgctggcccccgccaacccgcgcgacgagcaccagcactggtacaaggacatgcgcttcagcacccaggtcaaggacgaggagggcaaccctgcgttcgccctcgtcaacaaggccactgggctcgccatcaagcactccctcggccagtcccacccggtgaagctggtgccgttcaacccggagtaccaggacgagtcggtgctgtggacggagagcggcgacgtgggcaagggcttccgctgcatccgcatggtgaacaacatccgcctcaacttcgacgccttccacggcgacaagggccacggcggcgtgcacgacggcaccaccgtggtgctgtgggagtgggccaagggagacaaccagagctggaagatcctgccctggggcgacgaagcctacgccgcgggaggcagcagcgccgccaacgcgccccgcttcggcggcggcggcgagcccaccgtccgcatctactgcaaggccgacgaggggttcagcgccacggtccgcaacggcgccgtgtgcctcgcgcccaccaacccgcgcgacgagtaccagcactggatcaaggacatgcgccacagcaacagcgtcaaggacgaggaagggtacccggccttcgcgctcgtcaacagggtcaccggcgaggccatcaagcactcccagggcgagggccacccggtcaagctggtgccctacaaccccggctaccaggacgagtcggtgctgtggacggagagccgcgacgtcggccacggcttccgctgcgtccgcatggtcaacaacatctacctcaacttcgacgccttccacggcgacaaggaccacggcggcgtgcgcgacggcaccaacatcgtgctctggaagtggtgcgagggcgacaaccagcgctggaagatcgtcccctggtaaatgtgctgttctgtggctgcactggtcatcaccatgatctggagctttgaaggcatagccacctgtggtcagcagctgctgccgtgttgctagaataaagttggtggcgatcgatcgatcgatctttggtgatgggtgtccctccctgtgtgtttgtgtttagttccagtcgtttgtgaggaagtcagttatgtttgagtgagaggggtacttcgctcttcggttaactctgtacttgtcatgaggagagttttcatacccggagtgtagaactctgtactgtactcggatccttccttttccatccaagtgggttttattttatc

SEQ ID NO: 24500 - DNA, 1673 bp, Zea mays
  Clone ID: LIB3632-016-A12_FLI
ggcgaggcgttgaaacccttaaccctcttccacctcgaagcggcgcgaggagggagagtgtgagtggactcaggaggcggcgggcgaaatgaagcttaacgtcaagaccctcaagggcaccaacttcgagatcgaggcgagccccgatgcgtcggttgctgaggtgaagaggatcatcgaaactactcagggtcagagtacctacccagcagaccagcaaatgctcatataccaagggaaaattctgaaggatgagaccactttggaaagcaacggagttgctgagaacagcttccttgttataatgctgtccaaggctaaggcatcgtcaagtggagcttccaccgctactgctgcaaaagctcctgcaactccagcccaacctgctgcccctgccacatcagttgtaagaacacctacacaagctcctgttgccacagctgaaacggcacctccaagtgcacagactcaggctgctccagctgctacggctgctgcatcggatgatgctgatgtgtacagtcaggcagcttcgaaccttgtatcaggcaacaacctagaacagactattcaacaaattcttgacatgggtggtggtacttgggagcgtggtacagttgttcgtgctctacgtgctgcatataataaccctgagagagctatagactacctgtattctggaattcctgagaatgtggaggctccgcctgttgcccgagcacctgctgctggccaacaaacaaatcagcaggctccatcaccagctcagccagcagctgcaccaccagtgcagtcatctgccgcctctgcaaggcctaatgcaaatcctctgaacctttttcctcagggtgtcccaagtggtggggccaatccaggtgttgttccagctgcaggatctggtgcccttgatgccttgcgacagcttccacagtttcaagcactgcttcagttggtccaggctaatcctcaaatcttgcagccaatgcttcaagaactaggcaaacaaaacccacaaatcctgcgtttgattcaggaaaatcaagctgagtttgtccgcttggtgaacgaaactccggagggtggtcctggaggaaacatattaggtcaactggcagctgctatgccgcaatcggtgacagttaccccagaggaacgagaggccatccagcggcttgagggaatgggcttcaaccatgagcttgtgctagaagttttctttgcatgcaacaaggacgaagagcttgcagccaactacctccttgatcatggccacgagtttgacgagcagcagcaatagtgggtgatatggtgtggtggatgcaggaaaccgaggcagtagcagaacagcatagtgtcgttctgatgacctccgtctgatgagagatacttggttgtttatgctatgctgctgaccatcttttattttcatgtgttcggaatgctttctaagtacatattaattcaatatctgttacaccgtgtcaaatcgaggcctttgatttggtgggaagaggtagattgctgatttgtttagtttgctccttttctattatgaattgtaaggcgtcttggcttttctagctaaatagttttttaaaaaagcatctaaatgtaacacatataggtgcgttgtaaaaactattgaatctacaaaagctaaaatgatttacaat

SEQ ID NO: 24501 - DNA, 759 bp, Zea mays
  Clone ID: LIB3632-016-C4_FLI
cgagcccatggcggaccagctcaccgacgaccagatcgccgagttcaaggaggccttcagcctcttcgacaaggacggggatggttgcatcacgaccaaggagctgggcactgtcatgcgctcgctggggcaaaatcctacagaggctgagctccaggacatgatcaacgaggtcgatgctgatggcaacggcaccatcgatttcccagagtttctcaaccttatggctcgcaagatgaaggacaccgactctgaggaagagctcaaggaggccttccgtgtgtttgacaaggaccagaacggcttcatctcggccgccgagctccgccatgtcatgacaaatcttggtgagaagctaactgatgaggaggtggacgagatgatccgtgaggctgatgtcgatggtgatggccagatcaactacgaggagtttgtcaaggtcatgatggccaagtgagccacagaaccataatctgaaggcagagaagattatgcattgcatattagtcaagatgcaactttttattcatcgacttctagtgaaacattctgctagttgtagttgctgaaaaaggcaatgtagttcctgctttgttcttccctccagtgtgttttcagaactgttgtttcatgtgaacttgtaatgattgccctctctgctgtgtcttgattgcagttaaaatcatatgtagtttcaccccacccacacatcaacttctgtttcacgctgtttgtatcaatggatggcccgttgttttt

SEQ ID NO: 24502 - DNA, 1699 bp, Zea mays
  Clone ID: LIB3632-016-D12_FLI
cgctcggccaccagctttgaccgcctcccctcccctcctctcctgtgttcctccataccccactccccccgcaggagcggcgcggcggcggcaaaggcaaaggcaaaggcaagatgttcgggcgcgcgccgaagaagagcgacaacaccaagtactatgagatcctcggggtgcccaagtcggcgtcccaggacgacctcaagaaggcctaccgcaaggccgctatcaagaaccaccccgacaagggcggtgaccccgagaagttcaaggagctcgcacaagcctatgaggttttgagtgatccagagaaacgtgagatttatgatcagtatggtgaagatgcccttaaggaaggaatgggtggtggtggatcccatgctgatccatttgacattttctcatcattctttggaccctcttttggaggaggtggtggaagcagcaggggaagaaggcaaaggaggggagaagatgtagtccactcacttaaagtttctctggaagatctttacaatggaatctcaaagaagctctctctttcgcgcaatgtcatctgctccaagtgcaagggcaagggctcgaagtctggtgcttcaatgaggtgccctgggtgccagggctcaggtatgaaagtcaccattcgtcagctggggccttccatgatacagcagatgcagcagccttgcaacgagtgcaaggggactggggagagcatcaacgagaaggaccgctgcccagggtgtaagggtgagaaggtcgttcaggagaagaaggttcttgaggttcatgttgagaagggaatgcaacacagccagaagatcaccttccctggtgaagctgatgaagcgcctgataccgttactggagacattgtattcgtcctccagcagaaggaccactccaagttcaaaagaaagggtgaagatctcttttatgagcacaccctgtctctgaccgaagctctatgtgggttccaatttgttcttacacatctggacaacaggcagcttctgatcaaatcaaaccccggcgaagttgttaaacctgaccaattcaaggcaataaacgacgaggggatgccgatttaccagaggcccttcatgaaggggaagctctacattcatttcacggtggagttccccgactcgctggcaccagagcagtgcaaggctctcgagtcggtacttccgccaaagccttcgtccaagctgacagacatggagatcgatgaatgcgaggagacaaccatgcatgatgtgaacaacatcgaggaagagatgcgcaggaagcaggctcatgctgctcaggaggcgtacgaggaggacgatgagatgcctggtggagcccaaagagtgcagtgcgctcaacagtaagcagactaccataatgggattcaaggcactttggttgctcttcaattatgcgagtgcgcctgtggactgtatggttctatggttttgctgtcgctgagctacgaagtaggaagctgatgcgcccctggctctgcaagcgggggaatgtatcctttttttgctgcaactggaaaatgctacccaggcatagctggctaccttataacttttgcttgtgagatttgctagagtgacgattttaatttataggtggacttaatgtttgtgtaaggctaggcataacatcatgtctcaatggacgttgccgttgcacattggtgcatttt

SEQ ID NO: 24503 - DNA, 746 bp, Zea mays
  Clone ID: LIB3632-016-G10_FLI
gctcgcgtctctttcctattcgcgccgccgccgctgctgcaagcgccagctcgccgtcgtccgaatagtacactctaacgccgccatggggcgtatgcacagccgcgggaagggtatctcgtcgtcggcgctgccgtacaagaggacgcctcctacctggctgaagaccgccgcctccgacgtggaggagatgatcacaaaggcagcgaagaagggacagatgccgtcgcagatcggcgtcctgctccgtgaccagcacggtatcccccttgtcaagagtgtcaccggcagcaaaatcctccgcatcctcaaggcccatgggctggcacccgaaatcccggaggacctgtacttcctcatcaagaaggcggtggcgataaggaagcaccttgagaggaacaggaaggacaaagactctaaattcaggctcattcttgtcgagagcaggatccaccgccttgcccgctactacaagcgcacaaagaagcttccacccacgtggaagtacgagtcaaccactgcaagcactctggtggcctaagcaaggagctcagcgtcgggcgcttgaagccgagggcattgttggaaatcatttttatgtaccgttttaagagtttggagtgaactagagatggtgaatgtccctcctctggaggatgccatggaccctttttgtttacatagaactgccctgctgttaaacttttgctacttggcgaccagattttttcagctattttttttct

SEQ ID NO: 24504 - DNA, 937 bp, Zea mays
  Clone ID: LIB3632-017-A2_FLI
gtcgtttctcccttctctcccccgggcccggagaggagaggatggccggccggagcagcctctccatggtcgcgtcgcaccggctgttcacgccggtcaaccctgtgggcggcgccgaccacggcgtggagctcgacgaggccgacgtcatctggggcggcgtcggcggcggcggcggctacccggcgtcgtcctcgccgtcgtcgtcgccgttcctgtcctccgcggtcgacccgtacgcgcggtcgccgccggtggccgcgccgtccaagcagaagccgcgtggggtggtggccggcgctccggggccggcgtcggtgcccgtcaacatcccggactggtccaagatcctgggcgccgagtacgccgggagcgggtgggcggcgcacgacgaccgcgcggacgacgacgcggcgggctgcggcggcgccgggggccggcgctgggtgccgccccacgaggtgctgcaggggcgggagcgcgcggcggcgtccttctccgtgcgcgagggcgccggccgcacgctcaagggccgcgacctccgccgcgtccgcaacgccatctgggagaagaccggcttccaggactgaccgaccgctactgtcagcgccagcgccagcgccagccttgcgcttgcgcggccggcaatgcccgcctaccgtggcctggcctcgtttgatcccgttctcgccttgaggaggaggaagtgaggagcttttgcttgattagtggccttttaatccatttggattaggtcgatgagttctttctctctctctctttttttattatgttttggttcttgtcgctctagtcgtgatcgatgaggggagagtagagattaaaagcctctgtttttggcatttttcccccggagaggctcggtcgatgtacgtcccaccactaagattaattcatcttgattactagtatcaag

SEQ ID NO: 24505 - DNA, 2175 bp, Zea mays; identical to SEQ ID NO: 24463
  Clone ID: LIB3632-017-A9_FLI

SEQ ID NO: 24506 - DNA, 1330 bp, Zea mays
  Clone ID: LIB3632-017-C11_FLI
cccatatccgctcccctacctctccagcatcctcccgtctccgtcgtctcgtctccgctcctcacctcgccagccatgggcaagatcaagatcggaatcaacggtttcggaaggatcggcaggctcgtggccagggtcgccctgcagagcgaggatgtcgagctcgtcgccgtcaacgaccccttcatcaccacggattacatgacgtacatgttcaagtacgacaccgtgcacggccaatggaagcacagcgacatcgccctcaaggactccaagacgcttctcttcggcgagaagccggtcaccgtctttggcatcaggaaccccgaggagatcccgtggggtgaggctggtgctgagtatgtcgtggagtccaccggtgtcttcactgacaaggacaaggctgctgcacatctgaagggtggtgccaagaaggttgttatctctgccccaagcaaagatgcgcccatgtttgttgttggtgtcaatgaggacaagtacacctccgatgttaacattgtttccaatgctagctgcaccacaaactgccttgctccccttgctaaggtcattcatgacaactttggcattattgagggcttgatgacaactgttcatgccatcactgccacccagaagactgttgatggaccctcagccaaggactggagaggtggcagggctgccagctttaacatcattcccagcagcaccggtgctgccaaggctgtcggtaaggttcttcctgaattgaatggcaagctcactggcatgtccttccgggttcccaccgtggatgtgtcagttgttgacctcactgtcagaatcgagaagggggcctcttacgaggaaatcaagaaagctattaaggctgcttctgagggcccactcaagggtattatgggctacgtggaggaggatctggtttccaccgacttcaccggtgacagcaggtcgagcatcttcgacgccaaggccgggattgccctgaacgaccacttcatcaagctcgtctcttggtacgacaacgagtggggctacagcaaccgcgtcgtcgacctgatccgccacatgttcaagacccagtagagagagatatttctgcctccctatcgtgggtcgtccccaatggcctttggtcgcagaccatctttgctgcttgtctatgctgagaataaatgtgaacggtgcccctggacgctggatccatgctggttttggacacgttgtctttttgtgtttaacttatctgctaccgtcctgtaacgaattcactaagttctagttcttttgtgctttgttaagaatataaacaatgaggtttcaattt

SEQ ID NO: 24507 - DNA, 1506 bp, Zea mays
  Clone ID: LIB3632-017-D11_FLI
caggcctaaatggcggcggccggaacaattcccggcgccgccgcagccattggcgcttctgtgtcccaacgccaacgtcgcgtcggcgctccttctttcgtagctgcctacgtctccgagggcacccgcctcgtctgccggaggcagctccgtccggctccggtcctcgcttcttccttcatctccctttctcatccagcgaggcggcggttcctctgcgatgctgcggccggagcctcctcaggtcccgctggagaagccaagccccagggatttgcagagagatacccagctcttgtcacaggtttcttcttcttcttgtggtattttctgaatgtaatatttaacatcctcaacaagaagatcttcgactacttcccctatccatattttgtgtcagtgagccatctttttattggagtactatactgccttattggctggagcttcggcatcccaaagcgcgcgccaatcaactcaacacttctgaagcagcttgttccagttgcggtttgccatgccattggccatgtaacaagcactgtgtcatttgctgctgtagctgtgtcatttgcccacactattaaagctctcgagccattcttcaatgcggctgcttcccagtttatccttggacaaccagttccattgacactctggctgtctcttgttccagtggtgattggtgtctcggtagcatccctcactgaactctcatttaattggactggcttcattaatgccatgatctcaaatatttctttcacctaccgaagcatctattctaagaaggctatgactgacatggatagtaccaacttgtatgcatacatatcaataattgctctctttgtctgcatcccccctgcaattattattgaaggacctcaattagtgcagcatggttttaaagatgcaattgccaaagttggattaacaaagttgatttctaatttttttgtggtgggcttattctatcacctttataaccaggttgctacaaacacattggagcgggtagcccctttaacacatgccatcggcaatgtgttgaaacgtgttttcgtcattggcttttccatcatcgcattcggcaacaagatcaccacacagactggaattggcacttccattgctgtttctggtgttgccctctactcatttataaaggctaagattgaggagaaaaagcaaataaagagtgcataaggtgttggctgatgtggatgcggttggtttgtcgctttgatggacctctattctctcggtgaacgaacaaacttgcaagatggataaaatcttgctatctcctagtacatttgattgttattcccagtctggtactgaggtgtgcggttgttgttggctaacttgtttatttgaagcaaatttgagcaatgctcagtggcatggaatttccatttctgttttccttcgctcatttattctgacttgacatggtgctattgtaatcttaagcagtagtgtctctagaatgttttcccc

SEQ ID NO: 24508 - DNA, 1514 bp, Zea mays
  Clone ID: LIB3632-017-D12_FLI
cgcggtctgctcgttcgatctgtgcagcagatctgaggtcccgggcgaccgtgaagcagcttcaatcgtcggcatggcgctcgtattgcatagtggggctggaaacaagaatgccttcaaagcacttattgctgcagaatacagtgggatcaaggttgagttgaccaaggattttgagatgggtgtctccaacaagacccctgagtttcttaagatgaacccccttgggaaggttcctgttctggagactcctgatggccctgtttttgagagtaatgctatcgcacgctatgttgctcgcttgaaggatgacaaccctctttttgggtcttcccgtattgaacaagcccacgttgagcaatggatggattttgccgcaacagaagttgatcctggtgttgcatggtacttgtatccaaggcttgggtacctcccttatgttagcacaactgaggaaacagctatttcttcattgaagaggtcgcttggtgctctgaacacacaccttgcttcaaacacataccttgttgggcatgctgttactctagctgacattgtaatgacatgcaacctctaccatggaattgcacggatcttgaccaagaccttcacgtctgatttccctcatgtcgagaggtatttctggaccatggttaaccagcctaacttcaagaaggtcattggtgaggtcaagcaggcagagtctgcacctcctattccgaaaaaggctgctccttctaaggagccaaaggcaaaggatgtcaagaaggaggctccaaaggaggcccccaagccaaaggtggttgaggcaccagcagaagaggaagcaccaaagccaaagccaaagaatcctcttgacttgctgccaccaagcaagatggtccttgatgactggaagaggctatactcaaacacaaagactaacttccgggaggttgccatcaaaggtttctgggacatgtacgacccagagggctactctttgtggttctgtgactacaagtacaatgatgagaacaccgtctcctttgtgaccctgaacaaggttggtggattcctgcagcggatggacctgtgccgcaagtacgcctttgggaagatgctcgtgataggctctgagccacccttcaagctgaagggcctttggctcttccgtggccaggatgttcccaagtttgtaatggacgaggtctatgacatggagctctacgagtggaccaaggtggacatctctgatgaggcccagaaggagcgtgtcaatgcgatgattgaggaccaggagccctttgagggcgaggccttgcttgacgcgaaatgcttcaagtgagtgtgcttgcctggagacagaactgtttagcccttgaatttgcctatggaagagtttgcccttttactagtgtcgatgttgatctggtataccttgctatgaactggttaaagtttgtgctggtttgggattttttgtgcatcttgtgatacctcaagtcttcatcatttaaatgtttagccgtaat

SEQ ID NO: 24509 - DNA, 714 bp, Zea mays
  Clone ID: LIB3632-017-F10_FLI
ctttcgtcctcacgagtgaccgataatccgccggcgctaagatgttggtttatcaagatctcctatctggcgacgagctcctgtcggattcattcacctacaaggagctcgagaacggcgtcctgtgggaggtcgagggaaagtgggtcacccaaggtcctgttgatgtagacattggtgccaatccatccgccgagggtggtgaggacgaaagcgttgatgacacagccgtgaaggtggttgatattgttgacacattccgtctacaggagcaacctccttttgacaagaaatcatttgtctcttacattaaaaaatacatcaagaatctcactgctgtgttggagccagataaagcggatgagttcaaaaagggtgtcgagggtgcaaccaagtttctccttagcaagctgaaggaccttcaattttttgttggtgagagcatgaaggatgatgcgtccgtggtattcgcctattacaaggatggtgccactaatccgacattcctctatttctctcatggtcttaaggagatcaagtgctaggcttgcggcgagattagttacccatgttgggtactatctatgtactattgttatatccacaactatagttgtcctggttgaattgaactcaaaagggtttgtttgagaaaaaactgtccaagattggattgcttgttaaagctctattgttattgaagtgttattgctt

SEQ ID NO: 24510 - DNA, 1223 bp, Zea mays
  Clone ID: LIB3632-017-G3_FLI
ggctcgcactcgcgccggtcgttcgctgcagcacacaacgcaatcgccactgtcgtcgctcgtcagtccaccgactccaccgccaccggcagaaccagaacacatcgagcggcatcggagcgcgaatctgtgcggcggcgtcgcctctgccgggcgggtgggcggcatggggaggtccccgtgctgcgagcaggcgcacaccaacaagggcgcgtggaccaaggaggaggaccagcgcctcatcgcctacatcaaggcccacggcgagggctgctggaggtcgctaccaaaagccgcagggctgctgcggtgcgggaagagctgccggctgcggtggatcaactacctgcgcccggacctcaagcgcggcaacttcagcgaggaggaggacgagctgatcatcaagttccacgagctgttcggcaacaagtggtcgctcatcgccgggaggctgccgggcaggacggacaacgagataaaaaactactggaacacgcacatcaagcggaagctgctcgcccgcggcatggacccgcagacccaccgcccgctggccgcagcgccagcaggagggccgcagcagcagcattgccattaccagatggagccacagaagcgggcggcggcggcggaccattccgaggccgccgttgccaccaactcgccggaggccagcagccgcagcagcgacgacgacgaggcgccggcgctggcgccaccgccgcggcggcggcagcgccacctcgacatcgacctgaacctgtccatcagcctcgcggcctaccagccgccggagggaaccggcagcgccatcgagccactgacggcgacgacgaagcgggaggagggaacggcggcggcggtgtgcctctgcctcaacagcctcgggtaccgggcaggcgtcgagtgcgcctgtggcagcggcggctcgccgtcgtcccgttcgcagtgggctcgggattttttacaggcggcgccctgctacagaggctagcattgatcagtgagacagtgacatgatcgggagggcttttactgaggggaggggcagagcagatatagttaactagtagtactattagtaaaaaggcaagcgtgcttagtaggctttagcagctcatgcattgcatgcatcatgggttatttacgaggagatgtgctctttgtcttttgtcgattctggctctggcctcggacacagactgatcgatcatgccttggcg

SEQ ID NO: 24511 - DNA, 2019 bp, Zea mays
  Clone ID: LIB3632-018-A12_FLI
cttgatttcactgcggccaaagtcgctgccctgccgagtctcgactctccacctcagccctcagggccgccggctccttcctcccctctcctccgcctcgacaagcgtcggcgagatggtgaagaggagcaagaagagcaagagcaagcgagtcacgctgcggcagaagcacaaggtgcagcgcaaggtgaaggagcaccaccgcaagaagcgcaaggaagccaagaaggccggcaaggccggccagcggaggaaggtcgagaaggaccccgggatccccaacgagtggcccttcaaggagcaggagctcaaggcgctcgaggcccgacgcgcgcaggcgctccaggagctcgagctcaagaagcaggcgcgcaaggagagggctcagaagaggaaggcaggattgcttgaggacgaggacattgctagtttggcatctgcagcttccgcacagggcagtgagtttgcagcaaaggagaatgctcctttattagtggcaaagatcaacgatcattcagagaggtctttctacaaggagcttgttaaagtaattgaagcttccgatgtgattatggaggttcttgatgcaagggatccgctgggcacccgttgcattgacatggaaaagatggttaggaaggctgatccaagtaaacggattgtactacttctcaacaagatagatcttgttcccaaggaggcggtagagaaatggcttacatatctaagagaagaattgccaacagttgcttttaagtgcaatacccaggagcagaggaccaagctgggatggaaatcttcaaaattagataaaacaagcaacatcccacaaagcagtgattgtcttgttgccgagaatctaatcaaattgcttaagaattattccagaagccatgagctcaaactggcaattacggtgggtattgttggacttcctaatgttggcaagagcagtctgatcaacagcctgaagaggtcccgagtggtcaatgtcggttctactccagggattactagatcaatgcaagaagttcaattagacaagaaggtaaagttgttggattgtcctggtgttgttatgctcaaatcttccaacagtggtgtgtctgtagcccttcgaaactgcaaaagggttgagaaaatagaagatccagtcgctcctgttaaggagatcctaagtatttgcccacatgagaagttgctgtctctgtacaaggttccaaactttggttcagttgatgattttcttcagaaagtagcaactgtacgtgggaaattgaaaaagggtggtgtagtggatgttgaagctgcagcgagaattgtgcttcatgactggaatgaaggtaaaataccatattttacactgccgcctaaaagagatgctggggaagactcagatgcagtgattatatccgaggatgggaaagaatttaatatcgatgagatttacaaagctgaatcttcatatattggtggtttgaagtccattgaggagttccatcatattgagattcctcctaatgctccactggcgatcgatgaagagatgctagaggatggtggcaagaaaccaagcgaagccatccaggaaagccgggacagggaggagcaaatgcccgacgtgaaggactcaggaggaagcaaggcagccagcgccagcacgcagaacgacaagttgtacaccgccgacgccatactcgaccctcacaagaggaaagcagagaagaaacggcgcaaggcgagcaggcccagcgcgctgaacgacatggacgcggactacgatttcaaggtggattatcggatggaggacggtgggagcgagggtgcacatgcggatgatgaagatggcggagatggatccgaggataatgaaccaatgaccggtgtcgatgatgcgtgaattgtcatgtcgagtgccactttgccagaaatgatttgtcccaatgggggttgggaaattaacccacgacagttttgtgcttagtttgtttcttcaatgaaagatgacagttgcgtttt

SEQ ID NO: 24512 - DNA, 1409 bp, Zea mays
  Clone ID: LIB3632-018-B9_FLI
gcccgccctgccctccaccttctcccggcgcaataaacaagtcgaggcgaggcgaggcggcagcggcggcggcggcattgccgagatttccgtgattcttgcgcttgttagttgtgctgtgtatagttgggccggccgggggtggttccgttcagttccttatctgttggagtagtcgtcggcggcgatgggtatcctcgcgctcatcaccggcaaggcgggcgccagcgggttcgggtcggcgtccacggcggagcaggtcaccgacggcgctgacgccagccgcctcaccgtcgctatcacaggaggagctagtggcattggtctggagacatcaagagtcttcgccctgagaggagcccatgtggtcatcgctgctagaaacacagaggctgcatcagaagcaagaaagaccatcatggagaagaacccaacggcacgtattgatgttctgaagctagacctcagctccctcaagtctgtcagggcttttgtggaccagttcaactcgatgaaactccctctaaacatcctgataaataatgcaggcgtcatgttctgcccttttcaactgtctaaagacggggtcgagatgcagttcgcgacaaatcatctaggacactttctgcttaccaatctcctccttgataccatgaaggccactgccaagtctacgggcattgagggccgcattgtgaacctgtcatcagtcgcccaccaccatacgtatccgaagggaattgacttcgataacctcaacgatgagaaaatatacaacgacaaaatggcttatggacagtctaagctggcgaacttgctgcatgcgaaggagctctctagaaggctgaaggaagaaggagcaaacatcacagttaacagtgtccatcctggattgatcatgaccaatttgatgaggcactcctttgttctcatgaaggtgcttcaggttgccacttacatactgtggaagaatgtaccccagggagctgcgactacttgctacgtaggactgagccctcaactcaagggagtgacaggaaagtactttgctgactgcaacgtggagaagacgagcaaactggcgaggagcgaggagttggcgaagcagctctgggacttcagcgaggagctgatcaagtctgcgaagtgagagccgaaagagctggatcagagaaaatgttgtggtcctgcttggcatctagtggtacaagtgatgactgattagtatatagcacggaggaggaacctgggcgatggctggacctcatggtgttcaggaataaaatctgcttgctttcgtacattaattagtccggtgtggcaaacatcaatttgtagtgctgtcaatatctgttcaatatacgtgcagctcagttctgacttgaaaaatgcagagtcgtgtttgcctg

SEQ ID NO: 24513 - DNA, 2386 bp, Zea mays
  Clone ID: LIB3632-018-C12_FLI
gttttcgatttccttcctacgcgtctcgcgttggcagcgcgatccttcggagccgacgaatcccaccagtgcccgcgccgcctccgcagacgacgcaactgacagtcaccgacgcgacgcggctcgcctcctccgcccttctgttcagcctcctcgcccgcgatggctccgggcgccgacgccggctacggccagtgggcggcggcgtgccccccgctgcggcggaacctgcagctgctagcgcccgacgaggttgagctagcaaaaatgctgttgaatgaaggccagattcacctgtttgaacactggcctgaaccaggtgtcgatgatgacaataaaagaggcttctttgatcaggttcgccgacttaattcaagctatcctggaggtctggtatcttacatccagaatgccaaaaaacttcttgcggattcaaaggaaggcaaaaacccatatgatggtttcaccccttctgtgccttcaggggaggttttgacttttggcaatgacaattttgtttcactggaaacagctgggataaaagaagcctgcaatgctgcatttgttcttgtagccggagggcttggcgaaaggcttggctacaaaggaattaaggtagcacttccccgggaaacaactactggaaaatgtttccttcaacactatatagagtctatcctggcttttcaagaggccagctgcaaaatggttgatgaggggtgccaaacaaagattccatttgttattatgacttctgatgatacaaatgcgctaactatcaagcttttagagtcaaactcctactttggaatggaaccatctcaagtgaaaatactaaagcaggaaaaagtagcgtgtctagctgacaatgatgcaaggcttgcattagacccaagtgacaagtataaaattcagacaaagccacatgggcatggagatgttcattctcttctttattcaagtggcttgcttgaacaatggaagactgaaggacggaagtgggttctctttttccaggatacaaatggattgcttttcaatgcaataccatcagcattaggtgtcagtgccaccaagggttacaatgtaaattctctcgctgttcctaggaaagccaaggaagcaattggaggaattaccaaacttactcatgtcgatggtagaacaatggtcatcaacgtagagtacaatcagcttgatccactccttcgtgcaactggacatcctgatggagattcaaattgcgagacaggctattctccatatcctggaaatataaaccagttgatactggagcttggaccatatattgaggagctcaagaaaacacatggcgccatttctgaatttgtaaatcccaagtatactgattcgaccaagacagcatttaaatcatccactcgtctagaatgcatgatgcaagactatccaaagacgttgcctccctcagcaaaagttggattcacagtgatggatacatggcttgcttacgctcctgtgaagaataatcccgaagacgcagctaaagttccaaagggcaacccttatcatagtgcaacatccggagagatggcaatttatagggcgaacagtcttattttgagaaaggctggtgctcagatagctgaccctgttgttcacaccttcaacggacaagaggtagaggtttggccacgcgtaacctggagcccacggtggggtctcaccttcaagagtgtcaaggagagagtgcacgggaactcttcagtttctcagaggtcagctttggtcatcaatggtcagaacgtcttccttgaaggcctctcgttggacggcactcttgttgtcaacgccgtcgatgaagcagaggttaaacttaccggtcatatacagaataaaggctggactatccagcatgtcgactacaaggacacctcggagaaggaagagatcaggatccgcggatttaagttggagaagattgagcagctagaggtgaactacacggagccaggaaaccatagcttgagtgcatgaaacaaaacattcttggttgacccgactagcttcctaccgattgggaatagttcgcattgcctcccagattctgggaggccattgccagcataagttgaagctgttcttctccttgccaaagaattgtactccctcagttgcattttagttcaaaattaaactagtggacaacaaatatttaagaatggtggtagtaataaggagccaaatatttaagaatggaggtagtaataaggaagccaagtgcttcaccaatcattccaaattcaatattctttatgtatatccgtactatttcatagccaaacgttttctcctcaccagtgtaatcggagttgattatttatctgggatctgatgttcatgttac

SEQ ID NO: 24514 - DNA, 1027 bp, Zea mays
  Clone ID: LIB3632-018-C9_FLI
caggcaggcaggtcggcgaggagggcaggaagaccgaagaccgagccgtgcgggggctcgggacgggaacgggacaggacctcaaaatctcagatccttcctgcccgcccgcccgtgcccgtcgacgcgtcgttcttgccggccgcgccccacctccgccctctcctcctccagggggatcggatacgccacaggctgcgcgatggtgctgtgggtcttcggctacggctccctcatctggaaccccggcttcgacttcgacgacaaaatcctcggcttcatcaagggctacaagcgcacctttaatctcgcttgcattgaccacagaggcacaccggagcatccggcgaggacctgcacgcttgaaaccgacgacgaggccatatgctggggaattgcatattgtgtcaagggtggtccagaaaaagagctaaaagcaatgcagtacttggagagaagagagtgtgagtacgaccagaagatatccattgatttctacaaggaaggagatcccttgaaaccagctgtgacaggcgtcttagtgttcgtttccactccagatccaattggcaacaagtactatcttggccctgctcctttgcaggatatggcaatgcaaattgctacagccaatggccctactggctataatagggattacctgttctcaatggagaaggcattagccagcattagccacgaagatgattcgatcatagagcttgcaaacgaggtgaggaaggtgctcaacagaacaaaggagaccaagatcactggtgccaatgcttccctgaaatcacatgcccctcttgtgcacctgtccgcgcttccagaaggcaccgttgtggactcgagatagctcgccttggacgttggacctctactcggaatctacttccagctcttgcatgtttgtggccatcatgtactgattttcccttttcaacagttgtcgtgaggctgtatcttctggagttaaaaaaaatgctaaaagccggcactaataatgatattaacttgaaaaatc

SEQ ID NO: 24515 - DNA, 835 bp, Zea mays; identical to SEQ ID NO: 23771
  Clone ID: LIB3632-018-D9_FLI

SEQ ID NO: 24516 - DNA, 1121 bp, Zea mays
  Clone ID: LIB3632-018-E12_FLI
gtctcggcggctctagaagacgatgggcaaggacgacgtgatcgagagcggcgctggcggcggcgagttcgctgccaaggactacacggaccctcccccggcgccgctgatcgacgcggctgagctggggtcctggtcgctgtaccgcgccgtgatcgccgagttcatcgccacgctgctgttcctgtacatcacggtggccaccgtgatcgggtacaagcaccagacggacgcgtcggcgtcgggtgccgacgcggcgtgcggcggcgtgggggtgctgggcatcgcctgggccttcggcggcatgatcttcgtcctcgtctactgcaccgccggcatctcggggggccacatcaaccccgccgtcaccttcggcctcttcctggcgcgcaaggtctccctggtgcgcgcgctgctctacatcgtggcgcagtgcctcggcgccatctgcggcgtcggcctcgtcaaggcgttccagagcgcctacttcgacaggtacggcggcggcgccaactcgctcgcctccggctactcccgcggcaccggcctcggcgccgagatcatcggcaccttcgtgctcgtctacaccgtcttctccgccaccgaccccaagcgcaacgcccgcgactcccacgtcccggttctggctcccctccccatcggcttcgccgtgttcatggtgcacctggccaccatccccgtcaccggcaccggcatcaacccggccaggagcctgggcgccgccgtcatctacaacaaggacaagccctgggacgaccactggatcttctgggtgggccctctcgtgggcgctgccatcgcggccttctaccaccagtacatcctccgggctggcgccatcaaggccctcggctccttcaggagcaacgcgtgatgagcggggcttggctgtggagcaatggcgggcgacctacgggcgggggaagtcgtgagcgaggagaatgacatcatcgatcgacttgggtgccggtggttggttcgggtcgccttttttgtttcagcagctgctgcgttgcgcgcgtgcgtgagatttggtttggtttcgttcccctgcaatgtaatcatgtcgtgactctcaagggattattccgctctgctct

SEQ ID NO: 24517 - DNA, 2003 bp, Zea mays
  Clone ID: LIB3632-018-G2_FLI
cttcaccctcccctcctccccatcgctaactcacaagagaaccaagtagacgagggagaaggagatggcgaagaagaaggagaaggcggtgaacgtgtcgggcaagccgcggcactcgaacgacgtcaaccgccccaatgacaagaagggcgcgggcggcggcgccggtggcgggagccggtccgcggctaccgtgcggcggctcaagatgtacaagacgcggcccaagagggaccgctccgggaaggtgctcaggaacgattttcagtctaaagagctccccaacacccgcatcgagcccgaccgccggtggttcggcaatactcgcgttgtgggccagccacagcttgaaatgttccgggaggaactccagagtcggctttccgacaacttcagtgtcatcctgaaagaacggaagctgccactatcgctcctgcaagatcatcaaaagcaagcgaaggcacatctgcttgaagttgaaccttttgagcatgcttttgggccaaagggcaagaggaaacgtccgaaactaactgctcttgactacgaatctttgctgaagagagctgatgattcccaagatgtgtttgagcaaaagtatgcttcatcaaagttgccaagggaggaagaagaagatggcttacgtgatctagtgaggcatacaatgtttgagaagggacagagcaaaagaatctggggtgaactatacaaagttattgactcttcggacgttgttgtgcaggtgttggatgccagggatccaatgggcactcgatgctaccatctagagagacatctaaaagagaactgcaagcacaaacacttggttttcttactaaataagtgtgatctaatccctgcttgggctacaaaaggatggttaaggaccctttcgaaggactatcccaccctagcattccatgcaagcatcaacaagtcatttggcaaaggatctcttctctcagttttgaggcaatttgctcgtttgaagaatgacaaacaagctatttctgtcgggtttgttgggtaccccaatgttgggaagtcatcagttattaacacactacggtcgaagagtgtctgcaaggttgctccaatacctggagagacaaaagtgtggcagtacatcactctcactaaaaagatatttttgattgattgtcccggtgttgtatatcaaaacaatgattcagaaactgatatagttctgaagggtgtggtccgggtgacaaatttggcggatgctgctgagcacattggtgaagttcttagtcgtgttaaaaaggagcatctccaaagagcgtacaaaattcaagattggtctgatgataatgattttcttgtccagctgtgcaggaccactggaaaacttctcaagggcggggagcctgatctgacaacagcagccaagatggtacttcatgactggcagaggggtaaaatccccttctttgtaccccctccgcagcaaagcgacggcggtgcatctgaaagtgctgaacaacctattgggattaccaaagaggacggagtaagcagcgacaggactgccgcagccatgaaagccattgcaggaataatctcgtcacagcagaacatgaatgtgccctgccataaggaaaacaatgcagacaatgaagacactgaaaatgcagataacgaagacattgagagttcagataacgaagacaatgatgacatcgagcctgcagagcgatctgagtgatctttgggtacagatgtggattattagagttgatatgtcaaggctaatgaatttgtcagcccaggtgttgtgtagctacttgaccatatcactggcgtgccagaaaaaaaagcatcatgttgagttgcactttttgtaactatcgtacctgaatctttgtaatagggcaagaagagcagttttgctaggtacctggttgtatcgggatgcttatctgtgctgtctactacaaatacagttacatctattttacttaaatcaagtggaacttatctct

SEQ ID NO: 24518 - DNA, 2204 bp, Zea mays
  Clone ID: LIB3632-018-G3_FLI
ccacaacccacaaggaggccagggaccaatcacagtcatcttctcccgttcacgtaacgtgcactagggtttatggtttagggcgaccgccgccgtcctacgtccagcggccaggttttcttctggccctctgcgctgactacaacccaccacctccgggttaggttttggatttggagacatggcggaagtggtggacaagctcaaggactacgatatcaagaaggagggagaagcagagatcctcctgcacaagaagaactccgtcttctttaatcccgtgcaggttcacaacagagacatgtccattgctgttttaaggacctttgttgccaagcgtaaggaagaacatgaagcgctggtggacaagaggaatacatcacataaaaaaaataaacaaagtgaaacatccaatcaaaatggagaggatgcgtcaactggccagcaagatgaaatggatgttgtttgtgaaaaggagctgaataaagctgaagatcaaattgatgatctgtcgaaagaagcaacagaaccttcttggaaagtaaccagagagcttaagccaccacttgttcttgaggctttggctgctactgggttgcggtctctccggtatgcccgtgaagttgagggcttaggaaaggtagttgctctggacaatgataaagcttctattgaagattgcaaacgaaacataaagttcaatggtgcttccgctactagtaaggtggaagcttacttggttgatgctcgaattcacatgctgacgcatccaaaagaatttgatgtggttgatcttgacccttatggatcaccatctatatttctcgactcagctgtacaggctgttgctgatggtggtctattgatgtgcactgccactgatttggcagttctttgtggtaccaatggagaagtttgttacgcgaagtatggttcattcccaaccaagggcaagtattgccatgaaatggctttgagaattctccttgccagtattgagagccatgctaatcggtacaagcgatatattgtgcctgttctctctgttttcatggatttttatatccgtgtttttgttcgagtattcacttctgcaagtgaaataaagaatacacctcttaaactttcttacatatatcagtgtgttggctgtgattctttccatcttcaatgtcttgcaaggactgttcagaagaagaataatggtgtgaagcatgcacctgctattggacctgttgttcctcaggagtgcagtgactgtggaaagaaatttaatgtaggtggaccaatatggtcagctcctattcatgaccaagactgggtactttctactttgacaggtgttaagtcaatgaaggatagataccctgcatatgataaaataacttcagttctaaatactatgtcagaggagttacatgacgttccattgtttttcagtctccataacatagcaggcactgttaagtgcacatctccatctttggttacgtttcggtctgcagttctaaatgcagggtatcggatctcaagcacccatgttaacccacttgggattaaatctgatgccccttgggatgttatttgggacatcatgcggtgctgggtgaagaatcatcctattaaggaacagccacgtgactcacctggcacggtgatcctttcaaaatcgccaaagctagaagcaaatttttcaagagcagttgctgccctcagcaaggctcagacaaataagattaaacgattccttccaaaccccgaacggcactggggtccgaaggtcagagcaggccggaagatcacgagcaaacatgtctctctgttggggcctgacgctatcaagggtgctgtgaacggcgatgactgccagaaagaaggaaacggtgctgagccagatagtacagcctcagaacccgaggggatcaaagacgttgaggatgagccctcaaacaaacgccaaaaaaccagcgacggcgaaccagcaagcgaaccttgatttgtttgtcaatctttcgcgtctccattgtgttgtgcctgtgcttttcttgtttgtaggtggtcgatggttatttataccacctgttggattttgatcgaacaaattgtggcaggtttttattaaacttttgttgcatgtgtgatgctcctcctagtcacagagggaaaagacctattaaagcataatatatagtataactttctgc

SEQ ID NO: 24519 - DNA, 1570 bp, Zea mays
  Clone ID: LIB3632-018-H2_FLI
cacgtgctgaggctttcgttggtctcttcgccggcgacgagcacccagcagttctgtagaaatggctgatggtgaggacatccagcctcttgtctgcgacaatggcactggaatggtcaaggctggttttgctggcgatgatgcaccaagggcggttttccctagcattgttggccgtcctcgccacactggtgtcatggtagggatgggacagaaggacgcatatgttggcgatgaggcacagtccaagagaggtattcttacgctcaagtacccgattgagcacggtattgtgagcaactgggatgacatggagaaaatctggcatcatactttctacaacgagcttcgtgttgccccagaggagcaccctgtgttgctcaccgaggctcctttgaacccaaaggccaacagggagaagatgacccaaattatgtttgagactttcaatgttcctgccatgtatgttgcaatccaagcggtgctctcactctatgctagtgggcgtactactggtattgtactcgactctggtgatggtgtgagccacactgtgcccatttacgaaggatatgcccttcctcatgccattcttcgtttggatcttgctggtcgggacctcacagactccctcatgaaaattctcactgagaggggttactccttcacaacctcagccgagcgagaaattgtaagggacatcaaggagaagctagcatatatagcccttgactatgagcaagagttggaaactgccaagaacagctcttcagttgaaaagagctatgagctacctgatggacaagtaatcaccattggtgcagagagattcaggtgccctgaggtcctcttccagccgtcgatgattggtatggaggctgctggaatccatgagacaacatacaattcaatcatgaagtgtgacgtggatatcaggaaggacctctatggtaacattgtgctcagtggtggttcgactatgttcccgggtatcgctgatcgtatgagcaaggagatcacttcccttgcaccaagcagcatgaagatcaaggtcgttgcaccgcctgagaggaagtacagtgtctggataggagggtcgatcctagcctcgctcagcactttccaacagatgtggatatcgaaggaggagtacgacgagtctggcccggcaattgttcaccggaagtgcttctagggtttcacaagttcctcgtcgttacctagtctcaaattatgtcccctccatttctcgagatatgtgtggcagatttgcatgatacgtttgtttgtttccatcggacctgaagtcttcttggggataggctcccccctttgtatgttgtggctccaatccatgtgcgagcacgctgtgtctgtcgtgacacctggttcgtgagatgggttgtcaaacttgattggtttgttgtgcgtggctggaagagctgatagttatatatttggcttggactgtgccgcttgtatgtatctgaattctgaaagcgttgtaatctgagcatccgtgcaaagtatgaatggcccttttatatgggctggattttccggtttctat

SEQ ID NO: 24520 - DNA, 1061 bp, Zea mays
  Clone ID: LIB3632-019-B11_FLI
caatcatccaccgcgccgccgcagaggcctcgtcctcaccttccccgtaggaagccgaagtacagccagcagcgtcgccatcagcaccgatcatggccgactacgagcaggagcaggatatggaggtggaggcactgcaggccatcctcatggacgacatcaaggagatcgacccgagtgagagtgggatcgccaccaccgcccggtgcttccagatcctactctctcctcaggatgatgattttgatgagtcagcttatgtcccagttcaactggccctgatttttgcgcacactgagaagtaccccgatgaacctccactactaaatgtgaaaagtgtacgagggattaaaccacatgatcttgcatccctgaaggaaaagcttgagcaagaggcaaaagagaatcttggcatggctatggtctacactcttgtttcatcagccaaagagtggctaagtgagatatatggtcagaatggtggtgatgaggaacctgaagaaactgaagcagaagaggaggttattataccacatggtgaagctgttactgtagagagctttctggcgtggagagaccgatttgaagctgagttggccttacagcgtgctaaacttatgccagattcagctcttacatcctcaaaggaaaagaaactcacaggacggcagtattttgaaagtggaaggcatgcagtgaaaggagcaagcacagttgctgatgaagatgaagaagaggaggaggatattgaattcgatgatgattttgaagacgatgaagaggacatgcttgagcattatctagctcaacaatcagagaactcagcagcttaaccttctaggccaaacaaagtaccttttcgggcgcagctttaccttaggaagccaaatgttgttatatgttgcaactgtagctctagtgcgcactattttttttttatgtttctcatcatttggttgtatttgtggatgctttctagttttatcaagggggctgtgggttctcattaatatatacgctggaggagatagaagatcaagctgcctaatacttcgctgtat

SEQ ID NO: 24521 - DNA, 1734 bp, Zea mays
  Clone ID: LIB3632-019-D11_FLI
cgcgagcagcgtttgcttccctttccctgctgtgctcggcctcgccgcttcctctgccctggctcaacgattcctccgcttttcctttttcaaaatcgccctttcctcgtgcgcgtgtcgactccttcctgctcgccgccgggtctgggctgggtgacgctgcctcggatgaggccgcgctgaccggagccgtagccggaccacccgcccacccatggcgcgcccgcagcgcgtgtatgaggcttggaaagggaacaataaattcttctttggtgggaggctcatattcggacctgacgccaagtcactgatcctgtctgtttcgctcattgtggccccggtattggtcttctgcggattcgttgctcggcatcttcgccaccacttcccggcttacaatgctggatatgcgattcctgcggtagctgtagtgtttatgatttatgtgctagtcctgctcttgattacatcagcgcaggatcctgggatcgttccccgcgcagcccacccgccggaggatgagttttcttatggcaacgctttgtctgggggcacgcctgggaggctacaattcccccgtgtaaaggaagtactggttaatgggatgcctgtgaaagtgaagtattgtgacacctgcatgatttatcggcctcctcgatgctcacactgttcgatatgcaacaattgtgtagagcgctttgaccatcattgcccctgggttggacaatgcattgggcagcgcaattaccggtactttttcatgtttgtttcttcctcgactcttctctgcatttatgtatttgcaatgtcagccttgtacatcaagtttatcatggatgaggattatccaacagtatggaaggctttcaaacactctcccgcttctttggggcttctgatatattgtttcattgctctctggtttgttggtggactcactggatttcatatgtacctcattagcaccaaccagaccacgtacgagaatttccgatacagatcagacagcaggcctaacatctatagccaaggatgtctgaataactttctacaagtcttctgcagcaagacaaagccttctaaacacaagttccgggcctacgcgcaagaggaagtgcggcctccaacggttagcttcggcagggaggtcgatgaggaaccggtcggcgggcctcggccgaaagttgaggacgatcttgaaattggtaccgatcttctgaagatctctcagcggcgcaactacgaggacgtcgatgcagaaacgggaggccgtcgcagtcgcagcagcgaggtggaaggcacggccagtgccagacctgctgtggcgtgctcggagtcccagatccctgcggtcgggggtactgacgtgagggtgcggcactcgagctgggaccggcgaagcgggaactgggacatgtcgtcggctgtgcttacgaggagcgcgtcagatgtgattggacgtagcagcgtgtttgccgcgaacgctgcacgtccatctctagaagagactcgctagcgaactgtgtctgtgcatccaggaaacatgtgcgagcggttcggatagcgaggccatttgactcgtggtggtggtgacacacacccaggtgttttggctttggctgccttgattgggttttgttaccgacccttgtcagttgtcatgtatggacagttatttttagtcaaagaatctgcccccattgttggcgccatgttcgtgtgcctgtaaattgc

SEQ ID NO: 24522 - DNA, 2553 bp, Zea mays
  Clone ID: LIB3632-019-D8_FLI
catcccagttcccccggcaaacacactcggttctcccgtgcctctcgccgtctcgcgtcgcaacgactggccggccgccgccgccaccgccgacctacgtgccaaggtccgcatattcggaaccttcgccggcgagcacccaccaggattttttttttgtacatctaagatgtacagggcctcgaatttcatacctgatcctaatcaggtgctcctagatgccaaaccattaagatcgttagctccaatgttccctgcccccatgggagtcaatgttaatcagtcaagtacaccaccattggtctgtgtcactccggttggtcaattttcagcagggtttggtgcaggtaaccttcctgcctttggatcgttcactactttcagtgccacttcaaatggtgtttcttatgcaggcaccagtgctaatggtgccattgatgccacccctatctctgcatacaaaacaaggtcaaacatatcacttgatggtgatgatgatccttactcgggtaaccaaactgaacggaagcctaggagaggccgacctcccggttctggtcgtgatggctcaaatggtaagttaaagcgccctaagcccacttacaagaattttgttgctggcaaagagcttgcctttctggcagcttcatccgatcccagggatatcgtggaagcagttcacatgacctttgaggcactccggcgaagacatctgcagatggatgaaacacaggacgctagcaggcgtgcagacctgaaggctggtgccatcatgatggcaagtaacatcagggcaaattcgggcaagagggtaggaactgtccctggagttgaaataggagatattttctatttcaggatggagctgtgtgtcattggattgcatgcacctagtatgggaggcattgattacatgactagtaaatttggaaacgatgaggattctgtagccatatgtatcgtttccgcaggaggttatgagaatgatgatgatgacacagatgtgctggtatacagtggtcaagggggaaatagtaggaatactgaggagaggcaagaccagaagcttgagaggggtaacctagctcttgagaggagtttgcataggaagaatgagataagggttgtacgtggcttcaaggatccattttgcctaactgggaaaatttacatatatgatggcctgtacaaaattcatgagtcctggaaggagaaaacaaggtctggtatcaattgcttcaagtacaagctgctgcgtgaacctggacagcgtgatggagctgcattatggaagatgactcagaaatggatagatgatcctgctaccagaggcagggttctactagctgatctgtcatctaaggctgaaactattccagtttctcttgtcaatgaggttgaccatgagaaaggacctgcacatttcacctatactaaccaggtcaaatacgtgaggcctctcagttctatgaaaaagctgcagggctgtggatgccagagtgtttgcctgcccggtgatgccagttgtgcttgtggacaacataatggaggtgatttaccctacagttcattaggattattgtcatgccgcaaaccgatgatctatgaatgtggtgaatcttgcaactgttctacaaattgccggaacagagtgacccaaaaagggcccaggctacattttgaggtcttcaggaccaccaatcgaggctggggtcttcgttgctgggaacctgttcgtgctggttcatttatatgtgagtatgctggtgaggtcattgatgaactcaaagttaatttgaatgacaccgaagatgattacatttttcaaactgtatgccctggtgagaagactttaaaatggaattgtggacctgaactattaggtgaagctagcacatatgtatcggctgatgaatttgagccactgcctatcaagataagtgcaaaaaacatgggaaatgtctcccgtttcatgaaccacagttgctcacccaatgtcttctggcaacctgttcaatatgatcatggagatgatggacacccacatataatgttctttgcactgaaacatattccacccatgacagaactgacttatgactatggtgttgctggagctgaatctagtggttcaggctctcgtagaacgaagaactgcatgtgtggatcacaaaactgccgtggactattttgatgggttaagatccttgctctttgtggttaatcatacaaaccactttcagctagatcctttcttagtctccggatgatatgagtatgactgatgattccaattgctgccatgtgtactgtgaagacagcaagttgttgtcaaactgtagaatttctgttgccctgcacggcatggtggccgttctcccaccatttgttcaaatatttatgggggtgtgattgatgtatttcttctgctaatcttgtccacctgctgcaccggtttgtgtaacttgttatgatccctgtttgctctggacgcctggttgtttaaccgtgactccttggatctggtcatgtaaattatcctggtttaggatt

SEQ ID NO: 24523 - DNA, 688 bp, Zea mays
  Clone ID: LIB3632-019-E10_FLI
gctcctcccaccagtgagatcgatcgagcttccacctcctgtcatcctcctcctcttcctcctcttgcaggtcgcagctgagcagcaacaaggccggaaaggatgtcgtggcagacctacgtcgacgagcacctcatgtgcgaggtcgagggccaccaccacctcacctccgccgccatcatcggccacgacggcaccgtctgggcccagagcgccgcattcccgctgttcaagcctgaggagatggccaacgtcatgaaggacttcgacgagcccgggttcctggctccgaccggcctcttcctcggccccaccaagtacatggtcatccagggcgagcccggcgccgtcatccgcgggaagaagggatctggaggcataaccgtgaagaagaccggggaggcgctggtggtcggcatctacgacgagcccatgacccccgggcagtgcaacatggtggtcgagaggctcggcgactacctcgtagagcaaggcctgtaaacggaattgcttcagtccaatcggaattgtttataatttgttgttgtcgttccggcaaataattttgtgtggtttcacctaaaagtttggttgtcgtatgatttgtaaaccccgaacagtatctatatgtgattgaactgcgcctacctattcttttattatacgggaatatgtatgtatttcgtgc

SEQ ID NO: 24524 - DNA, 2779 bp, Zea mays
  Clone ID: LIB3632-019-E2_FLI
tccagagcctgcagaccccgacgccgctcgcgttcgggaccgtaccgccctcccctgccgtatccgcccacacaccctccctccccgccgcttccgcccggtatcccccactcgcgcggccgtaggacacggccacgtgcgccgcctcaaactgggggctgtggctggggcgggaggagcggcggcgttagggtttccccatggacggtggcgaggatcggacgttcaaggcgaactttaccagcgagggggtgacgatgctgcaggaccgcgtcaaggagaagctcagtgagctcatgggcgactactccgacgacactcttgccgagtatgttgtagtattgctaaggaacgggaggcacaaggatgaggctgcaaaggagctacatgtttttttaggcgatgacaatgatgcatttgtatcctggttgtgggatcatctgtcctcaaatttgcacctttatgttcaacctaaagctgcctcttctaaggatgacactagaagcagtcacaatgctgccagaggattgcctgttcacagtgtgataagcagcacacaagttaatcatgaacctgaagctgaaacccagaagacagtgataactcataaaaaaaaaagattggggtcatcgaaaaagagattggggaacaattggtcgaggtcaatcagaaacagttcctcttagaagcgttgtcgacaatgtttctcttgcaaaggaaaaggatcttcatgagtcacatgcagatgaaaaggcttttcataaatcacattctgtaagacgaacccgctctcctgacatgcataaccacagaaagaggagcagagaggcagatgtgcggtctactaagagtgcaacacacccagttaatggtgcaccacgtcggcttcttcagtttgctgttcgtgatgctgtcagaactgtgcccccagttacttctggttcagaatcagcttccaagcgactttgttctgtagtgtctacattggcttcagattccacacttgatattactcatattaggttacagaaaacaaattcagatttgagaataccagttgccacagcagcactaagagctgcagctgaggctgctgaagatgctctcaaggatagcttttgtggaagtgtttttagtagattgggcagaatgcccacaataaattctagtgaacaatcacctgatcgtagatcacaagatcttgaaggcaaagaatatgagaatatagataacatacaagctgaaaatcaagttgaattttatggaagaaatcaacatggtggcagtgatgtttacatgcgtgatcggagaacagaggaagccacaggttctctttctaatattgatgagtatggtcacaacagttctgttaggtataatggattgggttctctccgaagtgcattgcctgctagtggaggtaaagagtcattagtactggggtacgtaagaggagcttctgaagtacgaagcggaagattgatagctcaggggccacctgctggttcaggaccaagatcatctgaaaagatcctaaatgtttctggtaacactaagacacagaagcttcgaactcatgtaactagggatgcccttgcatttgaccctcaagtgccaatggagaaggtttctggtgcaaggaagtcgataggtcaggggccacatgctggttcaggaccaagaccatctgaaaggattctaaatgtttctggtaacactaacacacagaagcttccaactcatgtaactagggatgaccttgcatttgaccctcaagtgccaatggagaaggttgctgatgcaaggaaatcacatgtgaagattgcacatgctaacgatatgtccatgacaactgataagtccaaagatttgatacagtcaagttcaatgctggaggcacaaaaggctacatcaggtgctgctggatcaaatactacaggtcaacccgaaggtggctctgattctagaactgtctttgttagcaacgtacattttggtgcaacaaaagatgctctttctcgacacttcaataagtttggagcgatcttgaagacccatattgtgaccgatggtgtcactggtcagtcaactggctcagcgtatattgagttcttgcacaaagaatcagcagagcaggcgttaaccctgaacggggcatcatttatgttacgcattttgaaggtcgttcggaaaaactccactgaagcaacccgatcgcctggcttgcttcgtgtttcgcggggatcaccatttgcttcaaggctcattagaactgcatacccaaggccaacgtttcctggtgcaatccgtggacgactgccactcaggggtgttgcccagagcttacagtggaagcgcagtgccacagattcctcaaatgctgtaaaaccaagtcaggctgcaccttcagctcctgggaatcagttggtcaccccgaccccacgaagcttcacctacacacgcacggagccaaaaccaaatgacggtgcgatggcttgactgctcagctgcagcatgccgcagctcctgatgaatctcgcagaaagagttcgtgatactgttacgtggttcattcagctgcttttggtaaatatttaagtagctgcagatgttagtttgtagcaggctggtttttgtggaccaaaacctttgagcgatattctgtgaggttttctgtgctgtttttcaccgtcagcacatattctgtgctggctggctgttcggagttcgtggatggagagtaaaatatatatataaaaagtggtagtaagggaaaaca

SEQ ID NO: 24525 - DNA, 719 bp, Zea mays
  Clone ID: LIB3632-020-A4_FLI
tgacggttgctctagatccgttcatcctggtggttttgtgaggtcgaaagcggcgagcgaattagaagatgctggacaagctgtgggacgacgtggtggccgggcctcgcccggagacgggcctcgagaagctccgcaaggccaccaccgcccgcccgctcgtcatcaacaaagacgcggacggcggcagctacaagcgggcgcagtcgacgccgtcgaccccgacgacgccggtgacgccgtcgtcgtcgacgacgccgcgcggcgccggcaacgtgtggcgcagcgtcttccacccggggagcaacctggccaccaagggcatgggcgccaacctcttcgaccggccgcagcccaactcccccaccgtctacgactggctctacagcgacgagaccaggagcaaccaccgctagatcgggcgagatggatggacagtgaagaggccatgtttgctggtccttgtggttatctaaaacgcacgcatgctctattatagctagtcatcactatatatatacttgtgtttgtgtattgttgttcttgttctgctggtgtctccgccgtttaatttgacctatgttatggagtgagtgatatatgtgccgtcactcctagtatatagtagtgagtgactagttggtatgtgtagtactgtactatcttttctccatatgcatgttttgccagcgcgtaatgaatgtaatgtcagtactgct

SEQ ID NO: 24526 - DNA, 1257 bp, Zea mays
  Clone ID: LIB3632-020-A9_FLI
gcagcggctcatttttgccggcaagcagctcgaggacgggcgcacgctggccgactacaacattcagaaggagagcaccctccacttggtgctgcgtctcaggggtggcatgcagatcttcgtgaagacacttactggcaagacgatcacccttgaggtggagtcctcggacaccatcgacaatgtcaaggctaagatccaggacaaggaaggcattccaccagaccagcagcggctcatctttgctggcaagcagctggaggatggccgtacccttgcggattacaacatccagaaggagagcaccctccacttggtgctgcgtctcaggggcggcatgcagatcttcgtgaagacacttactggcaagacaatcacccttgaggtggagtcctcggacaccattgacaacgtcaaggccaagatccaggacaaggagggcatcccaccggaccaacagcgcctgatcttcgccggcaagcagctggaggatggtcgcactcttgcggattacaacatccagaaggagagcaccctccacctggtgctccgcctcaggggtggcatgcagatctttgtgaagacattgactggcaagaccatcaccttggaggtggagtcgtctgacacaatcgataatgtcaaagccaagatccaggacaaggagggcattccaccggaccagcagcgcctgatctttgctggcaagcagctggaggatggccgtaccctcgccgactacaacatccagaaggagagcaccctccacctggtgctccgcttgcgaggtggtatgcagatctttgtgaagaccttgactggcaagaccataaccctggaggttgagagctccgacaccatcgacaacgtgaaggcgaagatccaggacaaagagggcatccccccagaccagcagcgtctgatcttcgctggcaagcagctggaggatggccgcaccctagcagactacaacatccagaaggagagcactctccacctggtgctccgcctccgcggtggtcagtaagccatgggtcatttaagctgctgctgtacctgggtatctgcgtcgtctggtgccctctggtgtacctctatatggatgtcgtcgtctaataaacatctgtggtttgtgtgtcatgaatcgtggttgtggcttcgttggtttaatggacctgttgtgtcctctgtgtgttgtacccaaaactcttctgcagcagtatggctcgaatccttatgaagtttgatgtttgaact

SEQ ID NO: 24527 - DNA, 830 bp, Zea mays
  Clone ID: LIB3632-020-E5_FLI
cgcttcctcccgatcttaaccacccgccgcgccccctcccgccacccggcttcctctccccctcttcttcctccctcaaaccagacgctcgccccccatttccccatctctcttcttcttcttcttcttccccatccagaggaggaaggaagaagaataagcaggaggcctctcccccccagcccagccaccccgtagcgacgacggagggcggaagaggatgagcgcgtccaggttcataaagtgcgtcacggtcggggacggcgccgtcggcaagacctgcatgctcatttcctacacctccaacaccttccccaccgactatgttccgacggtgtttgacaacttcagtgctaacgttgtggttgatggtaacactgtcaacctcggcctctgggacactgcaggtcaagaggattacaacagactgagaccactgagctatcgtggagctgatgtttttcttctggctttctcactgatcagtaaagccagctatgagaatgtttcgaagaagtggatacctgaactgaagcattatgcacctggtgtgccaataattctcgtagggacaaagcttgatcttcgagatgacaagcagttctttgtggaccatcctggtgctgttcctatcactactgctcagggagaggagctaagaaagcaaataggcgcgccatactacatcgagtgcagctcaaagacccaactaaacgtgaagggtgtcttcgatgcggcgataaaggttgtgctgcagccgcctaaggcgaagaagaagaaaaaggcgcagaggggggcgtgctccattttgtgatctaataatgatcagt

SEQ ID NO: 24528 - DNA, 1450 bp, Zea mays
  Clone ID: LIB3632-020-F10_FLI
cacacaccacacctcccgaactacaagtttcgcttctcgtcgcgacgactgggcgagaccgccgccgccgcctgagttctgtagaaatggctgatggtgaggacatccagcctcttgtctgcgacaatggcactggaatggtcaaggctggttttgctggcgacgatgcaccaagggctgttttccctagtattgttggccgtcctcgccacactggtgttatggtagggatgggacagaaggatgcgtatgttggcgacgaggcacagtccaagagaggtattctcacgctcaagtatccgatcgagcatggtattgtgagcaactgggatgacatggagaaaatctggcatcacactttctacaacgagcttcgtgttgccccagaggagcaccctgtgttgctcactgaggctcctttgaacccaaaggccaacagggagaagatgacccagattatgttcgagactttcaatgttcctgccatgtacgttgcaattcaagcagtgctgtcactctatgccagtggacgtactactggtattgttctcgactctggtgatggtgtgagtcacactgtgcccatttatgaaggatatgcccttccccatgccattcttcgtctggatcttgctggtcgggacctcacagactccctcatgaaaattctcactgagaggggttattccttcacaacctctgccgagcgagaaattgtgagggacatcaaggagaagcttgcatatatagctcttgactatgagcaagagttggagactgccaagaacagctcctcagttgaaaagagctatgagctgcctgatggccaagtaatcaccatcggcgcagagagattcaggtgccccgaggtcctcttccagccatccatgattggtatggaggctgctggaatccatgagacaacatacaattcaatcatgaagtgtgatgtggatatcaggaaggacctctacggcaacattgtgctcagtggaggttcgactatgttccccggtatcgctgatcggatgagcaaggagatcacttcccttgcaccaagcagcatgaagatcaaggtcgtcgcgccacctgagaggaagtacagtgtctggataggagggtcgatcctagcctcgctcagcactttccaacagatgtggatatcaaaggaggagtacgatgagtctggcccggcaattgttcacaggaagtgcttctaggtttctgccaagttcgtcaagtgcttttagggttcgccaagttcatcatcgctacctagtcttaagttatgcccccttcatttcctgagatatgtgtggcagatttgcatcgttttggtatttcgtggctccatgtgtgagcatgctgtgtcctataacctggtttatgagatgagttgttaaacttgcttggtttgattggttttacctgtaagagttgatagttatat

SEQ ID NO: 24529 - DNA, 1891 bp, Zea mays
  Clone ID: LIB3632-020-F4_FLI
ctggaacaaaaagaaaaaaaacacgagaaaaatcaaatcaggagacggggattccagagagccccgttcgggtagggaagggaaggagaggcgaagcggaggcgagatgggggcggccgaatccgtgccggagacctccatacacgaattcaccgtcaaggattgcaacggcaaggaagtgagcctggaaacctacaaggggaaggtcctccttgttgttaacgtcgcctccaaatgtgggttcacggagaccaattacacgcagctgacggagctttatcagaagtacagggacaaaggtctgttctttgcctgatgtggttcttgatctgttgttgcgcctgaaatgtgaatctctctggaagttggtgcgtagaagtgggtaattggagtagtgcacgttgatgcttgttggaacagtggttcttgtcttctgtttgaagtggaatggcaaaaaatcacgaaaaatattctcctgaaaaaagtgtgcgagtagtcttgcccaagggagattttacattgcttgccacacagcattcataccaaaagctttgtttacctgtagctcatttcttcaactattttcagacatgcatgtgttttatgcagcttagattagataggcagctggtgaagtgcgcatacaatttcattgcattcgcttatcaaatctgaatgatctcccgttttctggagtgcttggatagtagttctaacttgcagataccttttgaggatcagcgaagggttctgaaaggagcctgtgagaaccctgtttcccaaagaagatggtttgtttccttgaggattgttttcccaaatttcttcgacaactaaaattagcttccacctaacattttctggctctcagccaacattgcactgtttggtgaaattaaataaaaattgtatgactgtttggcgaaattaaatcaaaactgtatggagtttaaatgacgctagaatgataatgtttttcttgctactaaggccgtctgcagtagtctatccatagtttacccaaaaacattgttttgcactgtagactgtattgttcgcagagtggagtttaaatataggtatggggatgtgtaagctacttgagatagtctaaggcatcaagtactgtacccacttacacttgcagcaaatttgctctgttgtgaattcagtatatggctatcaaacaatcccattgtcttttgcaactatgcctgtgtgtactttgattcagtctgcgcttgatattccattgaaatggttttattctctagatctaacagaaactgattttacttccaatcttgctagacttcgagatattggcattcccttgcaatcagttcttgcgacaggagccaggtactgatcagcagatacaagactttgcttgcaccagatttaaagctgaatacccagtttttcagaaggtgcgcgtaaacggaccagatgcggcgccggtttacaagtttctgaaagctagcaagcctggtttgtttgggtcatcaaggatcaaatggaactttaccaagtttctggtggacaaagatgggaaggtcatcgagagatacggaacctcgacagctccaatggcaattgagaaggacatccagaaggcccttgaggaataattttttgtgagcttgtctcgtctcatccaccacacacttgcagcagaaataggcacttgctgaaatatttcgtcgtagtaacattcagaccggacgtctttgcttatctgtagtaaaaattctgtgtaatgttaccctccttttcgccttccgttcgtgtaagtagaggttgtattaagtagccatcatctgctagcttttgccctttctgtgtgaagaagtgaagacatggtatattgatgcaaaacttaacgttggtg

SEQ ID NO: 24530 - DNA, 1021 bp, Zea mays
  Clone ID: LIB3632-020-G5_FLI
ctcatctcaatcgaatggcgcagtgaagtagcagaccgaggaagccactccaggactttgctcggctgacaccaggaagatgagctcgctacacgccacacgagcggagcttggcctggttgtcctgtacctgaacaaagccgaggcccgggacaagatctgcagggcgatccagtacggctccaagttcgtaagcaacgggcagcctggcactgcgcaggaggtcgacagatcgaccaccttggctcgcaaagtcttccggctcctcaagtgggtcaatgatctgcatgctcttatcagcccgccggccaaagggactccgctcaccctcgttctgcttggcaaatccaaaaacgcgctgctttcgacgttcttgttcttggatcagtttgtgtggctcggacgaacggggatcgtcaagaacaaggaggcgacggaccgcgttgccaggttatccctgtactgctggatggcttcttctgcctgtgcaggtctagttgagcttggagagcttaaaaggctatcgagatcgatgaggaagcttgcaagagagctgagggacacagataaatatgagaacgagcagtaccaggacaaaatgaggcagtcagatgaacggctcctggccctggtcaaggcggccatggacgtggtcgtggccgtcgggcttcttcagctggcgcccaagaaggtcactccgagagtgacaggagcctttgggttcgtcacctcgcttatctcctgctatcagcaacttccttcccgcgctcctgttgccaaagtcaaagtttgagaggtgtcgccgtcctagtaaaaaaaaaagaggcgacgctggaaatcgatctctgcttcaacaatggatcgtaatataattttattatgcgaatataaggcaggctagctatgtattttttttattaaaaaaatagtacaacaaaatagaacaccagtgattgcacgtatgggcttatcactatcttctctttttgcctagcaatggacaagtaatgttcacgtgatt

SEQ ID NO: 24531 - DNA, 2247 bp, Zea mays
  Clone ID: LIB3632-021-D5_FLI
tctgtatgagcgccgagaatcgagtttgcgctctcctttccggctttccgcccaaacagccgtcgggcgtcccacggccgccgcccctgccggagatacgcgtagccgggagttaagggatgagtcctcaaatgctgttattggaaacatcttaagttagagtaagttgctgaaactatggaagaggttcaaaactgtgtgatgaagctgcggagcaatccaaggcggcacagggataaagtgtatgttggctgtggggctggatttggtggagacaggctaatggctgcttataagttgctgcagagagtcaaggagcttaattacctagttctcgagtgtttggcagagcgaactctggcggatcgataccgaattatggtgtcaggaggcaaaggctacgatcctcgggtcaaagagtggatgtctttgcttctacccttggcttttgaacggaaagtttgcatcataactaacatgggggcaatggatcctcttggagcacagaaagaagtactgaacctggcatctgtcttgggactggagataacagttgccgtagcttatgaatcatcctttgaaactcaaggaagccctgtattgtccgatgaatcaacaggagggagagggggatgtagcacatatcttggggcagcttcaattgtacattgcttggaaaactataaaccacatgttgtcattacttcacgggttgctgatgcttcactcttcttagcacctatgatctatgaattaggttggaattggaatgacacacagttggcacaaggaacattagcaagccatcttctagagtgtggctgccaactcactggaggatatttcatgcaccctggagatgcatacagggattttccttttgaacaacttctggatttgtctctcccatttgccgaagttagttgcagaggagaagtcattgtcagtaaggtagatggcagtggaggccttttgagcccccatacatgtgctgaacagcttctttatgaagttggagatcctgcaaactacataactcctgatatggttgtagatttctgtaatgtacagttccatcaaatatcaaaagacaaggtcagctgtgatggagcaaaaccttctaatgcttgttgccctgagaaactcctgcaattatctcctactgaaagtggatggaaaggctggggagagatctcatatggggggcatcaatgtttaaagcgtgcccaggcagcagaataccttgtaaggtcgtggataggtgaaaggtacccaggcattaatgaaaaaattgtctcatatgtcatgggctatgatagtttgaaagctattggaggtgatgaggatagttacttggccaagcaagtattggatgtaaggcttcggatggatggtctcttcgagcttgaagagcatgctgttcagtttgtcgaagaatttattgctctatatacaaatggtccagctggtggcggtggaatcagcactggacacaggaaggaaattattctgcaaaagatgctggttgatcgggaaaacatcttttggcgatcgcatgcaaagaaggcgagcattccctgcctgcataatcaagctacatattctgaaacaggtcaggcacgtatttcacaagcgcaacgaaacccaacatgtcgtacaatggccattcaacactttgaagcaagcacggagaccccagcatcccctgctccagctttacctgggaaaagggtcgctctctaccatgtggctcacagcagggccggtgacaaggggaatgatatgaacttctctgtcattcctcactcccctgctgacatcggccggctcaggtccgtaataactccggattgggtgaagaacgctgtgtcacctctgcttggttcgtcttcgtttcctgacgagcgagatgttcagcatcgaaacaagctgcttgagcttgtcaccgtggaaatttactacgtcccgggcataagctccctgaatgttgtggtgaggaatatcctggatggtggcgtcaactgctcgaggaggatagatcggcatggaaagaccttgtcagatgtcatattgtgccaacaagttatcctaccgccatgattgtcaatattcttatccgtattcgaattaaaatatggtaaatagtatctgtattcgaaccaaaatatggtaaatagtgacatccgaatttgtatccgtgcgtatttgatccgaatacatctctattaattgactacagtacccact

SEQ ID NO: 24532 - DNA, 1568 bp, Zea mays
  Clone ID: LIB3632-021-H6_FLI
cgcaccgaaccgaagcagcggcgatggcagcggagaagccggctcccgtgcgcgtgctctactgcggcgtctgcggcctcccggccgagtactgcgagttcggccccgacttcgagcgctgcaagccctggctgcgcgcgcacgcgcccggcgtctaccccgacgaccttgtcgccgcctcctcctcacccggaggcggcgacaaggacgtcgacaaggtcggggatcgcctccagggcgtcggaatctccgacggctccacaagcgccgcaggggatgcttccgcgtctaagccccaagaggcgaaacgcctgcctggtggtaagctcaagaaaaaggagaagcaagaagtggtcattgagaagattgtccgtaacaagcgcaaatgtgttactgtggtgaaggggcttgaattgtttggtgtaaagcttagtgatgcttcgaagaagcttgggaagaagtttgcaaccggagcttctgttgttaagggccctacggagaaggagcaaatcgacgtacaaggggacatctcatatgatattgtggagttcattacagatacatggcctgatgtaattcatctctacagtttattatgctttacatcttttatttgcttccatgtatgtaagatttctgatactgtatccgcacaaaccatttggtgtcacagcacacagcagtaagtggagcacatcacctaaatatttcatgtaacaagtatatttgtatcgaggaatgaaacaaatttagttaaataatctacttctagactgataaagtggaaagctatcacttggaataggaattagagaaccaaaataccattaggttttcttgtttctggattgtggttaaatggaagtgccagatataatgaggtcatccatgtggtctccctgttaattttttgttctctactacactgaagtaggaaggaacatcagtcttttttcttagtttattctgttgacacacaaacactgcaagtggttcttccataaatcttgcttgtagtagaaattttagcgaaaatatacttgtttagttgttttgatataagaaaataatgttgctgtaccttccctttggctaataattattaaggagtagactccgatggcattttcagttctctagtgaactgtgcatggctcaagtatgtggcaagttgccatgtaacactactgaaaatgataacctgtgatttctgagaagtttatgtgcataatatgattgcagcagtcaccatgtgctggagttggttaagaatgttatagcttccatcagaggcaggttgaattttgttattgaattgtcattgcttttgtcctttatcaggtacctgagtcggccattttcttcattgaagatggaaggaaggttcctgctgcttgatgccatatggtttataaggcacgagaccaatggatttacaaatataatacagaggtaaggtaagggcatggctgttaaggcatatatagggccataccagctcatctcttgtctgaagtcatgaactgttgttccggtttttaggcttacttcataagtggcattctgtt

SEQ ID NO: 24533 - DNA, 1037 bp, Zea mays
  Clone ID: LIB3632-023-C10_FLI
cacacttctccctttccgccgccgccaccgaggaagacaccaggtcaccagccataggcccatagcaaaccaagcgcgaggaggaacaggcgtagctccgtagccatagatggctaacaagcgtcagcgggatgcgcggaagcgcttccgggaggcgaacccagacctattccctccgcaaaccgccccttctgccgacggaaccaagaacaagagcaagaagaagaagaataagagcatgttcaagaaggccaataagggcggcacgggaaggtttaagcacccgctacgggttcccgggatgcggcccggggaacgctgcttcatctgcaagtccaccgaccacgtcgccaaggcttgccccgagaaggccctctgggacaagaaaaagatttgcttgctttgcagggagcggggtcatagtctgaagaactgtcctgacaaaagcgagggaaatttgatgaaattttgctataactgtggtgaatctggacactctctttccaagtgccccaagcccattgagaatgggggtacgaattttgcaagctgttttatctgcaatcagcaagggcatttgagcaagaactgccctgaaaacaaacatggcatctatccaaagggtggttgttgtaaggtatgtggcgaagttacccacttggccagacattgtccgaataaagggagacaagatttgatatcctccagagatgatgatgtcaacatggaagagcacagtcaggaatgtcctgcggttcaccatggtggagatgacctagaagatgatttcgttaatgaagaagaaccaaaacccgccaaatcaaagaaggcaaagcaatcaggttcaagaccagccacagggacgggaaatgacgtgaagagcgccagtgccaagacaaaagcgaaacaagctcctaaagttgtaaaattctttggttaaagaatgggaattttgttgtagcttaagatacgaatgttccatctggacaaccttgtactgtcaagcggttgtgtgtaacgctgatgacgatgagaat

SEQ ID NO: 24534 - DNA, 1089 bp, Zea mays
  Clone ID: LIB3632-025-H11_FLI
caggaatccagccgacccagcacttccccggttcctcccagcagagtcttcttctctgcatccgttccgttccccggcctctcgcacatccaccgccaccgagccgcgtgcgtcttccatgaaggacccgttcgaggcggacgtcgaggagcaggactcgccgccggagtcgccggcgccgcccgaggatgaacccggcgccgcgggccctgcggaggaccccgaggactacgacggcggcccgcccccgcgccagccgtctgccccggcgtctcacgcagccggtgccaaggccaaggcccgtgtccatagggagcagcaggaggatgacgacgaggacgaggaccagattgaggtcgacctcgagaagcttcccagcagcactggcgacccagacaagctcgctaagatgaatgctatactgtcccaatttacacaacagcagatgaaccgttatgagtcattccgaagatctggatttcagaaatctaacatgaaaaggctgttggcaagcatcactggaagtcagaagatttctatccctacttcaattgtggtatcgggaatcgccaaaatatttgttggtgagctaattgaaacagcaagagtggtcatgagcgagaggaaggattcaggacccattaggccttgccacatcagggaggcatacagaagattgaagcttgaagggaagatcccacggcgatctgttcctaggctcttccgctagaattgaagcatgtatattacacatgtgtctggagtcctgacagatgtgtgccatgaggtgaggagtttctagtaccagcttgttgcagtttctggacagaaacctgaccagactctcacagcttctgttgagaaatcctgtcaaatgtcatatcatctttaagatggaattagaaagagttaaaacgtccctaccacggggcctaaaatcgcctggggttgttatttgtactgagggctactttgaaaacctcaaatccccttcgggattggaggggattgaggtggaaatgaactaattttctcttgagtttccaaactagccctctgtgattgtgtagaatctgatttccatgcgct

SEQ ID NO: 24535 - DNA, 1217 bp, Zea mays
  Clone ID: LIB3632-025-H6_FLI
ctgcttcctgctgcgatggggggcgagacgcacctgagcgtgcaggagctggcggcgtcgctgggcgcgctaccgccggagttcgtgcggtctgagcaggaccagccgggcgcgaccacgtaccgcggggccgccgtgccggacgcgccggtgatcgacatgtcggagcccgggttcggcgcgcgcatggccgcagccgccagggagtgggggctgttccaggtggtgaaccacggcgtgccctcagcggcggtggcggagctccagcgcgtcgggcgggccttcttcgcgcttccgacggaggagaaggagcgctacgccatggacccggcgtccggcaagatcgagggctacggcaccaagctgcagagggacctcgagggcaagaagacgtggaacgacttcttcttccacgtcgtcgcgccgccggagaaggtggaccacgccgtctggccccggagcctcgccgggtacagggaggccaacgaggagtactgccgccacatgcagcgcctgacgcgcgagctgttcgagcacctctcgctggggctggggctccacgggagcgccatggcggaggcgttcggcggagacggcctggtgttcctgcagaagatcaacttctacccgccgtgcccgcagccggagctcacgctcggcgtcgcgccgcacaccgacatgagcacgctcaccgtcctcgtgcccaacgaggtgcaggggctccaggtcttcaaagatggtcaatggtacgaggccaagtacgtgcccgacgcactcatcgtccatatcggcgatcagatcgagattttcagcaacggggcatacaaggcggtgctgcaccgtacgacggtgaacaaggagaagacgcggatgtcatggccgatgttcgtggagccgccgggggagctcgtcgtcgggccgcaccccaagctggtcacggaggagagcccggccaagtacaaggccaagaagtacaaggactaccagcactgcaagatcaacaagctccccatgtaattatgtagctcgggttctactgtcgtgcagtgtgcacccgcttctgttatttcagtctaccatttaagtcacataaccgaccgtgttatttgttgttgttgttgtaagggcactaatacatgctaaagaataactagtattttgtccgtgtattactgtaatttctataattaaaatatttacgatatctattatttagt

SEQ ID NO: 24536 - DNA, 1980 bp, Zea mays
  Clone ID: LIB3632-026-A12_FLI
cacggaagtccggcggcaatggagcctcactcttagcagactccttccgcagccaccgtccattgtcgccactcgtcagttctgaccaatcacgcgactccaaacagtgttatgcggcccacctgcacctgcaatgcaacgatcggtccctctcgagcagtagacgcccggttccttgtactttggcacccccatcacgtcgtctggtcaatctaaagcttggacttgcagcctcctcatcggtcgatcgatcggagtgacgtgctggggattgtaggtgcaagcgcgcgcgacattgcagctaccgagaagaaagcagaggggcaatcgagcagttgacgggcgtgcagcaatggcgggacttcacttcttgctcgtgccgctggtagcgcaaggccacatcatcccgatggtggacctggcccgcctcctcgccggcaggggagcgcgagtcaccgtggttaccacgcccgtcaacgccgcgcgcaaccgggccgttgtagaaagcgcccggcgggcggggctcgacgtcgaggtcgcggagatcgcgttccccggcccggggcacgggctgccggagggtctggagaacatggacctgctcacgaggagggagcacttcttgcccttcttccaggcggcgtggaagatggacgcgccgctggaggagtacgtgcggtcgctgccccggcgcccggactgcctcatagcagactcgtgcaacccgtggacggcggaggtgtgcgcccgccacggcatcccgcgcctggtgctgcactgcccgtccacctatttcctcctcgccatgcacagcctgtccaaacacggcgtccacgaccgcgtcgccgacgagctggagacgttcgaggtgccggacttcccggtgcccgcgctcgcgaacagggccacgttccgcggtttcttccagtggcccggagccgagggcttccagcgcgacgtcgccgaggccgaggccaccgccgacggcctgctgctcaacaccttccgcgacatcgagggcgtcttcgtcgaccgctacgcggcggcgctcggacggaagacgtgggccatcgggcccatgtgcgcctccggcggcctggacgcggacgccagggccagcaggggcaaccgccccgacgtcgacgccggccttttcgtgtcgtggctagacgcccggccgccctcgtccgtgctgtacatcagcttcggcagcctcgcgcacctgccggcgaagcaggtcatcgagctcggccgcggcctcgaggtgtcggagcggccgttcgtctgggccatcaaggaggccaattcgaatactgacgtgcaggcgtggctcgccgaggggttcgaggagcgcgtcagggacagggggctcctggtccgcgggtgggcgccgcaggtgaccatcctttcgcaccccgcagtgggcggcttcttgacccactgcgggtggaacgccgcgctggaagccatcgcctacggcgtgccggtgctgacgtggcccagcttctccgaccaattcagcagcgaacggctgctcgtcgacgtcctcaacatcggcgtcaggtccggcgtcaaggtgcccgccatgttcttacccaaggaggcggagggcgtgcaggtgtcgagcgccgacgtggaaaaggcggtgggcgagctcatggacgagggtcccaaggggacggcaaggagaggaagggccaaggacctcgccgcgaaggcgaaggtaaccatgatggaaggtgggtcgtcgtacgccgacttgaccgacatgatccaccacgtcgcggtgctcggcagtcggcagtaagaaaagccatgatcacacagactagatcactagaatctactagtgtaccaatgctagtgcacatactagaatcttgttctactagtgtacctggagctattcaaaattgcttattgtacctttctctttctatatgttttgaaacaccgtatccacacggaccatttgatctc

SEQ ID NO: 24537 - DNA, 2451 bp, Zea mays
  Clone ID: LIB3632-026-F12_FLI
gccagagttcacaaaaaatcacaagcaagcagtcgcgtgtgtagctcgcaacaatggcgacgaaccccggcctcttcagcgagtggccgtggaagaagctcggcaacttcaagtacctgctgctggcgccgtgggtggcgcacggcggctacctagcggcgaccaaggggtggagggcggccgacctggggtacgtggccatcctcccgtcgctgctcctccgggcgctgcacaaccaggcgtggatcaccgcgtcccgcctgcagagcgcgcgcggccggcggcaggtcgtggaccgcggcatcgagttcgagcaggtggaccgcgagcgcaactgggacgaccagatcctgctcagcggcatcctcctgtacctgggctccacctacctgccggggggccagcacctgccgctgtggcgcgcggacggcgccgcgctcatcgcgctgctgcacgccggccccgtcgagctcgtctactactggctgcaccgcgcgctgcaccaccacttcctctactcccgctaccactcccaccaccacgcctccatcgtcaccgagccaatcacctccgtcatccatccatttgctgagctcgtggcgtatgaactattgttctcaatcccattgattgtgtgcaccttgaacggaactgcttcaattattgcatttgagatttacgtgatctacatcgacttcatgaacaacatgggccactgcaactttgaattggtgcccaattggctcttcaaatggttccctcctctcaagtatctcatgtacacaccctcgtttcattctcttcaccacactcagttcaggacaaactactccctgttcatgccattctatgactacatatataacaccatggacaagtcatcggacacgttgtatgagaagtcactcaagggaaaagaagaaacggcagatgtggttcaccttacccaccttaccagcctgcactccatctatcatatgaggcccgggtttgcagaatatgcttctagaccttacactgccaagtggtatgtgcggatgatgtggccgatgtcatggctctccatggttctgacatggtcatatggttcttcatttactgttgagaggaacgtcatgaagaaactcaaaatgcaatcatgggtcatcccaagatacagtttccattatggattgagttgggagaaggaagcaatcaatagcctcgttgagaaggcaatatgtgaagctgacaagaaaggagctaaagttgttaccctcggactccttaaccaggcacataacctcaacagaaatggagaactttatcttcagaagtgcccaaagttgggagtaagactcgtagatggcaccagcttagctgctgcagtagttgtgaatagtgttcctcaaggcacagatcaagttgttctcgcagggaatatttccaaagttgctcgtgctgttgccgcagcattgtgtaggaagaatatcaaggtagtaatgaccaacaagcaggattaccattttcttaagcctaacatggcagaagatgcagctgagaaccttttgttttcaaagacaactactgcaaaggtgtggttaattggggatggtctagatgcttctgagcagtttaaggcacagaaagggacacagtttatcccatattcacagtttccaccaagaatggcacgcaaggacacctgcacctactcgacaactcctgcaatggttgtacctaaaacactacagaatgtgcactcctgtgagaattggctgccaaggagggtcatgagtgcatggcgcattgctggaatggttcatgcattggagggatggaacgagcatgagtgtggggacatcgtgctagacatggagaaaatgtggtctggtgctcttctgcatggtttccgccctgtggctcaagtttgattctccagttgcaaatgcaaggcagcacaataagttattgaaagttataacataatgctcgcgagaactatgctacatacatatcagtatgttggtgttctgtacttctgtttgtccatgctctgcctcttatcacttaagacatctgctatctatgaagttaagatgaactcatgtagtgtaaaaaccattctgcagaagcagggtgaaaaatagcatctctacaatggtaagaggggatgggatgtagtatataagtgagtctgatctactgctagatgtttactactttattcacaccctacgctcaaagatcaacgatgaattaattatgcgtcgatatttctccatgcatcaatgcatatttcaacaaggaaaagtatgagaaatgctattcattctccatgtagagatgtggatgaaagatctgcttcaatgcttcattttgttcatgatccagagaaagtagagatgtcatgtaagatgtaacagtggcccatattgcccatgacgaaaggcaataaaacgtgaccaacat

SEQ ID NO: 24538 - DNA, 895 bp, Zea mays
  Clone ID: LIB3632-026-H5_FLI
cacacacaagacacaaccccactcacccggcagggaggccctcttcgtcggcggaggccatggtttccctcaagccgcagaagaggctcgccgcgggagtcctaaaatgtggcaaggggaaggtgtggcttgaccccaacgaggtctacgagatctcgatggctaactcgcgtcagaacattcgtaagctggtgaaggatggattcataattaagaagccacagaaaatccactcaaggtcccgggcaaggagggcccatgaggccaagcagaaggggaggcactctggttacggtaagcgcaggggtaccagggaggctaggctccccaccaagatcctttggatgcgcaggatgcgtgtcctcaggcgtctgctgcgcaagtatcgtgaagcaaagaaaatcgacaaacacatgtaccacgatatgtatatgaaagtaaaaggaaacatgtttaaaaataagagggtactcatggagagcatccacaagtcaaaggccgagaaggccagagagaagactctctcggatcagtttgaggccaagcgagccaagagcaaggcttcccgtgagagaaagattgcaaggagggaggagagattggctcagggcccaagggaacctgcggcagcaccagtatcagctactgctccgtttgcagctgcaccaaagaaggcgaagaagtgaaaaaggtggtcttctagttctaggacctaattttggagcgccccaactcttttgctgttacatatccaagctgtcagatatctgtaataacatcttatctcgtttttcatgttggacaatgtagtagagttgtttgtcccaagtgtatttggaacgaattttcacagaatctgcttaatgcttcggtggaacccagttctggttttgct

SEQ ID NO: 24539 - DNA, 1032 bp, Zea mays
  Clone ID: LIB3632-027-C4_FLI
caacccaaccatcgctccacgcccgcgtggaaaagacggagagagaccgggagagaagaagaagaaggaaaaatcaggggaggaggagactcagcggccgggaccggaacgtgaaacgcggacgcacgtcgggaaagtaatgtaccaggccatcccctacagcagcgcccgggcgtggctgatgccggcggcggcggctgaggcgggcgtcgccgctgtgaagccggagccggtggcgaccgtcgcggagcctgcggcggaggaggagcgcgcccggccggacgccgcggccggggacgacgacgacggcggcagggcggaggtggggagggccgtggcggagaggccggtgctggtggtggggcggcgcgggtgctgcctgagccacgtggtgaagcggctgctgcaggggctcggggtgaacccggccgtgcacgaggtcgcggacgagtcggcgctcgcggggctcgtcccggccggcgccggcgccgccgccggcgcgctgcccgcggtgttcgtcgggggcaggctcctgggcgggctcgaccggctcatggccgtccacatctccggcgagctcgtgcccatcctcaagaaggccggtgccctctggctctagtttctattactaatcaatccgtacgtcggcgtgtttcttccttcctgcctcttctgtcttctctcagaaacgatggcgccgtggtttcgcccgtggccgttggatcgagcatcacaacaccacaccgcggctgatgcatgatatgagtttggaaataggactttggtttcttttttatctgtttatttatttaggcgaagcaaaaaaaaagaatggtgagaattcgaaccacagagtaattttattgtccgctaagcgtgtgcgtgcgatgacaagtggtcgcttcgcttcttccatcatgtgaatacggaagacgggcgagagacagaggggacggacgtttgtttgctgccggcatctgtacaatcctttccgtttcagattttaatgagggatgagctgtccagtttccc

SEQ ID NO: 24540 - DNA, 1492 bp, Zea mays
  Clone ID: LIB3632-027-H12_FLI
gggacacgccgccgggcctcactaaccgcaggttcgggagtactccggaacccgccgccgcatccacacgacgccacgactgacgacggagagccccggtctccttccacggctccaccgccaccaccccgcataaaacagcagcagaagaacaagggtatggcgaaggatgggggtcccgactggaacggcctgctcaagtggagcctcgcccacggcgacagcaccaacccgccgcgtgctctcagcgaggaagacagaaaatggttcatggatgctatgcaagccaacacggtagatgttgtgaagaggatgaaggagatcactcaggtgatgaaaacaccagaagatgtcttgcagtctcagggtgtgaccccggagaacattgaagatatgttggatgagctacaggagcatgttgaatccattgacatggcaaatgatctacattctattggtgggctggatcctctacttagttacttgaaaaattcaaatgctggcatccgagcaaaggcagcagaagttgttagtacaattgtgcagaataatcccaagagtcagcaacttgtcatggaatccaatggactagagccactgttgacgaacttcaaatcagatccaagtacaaatgcacgcacaaaagctttaggagccatatcttctctaattcgtcataaccagcctggagtttccgcatttcgattgggaaatggctatgctggattgaaggatgctcttggttccgatgatgccagactccaaaggaaagctctcaatctcatacaatacttgctgcacaactacaaggcagacaggagtgttgccacagagcttggtcttccgaagctgatgatgcaccttgtgtccagcgatgattccttagtgcgtgaagctgctctaggcggcctccttgagttggcgcgggacaagacatctggtaacgcgctacctgaccaagaaaagctgaaagacatgctcaagagccgaatagaagggatcagcgcaatggacactgacgatctccacgctgctcgcgaggagcggcagctggtggattcactctggaaggagtgctacaacgaaccttcgtctctcagggagaagggcctcgtcgtgcttccgggagaggatgctccccaacagccgccaccagacgttgcagggaagatgtttgagccaccgcttcgtgcgtgggcggctgcaagacctgctcaggaagatgactctgactctggcagcggaaagaaggatccgccattgctgcttaagttttgacggccttcttatgccgatactagttcttaggctccaccatgggtgttgaaagctgaaagatcagatctgatggatgcctgaccttcttcgaacctcagttgtggttcttgtaatttgcaccgcatttcttctgagtatgttttttatgagaagactgggaagatgacagacagatactgtatcacgtgatgctcgtaaattaacactacctgtg

SEQ ID NO: 24541 - DNA, 643 bp, Zea mays
  Clone ID: LIB3632-028-E2_FLI
ataatccgccggcgttgagatgttggtttatcaggatctcctatctggcgacgagctcctgtcggattcattcacctacaaggagctcgagaacggcgtcctgtgggaggtcgagggaaagtgggtcacccaaggtcctgttgatgtggacattggtgccaatccatccgccgagggtggtgaggacgaaagcgttgatgacacagctgtgaaggtggttgatattgttgacacattccgtctacaggagcaacctccttttgacaagaaatcatttgtgtcttacatcaaaaaatacatcaagaatctcactgctgtgttggagccagagaaagcggatgagttcaaaaagggtgtcgagggtgcaaccaagtttctccttagcaagctgaaggacctccaattttttgttggtgagtccatgaaggatgatgcgtctgtggtattcgcctattacaaggatggtgccactaatccgacattcctctatttctctcatggtcttaaggagatcaagtgctaggcgtgcggcgaaattagttacccatgttgggtactatctatgtactattattatatccaaaactatagttgtcctggctgaattgaactcaaaagggtttgtttgagaaaaaattgtccc

SEQ ID NO: 24542 - DNA, 2085 bp, Zea mays
  Clone ID: LIB3632-028-E3_FLI
ccggaccttactttttggaagtttggctctgttttctctcaccgcctgttctcccccgcgcgcgatggcggcggctccggcgagcgtcggctgcggcggcgcgtactcttgcgagacggcggagcgtacccgcgagtggatgcaggccctggccactttcctcggccgccaccgtccgctcctcgaggcccacgtcgtcaactttttcaaggacaggctgtgggagctagtggacgccgagtggatggagtgcctccggcgggagcccgtcgagagcttgctcaagctgccatctggatgcgtccaggagcactggcctgctacactgcgagagtttgtgcttactgctaggtcgcttgtgattccacgggagcagaaggctccgcaatcgcttgtatctgacattcatgtagccccagttggcactgttctcgctcagggcatgaactcaaagaagaagcacgaaattgaaaatctagctgctgtggttcatgcaattgcaaagaggtgtggagccaagacagtggttgatgtaggttctggccagggttatctcgcacaggccttatcttttgagtaccaactccgtgttgtagcaatagatgcttcatcacaccatgcatcagttacaattgctcgtgcagaaagaataaagaagcactatgctgctaaatgtgtggagaagcaactgctcatggtacctagggcagtcacctgtcatgttctttctagtgacacattggcagcagtcacattagatgcatgtaaggatgacaatggagaacatgtgagagatactaaaacatctactaagaaaatcactcaaatccaggaatcaactcagggcacccctccattaatcctggctggtcttcatgcatgtggtgatctttcagttaacatgctaagagtttttgtgtcctgtgaacaagtaaaagcattggtaagcattggctgctgttacaacttgctttctgaggatacttatgaggacacagatacctgccctggttttcctatgagcaaggctgccaaacattctgaattggtacttgggaaaagcatccgtgaccttgcatgtcagagcgcagagagatggagaaatctcaccatggacattgcattgcaaaattttgatgtacatgccttccgagctgcatttcaaatggtacttgagaaatattttccagaagtgtcaaggttgagtccatcaattggaaggcaaggaaaagctcttcgacgtcagaggcttcgaaaagttgtggaatcacaaatgactacaaagaaaaatgatgatttctcctgttcaactttaaaggaacaaaacaagaacacaaacgatgttcatccagtcatacatgaagttgacacagggccagatgacatccatcagaacgcacatcaaaagttcatcctgttcaaagatttcacattatctggattaggtcgccttggctgtggctcagtggaagacacgagtcttcttgaaatatggaaggacgtgcaacccttctctgaatatataggtcccttttggtgccttcgagctgctttaggtccactggtggaaacatatattttacttgatcggttattgtatcttcaagagcgaagcaacctagttgaagcattgctgtttcctctgtttgatcctaccatttctccaaggaacatggccgtaattgcttggaagttatgtgcaaattcttcagaagcatgacatggtaaatcttctgatgataggatatgcagttgatgggatggtgtgttggtaccaaactataagccagactattgtcttatggcagaacttcttcgatttagatacagttattgtattgctgtctcttttagaagggcaggcctgatacagaggtgagagctgtctcactgaatcaccaggtcacggtttcgaagcagcctctccgcatttgcgtgggaggcttgcctcggtttatcccttatccaagcctctagcactgggtgtgctttattttaattgtattgctgtcctcccatataaaaaaaacctgaagatagtattgtctttgaaattgtgagggcaatgcatttccctttcaaatc

SEQ ID NO: 24543 - DNA, 2176 bp, Zea mays
  Clone ID: LIB3632-028-G2_FLI
gtgagccgtgcattgaaggcaatggccgctgttcgtagatgctgcctgctggccgcggtgctgctgtggtcggcgctcgcttcagcggccacggccgcgccggcgcctgtggtggccgggccggtgtccagggtggaggacgccaccatgttccggatatactacggtcagagcttcaaggtcatcaagaactccggcgatggcaagagctaccttctcatgcagaacacgtccaagatggcatccaagacgaagtactgcacggggaggattaagtcgttcgtcatccccctcgccagcttctccgtcgacaccacgacctctccagtgtcattctttgaggtgagcaatgcatgagactctgcagtgcagtccaattggcaatgggtccttctgcaagggaaagaaaaaaaactcagaaaaatgtctaaatattcaattcctcatctactccgaacttaaagctaaagaaaattgtactcaggacagtgttactaataacaagtatgcatacacattaaaacaagagcagcaaaagaaacagaggagccaatcaagagagagtatgctttaagcttatggcaaactcataagtacacttgacatatatgcagctgcttggagtgctagagagcttgaaaggaataacatcgaaccaagtcgcttctcagtgcgtgctccagtcatatacaagtggaaatgcccagcttgtgaatagaactgatgtgcagacactctcgcagtttactgcgcatttcataagcgatacagatgaagacagaggttgcaactttgcagcatatgtacccttagaagagggcacaccattgcagatggctgagtggatcaagtacctgggaactttcacaaactctgaaaacagggctaatgctgtctacgatgcagtaaagacaaactacctgtgcttaagcaaagtagctgcaaaccttggcacaagattcaagcctgtagtagcgtggattgaattcacacagggaatgtggacatttgttaaagaaagttacatcttacagtatgtcacagatgcaggagcagaaattgttgatgcaactattacggataagagatttaatagttcagatccagaggatatggataacttccatgctattctgtgtgtgagtatcaatcactcagaatgtaatattacaactgtaatgttagttgacgagctcactgttgcatgtgagtgtgtgacgtacaaaagacacatcctcttttggccataaaagggattaatgctgacacaattaataattgaaataaactggactggttgtatcaaatgaacaatgcctgcaaaacaccaaatggtctattacttgacacatttttcaaatgactctgcacttagtaacagttaactaagcttggttcacgaatattacagacagtggacgtggtcatagatcagacatatgctttggagcctgcagagtacaaactatccacctttttggagaatattaatgttagccacgactcctgttacagttttgtatcaaatcgcagcatatggagatttgacaaaaggataggagcttctgggacacttggtaaccgaagcaatactattactagtatcatatcttttacctatgtaatgatctaatgaatttttccatctcaaagaaatgatgtcatacacatttactctttttccctttaagattggtccgatggagctatctcacagcctcagttggttcttggagatctcatagaaattttcttcccaacggggaactacataacaatttacttcaggaatcttgcaaaggatgaaggggtcacagagattggtcctgaaatgtgcactaggagcatatccacacccatggatcctataatcctgtcatgtgaatgatgaacccagatgaacacgaagagttgtcaagctactgtactaacagacagtggcaactagttgacagaagcatttaagttactgacaaactgatctggacagaagcatttgcaacaaagattagattacacaatctagaaaaatactttctttcaaatattgagcagcaactgctgtttggtcagttgatcaataagtgattacaaacctcggtgtatccatgttaaaaggaatttgatgtaattatccaagagaccatcttatgaaattcaaacgactgttttcaat

SEQ ID NO: 24544 - DNA, 1391 bp, Zea mays
  Clone ID: LIB3632-029-B12_FLI
gttcggaggaatttattcgaggaatagtgtttgaccggctccgctcgattctgcttcgttaccacgcgggtgctatcgaatcttggcggagatggggctcacgttcacgaagctgttcaggcggctattcgccaagaaggagatgaggattctcatggtcggtctcgatgcagctggtaagaccaccatcctctacaagctcaagctcggcgagatcgtcaccaccatccccaccattggatttaacgttgaaactgtcgagtacaagaacattagtttcactgtttgggatgtcggtggtcaggacaagatccggcccctgtggaggcactacttccagaacacccagggcctcatttttgttgtagacagcaacgacagagagcgtgttgttgaggccagagatgagctccaccggatgctgaatgaggacgagctccgtgatgctgtgcttttggtgtttgcaaacaagcaagatctgcctaatgccatgaacgctgctgaaatcaccgataagcttggcctgcactccctgcgccagcggcactggtacatccagagcacatgtgctacctctggtgagggtttgtacgaggggcttgactggctttcgaacaacatcgccaacaaggctcgaagcatctaggcaaggcttcaatcagtggaagcaaactgcctctaccattacagctatgaagtatatagtcgtgattgtgtcagacgtggtgtgtttttgggagataaaaggctcttttggtcgaggagctaggtatcagatgttttttatggtacctgtaattttccgtgcttctgttttggttttgtgcaaggtataccatgtctgactgtgtgctcgccactgtctgagtcgttgtactatcccgggccggcctgtccggctgtctcttggcatagcaaaatgatcgcctaatttgttagcacatgctcggtaatatcacgagggcttcggtggtcttattgctcacgctgaattctcaactttgctcttcttttctgcggttgaggttgcatcttgtattgttggctgatttcgagcaatcagaggattgtgctacgtcgtcggaggcatcatgggatagcagctagctttcgtctttgaactgggcttcggttctaaattcgacttcacttttatccttcattaaactttttaactttgatatcgctatataaactggttgtacctttaacactatattttatctttgtaattgatggttagtgattcaagagagcattgttttttttttttgttgatcacacatgttgcgtgtgcgacgtcagctatgaactccacaaataatgtaatttttagctttggaaatcatacattttttatttatattctataaagtatacagtttttattt

SEQ ID NO: 24545 - DNA, 755 bp, Zea mays
  Clone ID: LIB3632-029-B4_FLI
cgagcagcggaggaggccggcggctagagggtggcgatggcgcgtgcggaacaggaatcgctggctgcgccgccactggagtcgaccgcgacggcgagacagcgcgtcccgtccgtggaggtgcacttgtaccggcggggtgccggcccggtggccatcttccggtcggacctggcgggccctcggcgggaccgcctcgacgtgcgccgcatccaggcgagccacggcctccgggcgctgttcgccttcaggcccgagggatcccgccgcggccgtggcctccggatcaggtgcgacccggccgccggctactccgcgctgcccttccgcgacggcgccgccatcgccctcgacggcgagcccggggagtcgtggacgaagccggtgtcggtgatcgtcgccggcctgctggtgcccgctgtgatggcggcggttgcggccaacggggtgccggagccgctgcggtcgtcgaggctggccaatgggatctttgcgccgtggatcctcttcagcgccgtcatcatcttcgctcgtgccaggacgcggccaagggctccatgaatgaatctctctagagagcacgctaccgccagtttcttatgtacttactttcccatatcaaccatgttagaatgtaggaatttggtaacgattccaattatcaccggattttgtttgtgtttgctgacggcacgttatctgaaatgctattgattcagactgtcaccgtagttccttgctaacaggaacaagat

SEQ ID NO: 24546 - DNA, 2418 bp, Zea mays
  Clone ID: LIB3632-029-G11_FLI
tcccaaccctagccggctagcctccttccccttcagccttcacacctccgatttctcgcgccttcgtctcccgcccaatttccagaagcttctagaaccaggtttctaaccctaccgcagaatgatgctttcttgcgcctagtagcctggggcggaggcatggacggcggcggggaggggggctcgagcggcgggaggttccctattctgcaggcgaacagggaccccgagtcgaattgggaggtggacgttgccaagagcctcgaggattacctgctcaagatctgctcaggggaggtctccggcgaggacggggcccactctgtcaactttgccgaagcggcgttattactccaaggatcggttcaagtgtacagtaggaaggtggagtacttgtactcgttggtgcttcacgcgttagagttcctctcgcaaaagaaacaggaacaactggaaaatggctcagctcaagctaatcaaaacaaccctagcattattcccagtgaagaagatgatatatttattgggctagatgatgtcccagtggaaacaagaatatctctggataacaatgtcgatcgagatgatttacaaagaaaaattgtgaggccaccagcaaacctactggtgtttgaaggggactgtctggatagtgaagcaagcgagctagattcatatttgttagcaacatgtgatttttatggagatttccttctgctggatccttgtgatgcaccagctgtttttgactttctgcaaggaaaacattctggtaaagaaaatagtgtggctcatcaaggcagtgcagcaccttctaaaagccaagccaatattttcacttccccgaatgcaagatcagtgggcacaggtcgtaaatcagcccctggaaaagtcctaggaggtctagatccaactcaggagaaccaatcttcaactcaagaaaccagtccagataacaaacattggtctgatcctgttgaacctagctttgctgatgatgttgaaatgcatcccccagatgatatagaggaccctgttggagattattctgatgacgaggatccatggaaacctttgaatccacatgaacctggcaatttaaagattcggccttacaggagagtgaaaggttctccacggggtgttattggcatttcgaaaaagaaaactctcaaatcactgtttcctattgcaaagatggttggtgtcgtcatacctgaacatgctaaatcttttgaagcacagcagtctcaggaggaacattatggttcccaatcaccccctcgttttgaaaagtttttgagatcatttgaattaggagaagaaaatcccaatgtgtttggagatttgaaagatgacaatgcatccaatactggcattaattttgattatgatgacccagacatgccaaacgacatagatattgatcttgatgttccaacatgtcctgatgagattattgctataactcccaaaggtacacaggatgacatagatacacatgaaaacctcgacgacttgtgtcggtcacatctgaatgctctccttgccagcattgctgaggttgaaaagcagagtgagatggacgctcgtgtttcaacatggaaagaaagaattgagattgccttggaagagcaggatagaaacccaccttttgatatcggttcatatggggagcaaatacttgacacactttcatcaagaactaacaatacaggaactgcatcttttagtgagattgttagcggcagaccaaagtttgagattgccagaacgttctctgcccttctccagctggtgaacggcagaagtgttgatctggataaaggaaaagccacgaatgagttggtgtgttacacagcagagaatccatttcatgtaaggcttattggtcccaaccggaggccagaaatggaggcacgctttgctcggaagagagtcaagtccccactgcaaaatgcaggcaaagacggtgagtcctccctggcacaacatgagtgtcccaacaagccgttgcgtaaaaatggcaagattccagtcaagacagcgaccaggctgaccccagatgggaaacgaaggcgaaggtcatctgctcacctaatgcagccgatcaatctggaatccagcggatgaacgccagtgcacactgattcttctaattattgtaacttcagtggcggcttcataggcaggatgagcctgtaagttatgacataggcgtagctagcgggtgtatatgtacagttcaactgtaatgctgacagggcaagatttgttcaacggaattgcccttttatagcatttgccattgtttcatttttaatccaataagctaacacgatgccaagtctgttgttgtaaactggtgcctagctgtatcgatgttgccttccgcgatttgagatttatatattacgc

SEQ ID NO: 24547 - DNA, 1322 bp, Zea mays
  Clone ID: LIB3632-030-G7_FLI
gtcgcgcctcgccctccccgactccactccactccactccactcgcccgcgcccgccgcccgcgtgctcctccctcgcgccccgccccgccccgctgccctatctatatccattcccgctcgtccccctcaacaaccctcctcacggcgcactcgtgttcgtgtcatcccgcccgcaggccgcagtccatggccaccgccagcctcgcgctctcgctgcgcctcgcgccgtcctcgcgcccgctgagcctccgccgccggggggccaccggcgtcacctgccgcgccaccaccgccacgttccaccagctcgacgccgtcgcggtgagggaggaggagtccaggttccggacggcggcggcggagggccgcaacctgctgccgctcacgaggtgcatcttctccgatcacctcacgccagtgctcgcgtaccgctgcctcgtcaaggaggacgaacgcgaggcgcccagctttctattcgagtctgtcgagcaggggtccgagggcaccaatgtggggaggtacagcgtggtcggggcgcagccttctatggaggtcgtggccaaggctaaccatgtgacggtcatggaccatgagatgaagtcgaggagggagcacttcgtgcctgatcccatgaggatccccaggacaatcatggagcagtggaacccgcagattgctgacagcctccctgatgcattttgtggaggatgggttggattcttctcatatgatacagtgcgttatgttgaaacaaagaagcttcctttcagtaaggcaccacatgatgataggaaccttcctgacattcatttaggcctctatagtgacgtcattgtgtttgatcatgttgaaaagaaaacacatgttattcattgggtgaggacagactgctatcgttctgttgatgaagcatatgaagatggaagaaatcggcttgaagctttgttatcaagattacattgcctcaatgtcccaacactttcttctggttctataaaactcaatgttgaaaactttggcccagtaatgcaaaaatcaacgatgtcaagcgaagaatataaaaatatcgttgtccaagctaaagaacacatcttggccggtgacattttccaagttgttttaagccagcgttttgagagacggacattcgccgacccttttgaaatctatcgtgcattgcgcatcgtaaatcctagtccatatatggcctatctacaggcacgaggttgtattctcgtggcatcgagtcctgaaattcttacccgggtacaaaagaggacaataatcaatcgtccgcttgctggaaccataagaagaggc

SEQ ID NO: 24548 - DNA, 1074 bp, Zea mays
  Clone ID: LIB3632-031-B7_FLI
ctccccacgcgattcgatcctctcgccggcccaggcatcgtagaatccccccaccgaaaaaatcaagcgggcatacaaagagcgcgtgcgcactgcgcagtgcttggaataggtgggtcgaacttcgaaggggttcgaggacttcagctatggcatctgtgggacgtgcaggacgaggagggaaaggagatggagggaagggagaagggtcgctggctcgcagggcgtggaggcagtacctgctccagctccagcaacatcctctccgcacaaagatgatcacggcggggtgcctcgccggcgtcagtgactccgtggcgcagaagctctctgggttccagaagattgagaaacgcagactcctgctcaagatgctctttggttttgcatatggtggcccatttggacatttcttgcacaaaattttggattacatcttccaagggaagaaggataccaaaaccatagcaaagaaggtgttattggagcaagtgacatcttctccctggaataacatattgttcttgttctattatggatatgttgttgagaggaggcctttgaaggaggtgacgaccagggtgaagaaacaatacccttctgtgcaactcagcgcttggatgttttggccgatagttggttggataaaccaccagtacatgcctttacaattccgagtgatcttccacagctttgtcgcatgttgttgggggattttcctgaaccttcgtgcaagggctatgtctctgaagcaggcctagatggtttagaaggaacgtatagcagcaaagctcctgcccggtgctaactaaagcagccgaagaaggaggatgctggaagctgtatcctgcacggttacaaaaaccgttgtttatttcctggtagtagtcggtttatttgaatgtcaacgcatgcgaagacagattatgctttttgtaaaaaaaatttgtgatgggagcaaagtatggtgaattcggttagctttgaggaccagttcgtattcgttcattcattgttcagctaaatggtcatgggactgttccagcgtccaccgttcttgctttgctggtaatc

SEQ ID NO: 24549 - DNA, 2125 bp, Zea mays
  Clone ID: LIB3632-031-B8_FLI
cgtttctttactcctcgatcgagagccccattcgttaggggttagggtcgtagcgagggctctgaaattggaatcccaacagaggaattacacccgctttgggacttcggagaagggaatgtcggcaaccatcgaccggctcgcgacaccgagtcatgagggtcgtgcacacagtgacgaaaagcgagagtgcaattctgatgaagagaactcagaaggagaaagaaagcccaaaaaggattccttcaagaagagagcagttactacagggtatagatttaggcattccttaaggagaaagagtaaaacaaagaatgataaccatatagcctcaatagaagacataagagatgttcaagagctggagattgttgaaaggtttcgccagtgtttacttgatgatggtctgttgccagaacatcacgatgattatcacacgatgttgaggttcctgaaagcaagaaaatttaatattgacaaagcaaaacatatgtggtcagagatgcttagatggaggaaggaatttggtgctgacaatatagaggaatttgactacactgaattagatgaagttgtgaagtactatccgcagttttaccatggtgtggacaaagatggaagacccgtttacatagaactaattgggaaagttgataccaacaaactagtgcagatcacaactattgaccgctatttaaaatatcatgtcaaggagttcgagagatgtctccagatgaggtttccagcttgttctattgctgcgaaaaggcacatagactcgtctactacgatattggatgtgaaaggcgtgagcctaaagaacttcacaaaagatgcaagagagctaattatgcggttgcagaagatcaacaatgacaactatccagagaccttatatcaactgtacatcataaatgctggccaaggattcaagatattatggggtacaataaaatcatttcttgatccagaaaccgcttcaaaaattcatgtccttggaaacaagtaccaaactaaattacttgaaataatcgatggcagtgaactcccagaatttcttggtggcaagtgcaggtgtgaagaatatggaggttgtccaaaatcagacaaaggcccttggaaggaccctgaaattttcaagagggttatcaatggtgaggcaaactatggtcgacaagttcttgctgtatcaagcataaatcagaaggaagttggttgtactgaacacacaactgtggaagatgtttcttcttcaacggctttagtggatcccatcataagccctaatttgacccatgtggatgagttaaaatttcaaggacatgcttcctcatctgatgctcctcccattataggggatagcatccctgctgctggcaaggtcatggatgcatgctccaatccaagaaacagctcgacaccttccagctcaggttctttctctttgagaaatataccggcaacattgggaggacttaaaactcgaattgttgcatggtcaacattcgtaatcctgaccttgtcagcattcctctgttctgtgctgagcatagtgaccaaaaggctctcaaaccaggccatcacatgtgaccactatagtgctgacttccatcaaggatatatgggaaatggcacccttacatccgtattgacacggcttggtgagctggaggagaaggtacaagcacttgaagcaaagccaccccaagtgccatttgaaaaggaggaattgttacatactgctgtttaccgcgtggatgtgttggaagctgaactaatttctatgaagaaggccttgtatgagacattgattcggcaggatgagctgcttgcatatattgaccaacaacagacagccaaattttgtcggcagaagttctgtttctaagtactggagtacctgccacctattttcgtctctttggagatcgcatgcagctattgtggacccagtatacttgcaaatgttttcatatttgttgcagtgtaaagaaatgcaatttttagaaatacataggattgaggagcatggtagcttgtcttgagatcgtgttttagcgacaaaaacagaaaagcttgataccttgtacgcattttcaaccagatgcaggcgtaatctttcccc

SEQ ID NO: 24550 - DNA, 1915 bp, Zea mays
  Clone ID: LIB3632-031-C7_FLI
ccgcacctcgaaatttcggcagccgatgcctccgccatcgccgccgtggtcgcctagcacctcttctatctaggtttcgtcggtccctcttcttcctgcgccctcaagatctgcgcgacgacctgagctctccgtgctgtttagggcggccatgaacagcgcgttcagcgaggacatactcgctggcaagctcgccaagctcaacaacacgcagcaatgcatcgagacgttgtcgcattggtgcatttaccatagaaagaacgcagagcaaattgttcagacttgggacaagcagttccacagctttggcaaggagcagaagatccctttcctttatcttgctaatgacatcttacagaacagcaagcgcaacgggacagagtttgtagaagaattttggaaggttctccctggggcgcttaaagatgtaagtgagaacggtgatgaccgtgggaagaaggtggcatctaggctggttgacatatggcaagaaaggagagtttttggctcacgcgctgggggtatcaaggatgtgatgcttggggcagccccccttcctgttttagatatgaccaaaaaacggtctcgcagttcagcaataaggattgttaaaagagattctcgttctgtgaaactgagactaggcattggaggaactgcagagaggatcatatctgcattgcacactgttctcagtgaacaagcagatgaggatgatgacctggaaaaatgcaagacttctatgcgtcatgttggaaagatggagaaggacgttgacagtgcttgtagcaaagccgaagatcctcgtcgcgaggttctttgcacagaactaaaagatgaggaagctaacatgaaaaaatgcatcgaaaagctaaaagctgttgagaaaaatagagcagctattgtgtttgaactgaaggaggcactgcaggaacaggaatctgaactggagaaagtccgcactcagttacagctgaagcaatggtacatgaagcctcgaacatgcagcggagactcaagaatgagccaaccattccgctgcccagatcagcatcgttagtagagccaggaaaggtggtctccaatgggcaagtaaaggagcagcacaagacggctgctgctatccttgcagacaagattgcagcatcatcaaactctcagcagattctgcagtctgcactttcgaagtttgctgccgaagaagcaaagaattcatctgaaacacgctcagataagaggcaaaaggctgaacaactatcgcaggtaccaagcgtcgcaaatgccgctgcttttgttccaatgccacaagtggttgccacaacagctcagcagcagccccaggcaatcttagtgcaacaagcacctatgcagagccaagccactgcatctcagccccagtacaatatctaccaggccccgccccagcagtttgtccctcagcctggaggtgtaatgatgggcatgccttacaacatgagctccatgaccccaccgcctccaccgccgccccagatgatgagcctaggaaggccctcaccttcagctccacagccccagatggctgtcatgccgcagactcagcctccagcgccaccgatgcttcagcagcagatgccaatgaacctaggtcctcagatgcagttcacccttcaaccgcctggcgtgccgcctttcaggcccatgcagccacctcctgggatgcagtacttccatccccaatctcagtgacagttttggtagcccagccctgttaaacttttgacaggttctcaatttagcgttgactagtaagcaggatctgactgctgtagggtatactgtttgtgtggttcgtttcgacatatgttgttgtactgtacatgtaatgcgaggagaggtaaagagcgaggagagaaatgaagattaaagatttcac

SEQ ID NO: 24551 - DNA, 1413 bp, Zea mays
  Clone ID: LIB3632-031-C8_FLI
gaaaacggcactgtccccgcaaagaaaagcagacccctcgccgccgcgtgcctcctcgttggagcccgatcttgctggacgtcgccgcattccaaaattcgttaggcaatggcgccccctctcctctcgccaccgctgctcgccgacgcgctcgcgacgctgccacggtctttcctctgctcccgcccaacgcggcaactgccaaccgtcgggctcgccggagccgtacgtggcgaccgggggagatggagtgtgcggagaagggatcccagggtatttgccgcctccacggaagcggatcgtgaaaggtcggatgaggatgtcgccgacgattactattccgttctgggtgtgatgccagatgcaacccctgaggaaattaagaaggcatactacagttgcatgaaggagtgccaccctgaccttagcggggaccaccctgacgtgacaaacttctgcatgttcatcaacgaagtttactcggtgttgagcgatccagcacagcgtgcagtgtatgatgagatccatgggtacacagcaacagcaatcaaccctttctttgatgacagtgcaccgaaggatcatgtgttcgtcgacgagtttacctgcattggatgtaaaaactgtgccaatatttgccctggagtctttcaaattgaggaagactttgggaggtcaagagtctattcccagtcaggtagcacagagctaattcaggatgccattgatagttgcccagttgattgtattcactggacttccgctgcacagctgtcactcctcgagaacgagatgcgtagagtagagagggtgaatgttggtttgatgcttgctggtatgggagcttccatcaatgttttccggatggcaagtgttcgttgggaaaagaggcaagcaaaagtcctggagaaagccagaacacggatggtgaaacaggagacgtcagacacgaggagctcttggagcgaggtctgggcatcatccccaccacgagacgaccaaagcaacggcgatggggaagcatcggagagggccaagagagcggcagctgctgccaggcggtggcgagagttctccaggcgaggtgcggacaggcctccaacgcacaagcttcccgaggcagtgggcaacaaggattagtagtagtagtagtccatggaacagagagatacttggcaatgttggtttgatcatattggctaaatgtacagtgccattgtctgtagaggcttgcagtgccttcccagctagctttgcacgcactcatgtgctccatttgtaaaatctaggtgagtaggtatatagtgatgttgataacctgaacctgtacgtagaagacaacaagcacccagtgctgcagaacaaaggtcaaacatgtacaatacaatagaacgaatacaagtgtatacatac

SEQ ID NO: 24552 - DNA, 2080 bp, Zea mays
  Clone ID: LIB3632-031-E9_FLI
gtttgaaaagtgcagcgttcctccgtttcgcttctcccgctcccttccgcaacggcgtactccctccgccgcccgccgaccgccgactcccgccgcaaaatcctgcgtcagaagcgccgattctcggacgtcctccggatctgagacaccgagcgcactacgagctgtagctgtagtgacctaaaaatgagtgagggggatgctactcagcttgcccttgagaaaggattaccgcaagtgtctaatgatgatggttcgagtagtcctgcaactatgcacaagttgaaagttgacacagaagatgctggaagcaaaattgaatcacccactccagagaagcttgaatctagaagcaaaggggttgttgtgagttcgttggcaaggaatttacttgcagagaggtacaaagatagatttgcaaatcagttcctggaagatgagggtgacatagatgatgaagactataatgacagtatttcgccaggcatgagccgatctcagagatcaagaagcattgaacttctggagaagcacaaggatttactgaatctttttaatagaatggagagttctataaggttgctacgcttacggaagaggatggctacatttaataatattgccacccaggtggaaatactcgcaaaaaggaagttatcgtactgtcatttggcccaaatgaagtatttgtttccagaagcaatccagattaagagggtacttctacatgacgagaaaagcctatgcatgtatgctgatatggaaatcatacttgtaatggatgttgtggaatacacaagtactgatcactctccatccatgacaatttgcgatgctttttactcgaagcttttgacatttttggatgctcatcataagggtacagacattccagaggcaatcttaccagaaccctttaacttgaggtcaaggggccagttaaatcttgaggcatcacataatggacatgctgctgagccacatctgcaaggcaccactaaggatggattctcaaatgcttcccacttcccacaatcttttcgaaagctaatgtcccagaaagtcattactgatggagctgaaaggactcaattgctacttgatccaacaaaactgagctctgtgagtgcttatgatacagaaggaacaaacagaagccctaaaaagcaagacaaacatgcttcagttacagtgaactctgaaatttctgctactccaagccgtcatttgatctctcgttgtcaagagggtacgccaaaacaagagaccttagaatcaccactgttggctcaaacaccagcaactcagacacccaaaaggcaattgcccactccacttgagaaacttgaggccacatgtggacacatttctgaaccacgttcagctagttctgcccgcagatcactaaatacatctttaaaatttgaagggggaagcccttcttatcatgatagaatggaacatgtggctacatctaaaattggaattctctcggaagattcatctagtttcaacaagtcattagaggagaatggtcctgtcttctttactgatagagacaaaatcaatctggcagacccagtgggtgtccaggaaaagatggcttcgttacgttccacatttggcatcgtctgcgatatttctcattctatcaagaattcgctaattacaaaacaggagcttttccataatattcttgccaacaacttggagatagaacagatgggagagatagaagagcagctacatattttagaggatctggctcccaattggatatctaagaaggtgataaatggagaagaaatactttacagctttgaaactatagcagatcagaattcagtgtgggaaaggcttgtagaagctgtgtgaggtgtggaatagctgggattggtttaaagctaaagaatcagccgcatagtactatgtatgtaacgctaacggaacccatcaaacagccacattttctcatcatggaatcctcaggattgctcgtcttattcaattttaattttttcttctgttgcattgctaatgtgctaattacatgcttaatactgaaatttctacaagacat

SEQ ID NO: 24553 - DNA, 2978 bp, Zea mays
  Clone ID: LIB3632-031-G12_FLI
ggcccccgcggcgccagcgggcctggcctccgtcgcggtcgcggtcgcggttgccgtgctcgccgccgcggcgtcggcggccgtcacctacgaccgcaaggccgtcgtggtgaacggccagcgccggatcctgatgtccggctccatccactacccaaggagcgtccccgagatgtggccggatctgatacagaaggccaaggacggcggcctcgacgtcgtgcagacgtacgtcttctggaacggccatgagccctcccgtcgacagtactacttcgagggtcggtatgatctggtgcacttcatcaagctggtgaagcaggccggactctacgtgcacctccgcattggcccctacgtctgcgccgagtggaatttcggtggtttccctgtttggctcaagtatgtcccgggcattagctttaggactgataatgaaccgttcaaggctgagatgcagaatttcaccacaaagatcgttgacatgatgaagtccgaagggctctttgaatggcagggagggccaataattctttcccagattgagaatgaatttgggcccttggagtgggatcagggagagcccgccaaggcctatgcgtcatgggcagctaacatggcggttgcgctcaacacaagtgttccatgggtcatgtgcaaagaagatgatgccccggatccaattattaatacttgcaatggattttattgtgactggttctccccaaacaaacctcacaagcctacaatgtggactgaggcttggacatcttggtatacaggatttggtattccagttccacatagaccagtagaggatctagcatatggtgtggccaagtttattcagaagggtggctcttttgttaattattacatgtatcatggtggaacaaattttgggcgcacagctggtggtccattcattgcaactagctacgactatgatgctcctattgatgaatatggtttgctgagagaaccgaaatggggtcacttgaaggagttgcataaagctatcaagctttgtgaaccagcattggttgcaggagacccaattgtaacttcacttggcaatgctcagcaggcatctgtttttagatcaagcaccgatgcctgtgtggccttccttgagaacaaggataaagtatcttatgctagggtatcattcaatggaatgcattatgatctacctccctggtccataagtattctcccagactgcaaaacaacagtctacaacaccgccagcgttggaagtcagatttcacaaatgaaaatggaatgggctggaggattcacatggcaatcatacaatgaggatataaactccttgggtgacgaatcatttgcaacagttggattactggaacagataaatgtgacaagggataacacagactacttatggtatacaacatacgttgatattgctcaggatgagcagtttctcagcaatgggaagaatcctatgctaactgttatgtcagctggtcatgctttgcatattttcgttaatggacaactaacagggactgtgtatggaagcgtagaagatccaaaattgacatatagtggaaatgtgaaactttggtcaggcagtaacactatttcatgcttaagtatagcagttggtctcccgaatgtgggagaacattttgagacttggaatgctggaattctaggtcctgtgacactggatggcctaaatgagggaagaagagatctcacatggcagaaatggacctataaggttggtctgaaaggtgaggctttgagtcttcattcacttagtggcagctcttcagtagagtggggagaacctgttcagaagcagcctctgtcatggtacaaggctttcttcaatgcacctgatggtgatgagccattagctttggatatgagtagcatgggtaaaggtcaaatctggataaatggacaaggtattggaaggtactggcctggctacaaagcttctggaacctgtgggatctgtgattaccgtggagagtatgatgaaaagaagtgccaaaccaactgtggtgactcttctcagagatggtaccatgttcctcgttcatggcttaatccgacggggaaccttttggtgatatttgaggagtggggcggtgatcctaccggaatttcgatggtgaaaagaatagcagggagtatctgcgctgatgtctccgaatggcagccatcgatggcaaactggcgaacaaaaggctatgagaaagccaaggtccacctccagtgtgatcatggacggaaaatgactcacataaaatttgccagctttggcacaccacagggctcctgcgggagctactctgaaggcggctgccatgcacacaagtcatacgacatattttggaagagctgcattggtcaagagcgctgtggggtaagcgtggttccagatgcatttggtggagatccatgccctgggactatgaaaagagccgttgttgaggctatatgcggctgagtcatatgatccatataacgtactggtttctacaataatgttaccctatatcaagctggcaagaggtgaaagtggcggcaactgcgacacacggattgccagggtttacaggaattagttgtatgttagatttaagcatcgtatgtgtatgtaacttaggtcacatgagacttgcatggaagaagtggttaggaccctagctgtgagaaactaagtcttgtagctctctacacagtagaattggtctggcaggtgagggtgcagatgagactctgctttattacctgagtccatgtgcgcggtggctcttgggttggagattgccaaaaggccagcaattggctttgcattatctggtcattcatttttttggtcattggagggtgcaatgtaaatgttcagggtcaatcatttatgaatttttctagctagtaatgaaacagtaaagaaaatgttggttcagattataaaacaccagttatcttcc

SEQ ID NO: 24554 - DNA, 992 bp, Zea mays
  Clone ID: LIB3632-031-G9_FLI
cacgttgtcctctgttccatccccgttcgttccacgaaccaaaccaaacacgctccacaaaaagaggtcagtgtggacgcttgaccgcgaaaattatatagacttctactcggctgcatctttgctccggtcgatgcacgacaagaggagaatggggacggaggccgacgccgcagccgtggacctactccggtcgcagatcccgttccagaccgacggggagttcgttctcccgccgcgcggcgtcgggctcgtcctcgtcgacctctgcaacggcttctgcaccgtcggcgccgggaacctcgctcctgttgcaccaaacaagcagatcagtaagatggtggaagaggccgcgaggctctctaagctgttctgtgatagaaacctaccaatatttgcattcctggatacccattatccagataagccggaaccaccatatccccctcattgtattattggtactggggaggaggactttgttccagatctggagtggttggaaaaggagccaaatgtgactataaagaggaaaagttgtattgatgggtatatcagctgcatagagaaggacgggtctagtgtttttgctgattggattggaaaatatcagataaaaactgtcttggtgctcgggatatgcacggacatctgtgttttggattttgcaagctcaactctggctgctcgaaatattgaccgagtgcctccattacaggatgtcgtgatttattcaggggggtgtgctacatatgaccttcctgttgagattgctactaatatcaaaggagctcttgcccatccacaggatctgatgcatcatattggactctatatggccaaaggaaggggtgcaaagatagttgacagggtggttattgaaccttgaataaaaaaactttccctcgtcacagtgatgttgctagggtttccttccattgtaacaaccagatatatatatgcatcttggcagaaagttgttgagatttttt

SEQ ID NO: 24555 - DNA, 1546 bp, Zea mays; identical to SEQ ID NO: 3542
  Clone ID: LIB3632-032-D6_FLI

SEQ ID NO: 24556 - DNA, 1482 bp, Zea mays
  Clone ID: LIB3632-032-E12_FLI
gttactagctagcttatattgcatatctcctccccagctcctccgtcctcgctagctcgtcttcttcttcttcctctcatcttttgcttgtcctccattattccatcgatctcctattcctgtgccgaccgaggccgccatcgtcaaagagaaacacagagcgggtcggggactccctcgggggaggctgctagtgctagctagctcgaccatatacagtttgtgggcgcggccggccgggcaagctgctaaggtaccagcataccacccatccatggctttcctggtggagcggtgcggcgagatggtggtgtcgatggagagcccgcacgcgaagccggtgccggcgccgtttctgaccaagacgtaccagctggtggacgacccctgcaccgaccacatcgtgtcgtggggcgacgacgacaccaccttcgtcgtgtggcgcccgcccgagttcgcccgcgacctcctcccaaactacttcaagcacaacaacttctccagcttcgtcaggcagctcaacacctatggcttcaggaagatagtggcggacaggtgggagttcgccaacgagttcttcaggaagggcgccaagcacctcctcgcagagatccaccggaggaagtcgtcgcagccgctgccgacgccgctgccgccgcaccagccctaccaccaccaccaccaccacctccaccaccacctcagcccgttctccccgccgccgctggcacagccggtgccgtcgtaccaccaccacttccaagaagagcccatcgccaccgccaccgcgccgcacggcggtgctcaagccgccgccggcggcggcaacaatgaaggcagcggcgccggcgccggcgccggcggggactttctggccgcgctgtcggaggacaaccggcagctgcggcggcgcaactcgctgctgctgtcggagctggcgcacatgaagaagctctacaacgacatcatctacttcctgcagaaccacgtggccccggtgacgagcccctcgtcggcggcgcacgcgtccctgcccagcgccggcggcggcggcgccgcggcgtcctcctgcaggctaatggagctggacccggcggactccccatccccgccgcggcggccggaggcggacgacggcacggacacggtgaagctgttcggcgtggccctgcagggcaagaagaagaagcgggcgcaccaggaggatggggacgacggcaaccatgagcagggaagcagcgacgtctagccgccggccggcttgcattgctagctctctcgttcgtgtacatacagagatcagatcagagagtagtagtttgcctcgctagctagctaggctaggctttggtaattttcttctgagtgcgtactgaaattaatgtgcaagagcgaagtgtttgtctgagtaaaactaacaacaatctacggatgcgtgcatggaagctaagctatagatgcagaggcttgcaccaccttctc

SEQ ID NO: 24557 - DNA, 1493 bp, Zea mays
  Clone ID: LIB3632-032-H2_FLI
gagagagcacgtactttcctccacagccacagaggtaacccatggggtgcgcgagctccaaggccaacgccgacgtcgcggtggccgacgtctactgcccgccgcccaccagcgtttccctcttcgacatcaacgccgtcgaggagccctggctcatcgccaagcagaacaaagccgctgatgatgacgacgacgacgacgaggaggaggaggaagagacgaccgacgacgacgatgaggaccacgacgacgaaaagcagcccgccgccaagaccgtggtgccgctccctctcctcgacaagctcgagggctacgagctcgctccggcgtcgtggtccgaggtcagcaaggccctggaggacatgaagcccgtcctcgactccaagtcgccgcctgctcctgctcctgctcccaagaagaagaagactaagaagaagaagaagaagaagactaagacgaagcagcagcaacagccgatgcagcccgtggtgcctgctgccacggacgacggcgacgctgctgctggtagcaagaaggcgccggcgacgtcgtccgtcgacgacctaccagacagcagcaggcccgcgccgccggagctcgcgggtcggcgcgtcgtgaaggacaacccgttcctgacgcgcgaccgcgagagcaacaagggcgccggtgctgacggcggcccacggtggaagcggcgggacccgttcgagggctgccccgagcgccggcccccgggcgccgcgggcggcggcgtggtgctgtacacgacgacgctccgcggcgtgcggcgcacgttcgaggactgcgagcgcgcgcgggaggcggtggaggcgtgcgccgcggcggcgggcgtggaggccgtggacgagcgcgacgtgtcgctgcacggggagtacctccgcgagctgcgggagctgctgcccggcgacggcggcgcggcgcctccgccgcggctcttcgtcatgggacgctacgtgggcggcgccgaggagtgcgccaggctggccgagtccggcacgctgcgggagatgatgcgctgggtcaaggcccgcggcgaggcgtgcgcggccaaggacggccgcggctgcgagggctgtggcggcgcgcggttcgtgccgtgctgggagtgcggcggcagctgcagggtgctggtggcgccgccggacggagggacaccaaccaccaccacagagaggtgcgccaagtgcaacgagaacggcctcatgatgtgccccatctgccactgattgcattgcatgctcgtttcgtttgcattggattccatggatccgatgcaaaaatgaaacgtatattgttcaaaccacgatcattccatcagttgcagttttatttatacacagtacgtacgacgtgcgtacaacaagatttggacgtatccttgttatagtatatgtgtatatgtatatgtatattgtacacgtactatgcatgttgtcacaatgtatggttgtagggctgtgcaaatttaaatg

SEQ ID NO: 24558 - DNA, 1278 bp, Zea mays
  Clone ID: LIB3632-033-B7_FLI
caacaccgacccccgcttcaccaccacaatccacaagcagctccggcctccagctgagactctcgagttccgagtcgtccgtacgtgtcgtacgtcccagcagccggcgctcgtcgtacgtactgcgtacgcgcgcaagcgcttggtacgaccgattcagcacgcatggcgatgaagaagggcggcggcgcggcggggctgaagcagatcctgaggcggtgctcgagcctggggcgtcgtcagcagcacggcgcggggtacgaggaggaggaggacgaggcggcggcgacggggctgccgtccgacgtgccgcgcggccacttcgcggtgtacgtgggcgagcggcgccgccgcttcgtggtgcccatcgcgctgctggaccgccccgagttccgctccctgctgcgccgcgccgaggaggagttcgggttcggcgccggcggcatcctcgtcctcccctgcgaggaggtcgccttccgctccctcacctccgcgcttgcctgcgcccggtgaaggggtgcgggttgcctgccacgccgcgtcgccgccgctatattcgttcgattcattggtatctcggcgagcttactcacctacactagctactagctcggcgagagctccagcggttacgttgatgatggcgtgtgtcgtacgtgtgtaaatatagattactcgtattagagaaaagcgctaagctaagaacaggccggtggcgcggccggccggctgctgcgcatgcgcggaggattgtgccagcgcgcccccggcccggccggcattggagacggccgaccgaagattcgaaggatgaagcacaaggacatcgacggatcagatgcatggagctgagcgagagcgagagctccagatcagcttcgctgcagtcggctacgtacggctatcatcatctatctagccgtacgttgccacgttggccgctgctagctgcattgcatgcatgtacgttgtttgtgatgcgtttcacttactggccccctgctggtgcaacaagtgaaccatcattttttcccttttttttcggtacatgcaaagatactgctggctgactgtggcctgtgggtacgtagccagaggcccagagctaggtagctggtatatgggcgaccgtacgcaccgacatcaagcattcagatatgcacacacagcatacaaacaagtgtgtgttccgtccatccttcaattccttgcagcttcggttcgtttttatatatcctgatgattcatcgatcaataaatataggagtattttttttt

SEQ ID NO: 24559 - DNA, 1210 bp, Zea mays
  Clone ID: LIB3632-033-D2_FLI
gaatctttcagctcacacctccctatccctccttcccttctcctcctactgctactgctcgccaggtcccctcgctcgctcgctcgtcgtcttcaacctcacacaattatttgtgctcccgctccttccgtccgtccttcctccccccttcccctctccctcttccaaccgccgctcccgctgccttgcctctcagcccagggacgccaaggtctctgccaggatggtgtaggccgtgcctctcgcgcattatgaggtgtggtggtgagggatgggcgatggcctttgcagatgaaggagcgacagcgctggcggcctgaggaagacgccgtcctgcgcgcctacgtccggcagtacggcccccgcgagtggcacctggtgtcgcagcgcatgaacgtggccctcgaccgcgacgccaagtcgtgcctggagcgctggaagaactacctccgccccgggatcaagaagggctcgctcaccgaggaggagcagcgcctggtgatccgcctgcaggccaagcacggcaacaagtggaagaagatcgccgccgaggtgcccgggcgcacggccaagcgcctcggcaagtggtgggaggtgttcaaggagaagcagcagcgggagctgagggacagccgccgcccgccgccggagcctagccccgacgagcggggcaggtacgagtggctgctcgagaacttcgcggagaagctcgtcggagagaggccacagcaggctgccgctgcgccgtcgccgctgctcatggccgcgcccgtgctgccgccctggctgtcgtccaacgccgggccggccgtcgccgccgccgccgtcgcgcacccgccgcccagaccgccgtcgccgtccgtgacgctcagcctcgcgtccgccgcggtggcgccgggcccgcccgcgcccgcgccatggatgccggagcgcgccgcggccgacgcggcgccgtacgggttcccgagcccgcctcagcacggcggcgccgcgcccccgggcatgacggtcgtggacgggcaggcgctggcggagctcgccgagtgctgccgcgagctggaggaggggcggcgcgcgtgggcgacgcaccggcgggaggcggcgtggcggctgaagcgcgtggagcagcagctggagatggagcgcgagatgcggcggcgcgaggtgtgggaggagttcgaggccaagatgcgcaccatgcggctggagc

SEQ ID NO: 24560 - DNA, 1453 bp, Zea mays
  Clone ID: LIB3632-033-E12_FLI
gagagaacctctctgcaggtgcagccatggcgaagcccgtctccatccaggtgtggaaccccagcggcaagtaccgcgtggtgagcaccaagtccatgccgggcacacgatggatccgcctgctcaccgacaacgactgccgccttgagatatgcaccgagcacaagaccatcctctccgtggacgacatcctggcgctcatcggcgatcgctgcgacggcgtcattggacagctcaccgaggactggggggacgtgctcttctctgcgctcaagcgcgccggaggcacggtcttcagcaacatggccgtcggctacaacaacgtcgatgtcgaggctgccaacaggaatggcatcgcaatcggcaacacgccgggcgttctgacggagacgacggctgagctcgccgcctccctctcgctggcggcagccaggaggatcgtcgaggctgaccagttcatgagggctggcctctatgacggatggctcccacacctgttcgttggcaacctgctcaagggccaaactgttggagtcattggagctggtcgcattggctccgcctatgcacgcatgatgattgagggtttcaagatgaacctcatctactacgacctgtatcaggccacacgtcttgagaatttcgtcacagcatatgggcagttcctcaaagcaaacggtgaggagcctgtcacctggaagagggccgccaccatggaggatgtcctcagggaggctgacgtgataagtctgcatccggtgctggacaagaccacctaccatctgataaaccccgagaggctggccatcatgaagaaggaggctgttcttgtgaacgcaagccgagggcccgtgatcgatgaggccgcgctggtggagcacctcaagggctaaccccatgttccgcgttggcctcgatgtctttgaggatgagccttacatgaaacctggactcgctgacatgaagaacgccgtcgtggtaccgcacatcgcatcagcctccaagtggacacgcgagggaatggcaaccctgtctgctctcaacgttcttggtaagatcaaggggtaccctgtgtgggggaaccccaatcaggtggagcccttcttgcaggagaatttgacgccaccgcctgcctgcccaagcatcgttaatgccaaacaaattggcctgccatcggcaaagctttaggagcgaacactgacaggctggtatctacatgttgaagatgtgtcgtcgtcgtctccaccacgcgcacatatatgtacatgcatgtggattgaggtcatgcatctgcagagcaggtagcacatattaatttggatcatatatattgaccaatacacactgtatgctagattgctaggttgctgtgcatggatcatattgatcaatgacgaccaggcctccctccgtttcccttctatatttaggacctatttggttccttaagtcc

SEQ ID NO: 24561 - DNA, 2216 bp, Zea mays
  Clone ID: LIB3632-033-E6_FLI
ttctccccatcaacgcttcattcgctccagtctcatcgaatccaattcacagccagccagacagggcgggagatctccaagaagctatcttggaatccgagaacaccttgcattcgcggtcagtcaaggattcgaattctgacggacgagctctccggccaaaaaagtcagataattttcgggatagctcgggtggcgtctcggcaaccggaggagaccccggggggattaaggaaggggcaagatggtgaggctgccttacacaacggcgctgaccacgctgttcagctacgggctgctcttcgccttcggccagctcagggatttcttccgcaagttcgtcgactggttcaaggccaagaacgtcaagggctacgcgccgatctgcctgggcctggaggatttctatgtgcgacgactgtacctgcggatccaggattgctttggtaggccgatcgcaagtgcacctgattcatggtttgatgttgttgagcgcacctcaaacgacaataacaagacattacagcgtacctcaaataccactaaatgcctcaacctgggctcgtacaactaccttggctttgccgcagcagatgagtactgcactccacgtgttattgattctctcaagaaatactcagcaagcacctgcagtgttcgtgttgatggaggtacgaccaagcttcacactgagctggaggagttgactgcacgttttgttggaaagcctgctgctattctctttggcatgggttatgttacaaactctgccatcattccctgcctaattggaaagggtgggctgataattagtgactctctgaatcataactcaattgtcaatggtgcgagaggatctggtgcaactgttagggttttccagcataactcccctgctcatttggaagaggtcttgagagagcagatagctggtggtcaaccacggacacacagaccatggaagaagatcattgtcattgttgagggtatctatagcatggaaggggagctgtgtaaactccctgagattatagctgtctgcaagaaatacaaggcttacacatatctggatgaggcccatagcattggtgctgttggacagtctggccgcggtgtttgtgaactccttggggttgacccagctgatgtagatataatgatgggtactttcaccaagtcttttggatcatgtggtggatatattgccgcatcaaaggagataattaagcacctgaagcatagttgcccagcccatctgtacgctacgtccatgtcaccaccagcagtccaacaagttatctctgctattaaagttatccttggggaggatggctccagcagaggtgcccaaaaacttgcacgcatccgtgagaacggtaatttcttcaggtccgaactcaagaagatgggtttcgaggttcttggcgacaatgactctcctgttatgcccataatgctttacaatccggctaagatccctgcattctctagggagtgccttagacaaaaggtcgccgttgttaccgtggcgtttccagcaacacctcttcttcttgctagggcacgcatctgcatttcggcttcacacactagggaggatttgatgaaagcccttgatgttatcagcagagttggtgatcttgtgggcatcaaatacttccctgcagaaccaccaaagattgctgaagctggtcatgataagctggagtaggagcgaaccctgaatcgccccatgagtgattgaagttgttagaatcccttccggagttatcaacagatcattatggaagcaagcatatatggagccgtttcgctgggattttgtggatacgcaaagagtccatgatctgtcctattaggcagctgacagttatttgttgattgtacaactgttcttccaattgtgtatagctggttgaaatttagttgttctgttgctaatctgtttcaaatacgtagtagaatcggaggcaatataaactttcagcagagcattactgagtttcccctcgcagaccactgacgacaatgaaggcctcttgctttcatgtatttttctttctttctttttgtaatcagtctgttatatgggatcagtaggtgtccctttccatgaagttataggctactttgctaagttatgaattgtttttttttttgtgtgtgtgtattcagtggatgttaaatgcggccaatgacaatggttatttcttagc

SEQ ID NO: 24562 - DNA, 517 bp, Zea mays
  Clone ID: LIB3632-034-B12_FLI
ctcgccttccgaggaaactcaccagcccaccacagacccgagcggaagaagccatgtccgggcgcggtaagggtggcaaggggctcggcaagggcggcgcggagcgtcaccggaaggtgctgcgcgacaacatccagggcatcaccaagccggcgatccggcggctggcgaggaggggcggcgtcaagcgcatctcggggctcatctacgcgctcaagcgccagggccgcaccctctacggcttcggcggctaggctgatgggctcctcgcgatgttctccccttctgcagatgcgacgttttctggccgtgcccacaagtcttgcggtcaagaaagtttcaggaactcttgttagttcatctctggctgtggtaggtttatctgaatcgtgagactagtaggtttatctgaatcgcgaggctagcaggtttacctgaatcatgaagcagtgatgaaattatgtgagcatcggatgttggaaatcgagcttgtaatgcaatttgttactcttgatgc

SEQ ID NO: 24563 - DNA, 1623 bp, Zea mays
  Clone ID: LIB3632-034-D2_FLI
ctgcagggccagcgaaagcttcgttgttccggcgggcagttgcaagcaaacaactgccgcgcgcataacgccattgaggtaactggctagtgctagtcccaccctttgcacggcagcttgctagctagctacctacctcgggcgcgcgcggcatggcgaggcggacgagcggccccaagaagaagctgaggaggggcctctggtcgccggaggaggacgataagctcgtcaaccacattgccaagtatggccacggctgctggagttccgtccccaagctagcaggtctagagaggtgtgggaagagctgcaggctgaggtggatcaactacctcaggccggacctcaagaggggagcgttctcgcaggaagaggaggacctcatcatccatctccattccatgatgggcaacaagtggtctcagattgcttcgcagctgccggggcggacggacaacgaggtgaagaacttctggaactcgtacgtcaagaagaagctccggcagcgcgggatcgacccggccacgcacaagccgctcccgctggccgccgagggcatcagcagccgcacggcggtgttcagcgacgccgagctcatcctgtcgtcgccggcggcggcggcggggcggcacatgccgccgccgccagtggcggcatcggcggcggagagctacgtgtacagctacagccacagcagtggcggcgcgagcgacggctctctgcagtcgctgtcggggtacaacagcaacagcaagcaaacagctgcggatcacttgggtgccgcagccgcagcggggtacctgcagcaggagcaggacccagcagcagcagcagcagcagccgacgcgctgcactgcggaccctccggtgccccggcggtcgttctcccgtcagtgtccagctccagcacgctgaactcgatggctggcctaagccccgcggccaccaccaccgacgaacagtgcaccaacaactgtagcagctgcagcttccacagcgggttggagccgtggctggagctgggcagcacgagcggctactacggcgcctccgccgccgtggaccactacggcgcggcgctggacgagctcaagtggtccgactacgtgttcgacggcggctacggtggccagccgggacagggcatctacggcgacagcaaggacgccgtgcagttcgtggacgccaacgcgctcagcagcagcagttggtgcttgaattgatccccgtcggtcgatcccaacgcgctcggcggcgagcaattaactaatcggccggccgccaattccaactccatctccagcacagcagagacacacactgatacacgtgtgcatgtgttcctacgtgcctacctacgaggctacgactacgattgattggttgattggtgatacataaagtagctcatacatgtttgcattggtgagcttcttgtttgtaaattcaattttcgtcttctttcggattggattacagggtttgttaattttccggcgcggtcggtcgacatgtagagagtgcatatggtgacggtgattggggagtgacgagacatacatgtaatggaacatatatatagagagagagattacatatataataataatacatatttattat

SEQ ID NO: 24564 - DNA, 1006 bp, Zea mays
  Clone ID: LIB3632-034-D6_FLI
cgaatccgatcccgatttaattcgcccaaatccgtcgattaatccccacgccggccgcgtcatgctccggccattcctctcccctcccctcaccgctctgccgccgccccctgcctccaccgcagcagccgcgggcgccgcggcgatgcgacccgcatcctcctcctcctcccgctcctcggccggcggaggcggggcccaccaccaccaacacaaccacggcggccacagcatctccgtctctccgccgacgtgcaggcacgccccatcgtcggccacgctcgatctcctcatcctgcttctcgtgctcttctcgcttgccttcctgctcgcctcctcgctctcgcacgtcgcgcgctcgctctccccgctgctcgccacgccgcccgccgccgcggcgctcgcctacgccaccgccgcactgccttacctggccgcggcggccgtgctcgtcgccaccgcgttcctctcctgtcgccggctcccgcggcgccggtgccgcaacccgcgccggcgccggaagcaccgccggcggcgccgaagcatccatgtggcgcgagatcgaggcgctgccgtggaagggcggccagggcggaaacaacccagactacgagtgccttcgcgccgaactccgccggatggcgccgcctaacggccgagccgtgctgctcttccgcaaccggtgtggctgccctgttgctaaactcgaaggatggggcgcccccaagagcaaacggcgcaacaagaagggcacgcaaggttcgttccatgaccgagggctgaggtgaacgcaagtccggtgtcgccagttgcaaacttgcaacactgttgctttagactgccatgttgaataatacttctagcaaaagatacgccaatcacagtttacatgtgggttgcgccatgattgtattgttacgggtgttcggtgaaccccaacagttatgccgatacaaagacgagacgcaacaatagaactgttaataaaggacaatgggcttgtttc

SEQ ID NO: 24565 - DNA, 1534 bp, Zea mays
  Clone ID: LIB3632-034-D7_FLI
ctcacagccacgccacgccacgagagaagaatgccgccgacgctgggcctgctcctcgcggcggcggcggcggtcctgctgctgctgctgccgccgccaccatcggcgggggcgcaggagacgtgctggtcggggccggcgccgcggcgcggggcgtggatgtccgtggccagcttcggggcgcgcggggacgggcagacgctcaacacgggcgcgttcgcgcgcgccgtggcgcgcatcgcgcgtcgccggggcgcgcggggcggcacgctgctgtacgtgccgcccggggtgtggctcacgggccccttcaacctcacctcccacatgacgctcttcctcgcccgcggcgccatcgtccgcgccacccaggacacgtcgagctggccgctcatcgacccgctgccgtcgtacgggagagggcgcgagctgcctggtgggagatacatgagcttgatccacggccacggtctgcaggacgtcttcatcacaggtgagaacggcaccatcgacggccaaggcggcgtgtggtgggacatgtggaagaagcgcacgctgcccttcacgaggccgcacctgctggagctcatgtactccaccgacgtcgtcgtctccaacctcgtcttccaggactcgccgttctggaacatccacccggtttactgcagcaacgtagtgatagcaaacctgactgtgttggcgccgcacgactcccccaacaccgacgggatcgatctagattcaagcagcaacgtgtgcgtcgaggactgctacatctccgccggcgacgacctgatctccatcaagagcgggtgggacgagtacggcgtggccttcggccgcccaagctccggcatcacggtccggaggataaccgggtcgggcccgttcgccggcttcgcggtcgggagcgagacctcgggcggcgtggaggacgtcgtggccgagcacctgagcttctccggcgtgggcgtcggggttcacgtgaagacaaactcgggcaggggcggcttcatccggaacgtcaccgtctcccaggtgaccctggacggcgcccgctacggcctgaggatcgccggcgacgttgggggccaccccggcgcgtcctacaacgcgagcctgctccccgtcatcgacggcgtggcggtcaggaacgtctggggccggaacgtccggcaggccgggctcatacggggcatcagggactcggtcttcagtaacatttgcctctccaacgtgaagctctatggcattggcagcgactccatcgggccgtggagatgccgagccgtcagtggcagcgcactcgacgtgcaaccgtcgccatgtgcggagctggctagtacgtccgggacaggtttctgtacctgaatcagtttttccgcctcctatagcagcaataaagacgtcagcatttctccattttgttcatcacctacaggctacagggccctttgtttctttggcaaactcttctgcgattcagctgtcactgttgaattctgctgttggcagaggataatctacttttacc

SEQ ID NO: 24566 - DNA, 2542 bp, Zea mays
  Clone ID: LIB3632-034-F9_FLI
ctttgcataggacgcatccgccagaccgccactttcttccgcatttcctcaaacaattcgcgcgccgccgccgccgctctccggcgtctgctactcggctccgtgcccccaccaggcagcaggccaccaccccaatccctctcttccttcagagatgcagaaggtgcggctcaaatgggttgcctgctgctcgaccacctctcgcgcctccctggtacctcccccgtgccggcgcgctccctcgcacgcctccaaaagccgcttggcctgacggtgcctgtgcttcgcttccttcgccgccatcccacgctcttctccgagcaaccgcaccctcggttccccacgctgctctccttttccctcacggctgcgtcacacaccctcctgtcccgccttgccgatgcctatgcgcacgacgcgcacctccgcctcgcgcgcctcctcctcctcacccgctccaggtcgctcccgctcgcctccgtgctcccgctccgcttcgacctcggactgccgttcaacttcgccgccgcgttcccggcctcccaccccggtgtcttcgccgtcgccaacaaccgcatctccctacggtccacctccggcctccccgaggacatcgccgtctcctctctccaacgccgccacgccgcggccatcgactccgcgacctaccgcgcgctgtcccggccgccgtcctcgtcgagcgccccgctcgcgttcccgatgcgattcccgcgggggtacggcgggatgaagaaggtcaaggcctggatggatgagttccaccgccttccctacatctcgccgtacgacgacgcgtcagggatcgaccctgagagcgacatttacgagaagaggaacatcggcttgctacatgagctacttgggctaacggtgcacaagatggtgcggaggaacgccatccggcttcttcgggaagagctgggcctgccacacaagttcactaggctgttcacgcggtaccctggagtgttctacctgtcgttgaagtgcaagacaacgactgtggtgcttcgtgaggggtacgagagaggtaagctcgtggagcagcatcccctggctgctgtgagggacaaggtgcattatgtgatgcgcactggagtgctgtaccgtggaaaaggtttgtccaagcttgttctggatgaggatgtcactgaggaagagggtgcactgaatggggaggaatttgaaggggagggaatggatggggatgctgatgtcgagtgcttcagaatggagattgtggatgacgatgggtctgctgatgatgtggatgatgaaggttatagtgatggttgacatggactgatgactcttgccttcttgatttatgttttgcatttgtggcttcagtcgtgaattacagtgactgttttttattcaacttattagtggcttcaattgagaagttcagcaagttattgtagattactgtacacaaaatagaatgggaaatatgtcagccttttttattagctaaagtgcagtctcttcgtataataagacgtctcgttttcgaattcatactggtgcggactcggagcagatgaactgatgaagtaccgggttggacgaaagcccttcatatttttagtgtaaaaagctgtacctgaacgtgccagtgtttaagcctgctggcatgaacttcgaaggatatagcaatcttcaatttgatggattacattggcaaaaaaaaaaattcaagctctgctttcctgcatagtcacatgcaaaccaggaggtatcatgcgtctggtctggtcatgggctcatgaaactgaaggtgcgcagggggtgcatggaaactgccacttgaagtctggttgcagaattgggcagtgtggaagcatgactgcatatatgagtatgatgactgctaattgggttgttactcaggatggcaggattccaggttcagtgattcgtgtctggtcgtcttgcatgtttcatctcccttctttttccctccctgctcttgtttttgactagtctccgtcggcaatgcgtcagatccagttcaaatcaggtcactggtcaccctagagttagacctctaaaagcagtgcaaactatttacgattctgcgtggctgcacactcggcgtctggaagcagttctcgttggctatttgcacaggcgtctggaagcagttctcgttggctcactgaccaaaaaaaaaaaaatctgcaaactggagccgactcttctctctgcaaacaacttgattacggttttttctctctgtcagaagagtgtctcaaatcttatatatatcaaggatccaatcgctttggacttacataaatcaactgaaacaaaaatacaagccatccagtcatcccggaaaacaggaaggctgccggcggcggccagagagtgaatataaagtcttagaggcaataagtggtttcagctgacgagttatcgtgccacttttgatgtactttattaaccgataatcgtctcataatcttggattgaactttcgactctcgtggttgttttctatcacattgctccgtcc

SEQ ID NO: 24567 - DNA, 1599 bp, Zea mays
  Clone ID: LIB3632-034-H4_FLI
agcgttccaggtccagctccccccgcgatcccgacgaccccgtccgcctcggcctgcgcctccccgctacaactacaagggtccgcccgcgggcgctgcggtaccagcgagcccctcctcctccacactcagcggcgcggagatcctgtcctgtgccccggaccgagagaagccaggcgccggcgtctggaattcggacatggaggcggcggcggcggtcgtaggcttcggcctgaccaggtggcaggcggcggcgctgtcggcggtggccggctgggtgtgggcggcctccttctacgacctcacgcgccgggcgcgcgcgctcgtccagccgtgggtcacgcgccgggtgcacgccgagacggcggccatcctcaggttccagaggctggagcacaagttgctggacaatatcttctctgtgctgtcatgcgttgtctccgtgcccttctacacgggattcctccctctcctcttctggagtggacacggcaggctggctaggcagatgaccctcctcatggctttctgtgactacctcggcaactctgtcaaggatatagtgtcagcccctcggccgtgctctcctcctgtaagaagagtgacggctacagaagacgagaaggaaaatgccatggaatatgggcttccatcatcgcatgccctcaataccgtttgtttgacgggatatttactacactacgtcctcacgtttggagaacatggtagtgttacagttgctgcgggtttatctctagctttcttgcttgttatgctagttggcatcgcgcggatatatctgggtatgcacagcttgaccgacgttgttgctggaattggttttggcatcgtcatccttgcattctggttgtctgttcatgaccgtgtcgatgccttcgttgtctccggggaaaatgttgcgaccttctgggcaggcctttctctgttgctgtgctttgcgtatccgaagccggagttccctactcctagcttcgaataccacacagcattcaacggggttgctttcggaatcgtgtacggcatccagcaaacatacttccacttccacacccctgacgccccggtcgtcttcagcgccgagctgcccctgctcacgttcgccgggcgcgtcctcgtcgggatcccgaccatcctggccgtgaaattctgcagcaaggcgctctccaagtggctgctgcccgttgtgtgcagcaccctgggcatccccaccgtgtcgtcctgctacgtcccggccctgagagccgacagcggcagcggcaaggacaggcagggcgccgggcacctgcagcggctgctgttctcccacttcccccggaaggcgtacgacgtggacacgggcatcaggttcgtccagtacgccagcctcgcgtggtccgtggttgacttggtgccggccatgttcgcccatctgaatctgtagccagctgcgtagaatttctgcttctttctcttttcgatgagctcccaatgcggcgcatcctgctcgtaagacatggatcagcttacgaggctgtaaatccgatggtctgtctgtttggcttgtccttctcgtatcgtatgtacctagctgttctcacc

SEQ ID NO: 24568 - DNA, 974 bp, Zea mays
  Clone ID: LIB3632-035-A1_FLI
gagaggaagaagagagcaggaggaggacgacgatggttggaggccgtcccctcttcgtgctcttcggctcctccatcgtgcagtacagcttcagcaacggcggatggggcgctgtgcttgccgacatctacgcccgcaaggctgatatcctgctaagaggatatactggctggaacacaaggcgggctgttcaagtcatggataaagtgttccctaaggattcagcagtgcagccgtctctggtgatagtttactttggtgggaacgactccatcgctgcccattcctccggcctcgggcctcatgtgccgctagacgagtacatagccaacatgagaaagatcgcggagcacctcaagagcctctccgagaagacgcgggtcattttcctgagctgcccgcctctgaacgaggagatgcttcggaagtcaaccagcagtagcatagccatactgagtgagatcgtccggaccaacgagacctgccgcctgtactccgacgcctgcgtggctctgtgcaaggagatggagctcaaggtggtggatctctggcatgccatgcagaagagggaggactggatgactgcatgcttcacggatgggctgcatctgtctgaagaggggagcaacgtggtggtggaagagatcctcaaggtgctcaaggaggcggagtgggagccgtgcctgcactggaaggcgatgcccacggagttcgccgaggactcccccttcgacctcgtctcctccagcggcgacgccaccgtcaacccgtcggagtggacagtccacaggagaataccatgggactgactgaccttgtttctggccttatccctgggttggctccatgtctggactggaccaggatgcgtttgttctctgttgtgccttgatggaactggaatggctgggcgttgaagggactgtgtcataccaccatcttatctatttcatcagactatgagtttatcttct

SEQ ID NO: 24569 - DNA, 467 bp, Zea mays
  Clone ID: LIB3632-035-F3_FLI
tcactctctcactccactgcctccggaacaccctagcaatggagcccaactccagcatccctcccccggtgatgggcgcggcggtggcgtaccctccggcggccggcgccgcgtactccgccgggccgtacgcgcacgcgcacgcggcgttgggcgcgctgtacccgcctcccccggcgccgggtcccccctcctcgcaccagggcggcgcggcggcggcgcagctgcagctgttctgggcggagcagtaccgcgagatcgaggcgacgacggacttcaagaaccacaacctgccgctggcccgcatcaagaagatcatgaaggcggacgaggacgtgcgcatgatcgccgccgaggcgccggtggtgttcgcccgcgcctgcgagatgttcatcctggagctgacccaccgcggctgggcgcacgcggaggagaacaagcggcgcacgctgcagaagtcggacatc

SEQ ID NO: 24570 - DNA, 1918 bp, Zea mays
  Clone ID: LIB3632-035-G5_FLI
ctagactagtcctcttctagtcaccttaccccgtcgcttgcatctccccgccgccgccacgcgcccacgcttccttccgaacaaagctgtcgtgctgcctttcttgccgtccaactcaggcagccgtcctagtcctcgttggtcctcatctgctgcccttctacggtggaggagagaagaggagaggagcggagcggagatccagccgctttccggctgctttcttcttctaattgcggagcaagttccgtcaatactgcttgtgctgttgcgccaatttaagttcctgctgtccgcaaaaggagagcttccgcagctcctatggcaaagcctcccaatagcattggccgtagcagcagcatgccaagatcgaatgagggtttgaggctcatattttcggcagttataggtatcatgctgggttacctgtttgggatctccttccctacagtcaacataaccaagcttcacttcccttcgagtatcatatcctatattgaagacaggaactctggcatcacaacccagacattgttgaaccatgcttgggcatctgcaaacaatcgtaaaaagaatagctctgaatctaacactgatgaaattcccaagatttatgttcctacaaacccaaaaggtgctgagagacttccaccaggcattgtagtgtctgaaacagatctttatccccgaagactatggggtgatcctagtgaggaccttactagcgagccgaggtatcttgttacatttactgttggtattgggcaaaaggcaaatattgatgcagcagtcaaaaagttttcagacaaattcactattatgctgttccattatgatggtcggactactgagtgggatgaatttgagtggtctaaaagagcaatccatgtgagtgtcaggaagcaaacaaaatggtggtacgcaaaacgatttttgcatcccgacgttgttgccagatatgattacattttcatctgggatgaggatctaggtgtagaacatttcaatgcagagaagtacattgagcttgttcgaaagcatgggttggaaatctctcagcctggtttacaacctgataaaggactaacatggcaaatgactaaacggcgtggtgaccaagaagttcacaaagtaactgaggagagaccaggctggtgcactgatccacatctaccaccatgtgcagcatttgttgaaattatggcaacggtgttctctagaaatgcatggcgctgtgtatggcatatgattcagaatgacttggtccatggatggggtcttgactttgctcttaggaaatgtgtggagccggctcatgagaagattggagttgttgatgctcaatggattgttcatcaagcagttccttcacttgggaaccagggcaagtcagataatggaagagcaccatgggaaggggtaagagcacgctgcagaaaagaatgggggatatttcagacaaggctggctgatgcagagaaggcttattacttggagagaggcatcacgcccccgaattcaacagtagtttagatgaatacatgctcctcacatgccacggcaaggtttctgttgcgggaatctgctgcaaactggcatgttcatcgaagctgctgcaacccagggctacattaggggtcccacgaatcgccatgattgatcttagtgtcattcactttgttttaatgtcatttttttggttagtgagactagatgggatgtaagtaggagatataacagggactgtgatgacacccatttgtgtattgatgacctgatgcaatatggatgctgatagtccgtttctcagtaatcagtatgtaaattgtttgctgtataccagctgtgtgcaactgggtcaaatgatgtgttgtgctagtccatatgaagaaatatcaaggctagtttgggagcaagg

SEQ ID NO: 24571 - DNA, 2615 bp, Zea mays
  Clone ID: LIB3632-036-C11_FLI
ctggttttgatatggcacaatttctgtgggtttctcctttgattcataccactgtgtacttacgctgcgcgcgcgtgacttttaacggatgcgtgttcgttgtgcttgcagcataagctaggcagaggaagccgggacaaggtgcaacagttcatggcaattaccggcgcaagtgagaaagctgcccttcaggctcttaaagctagtgattggcacttggaaggagcttttgatgttttctacagccagccacaaattgctgttgctaatactcgacatctggaagagctctacaacagatataaaggtggaatattttactctctgttgcgccaatcatctttttatgccttgtctctgattttttttttccaattttacctgcgccatcatgttgtgtcttgattgctcagaaccagatgctgatatgataatggtggaaggcatatcacagatctgcaatgatttacaggtcattttttgggattttttttctttgaatgtatgttgttacactaaagtatcagcctgcagtcacttgtaatggataggtatatcaggcatcaggctcgaaatttgtgaactgtgattgtttcctttgttttgtgttttcttcatagtattcttcaatggaattcgtggaactattcaattttttcctatctacatttgctcttagtctgtgaagtgtagtaaattatagatttagaataccagcaacagacaacctgtctaccaccatggcgcgaaagggcctctagccgagttggttaggtgtgttctgagtagcacttcttagatcctgagtttgaatctaagtgggagcgaatttcagactaaggttaaaaaaggtcgctcgctggttcccctggttgtgtgcacacgagatgtatcgacctatgggggtggatcctcgtgtaggggctaggagggctcaaagtacgagtaaagatctggcgtatagggggtggatcctcttgttgcacgggggacttgcttttcgtgacctttcttagtcggggctccgattgagcttcttcttaatataaaaccttgggggcggtctttcccctaccggacgagtttttttgtctaccaccatggctttgggggttaagtatggctgtacttactatgtagactggcatgattgctaatgctagcgaaagggcctctagccgagttggttaggtggtttgagtagcactcctcaggtcctgggttcgacttcccgtgggagagaattttaggttgtggttaaaaaaatctcctcgtctgtctcacgccaaagcacagaaggcttagccccggtcgcggtcgttctcacatgggcttcgatgctgctgtgtatgggtagggcaggggttcgagggttttctcgacctgtgtgagaaggtcttattcttaatacaatactcgggggctgtcttaacccctgtaggtcaagttttttttaatgattgctaatgctaatttcagcatttattgcttcttattatttttggccccacaatagatactacagatgctgcatgaattttctttcccatgatcaggcccgcacatcatttattttggttggctatcttgtcttcatctatgtgtcctgatataagattctgatacgcaaatcatgtgtgtttccctttgtcaggtggatcctcaggatattgttatgcttgtcatatcgtggcatatgaaagcttccactatgtgtgaattcactcgccaggagttcattggtggactgcagtcaatagggtgagactgatctatgcgatttttataatcacttgtgctacaactcgagattctgaagtgtaaatagattgagtagtttgaaaagatccgactcattttcagagtggattcaatagagaagcttcaggcgaagttaccttcattgcgagctgagcttaaagatgatcgtaagttctcttttttcagttcgaactgctgctagcgtagcacacgtgtcatttgaatacaaatggttgcataagcagcttgttcagctaagggatgtaccagtaatggatggtttcatctgcctgtcacatacatgttcacttcatgcagagaagttccatgaaatatacaactttgcatttgcctgggcaagggagaagggccagaaatctctcgcattggagactgctattggcatgtggcagttgctatttgctgaaaggagctggcctctcattgactactggtgccaatttctacaggtaaggcataataaagcaatctccagggatacatgggcacagttattggagtttgttaagacaattgatcctcagctaaccaactatgacgaagaaggtgcttggccctacctaatcgatgaatttgtggactacttgaaagagaacggtcttgcctagcatagaaggtgtacggaattgggctgtaggggggagaatttgtcacccacaaggccaccatcattgtataacttaatggtcggatgcttgtattcattgcactaccaatagctaatgcggctcgtgcgtctggggatggagtttatcctctatatagacaaaacttgttgaatgatgtgggtgtaaaacgaaggctagaatggaagtcaagccctggttatcgcc

SEQ ID NO: 24572 - DNA, 1830 bp, Zea mays
  Clone ID: LIB3632-036-D8_FLI
gggggcccgaacccgcgacttcctgagacgaggactcctttcccttctgtcatctgagactcggaagcctcggccgccgccgttaccacctccttgcgccatggcggagaagtcgccggcagccgacgtggaagccggtctccttgcccacctcaactcagcgggagaggtccccgactcacgctctttcgcttcctccctcggcgtctcccacctcgaacttgagggcgtcatcaagagcctctcagctttccgcatcgtcgacagcacagacatcatcaaggagacatgggtgctcaccgaggaggccaagggctacgccgccaagggctcccccgaggcacagctcgtcgccgcaatttcaccggagggtgcctctaaggacgcactcaaggcaatattgggagatgctttcgatgttggcatgaaggcagccgcgaggaacaagtggatagggttcgagaaggggaataaggacttagtccttaggaaggttgagagcgtaaaggatgagctgcaagagcagcttagaagactagagaatggggaggttgtttctgataaagtgatcgatgatttgaagagaaggaaacttattacgaaagagaaatcaatttggtactctctaaagaaggggtctgagtttgttgtaaagagaaaaacgttggctactgatgtgacaacagaacaccttaggagtggtgactggaaggaccttgaattcaaagactataattatggagctcaaggtcaacctatagccaaaggttatgttcagcctttgatggaggttcgtgaggcaatcgagaacatctttattatgatgggattcactgagatgccaaccaacaatttcgtcgaaagcagcttctggaatttcgatgcactgtttcagcctcaacagcatcctgctcgggattcacatgatacatttttcctgaaagctccagcaactacaaaacagttgcctgacgactatcttgagaaagtaaagcaagttcatcagtctggcggttatggctccaaaggatatggttatgattggaaacgggatgaagcggagaagaatcttctccgtactcatacaactgctgtttccacgagaatgttatacaagcttgctcaggagaaaccttttactccaaagaggtattactccattgatcgtgttttccgcaatgaagctgttgaccggactcatcttgctgaattccaccagatagagggacttatctgtgattatggtttgacacttggtgatctgattggtgtattggaggatttcttctcaagtctaggcatgtccaagctgcgtttcaagcctgcctacaatccatatactgaacccagcatggaaattttcagttaccatgatggtttgaagaaatgggtggaagttggtaattcaggcatgttcaggccagagatgttgcttcccatgggactgccagaaggtgttaatgttattgcatggggtctttcacttgaaaggccaacgatgatcctttatggtatcgacaacataagggacctgtttggaccaaaggttgatttcaacctcatcaagagcaacccactatgccgattgggactgtagtgactagtgaggtacagggactctgaagcttgatcacaatgtgccaaagaatttgttttccttttttgttgttgtcctcccttgaagtttgaactccgattcatgtatctctggttatggctcaagaaaaccgctcatgatcggccatgttcaggtcctgaaatccctactaattctaaagctctggctaagctatggaatcaggggtcagcaatggcttttctactttattt

SEQ ID NO: 24573 - DNA, 1646 bp, Zea mays
  Clone ID: LIB3632-036-H10_FLI
gtgccccctcgcctccaaggctccaacgcatcaatcaatagagcgagcgcgctgtggcatggagcacaaggatgggggcacagcttctgctggtggtctgcccgccggaagcagcttgtgctcgggctcgccgttgctcgacgcgccgatcctccgccgcctctacgccgggcaaatccttgccagatggggcgcgaggatgtgggagttttctgttgcgctgtatatgattcgcatttggcctgactcgcttctctttgcggccatctacggcgtcgtggagacatcctctctcgtggtgctcggtcccgtggtggggacgctcgttggaagggccacataccttcaggttttgggcatctggctgctgtcgcaaagcatatccttgattgtcgctggaacctcggtgaccaccctgctcatgtatgccaacctgagagccacaagcttcccggcattcatggcgctggtcgccgttaccaacgtctccggcgctctagctgccctctcagctctcgccggcaccatactgatcgagagagaatgggtggtggtgatctcgagcgggcatcctccgtcggtgcggacggggatcaactcggtggtccggcggatcgacctgggctgctcgctgctggcccccgtgctgtcggctctcgtcatcagcctcgcgtcgactcaggcctctgcggctgtgctggcgctgtccaccgccgcctcggcggggctgcagtactgcctcttcgtctccgtctacaacggcgtgcccgccctcgccgcgccaagacagcccagagcttcggacgcagagcgcccgccgccagtaccgatgaccgtcgcgccggccgaggccgagccgacgcaggcgttggattggagggcgaggctggcagataagctctccgtcgcgtccggttgggagtcgtgggtggtgtacgcgaggcaggacgtcgcgcttcccggggtggcgctcgcattcctctacttcacagttctcagctttggtacgctgatgaccgcgacacttgactggaaaggcatacctgcatacgtgatcagtttggcgcggggcttcagcgccattgttgggatcggagcgaccctgctgtacccgctcgtgcactcccgggtgtccacgctccggacggggctgtggtccatctggatgcagtggtgctgcctgctgctgtgcgtggcctccgtctgggcggccaccggcgtggcgtccgcgtggatgctcatggccggcgtggcggcctcgcgcctgggcctctggacgttcgacctcgccgtgatgcagctgatgcaggacggcgtgcccgaccacgagcggtgcgtcgtgagcggtgtgcagaatgcgctgcagtccgtgttcgacctgctcacctacgtcgtggccatcgtcatctccgacccaaaggatttcagcaagatgatcgtgctctccttctcccttgttacctgcgccgcagtcatgtacacggtgcacgcctaccgagcacagaaagcagcgtgcacctcttccacctcgacatgacatgatcctggaaaagaagtgcgagactgcaaggtgtacggatgaaaactgagcggcttatgtatgattgattgcctccatggttttatcctagaccactgtatgcgtt

SEQ ID NO: 24574 - DNA, 1512 bp, Zea mays
  Clone ID: LIB3632-037-A7_FLI
ctccggacagagccctcgctccacaccgccggcgacctttttcctcctccgctcgaggagtgggccaacggagggagaccatatgggcgcggaggcagcgcatgggcatccgcagcagcagcctccctcgtccctccgacccggcagggaggccgcggcgccgcccgctgtggtggggctgcagctctcggcgctgatcgaccacgtcgcgcgcgtcgactggtccctcctcgaccgcgtccctggcgaccgcggcggctcgcagcaggtatccattgatgagctgaatcatattcttgatgaagtgaatgcccacatccttccttcccgcaatgatctcactccggtaactacaatagccggtggaagtgttgccaacacaatccgtgggctctcagctggttttgggatatcaactggaataattggagcttgtggagatgacaaccagggacttctgtttgtcaacaatatgagctttagtggtgtagatctcacaagattaagggcgaaaaaagggcacaccgctcagtgtgtgtgcttggtcgatgcaagcggcaatcgcaccatgcggccatgcctatctagtgcagtcaagatacaggccaatgaatttagaaaggaggatttcaaaggctccaagtggctcattgtgagatatgcacaacagaacatggaacagattgtcgaagctattaggattgcgaaacaggaaggcctttcagtatcattagatttggccagtttcgagatggttcgtgactctaggtctaaactcgttaaccttttggagactggtaacattgacctttgcttcgccaacgaagatgaagctagggaggttatagggggaagcctggaatcagatccagaggaggcgcttgcattcttgggcaagtactgcaaatgggccgtggtgacacttgcttcaaagggatgcgtggcaaagcatggcaaacaggtcgttcgagtcccggccatcggggagagcaacgcggtggacacaactggagcgggtgacctgttcgcgagcgggttcctgtacgggctggtgaaggggctgccgctggaggagtgctgcaaggtcggggcgtgcagcggcgggtcggtgacgcgggcgctcggcggggaggtgcggccggagaactggcagtggatgtacaagcagatgcacgccaggggcctgctgctcccggagctcaagaactgaatgaaactattgctgctgtagctttagcttgctaaatgcctgcatgctgcaccagctgttgtatctcccagctctcgaagactcgtagcatcacccagggccggtcgagtggccattatccagccttccgttgttaattgctgccgttacctttcccctgctagtctgttaatgttactagaatattggtgtccatgaccatgcttgattgctggcatggcgaaggacgggcagatacattagttgatttgtagagccactcctaagactgaatcaatcagatggagtatattgattactgc

SEQ ID NO: 24575 - DNA, 1623 bp, Zea mays
  Clone ID: LIB3632-038-B11_FLI
ctcgccgtctgccttctgcgcctccatttcggcctctgtcccttgcaagttcaatctcacctccaaccatgggtaaagagaagtcccacatcaacattgtggttattggccatgtcgactctggcaagtcgaccaccacaggacaccttatctacaagcttggaggcattgacaagcgtgtgatcgagaggttcgagaaggaggctgctgaaatgaacaagcggtccttcaagtacgcgtgggtgctcgacaagctcaaggctgagcgtgagagaggtatcaccattgatatcgctctgtggaagtttgagaccaccaagtactactgcacggtcattgatgcccctggacaccgtgacttcatcaagaacatgatcactggtacctcccaggctgactgtgctgtccttatcattgactccaccactggtggttttgaggctggtatctccatgatggccagacccgtgaacatgctctccttgcgttcacccttggagtgaagcagatgatttgctgctgcaacaagatggatgcaaccactcccaaatactccaaggcacgttatgaagagattgtgaaggaagtctcatcctacctcaagaaagttgggtacaaccctgataagattgcctttgttcccatttctggttttgagggcgacaacatgattgagaggtccaccaaccttgactggtacaaaggcccaaccctgcttgaggctcttgaccagatcaccgagcccaagaggccttcagacaagcccctgcgtctgcccctccaggatgtgtacaagattggtggtattggaactgtaccggttggtcgtgtggagactggtgtcatcaagcctggtatggtagtcacctttggtccaactggcctgactaccgaggtgaagtctgttgagatgcaccacgaggcacttcaggaggctcttccgggtgacaatgttggcttcaacgtgaagaatgttgctgtcaaggatctcaagcgtgggtttgtggcctccaactccaaggatgaccctgccaaggaggctgccagcttcacctcccaggtcatcatcatgaaccaccctgggcagattggcaacggctatgcccctgtgctggactgccacacctcccacatcgctgtcaagtttgctgagctcattaccaagatcgacaggcgctctggcaaggagcttgagaaggagccaaagttcctgaagaacggtgatgctggtatggtgaagatgatacccaccaagcccatggtggtggagacattctcagcgtatcctccccttggtaggtttgctgtccgtgacatgaggcagacggttgctgttggagttatcaagagtgtggagaagaaggacccaaccggcgccaaggtgaccaaggctgctgccaagaagaaatgatgcgatcctgcgcctgctttagcaatacctagttttcatcattacaagttttgtttgtggtcgttgctgttattgtgtgaactgttgagctctgttagcctgtgcacttttatctatttatttggtaccttcttgctatttcaccttctgcaatacaagaatgctgtaagagctatatgttaaccttttggcattgttaatttgattttagg

SEQ ID NO: 24576 - DNA, 1550 bp, Zea mays
  Clone ID: LIB3632-038-E12_FLI
ctccgatcgcggcggcagcttccgcgaaggccttcgctaaaaaaccgagctcgccacgccaggtatctcctatttttttctcctccgcctcgagttccgccacctccgagcctcccccgccgcgtcccagggaccgggagccccagtcccctagttcgctcgccttccgccggcgcaagagaagcccctatctcctcccatcctatgggcgccgtggcgtcgacggtggcggcgcgcttcgcgttcttcccgccgaccccgccgtcgtacggggtagagccaccgccgtcgccggccgcggctgcggcggacacggaggtggtggagctcagcggggtgccggtgtcacggggccgcggcgtggaggcgcgccggctgccaacgaagcgcggcaccgaggtggtgtccatgtacgtccgccagcccggggcgcgcctcacgctgctctactcccacggcaacgccgccgacctgggacagatgtacgagctcttcgtcgagctcagcgcccacctcaatgtcaacctcatgggttatgactattctgggtacgggcaatcatctgggaagccaagtgaacaaaatacttatgctgatatagaagctgtgtataggtgtcttctagaatcatatggagcctctgaagaaaacatcattctatatggtcaatcagtggggagtggccctactttggatttagcatcccgtttgcctcatttacgagctgttgttctacatagcccaatttcatctggtttaagagtgatgtatcctgtaaagcatacatattggtttgacatatataagaacattgacaaaattcctctggtcaggtgtcctgtattagttatacatggtacagctgatgaggttgttgactgttctcatgggagggcactatgggaactatccaaagtgaaatacgagcctctgtggatcaagggagggaaccactgtaatttggaactgtacccagaatacattaagcacctgaaaaaatttgttactgccatagagaaatcacaaccagttaaagacgaatctccagagagttcaggtccttcagatcctagtgaaattggatccgaaagtgcagagaactcaaggagaagcaccgatgtccgggacaaaccaagatcaagcattgatcatagacctagcattgatcgacgggagaaacctaggggaagtatagacaagagagataaaaacagaaagagtattgatcagcttgacaaaccacgggctagtgtggatcaacctgacagggcacgtaagagcattgatcgctttggggggatgatgaggtcagtcaaattgtgcaatattgattgtttcacttcagcttccgggagctgataatatcgggaggttagtacttcgtagtgtctcttagtcatctgtatgtattccatcttttataatttattattcaattgggtgttttagtgtggctgtggaaaaggtgtattggtctgaatgagggcttgtatttgtttcccatgaattgtttgtttctggaaaggaaactcccatagtttccaaacaac

SEQ ID NO: 24577 - DNA, 1649 bp, Zea mays
  Clone ID: LIB3632-038-G6_FLI
ccgggagtagccgacgcgccgtcactgaatcctcagatcacggctagccgtaatcacgacactctgctgactcccggcgagcagtgtaacattttccttcagccatgggcaaggagaagactcacatcaacattgtggtcattggacatgtcgactctggcaagtcgaccaccactggccacctgatctacaagctcggcggtattgacaagcgtgtgattgagaggttcgagaaagaggccgcggagatgaacaagcggtcattcaagtatgcctgggtgcttgacaagctcaaggccgagcgtgagagaggtatcacaattgatattgctctgtggaagttcgagaccaccaagtactactgcactgtcattgatgcccctggacaccgtgacttcatcaagaatatgattactggcacttcccaagctgactgcgctgttcttatcattgactccaccactggtggttttgaggctggtatctccaaggatggacagacccgtgagcatgctctccttgctttcacgcttggagtgaagcagatgatttgctgttgcaacaagatggatgccaccacacccaagtactccaaggcccgttatgatgagattgtgaaggaagtctcttcctacctgaagaaggttggatacaaccctgacaagatccacttcgttcccatctctggtttcgaaggtgacaacatgattgagaggtccaccaaccttgactggtacaagggcccaaccctacttgaggctttggacttgatcaatgagccgaagaggccttcagacaagcccctgcgtctccccctacaggatgtgtacaagattggtggtattggaactgttcctgttgggcgtgttgagactggtatcatcaagcctggtatggttgttacctttggtcctagtggccttactactgaggtgaagtctgttgaaatgcaccatgaggctctccaggaggcccttcctggtgacaatgttggcttcaatgttaagaatgttgctgtgaaggatctgaagcgtgggtatgtggcctccaactctaaggatgaccctgccaaggaggctgctagcttcacatcccaggtcatcatcatgaaccaccctgggcagattggcaacggctatgccccagtgctggactgccacacctcgcacattgctgtcaagtttgcggagctcattaccaagattgataggcggtctggcaaggagcttgagaaggagcccaaatttctcaagaatggtgatgctggtatggtgaagatggttcccactaagcccatggtagtggagaccttttctgaatatcctcctcttggtcgctttgctgtccgtgacatgaggcaaacggtggctgtcggagtcatcaagagtgtggagaagaaggacccaactggagccaaggtgaccaaggctgccgcaaagaagaaatgatgtgtctggctggttctgtgtttgcttgagggatacctagtggaaacataaaatatctcgtcttgttcacgtcattgtctgaactatgctcgcaacgtttgcctggtcgatttagaactgttattttcgttaaaaccagagtgttatttaagacttaaccgaacatctggtgagccatatatggttactagttttgttact

SEQ ID NO: 24578 - DNA, 1585 bp, Zea mays
  Clone ID: LIB3632-039-A10_FLI
tcgccgtctgccttctgcgcctccatttcggcctctgtcccttgcaagtttaatctcacctccaaccatgggtaaagagaagtcccacatcaacattgtggttattggccatgtcgactctggcaagtcgaccaccacaggacaccttatctacaagcttggaggcattgacaagcgtgtgatcgagaggtttgagaaggaggctgctgaaatgaataagcggtccttcaagtacgcgtgggtgctcgacaagctcaaggctgagcgtgagagaggtatcaccattgatattgctctgtggaagtttgagaccaccaagtactactgcacggtcattgatgcccctggacaccgtgacttcatcaagaacatgatcactggtacctcccaggctgactgtgctgtccttatcattgactccaccactggtggttttgaggctggtatctccaaggatggccagacccgtgaacatgctctccttgcgttcacccttggagtgaagcagatgatttgctgctgcaacaagatggatgcaaccactcccaaatactccaaggcacgttatgaagagattgtgaaggaagtctcatcctacctcaagaaagttgggtacaaccctgataagattgcctttgttcccatttctggttttgagggtgacaacatgattgagaggtccaccaaccttgactggtacaaaggcccaaccctgcttgaggctcttgaccagatcaccgagcccaagaggccttcagacaagcccctgcgtctgcccctccaggatgtgtacaagattggtggtattggaactgtaccggttggtcgtgtggagactggtgtcatcaagcctggtatggttgtcacctttggtccaactggcctgactaccgaggtgaagtctgttgagatgcaccacgaggcgcttcaggaggctcttccgggtgacaatgttggcttcaacgtgaagaacgttgctgtcaaggatctcaagcgtgggtttgtggcctccaactccaaggatgaccctgccaaggaggctgccagcttcacctcccaggtcatcatcatgaaccaccctgggcagattggcaacggctatgccccagtgctggactgccacacctcccacattgctgtcaagtttgctgagctcattaccaagatcgacaggcggtctggcaaggagcttgagaaggagccaaagttcctgaagaacggtgatgctggtatggtgaagatgataccgaccaagcccatggtggtggagacgttctcagcgtatcctccccttggtaggtttgctgtccgtgacatgaggcagacggttgctgttggagttatcaagagtgtggagaagaaggacccgaccggcgccaaggtgaccaaggcggctgccaagaagaaatgatgcgatcctgcgcctgctttagcaatacctagttttcatcatcacaagttttgtttgtgatcgttgctgttatcgtgtgaactgttgagatctgttagcatgtgcacttttatctatttatttggtaccatcttgctatttcaccttttccaatacaagaatgctctaagacct

SEQ ID NO: 24579 - DNA, 3206 bp, Zea mays
  Clone ID: LIB3632-039-B10_FLI
caacccctctctctcggcttctccgcctcaagcctcttcccaattccgctagctgctgcccatcggccgccgcgaaccgaccgaccggtgctgctccggctccgccatggccggcgccggcgccgagctgggccgccgagccgctgcgaacgctgccaacaccgcgggggcccgcatctaggctcgatggtgtaggggggactgggaactgcggagaggagaagtggaggtgagaggggcgacgacaaagagagagagagagatgggagcgattggaggcgacgcgccggtgcagtgggacaaggtggatggggccgaggtggccaatggcggcggtggaggtgctgcgggaaggctggagaagatactcgtctcggtgaggctgagaccgctcagcgacaaggagatttcaaggggggacccggcggagtgggagtgcatcaacgacactaccatcatctcccggagcaccttcccggaccggcccactgctccgactgcgtattcgttcgatagggtatttcgttctgactgtactaccaaagaagtatatgaggaagggaccaaagcagttgccctctctgtagttagtggcattaactcaagtgtttttgcatatggtcaaacaagtagtggaaaaacatacaccatgactggaataacggaatatacagcagcagatatctatgattacattgccaagcatgaagagagagcgtttgtattgaaattttcagcaatcgaaatatataacgaagttgtaagggatcttcttagtgcagaaaacacatcgcttagactttgggatgatgcagagaagggaacatatgtagagaaccttacagaggtgaccttgagggattcagaccacctgaaagaacttatttctacgtgtgaagctcaaaggaggaccggagagacatacttaaatgaaaacagctccagatcacaccaaatacttaaactgactattgaaagttctgctcatgagttcttgggtaaggacaagtcaacaacacttgttgctagtgtgaacttcgttgatttggctggaagtgaacgtgcatctcaggcattatcagctgggactaggctgaaggaaggttgtcatattaatagaagtctacttaccctaggaactgtgattcggaaactaagcaaggtaagaaatgggcacataccataccgagattcaaagctcacgcgcatattacaaccttctctaggaggcaatgcaagaacagcaattatttgtacaatgagcccagcccggagccatatggaacagtcaaggaataccttgttgtttgcaagttgtgcaaaggaagtggtgacaaatgcccaggttaatgtcgttatgtctgataaggcactggttaagcaattacaaaaagaacttgcaaggttggagagtgaattgcgatgcccagcttcatattctggtcttgaagcattagtgagagaaaaagataatcaaatccggaagatggataaagaaattaaggaactgaagttacatcgtgatcttgctcagtctagactgcaagatttgctcaaggttgttggagataaccacggttcgaagcaccccctggcttcttctgcaagaaattttacttttgatgttcctcagccatgtgaggatgagcaatcgacgacatcagaagctatcagcagtggccaaaattttaggcttcaaggacgcctgacaacacaaagagattataggtcacagcaatctgaaaatgatgtgcagtttgctacccctcttagctattcaatcagcagtcccccattcagtgggatgcctccaactaatggcagaaatgataactctcatatatctgatgaagattcagaggatctttgcaaagaagtacggtgcatagagaccaatgaaacagaagaaaatgaatgcttagagtcgtcagctgtgggaagcaatagtctgcaagattcaaatttagcttccagcatgcatgggaacgacaatacaaatcgatctgtgaattctggacggaatgatgcatcttctattaccctggaacaacatctggagaatgtcaaaaaaccgtttgccaatcctggcatggatctgggatcctctacacgtaactcgtcaagctcaaaagtaattggcagaagcaggagctgtaggtctctgatgggttctactctgttggaagacttggagaaagaagtttgcacccctccaagcagaagtttcatggactacccagggaggcccgaaacatgtcaaagaagggtacccgcactgaactacgatgcagagagtgaagctttatccagggcaggatcaatgctatctgaaattaccaccacgaggggtggactgaaggaaaacagctctgctgctggtgatacagaatttgttgctggcataggtgaatttgtcgcggagctaaaagaaatggcccagggtcataatggagaattggctgaagggaccataaggagcgtggggctggatcccattatggatatcttgcaatcaccttctcgctggcctttggaattcgagaagaaacagcaggagatcattgacctgtggcatggatgcaacgtttccttggtccacaggacttactttttcctgctgttcaaaggggacccagccgacgccatttacatggaagtggagcttaggaggttatcatttctcaagaacacatactccaacggaagcatggggtatgatatggtggcaggcagcttgagcacttctctggtttcaagtgcaaagaaactgcaacgcgagagggagatgctctgcaggcagatgcagaagcggctgacgatccaggaacgggagagcctgtacaccaagtggggagtctcgctgtcctccaagaggaggcggctgcaggtcgctcggcgcctttggacggagaccagggacctggagcatgtgagggagagcgcgtccctcgtggccagactgatcgggctcctggagcctgggaaggcgctgagggagatgtttggtctgagcttcgcgccgcagcagtccacccggaggtcgcacagtagttggcggtatggccgttcttctctagactgactgagctcgaaagacgcagctgacaaaaaaacaacaacagttattccgttgttttcgttttgtgtagtgcctgatttttttgctgtcctctcggaaaatagaaattcctgaacattttgtgacc

SEQ ID NO: 24580 - DNA, 1093 bp, Zea mays
  Clone ID: LIB3632-039-E8_FLI
caatccgtgccaaacacggggggaggaggtcagatcggcggtggcggtgacggtggcggtggtggcggcggcggatatgtaaatgcgggcgtggaggtggaggacaaggcgtgcccctgcggtgtcgggagctgcctcgtgctcacgtccaacacgccgaagaaccccggtcgcaagttctacaagtgccccatgcgggatgggggttgcaacttctttgagtggtgcgatgctccatctcccgcccctgccaatgcacgaaataacatggttgtacactcagagacatcagcaacagatatgctttgcccatgcagtgctggaacttgcttaattctcaccacaaagacagggaaaaatgttgggaggcagttcttttgctgcccattaaatcagggtggtggtggtggctcttgtggctttttcaagtggtgtgacgagctacagcctagggttggtgcaccactgcaagcttcagcgcaataccaagcggattccatgccaagcatccaaaaccccagccagaggagctcgtcttcctgcttcaagtgcgggcaggagaaccactgggctcgagactgtccgaatcaaccgtcggatccttatcctgacaagggtgggagaccagtagctccagcgggctcacctggtgcgtgctacaactgtggtcggtccggccactggtcccgcgactgcccaacctcgaatagtggtggtggtggtggtaccggcaccagccgtgccaggtcgtcctcagccttgagctcgtggaatagtcagagatactgataggaggctcctgtgaactcaattgaactgacatggacatgctgtacgaaacttggacaattgcccccctccacgtgttgcttaggtatgtgctcacgccgatgccttttgctgctctacgctatctctatatgtaagagagaactgttgctgttctctgtcttcaccctcaccctgttttatactcctatctctgtcgaacttgggtatactgtttttttatctactctaggatttttttcacatataatattgtatgtgtgggtctaaggagaaccatatcgtccaagcatttctttccatg

SEQ ID NO: 24581 - DNA, 767 bp, Zea mays
  Clone ID: LIB3632-039-F7_FLI
tagacagctagcttcatcagtaggatgggcagcgacgaggaagcggcgctgctggtgccggcggtggaggagggttgccccgggtgcgtgatggagcggcggaaggcgagcagcaacggcaggatcccctacagcgagctgttcttcgtcgccgccacctccctcgcctcagctttaccgatcacgtgcctcttccccttcttgtatttcatggtaagggacttccgcgtcgctgaaacagaggaagacatcggattctatgctggttttcttgctgcgtcgtacatggtgggcagaggcttctcttccatcttctggggcgtcatcgcagaccgcgttggacggaagcctgtcatcacgttttcgatactgtccgtgtacggtcgtattcagcgcgctgtttggtctgagcacgacgtactggatggcgatcgccacgaggctcgtgctgggcgctctcaacggcctgctcgccccgataaaggtcagggtccggtgtttcagcaagaactcatctcgtctgctacattaactcgtgtgtttatttggaaaaagaagaagtttgcatgcatgctgaatctgatcgaattcagttgcgtctgtatgtatgtatgtatgtatgtatgtatatgtctacgaacaatttcaggcgtactgcgttgaagtttgccagacccagcaccaggcgcttggactctcgcttgtaataatctcatcaacgaccgagctcttcatcgtttaataaacaactcttccgtttttttttc

SEQ ID NO: 24582 - DNA, 1276 bp, Zea mays
  Clone ID: LIB3632-039-H6_FLI
gcagccgctcccgaactgaggaaccctaccacgcgggcgacggcggtgcgcgaccggtgacgggacagcggcagcgccccctcctccatctgctggtcccaccgcctcctgacgttatccgatactgccaatccccctcttcgccgttgacggagcttaccgaggaaagaagggcagggccatggcgggagccttcgctttccgcctcgtgcctcgcctcgccgcagagccggcggcgagggggaagggtggcggaggaggagccaaccgcgacgccggcagcagggcgctggtgtcaaagaaaccaaacaagcagcagcatttgtggatcaggaaggagacagctgggtcagggaagaaggctctccgtcttattgatgctgtttcgaagttaccaaatgaaagagaagctatttatggtgcattggacaagtggagtgctttcgaacctgaatttcctattatagcagcagcaaaagctttggggatgttgaaaaggcgacgacaatggttaagaataatccaggtaaccaagtggttgatgagcaaaggacaggtgctgacatggacaacatatgatacacttctgctcgcacttcttatggataaacgggtagacgaagctgagtcagtttggaacactgtaatacagactcatacccgctcagtgcccaagaggttgttctctcggatgatcttgatctacgacattcaccagcgcccagataaagttttggagatattcgcggatatggaggagttaggtgtgcgtccggacgaggatacagcgagacggatcggaaaggcattcgtggcttctggccaagaagaaaaggagaagcatgtcctcgagaaatacttgaagaagtggaagtacatccatttcaacggcgagcgcgttcgcgtgcggagggacggaccattggcgtagtgcccgttttctgaaaaatgctcgaacctatcagagtatcgtgccggtaggcggtagggcaggggagatgctgttactgccgctgtgacagtcaggcacatggatatcggcactagtccctatcctatgtatgtggaatggaacggaaactggagattggttccatggctctagcctgtggaggagacgagcggatggggggtggctggctactaccggcgagatagtgatttaataggcactacataggcgtccagtgattgcgatggctttaacttgcgtatgtgtctgcggaatggtcccgtgctatttcggtgacttgtgcttgtggaattgtgaacaccc

SEQ ID NO: 24583 - DNA, 368 bp, Zea mays
  Clone ID: LIB3632-040-A10_FLI
aaaacgcaactgatgatgcacagaagatgatgcaaatgggtggtggatttggatttaacccaacaatgagtttgggagcagagaaagacagcctggatatcatgcagcatgactgggctctacctaagatggagcggcacgcagaagatgtgttgaaacagttgctgaagaaatgactcgaacggttgggcttctgggaagcaacactcgcgtcgcgtcttccagtttttgttgaagccagtttggaccaggaattttaccatttctaaatgtattatttataactagctactataacacccttagaaggtggagacccggtgttgtgatacttaatataagtagaaaaaacgtaattctgttacttt

SEQ ID NO: 24584 - DNA, 2181 bp, Zea mays
  Clone ID: LIB3632-040-B4_FLI
gagacctcttcgcatcccgaggcggcgcttttggggtcggaagcgacacgggcgccgggcgggtccgcgggtggtggtgctactgctagcaagcagcagcaggcgacgctaggcgagagccccagtcggagcaggccaccatgtgcggcatcctcgctgtcctcggcgtcgctgaggtctccctcgccaagcgctcccgcatcattgagctctcgcgcaggttacggcaccgagggcctgattggagtggtttgcactgtcatgaggattgttaccttgcacaccagcggttggctattatcgatcctacatctggagaccagcctttgtacaatgaggataaaacagttgttgtaacggtgaacggagagatctataaccatgaagaattgaaagctaagttgaaaactcatgagttccaaactggcagtgattgtgaagttatagcccatctttacgaagaatatggcgaagaatttgtggatatgttggatggaatgttctcctttgttcttcttgatacacgtgataaaagcttcatcgcagctcgtgatgctattggcatctgccctttatacatgggatggggtcttgatggatcagtctggttttcttcagagatgaaggcattgagtgatgattgtgaacgcttcataacatttcccccagggcatctctactccagcaagacaggtggtctaaggagatggtacaacccaccatggttttcagagacggtcccttcaaccccttacaatgctctcttcctccgggagatgtttgagaaggctgttattaagaggctgatgactgatgtgccatttggtgtgcttttatctggtggactcgactcttctttggttgcatctgttgcttcgcggcacttaaacgaaacaaaggttgacaggcagtggggaaataaattgcatactttctgtataggcttgaagggttctcctgatcttaaagctgctagagaagttgctgattacctcagcactgtacatcatgagttccacttcacagtgcaggagggcattgatgccttggaagaagtcatctaccatattgagacatatgatgttacaacaatcagagcaagtaccccaatgtttttgatgtcacgcaaaatcaaatctttgggtgtgaagatggttatttctggcgaaggttcagatgaaatttttggtggttacctttattttcacaaggcaccaaacaagaaagaattccatgaggaaacatgtcggaagataaaagcactacatctgtatgactgcttgagagctaacaaagcaacttctgcctggggtgttgaggctcgtgttccattccttgacaaaagtttcatcagtgtagcaatggacattgatcctgaatggaagatgataaaacgtgacctcggtcgaattgagaaatgggttatccgtaatgcatttgatgatgatgagaggccctatttacctaagcacattctctacaggcaaaaggaacagttcagtgatggtgttgggtatagttggatcgatggattgaaggaccatgccagccaacatgtctccgattccatgatgatgaatgctggctttgtttacccagagaacacacccacaacaaaagaagggtactactacagaatgatattcgagaaattctttcccaagcctgcagcaaggtcaactgttcctggaggtcctagtgtggcctgcagcactgccaaagctgttgaatgggacgcatcctggtccaagaaccttgatccttctggccgtgctgctttgggtgttcacgatgctgcgtatgaagacactgcagggaaaactcctgcctctgctgatcctgtctcagacaagggccttcgtccagctattggcgaaagcctagggacacccgttgcttcagccacagctgtctaaccttatgtttatcacccagcaatgcttgaaacagcaaaggttgtccattgcttgtttcagtttccttccgatcatgtttttagttccatcaatcaagcaatggagacatgcttgtgcttcatacttggcagcatcgtgtttgggttttcactgggcagtactgtttaatttttatggactgaaaagactcagttttgtaaatattcgtcactgtgaccaattcctgtggtggtttatgtgatttgcagattgcagtggttagtgt

SEQ ID NO: 24585 - DNA, 2626 bp, Zea mays
  Clone ID: LIB3632-040-C3_FLI
ggcagctgccgccgccgccgccgcgccgtccgccgatgccgagctgcctcctccctggcatcgcgccacgcccaccgccggccgctctccgcagcctcctcctccgccgcagcagaatggcctcctccggtacggcccgcgccttccagctccgcctcaacccactcaccggcgactccgagtggctcgtcgtcgacgaggcggaaacggaagcggaggcgcctgcgcctgcgccgacccaacataagcagctccttgccgccacctcctacctcgacatgctcaacgacgcctcccgcaaccgcgcgtaccgcctcgccatcgacgccacggtaacggaccccacctctcgcgtcctcgacatcggagctgggaccgggttgctgtccatgatggcggcgcgagctttggcagctgctggaggtgaaggtaggggaagcgtgtcagcatgcgagtcctaccttccaatgggcaaactaacacggagggtactcagagccaatgggatggaaaataaggtcaaagtatttcacaagcgatcagatgagctcggagttggagtcgagcttgattctcgacctgatatattggtaagtgaaattcttgattctgagctgctgggtgagggtctcatacctactctacagcatgcgcatgacatgctattggtgaaaaatccaaagacagttccatatcgagctactacgtatggagtgttggttgagagcacgtccttgtggaagatgcatgatctgcacagcaatgaagcaaatgctgaagatggtgtgaggcttattcccagtggaacacaaattgttctttctgtgaagtcacaacaacatgcgatgcaatgtgatgcactggcagatgaaataagattgatagtcatcgtgaaacaaagattgagataaaagcaacagctgatgggcatgctcatgctattgtttcatggtgggtgcttcagctggattcttctggatcagtcttttactcaactgctcctagatgggtgagacaatccagtggtgtcgatttaccacaatatgccaatggcacgaaggattggtgtgatcattggaagcagtgtgtttggtttatacaagggacaggggctcctgcaaagaaagatcaaactctttctttgagcgctagccataaccaaactagcatctcatatcagttgaatataaatgatgaaggaagtagaagccccaaaagtaatcatctaacactgttaccagaaagggtagcactttatggtgataaagtttggagatcagcgttgataagtgtaatcaggaattatgtaagtaatccctctatgtacttggtatagtatgttcttatccaactagtattccatattatgattgctcaccgtaacttctgaagaattataataataataaataattaaacatcccaatattcaaaagcatgtaatctttcaatctgtgaataattaaaagcatgtaaataattaaacagactgtgatgcagtttcctcattttttagaaaacagaactgtattggtcaacactgatttgacactatttgtaggtgttctatactgtgcatcttgtcaccttaacttttcatgtttaacttttctctgcccagacgagcgaaagatcctctctgatctgcattgtggctgatgacagcgtgttcctagctctcattgtttcttttctgttaccatcttcaaaagtcctcgctatgtttccatgtcttagagacagtggcctcaactatcttcaagctgttgcagatgcaaataatttatccatggaccggattaaagtgattggtaaaaaggcatcgtcccttactacaaatgacttaaatcatgaaaaggttaatatgttagtgggggaacccttttatcatggaagtgaagggatgctgccatggcaaaatctgcgtttctggaatgaaaggactctgcttgatccgttgctctctgaggatgcattcatcatgccttgtaagggaatattaaggttctgtgccatgtcacttccggacttgtggagaagccgtcgtagccttaaagatgttgagggttttgaccactcagttgttaatgatactttaggggcctgtggtgacctgcctggagagcaacaaggcccttgcctaccttattatgtgtggcaatgcggttataccaagaaattaagtgaagtttactctctcatggatttgaacttttctgagcctatccactcttgttttggtgaaacaaaggttgagtttgcccacgatggaacatgccatgggttcgctgtttggatcgactgggtacttgacaaggaaaattccatagtgataagcaccgggccagagagcagatactggaagcaaggggtgcagctgcttagcacgcctgtacaagtgaacccagcgaattcggtgatgcacgtggaggcgaatttcgatgctgacattggggagctcacgtttaaatccaccacgctctcatgatgccaactgtaatgtgtggacaaccaagcctcatgcgtgtgttgttcttaaaagttagcatttgtcgctgcgttttgttcgtcggagctcctgatgtgagtcaagcactcaagctcatgattacgtgtgtgttctgtc

SEQ ID NO: 24586 - DNA, 1777 bp, Zea mays
  Clone ID: LIB3632-040-F10_FLI
gccgtcgtctgctccgggctgctgttctgcgcctccacaaggctttggcctctgttgtaagatctgctttatttccaccctactaatgtgtaccaggccttttctaagctggtcacagtggttgcaacttcagatcgatatctaagctgatcactgtgtttgcgacttcagatcgagattctgatcctttagtattgtgtgatttttactggtgtttctaataatcgattcatccggtgtaacagttttaagcttcacctccagccatgggtaaggagaagtcccacatcaacattgtggttattggccatgtcgactctggcaagtcaaccaccaccggccacctgatctacaagcttggaggcattgacaagcgtgtgattgagaggttcgagaaggaagccgctgaaatgaacaaacggtccttcaagtacgcttgggtgcttgacaagctcaaggctgagcgtgagagaggtatcaccattgatatcgctctgtggaagtttgagaccaccaagtactactgcactgtcattgatgcccctggacatcgcgacttcatcaagaacatgatcacgggtacctcccaggctgactgtgctgtcctgatcattgactccaccactggtggttttgaggccggtatctctaaggatggccagacccgtgagcatgctctccttgctttcacccttggggtcaagcagatgatttgctgctgcaacaagatggatgcgaccactcccaagtattccaaggcccgttacgatgagattgtgaaggaagtttcatcctacctcaagaaggttggatacaaccctgacaagattgcctttgtccctatctctggttttgagggtgacaacatgattgagaggtccaccaaccttgactggtacaagggtccaaccctgcttgaggctcttgaccagatcaccgagcccaagaggccttcagacaagcccctgcgtctgcccctccaggatgtgtacaagattggtggtattggaactgttccggttggtcgtgtggagactggtgtcatcaagcctggaatggttgtcaccttcggtccaactggcctgaccactgaggtgaagtctgttgagatgcaccacgaggctctccaggaggcccttcctggtgacaacgttggcttcaatgtgaagaacgttgctgtgaaggatctcaaacgtgggtacgtggcctccaactctaaggatgaccctgccaaggaggctgctagcttcacctcccaagtcatcatcatgaaccaccctgggcagattggcaatggctatgccccagtgctggactgccacacctcccacattgctgtcaagtttgctgagctcataaccaagatcgataggcggtctggcaaggagcttgagaaggagcccaagttcctgaagaatggtgatgccggtatggtgaagatgattcccactaagcccatggtggttgagaccttctctcagtatcctcctctgggtcgttttgctgtccgtgacatgaggcagacggttgctgttggagtcatcaagagcgtggagaagaaggacccaactggtgccaaggtgaccaaggctgcaataaagaagaaatgatgcgtcctcccatgtgccctcgtttattttgtacttgtgcccgtatacttcgatctgttaaaatctattggttgtgtgccctgtgtctgttgtttgggtatctatactgttattttgagacatgttgacttgcatggtcatctggattgggttcgcatttctgagtc

SEQ ID NO: 24587 - DNA, 1280 bp, Zea mays
  Clone ID: LIB3632-041-A7_FLI
gcctgtacggcgacctcccgccgccgtcgtcggccggcgatgaagacaaggcctccacggcttccgtttggtccagcgccaccaagatggcgcctcccaccctccgcaagccgtccaccaccttcgccccacccccatctattctccggaaccagcacctgccaggcccaacgactacgaggactaccggaaggacaagctccggcgcgccaaggaggctgagctgaacaaggagcttgagaggcggcgccgcgaggagcaagatcgggagagggaacgcgagcagcgggagagggaggcccgcgagcgcgaggagaaggactaccaatccagggcctcctccctcaacatatccggcgaggaggcgtggaagaggagggcagcgatgagcggtagcggttctgctgctagaaccccatcgtccccacctcacggtgatggcttcgccattgggagctcatcttctgctgggttgggtgtgggtgccggcggacagatgactgctgcccagaggatgatggccaagatgggatggaaggaaggtcaggggcttggcaagcaagagcagggcatcaccgcgccactagtggccaagaagaccgataggaggggaggagttattgttgacgagagcagttctaggcccccagaaaagaagccgagatctgtcaactttgatgggcaaccaacacgagttttgctgctccgcaacatggttggtcctggtgaggttgacgatgagctggaagatgaggtggcatcggagtgtgccaagtatgggacggtttctcgggtgctgatatttgagatcacacaggcagacttcccagctgatgaggctgtaaggatattcatacagtttgagcgggcggaagaagcaacaaaggcaatgattgatctgcaagggcggttctttggcgggcgtgtggtgcaggcaaccttctttgacgaggaaaggtttgggaggaacgaactggctccgatgccaggggaagtgccagggtttttcgactaaagaaagaagttttcatgtggtatcagataagtggtgggttgtgaacttgtgattctttcttttaatcgagatgaactagaacatacagtcaggcaatttacttgctttgtagtgctagtgcagtgtactggaaatattatggatataaattatggtttttgagctgtgcctcctgctgctgaactactaccttgtatagttgtatgtacatgagcattttgaccgctttagcatgctttgtcgtgcagttatcttgattttgatc

SEQ ID NO: 24588 - DNA, 1798 bp, Zea mays
  Clone ID: LIB3632-041-D4_FLI
cgcaccttcacctccacctcccccgcagcccgaccgcacgacccgccgccgccacgtgcaggaacgcgcgctgcatcggcgtcacgctatgcctccggatgccgacgacaccggaggaacggcggcagaagcgcgggctggcccagttcctggacttatcggccgcgccgacactcacgccacccgcgcccacgcccgtgcatctcacgcccgcggccaaacggcgcggggcgctgcgggagatgcgccgggtgtggtgggtgtgcggggtcgggtactgggtgcaggggttccgctgcttcccgtggctggcactcaacttccacctcacgcgcggcatggggctcagccccgccggcctgcaactcctgcagaacgctgggagcctcccgctcgtcgccaagccgctcttcggggtcctctccgatgccgtctacatcggccgcgcccaccgcataccctacatctcccttggagtgtggctgcagctcattgcttggggagtacttgcaaccattccagttacaggggatgcgtttccaactctaatggcatgcattctcattggaaatctaggagcatctgtcacagaagtcgtaagtgatgctgttgtcacggagttcagtaggacacagaaggctggtgtactacagtcatatgcattcgtagccctggctgcaggatccttgctggggaacttgtctggtggttacattctgcttaaaacacaggaaccaaagatcatgttcacagcattctcagtccttcttggcttccagctagcactgtccctaagtacaaaagagacattgccaagctctcgaggaaactccagaaatcgtcttgtcaaaagctctttggcagctaacttccgcaagcaattctcaaacttgatgacagcgatcagagaggaaaggatcttataccctcttgcatggatcatgacatcctttgctgttgtgcctgttctttctggaaccatgttctgctttcaaacacagtatttgaatctcgatccatcggttattggtctatcgaaagttgtgggacaggtcatggtcttatcactaactgtactctacaatcgatatcttaaaaggataccactgaggtgccttaccacaggacttcagatactatatgctctggcagttttgtcagatttgatccttgtgaaacaagtaaaccttgtgctagggataccgaacgagattcatgttctttgcttctcagctctagctgaagctctagctcagttcaaggtattgccattctcggttttgttgtcaagtctctgcccaccaggctgtgaaggttctttgttcgccttcttcacatctggactggtgctttcagcaatacttagtggagtattcggagttggattgtccaccctgatcggtgtgtcttctgtggactactccagcttgcctttgggtattttgctgcaaagtttggctgcattgctaccgttgggatggatatcctttgtgcctgagaaatggactgccgatgacacggttgtaataaaaagatgaagtgttttcaccatacaaatttccaggcaagatcctgttaggcaatgacacaatgtagataaatgtagcccacccagtcaacactggtgaggttacatgtataggtatccagattctcttcaattagaatagttcttattattactgtactatatgcaatacaggatagcccttatgctcctgctgaatatagcacacaaattgcattgaattagttgtctcgtgaaacgagattggactataaaatttgcttcacatgc

SEQ ID NO: 24589 - DNA, 2152 bp, Zea mays
  Clone ID: LIB3632-041-F10_FLI
gagacacggtagaggagcccgcggtttcccttttcccctcccaacaaggtattcctgggttcttgcttgcctttcgagctctgcgggattgacaattctgacaggaccggcgtggaggaagggttgatagggaggattttttggattgatctataagccttttggtggctaacggttgggagctttggaggagaactcgagtccttgggctctaggttggtctggacgaggccggaggaagttgccaatggagccgccgactgggttctgggcctcgcttctgagcttcctcaagttcctcccctacttctgcggcctcctcgtccttggactcatcaaaggtgttttgttgtgcccttgggcatgtctgattatggcgattggaatatctgccctggtcctgggcttatggcctatgcatctgatttggacatactactgcattgtcagaaccaagctggttggacctgtggtaaagcttctgcttcttattgctgcgactgcagtcttgatcatatggttgataattggcatcccgggaagcatatttgctggattggtatatggttttctagcacccataatggctacatttgatgctgtaggagaaggcaaagaaaagccatttgttcattgctttgtggatggaacatggagtactatcactggaagctgtacagtagtcagggacgtgaaagatttgcttttccactcctatttttcacttatggatgaccttcgtcttcagaaacctcctgacggggagccatatgagataagattgcttgatattcctggtgcactaatagcggctgcatttgggcttctacttgatggaataatgttcacattaattgccttctataagtgccccgtgatgcttttcaaaggatggaaacgactgatccaggacatgattgggagagaagggccctttctggagactgcttgtgtgccatttgctggtcttgctattcttctttggccatttgctgtagtaggagccgttctggcatccatactctccagtgcccctttaggtgcttatgctgcagttgtagcttatcaggaatcctcccttatcctgggaattgcctatgtgttctcgtcggtgtctatatttgatgaatacacaaatgatgttcttgacatggcgcctggttcttgttttccaagatttaaatatcggaagggcaaagatgagtcttcacacgggcacagtgttccattatccagaccagcctcattcaatagggagaagcaagaagggaaaaggcctccgtctcgtgttacttcatttaagaacagcattgatgatttcaatccattcaagctgctggaccacctatttgccgaatgcaggaaccagggggaggatttggttaacagaggagtgataacaatgaaggacattgaagaaacgaagtctggcaaagttggcagcggtgttcttaatgttggtctaccagcgtatgttattcttaatgcactccttcggtctgcgaaagctgattctgtcgggctaatcttaagtgacggctctgagattacatctgacaatagacctaaaaacaccatctttgattggttctttgaccctcttatggttataaaggaacagatcaaagctgagaatctcactgacgaagaggaagagtatctgaaaatgcgagtgctattggctggtgatcccagtcgcctgaaaggctctctgcctcatgttccatccttgactgaacgtaaaaaggcagatatagacgcattcgctcgcaggttgcaaggaatcacaaagtcgatatctagatatcctacatcaaagcgccgcttcgacgtccttgtgaaggcgctcttgtcagagctggagaggacgatgggccaatctggcaatggatcccagtcccaggcgcagaggctgcgaaactcggtagcccggatgttgagccagaaatctatgggcaagactgccaacattagggatgaagacccagaagcgcagatgacgagactgtctcgcaccccgtgatcgtctgtttgttagtttgacgatgccgtatcacatgctattccagccttgtacaaatgatgagtagatagaatgctgcggcttgaactgatgctcttacatctcatgtatgatctgtatattttaggc

SEQ ID NO: 24590 - DNA, 1438 bp, Zea mays
  Clone ID: LIB3632-041-H1_FLI
cgtgcccgtgtcccgccgccggcggcgctggggatggcggggcccaaggcggctgaggacggctcggcggctccgctgctgcctgcgcaggcgggggaacggagctcaggaggcgtgggcggaggggccacgtccgcgcagacgctggggaacgtggttgtctccatcgtgggcaccggtgtgctcggcctcccctacgccttccgcgcggccggctgggtcgcgggctccatcggcgtcgccgccgccggctccgccacgctctactgcatgttgctactcgtggactgcagggataaactcaaagaggaagaaactgaagagtgctgtcatggtcactatacatatggggatttgggtgacaggtgcttcgggactataggccgatgcttgacagagaccctcgtccttgtttcgcaggctggtggttctgtagcatacctgatattcattggccaaaatctccattccacattcagccagctgatgtcaccagctggcttcatctttgccatcctcctgcctctgcagatagcgctctccttcatccgctcactgtcgtccctttctccgttcagtatatttgcagacgtgtgcaatgtccttgccatggcaatcgttatcaaagaggatcttcagctctttgaccaccccttttcaaacagaagcgcttttaatggactgtgggcagtaccattcaccttcggtgttgcagtcttctgtttcgaaggattcagcatgacccttgcactagaagcgtcgatggcagaccggagaaagttccgctcggtgctttcccaagcagttgccgccattatagccgtgtatgtctgttttggagtttgtgggtacttggcctatggcgaggccaccaaagacatcataacacttaatcttccgaacaattggtcgtctgctgcagttaaggttggcctatgcatcgcactggcattcaccttcccagtcatgatgcacccgatccatgagatcgtcgagacaaggttcagatccaacagatgctttcggaagctcagccacaacgatggcggcgcggagtggataggcttgcacgcaagccgcgtcctcgtggtggcggtcctcactgtggtggcgtccttcatccccttctttgggtccttcatctcgttcgtcgggagcaccatgtgcgcgcttctctcctttgtgctgccggctctcttccatctcagcattgtaggctcgtcaatacccttgtggaggcgggtgctggactacggcatccttctctttggtctggctttcgctggatatggtcttgtcactgctctctcctcgcattgaacaatggcccaaacagtcaaaaaagtgcagagatcaggatatcttgtgatgacaggagtcaaatggatgctaggagcaccatatatcagatagcacggctcggattagtgcgtgattg

SEQ ID NO: 24591 - DNA, 1239 bp, Zea mays
  Clone ID: LIB3632-042-B12_FLI
ccgacaactcgggcgggacacgggagacagccatggcgacgggcggccaggggaaggccgcgggctactaccagtacccgacatcgtacgccggtgctgcggacgaggagcgccggtggtggccgtggctcgtgcccaccgtgctcgtcgcctgcatcgcggtcttcgccgccgagatgttcgtcaacgactgcccgcgccacgggagcacgctcggcggcggcgccgggtgcgtggcggccggtctcctccgccggttctccttccagccgctccgcgagaacccgctcttcgggccttcctccgccaccttggagaagatgggagctctcaactgggccaaagtagttcatgagcaccaagggtggcgcctcattagctgtatctggctccatgctggcctagttcacttggttgtcaacatgctaagcttgctcttcattggaatccgccttgagcaacaatttgggtttgtgcgcattggtgtcatctacttgatatctggctttgggggcagtgtgttgtctgcacttttcttacacagtaactacgtctctgttggtgcctctggggctttgtttggcctccttggatctatgctttcagagcttattataaattggactatctattccaacaaggcagcggcaatcataactctactttttataattgtaattaatctggccattgggatattacctcatgctgataattttgcccacattggtggatttgcttctgggtttcttattggatttgtgctgctggcaagacctcaatttggttggatggaacgcagcgagctacctcagactagtcaacctccaaagtacaaatcgtaccagtatgtcttgtgggttgctgcactcctcttgctggtagttgggtttgccattatcttggtcatgctcttcacgggtaagaatgggaacgacagctgccactggtgccattacctgaactgcgtaccaacgtccagatggaagtgcgatacctgaattccgcaaagtatatgctccactggtgttcgtgtgttcgtggaaatgtacgaccaaatgtatcctccacttgaccatcctgcgcttcttttgcccggattctccctggttccatgaaatacaaatgttccagaattgtagcacgagcttgtaactgttgatttcggcataattgatgtattcatctcaccaaactctatagcaccaccttgataattttagacggccaatctaaagt

SEQ ID NO: 24592 - DNA, 883 bp, Zea mays
  Clone ID: LIB3632-042-C10_FLI
ggcttccccgccgcgtcgtgcacctgcaccagcaccagcacggcgaccaaccctctcccaacccgactagtcggactcgcagctccgccccaagtccaggtccaagcatggaagtcgcggcggcgtcggcgaggcccgtcctgcgcgtggctgccatctgcggctccctccgcaaggcctccttcaaccgcggcctcctccgcgccgccgcggaggtgtgcgaggactccatcccggggctccgcatcgacgagctcgacatctccgacctgcccatcatcaacaccgaccttgagaccggcagcggcagcggcaccgtcttcccgcccgccgtcgaggccttccgcgccaaggtctgccaggccgactgcttcctcttcggcgcgcccgagtacaactactccatcgccacccccctgaagaacgcacttgactgggcctctagaggaaagaactgttgggcagacaaagctgctgcgatcgtgagtgcaggcggtggctttggaggagggaggtcgcagtaccatctccgtcaggtcggggttttcctggatctccatttcatcaacaagccagaactgtgcgtccaagccttccagcagccacccaagtttgacagcgatggaaatctggtcgatgctgaaatcagagagcggctcaagaaagtgctcctatcccttcaggccttcacgctcaggcttcagaaggaggactgaatcaactcggtaccattgtagtacgtgcttccctgagaagcgtttattgctcttggaagtttgtaacgcgttgctgggtggcctggaagtttgtaataaatccaagaagtgttctcgctgaatatttaagatttgatcgcatctatatataataaagattgtgttct

SEQ ID NO: 24593 - DNA, 2653 bp, Zea mays
  Clone ID: LIB3632-042-C4_FLI
gagccacgccacgcaggcacgcacgcggaggggagcgccggccgtccgcggcggattgggatctccctcgcccgcccgtccactcgagactcgacggcacccgccgcatttgagctgagctgaggaggcgtgggggacggcgcggggatgtggcgcctgcggatcgcggaggggggcggggacccctggctccgcacgaagaacgcccacgtcggccgccaggtctgggagttcgacgcctccgccgaccccgaccccgccgtcgacgccgcgcgccgcgccttcgccggcagcaggggccacctcaagcacagcgccgacctcctcatgcgcatccagttcgccaaagaaaatcctcttgagcttgaccttccagcgatcaagctcggtgagcacgaagacgtaaccgaggaagccgtgtctactactttgagaagggcaatcagccgtctttctactctccaggcacatgatggacactggcctggggattatggtggccctatgttccttatgccaggcttgatcataacattgtatgtgactggagcactaaacactgtcttgtcatcagaacaccagaaggagatccgtcggtatctttataatcatcagaatgaagatggtggctggggcttgcacattgagggtccaagcaccatgtttggctcagcactgacctacgttactttgagattgcttggagagggaccagatagtggagatggagcaatggagaaaggccgaaactggatcttagaccatggcggagcaacatatataacatcctgggggaagttttggctctcggtacttggtgtatttgaatggtctggtaacaacccggtaccaccagaagtatggctactgccatatctcctgccatttcacccagggaggatgtggtgtcattgtcgaatggtgtatttgccaatgtgctacatctatgggaagaggtttgttggtcgaatcacaccactcgtgttggaattaagaaaggaacttttcaaagacccttacagcaagattgattgggacaaggcccgcaatctatgtgctaaggaagatctgtactatccacatccatttgttcaagatgtcttatgggccactctccataaatttgttgaaccagttatgatgagttggcctggcagtaaattgagggagaaagctctggagacagccatgcaacatgttcactatgaggatgagaacactcggtacatttgcattggtcctgtaaacaaggtattaaatatgcttgcttgctggattgaagatccaaactcagaggccttcaaactccacatcccacgagtctatgactacttgtggcttgctgaagatggcatgaagatgcagggttataatggtagccaactttgggatacagctttcatagttcaagccattgtggctaccaaccttaccgaagagtttggtcccacccttaaactagcacacaactatatcaagaaatcacaggttcttgacgactgccctggtgatctgaatgactggtaccgccacacatctaaaggcgcatggccattctccaccgcggatcatggttggcctatatctgattgcactgctgaaggactaaaggcttcattattgttatcaaagatttctcctgaaattgttggtggaccgatagaagctaatagattttatgatgctgtcagttgtctgatgtcttatatgaatgataatggtggttttgcgacttatgaactcacaagatcctatgcctggctggagctgatcaatcctgctgagacctttggggatattgtgattgattaccccagcaatccaggccctgacatcattcagaaaactataccctgggcaccgcaggaaagaggtggacagctgtatcagcaaagctgctaatttcattgagagcattcagaaaagtgacggttcatggtatggctcttgggctgtttgtttcacgtacggcacttggtttggtgtgaagggactaattgctgctggtagaacatttgagagcagtcctgcaatcagaaaggcatgcggctttctgttatcaaaagagcttccttccggtggctggggagaaagctatttatcgtctcaagaccaggtttacaccaatctcaaaggcaaccgagctcatgcagcgaacactggttgggccatgctggcgctgattgatgcaggacaggcccagagagatcccgcgcctctacaccgagcagcaagggttttgataaacttgcagtcagaggacggagaatttccccagcaagagatcataggagtgttcaacaagaactgcatgatcagttactcccagtacaggaacaccttcccgatctgggctctgggagagtaccggtgccgagtcctgggagctggcaagcggtagtgacccggcctggccccgtcaacttgactgaaaggcgctttgttgtcttggtgttcttggtgttctatcttggcacgccgagggctgtcttgccggccgcctagctgtctcatgaatcaatcagcttttttgtgagtagctagctatgtgcggtggttggaataatgcagctatgcttttttttagggttgcgctcctagttctaataatgtactacgtatattggaagcagaataaatgttagattgaact

SEQ ID NO: 24594 - DNA, 1259 bp, Zea mays
  Clone ID: LIB3632-042-F4_FLI
ccgctgcttcaagaaaccaccgagagcccaaccgcacaggcaggagagagagcagggagccagggacagtagcgtggggccggggagcaacgatggaggggaaggaggaggacgtgcgcctgggcgccaacaagttctcggagcgtcagcccatcggcacggcggcgccgctgttcgagcccggggagctcaagtcctggtccttctaccgcgcgggcatcgccgagttcgtcgccaccttcctcttcctctacatcaccgtcctcaccgtcatgggcgtctccaagtccacctccaagtgcgccaccgtcggcatccagggcatcgcctggtccttcggagggatgatcttcgcgctcgtctactgcaccgccggcatctccggaggacacatcaacccagctgtgaccttcgggctgttcttggccaggaagctgtccctgactagggccatcttctacattatcatgcaatgcctgggtgccatctgtggagctggagtggtgaagggcttccagcaggggctttacatgggcaacggcggtggcgccaatgttgtcgcccccgggtacaccaagggggatggccttggcgctgagattgttggcaccttcatcctggtgtacaccgtcttctcggccaccgatgccaagaggaacgccagggactcccatgtccccatccttgccccactgccaattgggttcgcggtgttcctggtccaccttgccaccatccccatcaccggcaccggcatcaacccagctagaagccttggcgccgccatcatctacaaccgggatcatgcgtggagcgaccattggatcttctgggtcggccccttcatcggcgccgccctggctgccatctaccaccaggtgatcatcagggccatcccgttcaagagcaggtcttaagctgccgcgggtgtgctgagacatgcatgccagttcggaaggacgagcgtcttcctgtggggagtgtcttgtctgcccacgcctagtttctctgctgaatctccatctctcttcccttcaagactgctcactgctgcactgctctgttatctgaacccagaactttgtgtactcctgtaccgagctgtgtgtatgttttttttttcttccatcgtgtttgttgcaagggttcccgtatccttttatgcgttgggatcgtggcaagaaagggcagatatcatgtggaaacgtgggtttatctatcagctggatttttcatccaagtggaaccgattcagaatt

SEQ ID NO: 24595 - DNA, 1690 bp, Zea mays
  Clone ID: LIB3632-043-D6_FLI
gctccgcaattccgcatcacgcagaggcagagcgaccaacccagaaccccaccccaccgcccgcaaccgcaagctcagattccctccccaccccaccccaccccaccgtcccgctcactccagcccagcccgcgtccccacagcccagcgacagcgggcaccggcggcatccagccatgtgcggcggcgccatcctgtcggacatcatcccgccgccgccaccgcggcgggtcacggctggccacctctggcccgagagcaagaagccgaggagggctgcatccggcaggaggggagcccccgtggagcagcatgagcaggaggaggatttcgaggccgacttcgaggagttcgaggtggagtccggcgagtcggagctcgagtccgaggacgagcccaagcccttcgccgcccccaggagcgcgctcgccagaggtggactaaacactggtgcagctggtgtcgatggccctgctgcaaattcagttaaaaggaagaggaagaaccagttcaggggtatccgccggcgcccgtggggcaaatgggctgctgagatcagagatcctcgcaagggcgtgcgcgtctggctcggtactttcaactcccccgaagaagctgccagagcttacgacgccgaggcacgcaggatccgcggcaagaaggctaaagtcaacttcccggatgaggttcctacggcggtttctcagaagcgccgtgctgctgggcctgcctctctgaaagcgcctaagatggacgttgaggaggagaagccgatcatcaagctcgcagtgaacaatatgaccaactcaaacgcatatcactaccctgccgtcgtcggccacaacatcatacccgagccattcatgcagactcagaacatgccattcgctcctctggtgaattatgctgccctagtgaacctgtcttcagaccaaggcagcaactcgttcggttgctcggacttcagcctcgagaacgactccaggacccctgacataacttcggtgcctgcgcccgttgccaccttggccgccgttggcgagtctgtgttcgtccagaacaccgccggccatgctgtggcgtctcctgcgacggggaacactggtgttgatctcgccgagttggagccgtatatgaatttcctgatggacggtggttcagacgactcgatcagcactctcttgagctgtgatggatcccaggacgtggtcagcaacatggacctttggagcttcgaggacatgcccatgtctgctggtttctactgaggctgaggcccagcgactggtgcttgtgtacatagggggggacaaagggtaagagcctgcagtaacagagattggctctttctggtacttgcaatttctatcccttcaactctttcttccgcccccgtgtttcaggaataatgttctggagatgaagaaacgcttgcgtgggcgtgccctgcaggcacgcgtgtagtagctgcggtattagtatatatgcttagatgttcagtcacttcctttaagtacaatttggcgctggacatgtaccttattttactatgtatccgtgacaacagctatgtgtctgctccttttattttcttgtctttgcttcaaaaaaatggctctgaacattgcgagtttgtactttgtagacaatatatatatatatatatgtgtgtatgtgcttggtttgcttc

SEQ ID NO: 24596 - DNA, 2298 bp, Zea mays
  Clone ID: LIB3632-043-D8_FLI
gtccgccgccgccgctccccgctctctcctctgcttgcggactgcgtggagcaccagcggcggccagcgggcaggaggagctccctccccaaacagagaggggtggggtatcagtgcgtgcgctcctggaggagggcgtggaagagcagagcaggcggcaagcaggggtttgggaggatggtttcgctctcgacttggttccgctatgccgcacacaagtttgattactgcatctccctctcgttgaagaaatataatgtgggccagatcagcagcacgcagctaactgatgtgatattcaaaaatttcttccatggcaagctcacctacgtgtgtcagaccaaaggggaagaagccatggctcccatcgtatctccaactggaggagccgtccttgtcagaaagctcgcaaatttgagccccacatccagtatcgctgggcaggtcaacctactcaacgctgtttcctgcagccatggatgccacgtccagcagttcccgtgcatgcgctcaagtgtcgactccgtgccctgcaggtggcctcctctcaagctctagatatcgggagttgttggagtaatagtattttgtttaggatttaaagttttagggacgtcccaatatctatatattgggagaaatatttttaggagatgttggagatgctctaaggatgtcttattttgcatagaatgtaaaataatagtaaactaatattgtcttgccatgccaatttcttattctgtttcctactgcaaaaactattataaaactaacccaggaactgcttagcctttgttttgcattttgatgctttatttgaatccatatatatttgctatttctagacggtaacaactaagcctaaaacagaaataatcaactaagcattggactttgttaatatccatctcattaactaagctaactatattgcacaagcacggtaaagactaaagatgcccctagctacaattcttacctagattcttatttgcatgtttgataatcaactaatgcagcgaaagggcctctagtgtaataatggttaaggcttccgggtagtatctctaggtcccgggtttgcgaattctagcttggttaaaaatatcctctcgttgtaccccgcccgctcccgggttacgtcctacgcgccaccctctggttgggctgttgcagagtgggcggtggcagcccgctagtgatgtggggctagggttcgaggattttctttgctaagaccatgtttcggtctcttcttaatataataccggaggaggacggtctttgcctccccggccgagtttttttttaataatcaactaatgcagtcaatgcataatatattccaacgttactgcattcctttcatttaatactctttaagaacagctgttaatcacagtccatctatttgtataatgtgacattattttcaaactgtggactatgtgaagtatagttaattctcacctgttggatctcacggaatagattttatttttgcattttagtgaaaactcattaaagcatcaacatgaaggaaacctggttggctggtttgtaaagcaacttcacctgatagccagagaccatttgacatcacctattgcttaagatgtttttaatagtctttagcgtgtaaaattttctccacagggaagtgtttgtcggggacgttgtcttgttaaaagacccagagaaatctggcaattttgttattcgacgactggctgccctggaaggctatgagatggtctctaatgatgagaaggatgagccgtttgtgctcgagaaagaccaatgctgggtcctggcagacaacctagtccttaagccaaaggaagctagagatagccgcttgtttggacctgtcccaatgactgacatccttggcagagtgatatactctttaagaaccgctgttgatcacggtctagtcgagaacagcggcatggccacgaaactggatggtccagtactggcagtggagcttgatgtggaagagttggcgaagaacaataaggcgtagacacttgatgttttcgacatgctgcgctataactcaccttaacaatggatgttttttttttgtttatgatctgctgctgcttcaagtagaagtgcattggaatgttttttcacggtttgcctgtggagcagtcaataatggtcttgacagataacccaaaggccgctggaccgtgttcactcagaattctcagcaggatacatcgtgtgactgtaatggttgtttttagggtttcttattcatgaagttgccgtgaatcttgtatc

SEQ ID NO: 24597 - DNA, 1663 bp, Zea mays
  Clone ID: LIB3632-043-H3_FLI
cgcagagacaggcgtcttcgtactcgcctatctccgcgacccaaagcgttcccccttctcccattcttctctcatttctcaccaccgccgccgctaccccctttcgacaacaccatgagggagtgcatctcgatccacatcggccaggccggtatccaggtcggaaacgcgtgctgggagctgtactgcctcgagcatggcattcaggctgatggtcagatgcccggtgacaagaccattgggggaggtgatgatgctttcaacaccttcttcagtgagactggcgctgggaagcacgtcccccgtgctgtttttgttgaccttgagcccactgtcatcgatgaggtgaggactggcacctatcgccagctcttccatcctgagcagctcatcagtggcaaggaggatgcagccaacaacttcgctcgtggtcactacaccattggcaaggagattgttgacctgtgccttgaccgcatcaggaagcttgcagataattgcactggtctccagggcttcctcgtcttcaacgctgttggtggaggaacgggctctgggcttggttctctcctcctggagcgcctgtctgttgactatggcaagaagtccaagctcggtttcaccgtgtacccatccccccaggtgtccacatccgtggttgagccatacaacagtgtcctgtccacccactctctcctcgagcacactgatgttgctgtcctgctcgacaatgaggccatctatgacatctgccgccgctcccttgacattgagcgcccaacctacaccaacctcaacaggcttgtgtcccaggtcatctcatccctgactgcttccctgaggttcgatggtgctctgaacgttgatgtgaacgagttccagaccaacctggtgccctaccctaggatccacttcatgctttcgtcctacgctccagtcatttctgctgagaaggcctaccacgagcagctgtccgtggccgaaatcaccaacagcgccttcgagccatcctccatgatggccaagtgcgacccccgccatggcaagtacatggcatgctgcctcatgtaccgtggtgatgtggttcccaaggacgtgaacgctgctgtggccacaatcaagaccaagcgcaccatccagttcgtggactggtgcccgactggcttcaagtgcggaatcaactaccagcctcccagcgtcgtccccggcggtgacctggccaaggtgcagcgtgccgtgtgcatgatctccaactccaccagtgttgtggaggtcttctcccgcattgaccacaagttcgacctcatgtacgccaagcgcgccttcgtgcactggtacgtcggtgagggtatggaggagggcgagttctccgaggctcgtgaggatctggctgcgctcgagaaggactacgaggaggtcggtgctgagtttgacgagggtgaggacggcgacgagggtgacgagtactagacgctctactggcgcggcgtcgtcgggcttgtgtgccactgctatcctgtgatctgccctgagtggctcctatcgtgttatgtttctgtcggttcttatctatctgtcgttgtgtggtttacaacttacgttgtaagactttattcccccgctttgctactgggttattaagtttggcgttattgttttcttg

SEQ ID NO: 24598 - DNA, 2362 bp, Zea mays
  Clone ID: LIB3632-043-H8_FLI
cgagacgccgcattggatgctccctccgctcgaatctgccgctttccattatcgctgacccaagcaacattctctgcttcttggcccttgccttcttggttcgccctcccgcaatctctggttctggcctctgggcatcgcgggagtaaggcgtttcttggttttcctttcctgagatgggtctgagaaagagaaacgccatggttggtgaggcagccatgttcgccgcatcttggtagccctcactcggcattggcatcctctcgttcttggacttggagttaactcagccatgaggaagcatgggtggcagctgccgtaccaccctctccaggtggttgcgatagccgtgttctcggcactggggttcgccttctacgtcttcttcgtgccgttcgtggggacgaagccgttccagattgtggccatggctatctacactccattgattacatgtgttgttgtgttatacatatggtgtgcggcaacaaatcctggagacccaggcattttcgattcaacgaagaatttgaagttagataagaatgaaaagcactcctatgtgaattcggatcaggggattaatcatggaggaaggccattaagtgagacttttggtactgctgataacagtgagaagctgagcagcatgcttgagaggaacgattcgccttcttggcccagattttctggaattatctccctggtttgtctcccattctcttgcctttgcaaacggtgcctccattcagacagtctatcttcagaacacaaaatgtgtgaagaaggcatgtttttctgcagcttatgcgaagcagaggttttgaagaacagtaagcattgtagagtatgtgacaaatgtgttgatggctttgaccatcactgcaggtggcttaacaattgcatagggaaaaggaactacaaaggtttctttgttctaatggcttctgcagttatcctgcttgtgatgcagtggttgtcggggggacttgtgttgattctctgtattgtgaagcgaggagaattctccaggcaggttgtcacaaagttgggaagcagcttctcaacagtggcttttgtaattgttgtggcaacttgcaccattttagcaatggttgcaaccgtaccacttgcccagcttttatgttttcatgtccttcttgtgaaaaagggaattagcacatatgattacatcatagctttgagggagcaggaggaacaacaagaggttcctggacaccaaagcccgcagatgtctattgttagttctgttactggttttagcacagccagttcttttgggcctcttcatcgtggttcatggtgcactccaccaagattattcctggaagaccagtttgatgccattcctccagagattggcatttcacggaattcaggcagtaagaaaactaaggaagaggaaggagcaaggagaaaagctggagcagtgaaaatcagtccatggacattggcgcggcttaatgcagaggaagtctcaaaggcagccgcggaggcaaggaagaaatccaaaatcctgaaaccagttggaaaacatggcgccccagagaacagcagcaaaccagaccatttgcctagctacaagagacggctagacaggagaggtttccctgctgaactctctcttgacccacttgcaactctatccgcaagcggcaccgaaagcaactacagcgacgcagcaacagaaatctgtggcagtctagccccgttacagctcgaagcgagaagtgctttccaaccaagtactgcagcgtccacaagaaatgttgcttcatcgcctgaaagtagctttgactcaccaaatctccaccccttccgcacttcctcggccacagctgatgagatgcagggagccatgatgcatacagctcacaggggcatcgagtttaaaagatcgtcaagcgatggttatgaagcatcaggaggtgaagatagcgaccgcatcccttcaaggatcgtgcacaggtcgtcaaactgggccagtgtctttctgaattctggtcagggagaccctccagctgatctgctgacgacatcagctgaaggttttgtagctaacgactctggttcctagagcaggcattgctgggtatggcagagcaatgttgacaagacattgactagtatctggcattaggtttaggtttaggcgcttaatttgtctgattacatgcggggatttggattagttctaggggccgattacatgtctgtaaaactgccttcttgctggtgccacttttttggcattccattgtcgccttcggcaaaatgtgaatttgacgccattgtgcttgctgagcttgatccaaagtactgtcgctgagtagtcttttgt

SEQ ID NO: 24599 - DNA, 951 bp, Zea mays
  Clone ID: LIB3632-044-B12_FLI
caagtgttaccatgatgaccgtggaggaaaagccagatgtgacgtacaatgatgttggtggctgcaaggagcagattgagaaaatgcgtgaagttgttgaacttcctatgcttcacccagaaaagtttgtcaagcttggtattgatcctccaaaaggcgtcctttgctatggcccacctggcactggcaagacacttcttgcaagagctgtagcaaatcggactgatgcttgtttcatccgtgtaattggaagtgagttagttcagaagtatgtcggcgaaggtgctcggatggtcagggaacttttccagatggcccgctcaaagaaagcgtgcattgtattcttcgatgaagttgatgctattggtggtgctcgttttgatgatggggtgggtggcgacaatgaggtgcagcgtacaatgttggaaatagtaaaccagcttgatgggtttgatgcaagagggaacatcaaagttctcatggccactaataggcctgatacattggatcctgcacttctgcgtcctggtcgtctggacagaaaggtagaattcgggctacctgacctggagggccgtacccaaatctttaagatccatacacgcaccatgaactgcgagcgagatattcgtttcgagcttctggcacggctctgccccaactctactggagcggatataaggagcgtctgcacagaagccgggatgtatgccattcgtgcccgcaggaaaacggtgacagagaaggattttctcgatgctgtcaataaggtcatcaagggctaccagaaattcagtgcaacacccaagtatatggtgtacaactagagagtgtcttcatggaatatgttgattttagaactccgggatcttttcggtgattgtgtcatcgtgaggttctatgcaaggattgttgtttgttttgaaatctggatccccagggattgcatcc

SEQ ID NO: 24600 - DNA, 909 bp, Zea mays
  Clone ID: LIB3632-044-C8_FLI
catatcaccaccaacacacacacaggcaaaacacatcaagctcaacacacatggctgacaatgccggtctagtaggcctgctcttggagcagcaccagctgcgcccaccagcagcagcatcaagagcaccacctcaaatcacaagcaaggccactcgtcccctcctcgccaccgccaagaacgacgtcgtcgacaagggcagctccgccgccgcttccttcagccgctcttcctcttcttcttcttcccgtgcaccggcgccgacggtgtcgccgacgaccgcctgccctttcctgcaccggtgcttcttctgccacggggagctcgccgacggcagggacatatacatgtacagaggcgagagggcgttctgcagcgaggagtgccgctgccgccatatcctggcagaggaggacgatgacgacactactacctcggtcggggtcgtggcagcggcagcggactgctccacccagctccgccatcaggcccttgctgccagcttcacgttctgaggtggtgtccggccgagcgggcgggcgggtagaccaccgaggactcgtacggtgggcctgccaccggcggcttgccgtggaggaagcaacgatgtccatcaccttgagtcagatagcttgtccaaacacagatgggtgtcacggactcatgcacggctgatataatctgattgggcttcaatttcaacgtttcaaaatgatgggttaagtttcttgttttttgttggaggtgaatgtttttttttttgcaaattgtcttcttatacagtatattattctgtcgaaactaccttcttgttttcagtgctctatgattatctcttgttaagtaagttggatagtaagtttgtacatttctatcctctttaagcttttgtatttatataattatatc

SEQ ID NO: 24601 - DNA, 2132 bp, Zea mays
  Clone ID: LIB3632-044-D6_FLI
cctcgtttcaaattgacaccccgtccaacgcaaacgagagtgaaagccgaagcgagtgcgagtgcggccctcagctgctgcagttgctcctgcagtcctgctcgtttctgcggcggcggcggcggcctagcacctgagcggggcggcgagaggggacggagatggatatcgcgcgggcggctgctggcgtggcctgctgcaaggagcaccagaggatctacgccgagtggttcgccctcgccgacccagatggcgacggccgcgtcacgggcgccgatgccaccagcttcttcgccatgtccgcgctttcacgcgccgatctcaagcaggtgtgggcgatcgcggattccaggcggcaggggtacctcggattcgccgagttcgtcacagcaatgcagctcgtgtctctggcccaagcagggaacgagatcacacaggacagtctgaaacgtgaagacctgagcaccttggatccgcctgtgatggaaggtgttgatgagctactggctagatccaaggctgttgtaaagagagttcacccagatgacaatggcaccactcaggcccaagcaccttccatatatcactggtttggttcaaaatcagcacagaaggtgcagatgcctctgactgctgttacctctgtaattgatggcttgaaaagactctatgttgaaaaactgaagcctttggaagtcgcctacagatacaatgatttttctcacccattattgacaaacagtgactttgaagcaaagccaatggttatgctcttgggtcagtattcaacaggcaaaacaacattcattaagcatctgctaaagacaagctacccaggagctcacgtcggaccagagccaacaactgatagattcgtagttgtcatgtcaggatctgatggaaggaccattcctggcaatactattgccgttcaagccgacatgccattcactggtcttacaacctttgggggagcgtttctgtcgaagtttgaatgctctcagatgccacatcccctgctagagcatatcacctttgtggacactcctggtgttctctctggggaaaagcaacggacccaacgtagctatgatttcactggtgtgacctcatggtttgctgccaagtgtgaccttatccttcttctgtttgaccctcacaagcttgatataagtgatgagttcaaacgtgtcatttcatctttacgtgggcatgatgacaaaatacgcgtagtgttgaacaaggccgaccaagttgacacacaacagcttatgagagtgtatggtgcattgatgtggtctcttgggaaagtgctaaatactcctgaggttgcgcgtgtgtatatcggatcatttaatgataagccagtgaatgattcagctgttgggccaattggaaaagacttgtttgagagggagcaagatgacctcctctgtgacctgaaggacattcctaagaaggcttgtgatcgacgggtcaatgagtttgttaagcgtgcccgagctgccaagatccatgcttacataattggccatctgaagaaggagatgcctgcagtgatgggaaaagccaaggctcagcagcgactcatagacaacttagaggaggagtttgcaaaggtgcagagggaatatcatctccccgccggagacttccccgacgtcgagcacttcaagcaggtgctgggcgggtacagcatcgacaagttcgagaagctgaagccgaagatggtgcaggcggtggacgacatgctcgctcacgacatcccggagctcctcaagaacttgcggaacccgtacgagtgaaactgacctgacctctcgcgtccgtcggttgtaaaaagattatcttagctgtcacgtccggtgatggcggacggacgaggcagacgttcctgggagagagatgcctagacggttacgggtcactactcactcactagctgtccgcagctgtgccaaaaccgagaggacacatgagggttcagatcggacagccacagcgcatagcctgtgttggtttcggcgtcagtgctctctgcacgcgaaggagctgctgcggcaccgttgccgtgccgtctcgctgtgatacatttcccctcgtgacgagatgaaaagagttgcaggcggcag

SEQ ID NO: 24602 - DNA, 1269 bp, Zea mays
  Clone ID: LIB3632-044-D7_FLI
tgtggttgaagattttttgatggacgagcagttctcttctctttgccagcatcttcttatccatctggatgaggaaaggcttcttggtttcttaaattctttaggcaagctcatcaatcctactatgcagtgcaaggaattgacattcccgtgttgttggcttgaagttcttttatcaggacattatgatcacatatctcttgatgatcttgtctttttgaactgtgtcattgccaagggtagacaactttggcggctcatgaacgatgaagaacaacacgaagaatgggggcaaatggaagaacttttgaagggcggaaaccatttgactgatgctgatcattttgctctcatgaaggaacttgtggagacagaattacctggtgtgcttaagtgggtaggcattcagtcctggataattttctgtgaattgtcgaaagaatgcaaatcaggagattcttgtgaatcttttttctctcataacaaaatagaatttcacaaggctgatgattactcattggttcggaattatgggttctcaatttcacatatgcctgatattgatgttgaagatctaactagaagcagccataaaaggagaaagaggaataggagaaagcgccataggtacgagtctgatgaggacaagtttgatgaactgcttgaacttggatcatctgatggaaagaatggtgttgagtcacagcgtggaagctggcgcctttcaactgatggtttctctgcttcttgggacatttcagacataccagatcacctttctacttgttatttcacaatttgggtaaagtgggcttgctttagatgattgtctacacagtatgtgtagtatatcaatctgggtgccttttcagctacagaatctatgagcatggagctcaggcaggcatatttctgcactaattctgcaacattttggtgatgggttctgatgatgcattctgggattgctgaacgctgcatgagatccaggacaactctctttagttgggatgctgaaggttgacacctgttgaagaattttggttgcataggcattgaatatggtccaggcatttccttgaaacccatttggactttggagttagttgtagagaactcaggtattgactaagctaagcaaaaacgagtttgtaattgtgttgtctagtgctagcgacattttgccaactacacctgttgtaaatataccagattgttgctgtgaatttgattggaattgggttgaattggaatttaattcttgggctg

SEQ ID NO: 24603 - DNA, 892 bp, Zea mays
  Clone ID: LIB3632-044-E5_FLI
ccagatccaggtactcttcctttcgccgcggctgagaagcaactctccctctctgtcctcttcctgtcgccgcactcattttctcttgccgggaacggccatacaccatggcggatttctccaaggaatcttgcccttctgtgaagaacattttacttctggattctgaaggaaagcgtgttgctgtaaagtatttctcagatgattggccgactaatgcatcaaagttagcctacgaaaagtctgtttttactaaaactctaaagacaaatgcacggacagaagctgagataacattgtttgatggttatattgtcgtttacaagtttgtacatgaccttcacttttttgtcaccgctggagatgatgagaatgagctcatcttagcaagtgtactacatggtttttctgattctgttggtcttctactcaggggtgatgttgagaagcggactgcgcttgagaacttggatttgatacttctctgcattgatgaaattgtggatgggggaatcatcctggaaacagatgcaaacaccattgctggtaaggttgcaaccaatgctgttgatggttctgtgcccttttctgagcagacgatatctcaggcactagccacagctagggagcaccttgcaagatctctactgaaatgaacaaccagcaatatgtatgacatatatgtgtgttaaaggttgggctactgaatgttaagggtctttgtagtcgttattcatcccaaagtgctgctgtgacagagcctagttgaatatccgagggattggtcacatgctcgttattttttttgaaccagtgagtttgtagctgccatatttcaggtaaaacataaaataaagagttgtaattgggtgtaatataattttcaccatac

SEQ ID NO: 24604 - DNA, 3008 bp, Zea mays
  Clone ID: LIB3632-045-E9_FLI
gcagcacggcgccccgcccctcgtactcggtgagatatatccccgccttccctcgcgaaagctctcgtagagacgacgacgacgacgacgacgacgacgacgcgagaagtcgaggcgccgctgcttgctaggaccgagcttcaggaagtctccaacggccccggcgccggcacggcctgccccgcgccgccacagggattgattgtgatcagatctattctgtagtggtcagcggctgagggtgaaccgaagatgagcgttgtgggattcgatctcggcaatgagagctgcattgtggcagtcgcgcggcagcgcggcatcgacgtggtcctcaacgatgagtccaaacgcgagacacccgccatcgtctgcttcggggacaagcagcggttcatcggtacggcgggcgccgcgtcctcaaccatgaaccccaaaaactccatttctcagatcaagcgcctgctcggccgcaagttctccgaccccgagctccagagtgatctcgcgtccttcccgttccgtgtcacggagggccccgatggatttcccttggtacatgtgcggttcctgggcgaggagcggacgtttacccccacccagctgcttgccatggtgctgtccaatctgaagggcattgctgaggggaaccttaagactgcggttgttgattgctgcattggcatccctgtgtacttcagtgatttgcagcgcagggctgttcttgatgctgctactattgcaggcctcacgccgttgcagctatttcatgagacaactgccacggcattggcttatggcatttataagactgacctcccggagcatgaccagctaaacgttgcatttgttgatgtcggccatgctagcttgcaggtcagcattgtcggttacaagaagggacagctcaagatgctttcgcatgcatatgaccgttctcttggtgggagggacttcgatgaggccctcttcaagcacttcgcggcgaagttcaaagaagaatataagattgatgtttaccagaatgcccgtgcatgccttaggttgcgtgtggcgtgtgagaagcttaagaagatgctgagcgccaacccagaggccccactgaacattgagtgcttgatggatgagaaagatgtgagagggtttattaagagagaggagtttgaacacatcagtgcacctgtgctggtacgtgtcaaaggacccttggagaaggccttggctgaagctggcttgacaactgaaaatgtgcactttgttgaggttgtcggatctggttctcgtgttccagccataatcaagataatcactgatttttttgggaaggagccgagacgaaccatgaatgcaagcgagtgtgttgcgcggggctgtgctctccagtgtgctattctcagccccactttcaaagtgcgggaattccaggttaatgatgggtttcctttctcaattgcattgtcatggaaacaagactcgcagaacagtgcaccccaacagacccttgtatttccaaaggggaatgtaattcccagcattaaagctctaaccttctataaatccagtacatttgaagttgatgttttgtatgtggacacatgcgactcgcaaattccacagaagataagcacttacacaattggacctttccaaccctccaaaggtgagagggccaaactgaaagttaaagtgcgtctcaacatccacgggattgtcacagttgattcagctatgatgctggaggaggatgtggcagttccagtctcatctgctaatgaagctccaaaggatactacaaagatggacacagatgatgcaccaagtgatcctgtctctggaactgatgtgaatgtgcatgagcctgatactactgaggctgctcctgcagctgaaaatggaacacaaaatcccgaggaaaaatctgttccaatggaaactgatgcaaaggttgagccatcaaaaaggaaagttaagagaacttctgttccggtccatgcgttggtctatggtgccttggctgcagctgacctgcagaaggctgtagagaaagagtatgagatggctcttcaggacagagtaatggaagaaaccaaagagaagaaaaatgctgtggaagcttatgtctatgacatgcgtaacaagctctacgacaggtacaacgattttgtgacacctgaggagaaggaagggttgattggaaagcttcaggaggttgaagattggctatatgaagatggtgaggatgagacaaagggagtctatatttctaaactggaagatcttaagaagattggtgacccaattgaggcacggtacaaggagtcgacagaaaggggttcctctgtagatcaactggtctactgcatcaacagtttcagagaggctgctttgtccagtgaccaaaagtttggccatatcgacatatctgagaaacagaaggtcatcaatgagtgctctgaagtagagaactggttgagagagaggaagcagcagcaggacgccctacctaagcacaccgatcctgtgctgctcgtatcagatctgaagaagaaagctgaagcacttgacaggttctgcaaaccgatcatgactaaaccaaagccagctccgaagccacagactccgccaccacatactccacctccacagcctgaagcccaagcatctgaccctcaaacaccagaacaacaacaaagcgggactggtgcagctggtgagccgggtagtgagggaggtgtgcagcaggcctccggtgagcaaatggacatggacaggcccgatgattctgcggatgttgcggcataattgtggttgtggttgtcatctgtcttatgatcgatcaaaattttctgtttgtctggtaggtggatgagttaaggcaacagcatattctcccaagcgatttcgttttagggtttggaacattgagattgaggtaatgcgtcttgtccagcgttgttttggtctggactgtgaatcagaatagaaacgttgcatgatcgaattgcgccatt

SEQ ID NO: 24605 - DNA, 818 bp, Zea mays
  Clone ID: LIB3632-045-F12_FLI
ggatggccggactcgctctcgctccatccatccatcagtggagtgaagtgaataattcaacaccagcaaaacacacacaagttcgttcgcagcaagtaatggcgagaacgagagagaagctgacgctcctggtggccgcagtcgccgtgggcctcctgctagccggcggcgcgggcgcgggcgtggcgtcggcggcgcgtggccgtgaggggcggcggcgcgtgcacctgcggctgtacatgcacgacgtgatcggcgggccgaaccggacggccatccgcctcatctggggcgtgggcccgccgcacgcgtccatgccggggcgcaccttcggcgacacggtggccatcgacgacctcgtcacggacgggcccggcgtcggcgcagactccaggcccgtcggccgggcgcagggcacctacatgctgagctcgcagcacgaggaggtgatcgtggtcagcatcaccgtcgtcctcaccgcggggccgtacaacggcagcaccctcgtggtggccggccgcgacaggatctacgaccagacgagggagctcgcggtggtcggcggcaccgggggactccgcggggcctccgggtacgtgctgtggacgacggccaaggtgtggtcggaggtgcacatggtgctggagctcgacgtgcacgcgtccgtgccactgcccgacgaggaccacgacgacaacgacgttcttgttcttggcagtagggatgcgtagtaagatagacatggtctgtatctgtccctgtctaccaccgatcccatcaatgaataaataaacaaatataaaaggagcttgaatttt

SEQ ID NO: 24606 - DNA, 459 bp, Zea mays
  Clone ID: LIB3632-045-H1_FLI
gtttgccccgatttctccccctaggactgtgggagcctcgggcactagatcagtcgcctctaaagtcaagaagctagtgtggcgaatctagttttttagagagaaacgtcgtcgcgattcaccaaggaagcatgctgtttggctggagtggatcgaggccacttgccttatgcgtgaatcttgattcctgacttatgcatgaatcttgatttgtggcctaatgttagattttaattctagcatatcctaacttgtagggtgctaaaaagcagctttgttgttgctgaagcgagcacactaaaatctggttccaccggcggctcagtatcccctagatgctttcctgagagaaaatgggtaaatatcggtatgctattaaacgagcctgttttcgcttgtgttttgctaaacatcgagcactgtcaaaggatgcaaagcgagtaacgcatgaatctgact

SEQ ID NO: 24607 - DNA, 1057 bp, Zea mays
  Clone ID: LIB3632-046-B3_FLI
ggcaccctcacggcgaactccccacctcctatcgcccccctctctctagcgccgcacaaatctctcctcccccgctcgccctcgctgcattgggcgccgccaagcccccgccggatagagaggacgagaagcggcgtggctgcgggaggagcgggcggcatgtgcgacctggtggcccgcacgggccggcaccagcagcgatgcataccatttaggtatagagctaacaatgatgaaacctctggtgacaaaactaagaaagtcgtggaagttctcatgataaattcccagagcggacctggtcttttgtttccaaagggaggatgggaaaatgatgaaactgttgaagaggcagcagctcgagaagctatagaagaagccggagttcgaggtgatatagtgcattttctggggtcgtatgacttcaaaagcaagacacatcaagatgcgtgctgccctgagggtatgtgcagggctgcagtgtttgcgctgcatgtaaaggaagagctgaactcatggcctgagcagagcacccggcagaggacctggctcacggttcctgaagctgcatccaggtgccggtaccagtggatggaagaggccttgctcacaggcttctctgactggcacgacaagtggagcataggtgacggcggtggcggcggtgccaactgtgtgacccggcctaactgctgatgaacccatctgcagtcgtccaatttgtccatcctcccccatttcccctaggctccgacattgcgtaacgcaataaatacagtgtacttctctcgatgctgggttggtcattgacccttggatggttatcttagttattagtgggacgaggtatatagtatttatatctgatgaagacgagaattctcacaacttttaagtgtcgattctcgtgcctgtttatttctcggtttcaggtcagctgcagcctgcaggcaggcacgcaccctgcgcactttgtaactctgctcctgattctggagatgcacatcctgtgtatgaactgaactggtataacttgaaaataactgttaagtcaacc

SEQ ID NO: 24608 - DNA, 1954 bp, Zea mays
  Clone ID: LIB3632-046-B7_FLI
cgcaccgccttctccactacttacccgaatcctaacgctattccactgcattctgctccgaaatggccctcgccaccaacgtcgccgccgcagcagccgccgccatctccggagggtctgcctcacagccccgccgcgcgtcgccgtcgctgctcctgctcaggcgccgctgcgccgtcggcgccgtacacgccgcggagccgtcgaagaacaccggcgtcgtcccggccgccgcgaaggcctcgacgccgacggtcgtgcccgagaacgacaccgtcccggccccatccctggccccggacgcgtcgtcgcgcgcgaggtgggcggtggacagctggaggacgaagaaggcactgcagcagccagaatacccgaaccagacagagctcgaggaggcggtcaacacgatcgagaagtctccgccgatcgtctttgccggggaggcgcgtcacctggaggagcgcctcgccgacgccgccgtcggccgcgcattcctcctccagggcggcgactgcgccgaaagtttcaaagagttcaccagtgctaatatccgcgacaccttccgcgtcatcctgcagatggcggtcgtgctgacgttcggcggccaaatgcccgttgtcaaggtcggtaggatggccggccaattcgcgaagccgaggtcggacgcgttcgaggagaggggcggcgtgaagctgcccagctaccggggcgacatcatcaacggcgaggctttcgacgagaagagccgcgtccccgacccacagaggatgctcaaggcgtactaccaatccgcttccaagctcaacctgctccgcgccttcgccaccggcggctacgcggacatccaacgcgtgacgcagtggaaccttgatttcactgagcacagcgagcagggcgacaggtaccgtgaattggcacatcgggttgatgaatcccttggattcatgggtgcagctgggctaacagtggaccagcctttgacgacgatgatcgagttctggacctcacatgagtgcctcctcctaccttacgagcaagccttaacccggcaagactccaccaccggtcttttctacgactgctccgcccacatgctctgggtcggcgagcgcacccggcagcttgatggcgcccatgtggagttcctgagggggatcgccaacccccttggcatcaaggtgagcgacaagatggagcccggcgagctggtgaagctgatcgacatactgaacccgacgaacaagcccgggaggatcaccgtcatcacaaggatgggggcagagaacatcagggtcaagttacctcaccttatccgcgcggtccgccaggctggacagagtgtcacctggatcactgacccgatgcacgggaacaccatcaagactccttgcggacgaaagactcggccatttgactccattctggccgaggtacgggccttcttcgatgtgcacgaccaagagggaagccagcctggaggtgtccaccttgagatgaccggtcagaacgtgaccgaatgcacgggcgggtcaagcaacgtcaccttcgacaacctgagagaccgctaccacacgcaatgcgaccccaggctgaacgcgtcccagtccctggagctcgccttcatactcgccgagaagctgaggaagcggaggatgcgccggtcgtcggtggcgtctgggctcggccgcagcatcttgcccttgccgccctttggcttctgatgtcttgcacgctggctgtgtgcatgcagggtgcagtgcaggggtgtggtaggagaatcttacgttgtcgtttgccttttgctatgtagtatgtaatgctttaatattttactgcattctacgtcgttttttttccttcttcttctatttgtttctttttgtacgtagctgcagctcataagagattgaataatactattgctgccacatatatagacggagttagctttgtg

SEQ ID NO: 24609 - DNA, 2684 bp, Zea mays
  Clone ID: LIB3632-046-B8_FLI
caagacgagccgcgctccgtcgcatccacctcgtctcgtcacacactccactcgaacgcactacttgatcggccaaagccaaacgaactgggctccctcccctccacttcctctccccatggcgcagcagctcccctgcgtctcgtcgccgcgcccgctgctcgccgtgcccgcgggccggtggcgcgccggcgtgcggggccggcccaatgtggcgggactggggcgggggcggctgtctctccacgccgccgccgcgcggcccgtggccgaggcggtgcaggcggaggaggacgacgacgacgacgacgaggaggtggccgaggagaggttcgcgctgggcggcgcgtgccgggtgctcgcgggaatgcccgcgccgctcggcgccaccgcgctccgcggcggtgtcaacttcgccgtctactccagcggtgcctccgccgcgtcgctgtgcctcttcgctcccggcgacctcaaggcggatagggtgaccgaggaggtgcccctcgatcccctgctcaaccgaacgggaaacgtgtggcacgtgttcatccacggggaccagctgcacggcatgctctacggatacaggttcgatggcgtgttcgcccctgagcgcggacagtactacgatgtgtccaacgttgtggtggatccatacgctaaggcagtggtaagccgaggtgaatatggtgtgcctgcgcctggtggtagttgttggcctcaaatggctggtatgatccctcttccctataataagtttgattggcaaggtgacctaccccttgggtaccatcagaaggaccttgtcatatatgaaatgcatttgcgtggattcacaaagcacaactcaagcaagacaaaacacccaggaacttacattggtgctgtgtcaaagcttgaccatctaaaggaacttggagtgaactgtatagagctaatgccctgccatgagttcaatgagctagagtacttcagctcctcttcgaagatgaacttctggggatattccacaataaattttttctcaccaatggcaagatattcttcaagtggcataagagactctggatgtggtgccataaatgaatttaaagcttttgtaagggaggcccacaaacggggaattgaggtgatcatggatgttgtcttcaatcatacagctgaaggtaatgagaaaggcccaatattatcctttagggggatagataatagtacatactacatgcttgcacctaagggagagttttataattattctggttgtggaaataccttcaattgtaatcatcctgtagtccgtgaatttatagtggattgcttgagatactgggtaacagaaatgcatgttgatggttttcgttttgaccttgcatctatactgaccagaggatgcagtctatgggatccagttaatgtgtatggaagtccaatggaaggtgacatgattacgacagggacacctcttgttgccccaccacttattgacatgattagcaatgacccaattcttggaaatgtcaagctcattgctgaagcatgggatgcaggaggtctctatcaagttggtcagtttcctcactggaacgtttggtcagagtggaatggaaagtatcgcgataccgtgcgtcagttcatcaaaggcacagatggatttgctggtgcttttgctgaatgcctatgtggaagtccacagttataccaggcaggggggaggaagccttggcacagtatcaactttgtatgtgcacacgatggatttacactggctgatttggtcacatacaatagcaagtacaacttgtcaaatggtgaggacaacagagatggggaaaatcataatcttagctggaattgtggggaggaaggagaatttgcaagtctgtcagtccgaagattaaggaagaggcaaatgcgcaatttctttgtttgtcttatggtttctcagggagttccaatgttctacatgggcgatgaatatggtcacacaaagggagggaacaacaatacgtactgccatgaccattatgtcaattatttccgttgggataagaaggaagaacaatcctctgatttgtacagattctgccgtctcatgaccaaattccgcaaagaatgtgaatctcttggccttgaggacttcccgacttcagaacggttgaaatggcacggtcatcagcccgggaagcctgactggtcagaggcaagccgattcgttgccttcaccatgaaggacgaaaccaaaggcgagatctacgtggccttcaacaccagtcaccttccggtggttgttgggcttccagagcgctctgggttccgatgggagccggtggtggacaccggcaaggaggcaccatatgacttcctcaccgatggcctgccagatcgtgctgtcaccgtctaccagttctctcatttcctcaactccaatctctatcctatgctcagctactcctccatcatccttgtattgcgccctgatgtctgaaagaagcagatacaatagagtatactatagcggttgttctctaggctgtagcatgcagtggaaactggaaaatgttggggttgctctgttgtcggtagtttacatgcgcatgtcggtatgtgtagctaaagctggtggatctcagttctcagatcggactcgagacggggaaaaccattgcccagttggctggttc

SEQ ID NO: 24610 - DNA, 1853 bp, Zea mays
  Clone ID: LIB3632-046-C10_FLI
cggctcctccccacctggccaccactaccacctcccgtctcctcgcctccttccaaatccaccggttgccatccgtccgacgaggacggaaagggaccggcgtgagggaaacctagatgacccgttcctgggtcgggaccagagagccttccgggctgcgccttcgatcgccgccccgccgcctagggttcccgcgcctgtagatcgggtttgggggacgaggaaggggagtgccaagtaagggaacgatggggccgaggcgctccaagcgcgtttcgtgggccaccggggccaatctctgcaaggtaaggttttttatttcggaggattccccttctcaagctggattgagaccgcaggacaatctccaagcaaaaggctcatggttaatgcatgcagctggcccaagctcagatgattcgctgccacctggcttcgaatcattgcagccaacaagctgtctcaaaattgacatatcccaaatccatgttattaggtggagatgcccaccacaggtattgcataatcctgtttggcttgtagctgctggagaagaaagtgaggaggttgccttgcagaatgataggatatttggagcacttgaggctatatatccacggccgtcgaacattcctccaaacccatttgttactcctgatgtgaaagactcccaatatgatgattcccgaacccagttggttccgttgctcccagttgaagaggatgatgcctctgaccagttggaagaaccacctgttggtctatcaagtagttaccagcagtcagataagtacgactcagcaacattcagggtcccacaagcctcagacgctccctttaccactgcgcagcagcagcagcagccgaatggttccatcaacaacacaaggtctggtgcccccgctgagcctgacacagtggctgctgcatctgctgcttacactgcaataattcagagcaaccgaatgggaaatatgattgaccaagatctgctcgtcgaaatgctaagtgaccctgcccaacttgagaggttaatgaaagaatatgccgcgcttaagcacgaacagtcaactaacagttctgttgccccaatggtgaaaggtccaccacctcagatgacagctagtgttccggtctccttcccagatcacaccactgcttttcacaacataaactctacactgccgcctccacctgttctgaatcgtctgcctcctccagctattccttcagcagttaccatcaatccaccagcaagttcaagtcaagcaattagctttccaactggccgaaccagcggcttgaactattaccagaccctgatccatcagcatggaggggagaggcaggagccacagccacttcaacagcatggaatgcactttccaatgcatcaccgcactgtcgcttcccagtctagcgccactgatatcgtcagcagtggtactatgccagctagggatactaagcaaaggcctatgaagccttgtgcttacttcaacagcgccagaggatgccgcaatggtgcaaaatgcacgtttctgcacgacgtgtctgccgcgaggaaagaacagccaaagggacccaaaagaattaagctagacagtagaatagctggtcggtattgaggaggctgctgccggtttattttttactgttctttggttcaaaatccttttcctcctttttttccttcaaaaaattattcagtaaatattgcgccccagctcctttcctttctcttagccaatttctatttgtttactagaagaacatgctcttagcccatttctctttgttgactaaaagaaaatgttttagaagaaagaaaaaaatatcccatgattgaatgg

SEQ ID NO: 24611 - DNA, 1410 bp, Zea mays
  Clone ID: LIB3632-046-C12_FLI
ctcctccctctgtcccctctcccaaaacccctctctctccacgcttctccctcactctcccagccgctgcagccgcgctgccctccgccccggcgcccgtcgcgctgccctcccatctccctccggtgttgtgttgtcatttgtcaggtagccgcctccccccccccccccccccctcttcagcttgttctccgcggcggcggcggcggcggcttggatcggagcggagggagaagatggtggcatcaatcagggtgcccaagacccaacgcgccaggagggagcttctcaagcacgcgcccaagcttgttgagaccagcaagaagacactgatcctccatggtaccaagactagtgctgtgttgaactctgtgctgtcagatatttaccacctaaagcgtgataatgctgtgaaatataccaagaagaatgacaacattaggccttttgaaagtggtggagaatcttctctggaatttttctccctcaaggcagactgtagccttatagtgtatggttctcattcaaagaagaggcccaacaatctgattttggctagaacgtatgaccaccacatatatgaccttgttgaagtaggagttgagaactacaagtcaatggaatcttatgtttatgataagaagctagcaccattacttggatcgaagcctttctttgctttcataggggaacactttgagagttctgaagagctgaaacatttgaaagaagtgctgcttgatcttttcagaggagaggtcgtagagaatctgaaccttgccggtgtggatcggatctatgtgtgcactgcaatctctcccaccactgtctacatgatgcactgtgctctccgtctaaaaaggtcaggtacatctattcctaggatggagctggtcgaagttggaccttcaatggatctggttgtaaggaggcacagacttccagctgaaagtttgaagaaagaagctatgaagaccgctgaacatgctaagaagatgaaaaatgtcaccaaggatccagtgcagggcaagctgggcaaggtctacatgccagaccagcaggttggaaagttgaccttatcaaacgacgtaaagggactaaagagggagcgccgcgaagccaagaaaaatcaggactcaaagaagcaaaaggtcaaccctgagtaaagagcactgaagtttacctttgtattggatacaggtcaggttaagaaaccctggcttgtatctgtttccaactgctgtgttatccaagtagaagttgctcgctgtcagattagtgccatcttgttaggctaaagatctctgtacgactttcacatcagtattgtgtaccaatccatgttatgacataagcatggaattttgagaatgtgttatcctatcaaatatcaaacgtcttctgaggtct

SEQ ID NO: 24612 - DNA, 467 bp, Zea mays
  Clone ID: LIB3632-046-F3_FLI
ctgctctgttgctggtgactaggagcagtagcgagagggattctggatggccaagtcgaagaaccacacggcgcataaccagtcgttcaaggcgcacaagaacggcatcaagaagcccaagcgccaccgccagacctccaccaaggggatggacccgaagtttctgaggaacttgaggtactcaaggaagggcaacaagaagagtggcgaggctgagtccgaggagtaagatgatggtgattgagtttgtggcgacaaatgcatctcttgtatcgctaagagtcttagctgtgaacttagttctcacttctgtgtgactgtgatcaaaggacttgtgtatgatcaaaggagatccatcagttggtaccgaagtgtattttatgtcttgttggttacctggaatttaattaaaaccatcacttgtatccttttgagaattgggcaattgatgtgtcgttttctgttct

SEQ ID NO: 24613 - DNA, 1359 bp, Zea mays
  Clone ID: LIB3632-047-A7_FLI
ttcacccgcgacgagcacccaccaggcatagagagagatggcaagtctaaccggcctcaccgcgaaccctaatccgaacaagtcattcgagatactgccgaacccaggtgactctgtctccagcctcagctttagtcccaagagtaatctgcttgtggcaacctcctgggataaccaggtgaggtgctgggagattgttggtggtaacagtcagccaaaggcgtccatttctcatgatcagccggttctctgctcggcttggaaggatgatggaactactgtcttctctggaggctgtgacaagcaggtcaaaatgtggcctcttctgtcaggtgggcagcctcagacggttgctatgcatgatgcccctgtcaaggaggtcgcctggattcctcagatgaatcttcttgtatccggaagctgggataagactttaaggtactgggatacaaggcaatcaaatcctgtgcatattcagcaacttcctgaacgttgctatgctcttactgtgaattatccccttatgattgttggaactgctgaccgtcatcttgttgtcttcaatttgcagaatcctcagacggagttcaagcgaatccaatcaccactaaaataccagacacggtgccttgctgcattccctgatcaacaagggtttttggttggttcaatagaaggaagagttggcgttcatcatatcgatgacgcacagcaaagcaaaaacttcacattcaaatgccacagggaaggaaatgatatattctctgtcaattcactcaacttccaccctgtccatcacacatttgcaactgctggatctgacggtgctttcaacttctgggataaggatagcaagcagaggctaaaggcttttagtagatgcccccttcccattccttgcagtaccttcaacagtgatggttccatatttgcttatgcggtttgctatgactggagccgtggggccgaaaatcacaaccctgcagctgcaaagacatccatctatctccacagtccacaggaaaccgaggtcaaaggaaagccgcgcattgcaacaggcaggaagtgattgcattgaaggtgttgcaaggaaccatgatgtcatccagcagttttgtcatgcctccctcctgtcttggaagtctggtagagtgtaaatttcagctaacttatgcgccgattatagggtttctgtagtacctggtgtttgtggtgtcttcaaaatagattctgtcgacgttctgtgatgatctccttactgcttatttctggcagtaaaatcagtgtatcttaaaaaggttgtgatgtaaattttcgtgcatatggaccccgatactaatggagttttacttcacagat

SEQ ID NO: 24614 - DNA, 1084 bp, Zea mays
  Clone ID: LIB3632-047-B8_FLI
cacacacacacggagagatcaaattgatacactgcgatctcgatcaaacaaatcaaaaaaaaaaaaaaatcttgcgagacacaactacacgggcctcgccaagatcctcaagaagttcgacaagcgcaccggcggcgtgaatgccgtgtcctcccgcgggtcggcggcggatccgtcgtcgtccagcgccgcggaggccgacttcctgacgctcctggacgccgagatcgacaagttcaacgccttcttcctggagcgggaggaggagttcgtgatccggcagagggagctccaggagcgcatcgggcgtgcgggcgggcccgaggccacgctggcgcgcgtccggcgcgaggtggtggacttgcacggcgagatggtgctgctgctcaactacagcagcgtcaactacacgggcctcgccaagatcctcaagaagcagatcgaggagagcctgccggagtggcggagccagttcctcaactacaaggagctgaagcggcgcgtgaatgccgtgtcctccccgtcatcgcgcgggtgctgcggcagcccttcttcaccaccgacctcatctccgagctggtcagggactgcgaggccgcgatggaggccgtcttcccgcccgccgccagcagggacctccacgggcgccaggcgctggccgtcgccgggcagggcatcttccgcaacaccgtcgccgctctgctcaccatgcaggaggtgcgcagcgggagctccaccgtcggccatttctcgctgccgcccatgcagccgctgccggagtcggactggctcgtccagtccgttgacagcacgccgacggcgtcgcccctcatccccacccagtgactgacgacaccatggtccacttccagttccatggcactacagtgctacaccacagcggcgtattatatagtatgcaatatatataatctacatactgtagtagtggtgctcggtatgcggctgatgtgtacagtagtagtatttttttctctccttttgttgatgagacttgagaggtgtcctttttgctctctttcttattttaccatcaaaaataataataatcatcataataatt

SEQ ID NO: 24615 - DNA, 2387 bp, Zea mays
  Clone ID: LIB3632-047-C1_FLI
gtctccttcctctattcgtgttgtccgttcgctgccgccgtcgcctggttcgcatcgcatacagcgcctcagtccagatcgatcctccctcttcccagatcgggtctagttggacggcagcagccgccgccgcggcatctgtcatattcacgccgcgtgtgctctctctttctgtctccctctctatctgcgacgactgggtgtgataccgcagccgccgccctacgctgggttcccgagccttcgccgatctcttctccggcgaagagcgcccaccagatccgccgcgcatcgatgtctcctttggctcttctccaagctctcatcttcatcctgtgctgctcgcctctggcttctgcttcctcgtcggagctaacccttgcaggagctgcttgtggagatgatcagcttgtcatcttcgatgcttctgatggcctccttaacctgtcggtcaatggggttctgatgcaagatcgcgtttttgcctgccagaagctcggcttctactttggcagtggatgcctccgctgcagcaacctttcagatgcgtggaggagtgccgtaaagcagtactgtggtgaagggagcgaaaagagccatgcaactttacatcaagatgtgccaaggaagctcttgaggtggtccacagaaaatagctcaaggaatgcatgtgaaaggtctgggttgaatgaaaataatcaggacattggtgattcttcagaaaagcaggagcatctcctggctgtgccaggtgtgattctcttatgctgtggccttatgttaccatgctttcatgctgaaaggaaagaagtcagcaggcatgacaatgcaaccattcagcgcaacgcacttgaatcagtttcatcctatgaaggaagcatgtcatctgagaaagtcccaccaactccacatcgaatacctccaagtccctctagatttgcgccgtctccacagatagctagagttggatctgtcaacttaagcatccagcagatcctcagggcaactcagaacttctcaccttcatttaagttaggtgaaggaggatttgggatggtctacagggctgtattgccagatggcaatgttgttgcggtcaagagagctaaaaaggatcagtttgcaggtcctagggatgagttcagcaatgaagtagacttgcttgctaagatagaccaccgaaatttggtgaggttactgggttttactgataaaggaaatgagcgcattatcatcactgagtatgttccaaatggtactcttagagaacatctagatggtcaacatggaagagtcctagattttaatcagcgtctagaaattgcaattgacgtggctcatgcacttacttatcttcatctgtatgcagagaagactataattcatcgtgatgtgaagtcatcaaacatcctgctgacagatagctatcgggccaaggtgtctgactttgggtttgcaagaagtggccctagtgacacggagaagacacacatatcaacgaaagtgaaaggcacagctgggtacctggaccccgaatacttgaggacataccagctaactccaaagagtgatgtcttctcatttggcatattgcttgtagaaattctttctgctcgcagacccgtagagctgaagcgaacccctgaagagaggatcacaatcagatggactttcaaaaaattcaacgaaggcaacacgagagagatactggacccattgctggaagatcacgtggacgacgaggtgcttgaaaagctccttagcctggctttccaatgcgctgctccgacacgggacgaccggccgaccatgaaggaagttggggagcagctgtgggagataaggaaagagtacggaaagagtgttaggaaggtgtgaagatcatggaaaacatttccctgtttctcaagactttccctggaccaaggggactaaggggggtgtttggttttatagggattaaattttagttcttccattttattctatttaagtccctaaattaccaaacacggaaatcaaaactttattttagttttagtatttggtaattcagagacttgaatggaataaaatggatagactaaaaataagttcctagaaatcaaacaccctctaagcatgcgaagtatttgtgcccattggataaacacctgatcatctatgtttcttggaagatgtgacctgaagaaatgtacagtgcgataacaccgccatcagtttgtgctttcttgtctcagtttgcagtgcactccctctatggagaatgtatattttggagttctcgcatttcttgattctgttgatatggtattctgatggatgtacccgcatacattactgcaaacggtctgaaataatatacgaagggaaattgtttgtattgg

SEQ ID NO: 24616 - DNA, 1523 bp, Zea mays
  Clone ID: LIB3632-047-C3_FLI
gatgaagcatcgatccgggagaaggttcagcattagctctagctagagctagatagccggaggaggagctagtaggaagaggcatggataatcatcaacttgtcgccatggcagcggtggctcagccggcgagcccgacctcgccgcacgtcgcgcacaagatcccgcccggcgacgggccttacgcgagggccaagcacttccagctggtggagaaggacctggacgcgtcgatcgcgtggttctggaaggcgatcagcgcgggcgacaagttggacagcgcgctcaaggacatggcggtggtgatgaagcagcgcgggtacctggcggaggccatcgacgccatcaggtcgctgcggcacctgtgcccgaagcagtcccaggagccgctggacaacatcctcctggacctctacaaggccagcgggcggaccaaggaggagatcgagctgctcaagcagaagctccgcaagatctacctcggcgaggcgttccatggcaggaccaccaagcgcgcccgctcgcacggccgcaagatccacgtctccgtcaagcaagagacatcgcgcgtcctgggcaacctcgcgtgggcgtacatgcagcagcgcaacttcatggcggcggaggtggtgtaccggaaggcgcagatgatcgacccggacgccaacaaggcgtgcaacctcgccctctgcctcatcgagcaggcccggctcgccgacgccgagctcgtcctcgccgacgtgctcgccgggaggtacctgcaggcccgcgaccagcaggacggcaagatcgtccggaaagtggaggagctgctggcccggatcatggcgcatacgacgtggccgggcggtggcggcggtgacggacgacgacgcccggcggataagagcgggagcgggagcgagagcgacgacgatgactgggtcgagaaccagatgctggctttgctcgacgtggcggtgccgtaccggaagaagagcaggaggctgccggtctttgaggagatctcgcgagcagaatagcagatggctgatatagattagcagcagcatcatcatctttcgatcgagctccatgcatatatcgtttgagcgagcgcggatcctctggacctaactgcagtctgcagataggtaggtaggtaggtctgagctgatccagacccacatgtcagtgaccggacgcagaggatctgcttccattattatttgatcgactcctgtccagctcaaccttttggaccaactccgtggcgatagcagtagcagcagcagaaaggtaaagcgcgcgtgtgtgtgtgtgcccctgtgaatctgtggatcggagacagtgtgcagtagcatagcatcagcagcaaggtatttaaagcgtgcaagtgtgtgtataactgtatatacgcttcttatatgcatctgtggatattttgcatggatcggacgcatgtcgcagtcgtgtagtacgtgcgtttgtaaagctattttcaccagtatactcatctctatgctcatattcaaattttcact

SEQ ID NO: 24617 - DNA, 1229 bp, Zea mays
  Clone ID: LIB3632-047-D11_FLI
cgccacagcaacgaccaaccggagccgccgccgccgccgacggggacggggacagggacagggaaactaccaccaccggccatattaacagctgcgcgtgcacggtggagttctacttccgcccgtgattcgactcgactcgactgctcgttccgtctcgaccttcaggcgggtaagcaggttgaccgtccgcgaattcaccgtatcccgggatacgtatgggttccaaagcgtccttccgcgtcacgctcctcttgctgctcctcgccgccgcctggggacctgctgcacaggccgacgacgctggtattgctgagctcccggatcatagagctattaccttgaaggagcaggtttcttcgaccaagattcctgtccgtctcaagagtggcagcccgctgtgctcagcctgtgaaaacttcacgggcaaagctgtcagttatatcagtgagaaacagacgcaagataaggtcatgggattccttcatgacgcttgctctcagtcattctcgtttgaacagaagtgtgatgaattgatggactcttacgcaaccctcctgtttgccaagatcacggagatcaaaccagaagcgttctgcaaacagtatggcctgtgcaggggcacggctcttttctctggtgtgacaagtgacagcacatgtgtgttctgccaccacctgcttgatgaagttatgtccaaactgaaagatccggacgcggagtttgagataattcagatccttatcaaggagtgcaataagattgaaggccacgtccagcagtgcaagcgactggtcctgcaatacattcccctcatcctggtgaacggcgagaagttcctcgagaagaatgatgtttgcgcgctcgttcaggcttgtccagccacccataagaagactttcagctcagccttgaaggaggccttgttgctgagtaacgcttgaaggttggaggaagaacacgcaaagcgtttagcagtggttggaaatagtgtgcccaagtgccgtgtttgtacatataattgtcatatgaatgcatgaagacgtgtcttgtgccctgcattgtttccatcttgtatcataattcataaacacgttgtcttgagtagatttttatggacatccacagtgggtgaaggttaaaatatatttgtatcataattcatataagcacattgtcttgagctacggtgcggtcagtcaatttatatatccagaaaatttcagcgc

SEQ ID NO: 24618 - DNA, 960 bp, Zea mays
  Clone ID: LIB3632-047-E6_FLI
cgtgctcgccactcctcgccgatggcgtcctccactctgccagcctcccccttccgtatgtctcttcccggactacgagccccggaccctgctaaggttaagcacgtatccgttcgaacccccgctcgccgtcttcccgttgcagcctccgcggcaccatcaggcgccgcggcggcggcggcgagggagcgcaggcgtttcctggagcgctacgggctcaacccaaacgacttcgaggaagatgcagaggataatccgagggaggagagaaaggacaggcggaggcggaggcagtcggggagaggggagcaaactgcggaagcggcagtgactccagcgaaggtggaggagcctcgggagactcacaaaatgctccaggtgctaggtggaaaagtccgcagaaggaaattactgtcacctaaagataggaatgtccgtccaatgatggaagttgtccgaggagcagcctttgacattttacagtcagctggtggttctcctgcttcactcagaccgggtcggtggctagacttgtatagtggtactggatccgttggaattgaagctatgagccgaggatgttcagaggcacatttcgttgagatggatccttgggtcatctctgaggtcctcaaaccaaatttggagtgtactggatttcttgacgtgtcacacatacatatgctccgcgttgaaaatttcttggccaatgccgaaaaatctcaaggtagatatccttcctttgattacattagtgtaacaccaccatatctggaggtcaactatagcacgctactcggccaacttgcaaggtcaccattggttggaaaagactgcttcatcctagtcgagtacccgctgaaaacagacatggctgaatcctgcggaaaccttgtaaaggtagctgacaggaggtttggtaggaccaacttgctgatatatgggccaacttggtcagag

SEQ ID NO: 24619 - DNA, 2512 bp, Zea mays
  Clone ID: LIB3632-047-G4_FLI
ctgtaagcggagagccttcgtggtccctgctcggttcatcagaatacaggaggcaccggagctttaagattgtgcagacacataatttggatgctcctgcctatgcaagatgtcaaccaccagagatattgtttagtgctgggaaagttatgcagttttggatcataaattctacatagacaagataattatggaccgtgcagacacatcagggtttgtcagtggtggttgctttggtactacactcctgctgatattctttcatttcgtctattctacagtccgtgtctgaaagatcgtcagtaacgctgcagctgcctgggcagaaatatcatcaggccccctgttctttgagatctctggtgttttatctcattttcttttccaccatcggtatattgtcttaactgtgatggataacggcttcatggacatcccccatccgcctctgatgaatgacccttttgtgttagtgggatgctcagcgccaagctccacggtggagaacatgggccaaagcacactctgtatggatggcctgaacccagcaattgttaattgcagccatgttaatggaaatacacagataatgaatgacataacagcgagagatgatggcagcaggttagtccttggtttgggtccaacaccgaatttttattctgcagtgtccactggctcaaaacaagctcagagattgtcaggccagagttcaactttcactgattcagggatgctgaggcttggccttcacaccgatggtgagggagcaattcaatgtctgcaagcaccgaatggagcactccattctttaggtattgtcgacgaggcttcaacatctactactgtaaggagcatgggtggttacatgccatccctactctttgctccccgctccaatcctactgccaatgagacacaattagaaatcccagattctctaaacctcacgcacagcaccagcaacagtcagcatattcaacgtcacctccagttcagccctgaaccctctgcaatgaccgagtcttcatttggtgtgagttctgatgttgtcaccgcaacaactacatcagaacgtagccattctcgacatcctaagaaatgcaggttcaagggatgttccaaaggtgcaagaggcgcatcaggattgtgtattgcccatggaggtgggcagagatgtcataaacctggatgccataaaggagccgagagcagctctgcatactgcaaagcccacggtggcggtcgtcggtgtgaggaacttggttgtaccaaaagcgcagaaggaaaaacagattattgcattgctcatggtggaggccgccgctgcgaacatcctggctgtcctaaagctgcccggggtaagtctgggcggtgcatcaagcatggtggtgggaagaggtgtttggttaaaggttgcattcggagtgcggaggggaaggctggattgtgcatttctcatggcggtggccgacggtgccagtatccagattgtggcaagggggcacagggcagcacattgtactgcaagggacatggtggtggcaagaggtgcgtcttcgatggttgcagcaaaggcgcagagggtagcacacctctgtgcaaagcacatggtggcgggaagcggtgcatgtttgaaggaggtggtgtctgtgcaaaaagtgtgcacggggctactgaatattgcgtggcgcatggaggaggaaagcgctgttccgtgcccggctgcaccaagagtgctcgtggccgcactgactgctgtgtgaagcacggtggcggcaagcggtgcaaggttgagaactgtggcaagagcgcccaggggagcacggacttctgcaaagcccatggcggaggaaagcggtgcacatggggcacaggctgtgaaaagttctcccgtggcaagagtggcttctgtgcggcacatggtaccttgatggccaggcagcgagaacaagaggcggcgaagaatgtaggaagcatgattggaccaggtctcttcagcggcattgttgtgtcatctgccaccgcagcaagcagcatgacgaacgagcactcgtcctctggtgtcagcaccgcttccgactgcgacggcactgtgaggagccaatcaatgattcctccacaggtgctggttcctcgctctatgatgccttcttggtcgactgagcctgtagatggaggcagagagggaggtcatgttgttcccgaggggagggtccatggtggtggcctcctgtcacttatcggtggcagcttcaggaacgccgatttggagaagcttcaaagctagtgcttttccatcagcagattcggtcagtttgtttgtacataaacaggccgcgtttcggcccattgtattcttattgtgccttttcttgtctagataaacatttcaaccttcatgttgtactggtttaagtccattgtaaagtggtgactggcaattgttgtgaacgcttttggcttgttggttcagctgtagtcagtactgcaataatttcgtgtgttgttt

SEQ ID NO: 24620 - DNA, 2010 bp, Zea mays
  Clone ID: LIB3632-048-B7_FLI
tggaaatccattcattccttcgtcccccacctctcgctctatctccatctccatcccgcctcctcctcctcctcatgctgctgcggccactgccactataatagcccagctagctagaggccacccatcaagctgcccattccctcgtgacagcgcagctgcctgcctgctccgaggcgccacccagctcttcctcgccccagcagccgtttctcgagatccttttcactttcaccaccagggtacatagaccgcatctgcggtgctctgcgctcctcagactcgacttgttggttcatccatccagctgccgccggagcccggaggtcgatcagctacctatctgaccgagcgtggaagctcccggaccggacattccattttccgttccgaagggggggtgagaaggcggggaatgagtacaaccaaggtgaagagacgtgtgggcaagtatgagctcggccggaccataggcgagggcaccttcgcgaaggtcaggttcgcgagggacacggtcaccggcgaggccgtggccattaagatcctggacaaggagaaggtcctcaagcacaagatggttgagcagatcaagcgggagatctcgacgatgaagctgatcaagcaccctaacgtcgtccgcatatacgaggtgatgggaagtaaaacaaagatctacattgtgttagaattcgctaccggtggcgagctctttgatacaattgttaaccatggtcgaatgagggaagacgaggcaaggaggtacttccaacagttaatcaatgcagttgattattgccatagcaggggtgtgtaccaccgggatttaaaacctgaaaatttgctgcttgattcatatggaaacctgaaggtctctgactttgggctcagcgcgctatctcagcaaatcaaggatgatggactgctgcacacaacttgtgggactccaaactatgttgcaccagaggtccttgaagatcaaggctacgatggagcaatggctgatctgtggtcatgtggagttatcctgtttgttctgctagcagggtatttgccgtttgaggactctaatctcatgactttgtataagaaaatatcaaatgcagaatttacatttccaccatggacatcttttcctgccaagaggttgttaacaagaatccttgatccaaatccaatgacgagaataacaatcccagaaatattagaggatgagtggttcaaaaagggctacaagcgcccagaatttgatgaacaatatgacaccacattggatgatgtggatgccgtcttcaatgattcagaagagcaccatgtgacagaaaagaaagaagaagaaccagtagctctgaacgcattcgaactgatttcgatgtcagcgggcctaaaccttggaaacttatttgactcagagcaggagttcaaaagagaaacaaggtttacatcaaaatgtccccccaaagaaattgtccgcaagatcgaggaagctgcaaaacctctaggatttgatgttcagaagaaaaattacaagttgaggctcgaaaaggtaaaggcagggaggaagggaaacctcaacgttgctactgagatactgcaagttgcaccctctctccacatggtagaagtccgaaaagcaaagggtgacactctggaatttcataagttctacaagaacctttccaagaccttgaaggacgtcgtctggaaatccgacgatcttcaaacgcaacatgcttcttagcagaacctcagagaggaggaatggcaaactattttgtgcaccatcctttcaagcaaactattctgcatgtaacggtgggtgcccaggaaattgcgctggtgctccaccatcgttgtatatgctgcgtcttgagttgcttgctgtagctgaagggaagttcattcagtaggttttgagtatgagttttgtatatccgtatatgcctatgactatgagccgtgctggaacactatgatcagaaactgcgaaatggagcccagaatgttcttgcc

SEQ ID NO: 24621 - DNA, 701 bp, Zea mays
  Clone ID: LIB3632-048-C8_FLI
caaaacgcttccccgacgcctgactccaaaccctttcgcctccgccgccgccgccgccgcctgatagctccagcgccctcgccgtcggctgcccggctgccgtcctcccgctacgagctaggcatctccttcgccgatccagcatgggtaagacacgtggtatgggagctgggcgcaagctcaagacccacaggaggaaccagaggtgggctgacaaagcctacaagaagagccatcttggcaacgagtggaagaaaccctttgctggatcatctcacgcaaaggggatcgtcctcgaaaagatcggcatcgaggccaagcagcctaactctgctatccgtaagtgtgctcgtgttcagctggtgaagaacggtaagaagattgccgcctttgtgccgaacgacggctgcttgaactacatcgaggaaaacgatgaggtgctgatcgcggggttcggtcgtaagggtcacgccgtgggagatattcccggtgtccgtttcaaggttgtgaaggtctcgggcgtttccctgctcgccctcttcaaggagaagaaggagaagccgagatcttaaaaaccctattcccctcgccacaaatgaatcatgtaatgcttttggagttctgggacctcatgttgagaacctagcgattgttttgccatagttttgtttagaagattctgaattgaattctatatccgt

SEQ ID NO: 24622 - DNA, 963 bp, Zea mays
  Clone ID: LIB3632-048-D2_FLI
caaggccacacacacacacacaccactaggctaggttagccttttaatcgtcgtcgagaagcaagaagggcgcgcacgcaagcaggcaagcaagaagagagccgatcgaccgagagctagcacgcgatggcgaggtcttccaagatgatggtggcggcagctctgctggccttggccctggccgtgtcgaccgccgaggcgaggaacatcaagaccacgacgacggagaagaaggacgacgcggtggtgcagccgcagaccttcccgcccttcgaccgcctcggcggcggcgcgtccccggcgttcggcggcctccccggcggcagcattcctggcagcagcattcccgggttcagcatgcccggcagcggcagcagcctacccgggttcagcttgcccggcagcggcagcatgcccctcttcggcggcggctccccgggcttcagcggcttcggcggcatgcccgggtcgcccaccgccggctccgtccccgagcacgccaacaagccctgaacgccaacaagcgtggtagtagagtggtgctactgttactgtagtacgtcgtcgtcttcatgcatgcgtggttcgtggtttcccctagctccatacgagcagtagttgggccttgcacgtaccgtacgtctagctagctatatatatatagcttgtgttctactgccttttagtttaattacctgcctgcattggagagttggatctgtttcatttggtggtgtttgctttactattaggtcagtatctgtttgtggagacttggtgtttaatttatttagccgtttgtgactggttgtagctagcggtggtgcggtggtgatgttcttgaggcatgaataatgctacatgcatgtgatgtatccatgttttgtgtgtggtaaacctgttgtttgtataagctgtatgcatgggtctttaatttgtttttgaagcagggttcacgttatt

SEQ ID NO: 24623 - DNA, 1208 bp, Zea mays
  Clone ID: LIB3632-048-D9_FLI
tccttcccacgccgccggcctgcgccgtctctccacccgtgcctcggcacccagcagcccggctcctccgtctccctccgcctccgcgccctccccgacggcgcttctcgctcacctcgccgcggccggagtggccgtcctcccgggcctctccgccaccgagttcgccctcgcggaggccgcgctcggcggcgtccagctgccgcccgacctccgcgagctcctcgcgctgggcctgccgtcgggggacggattcccggactaccgcaccccggcggggctgcgcctcctccgcttcgccgcgcaggaggtccccgcggccgtcgccgcgacgctgccgctcgccccgggccggcgcgcggggcgggccgcgccgccgcccctcgtcccgctgtgcggccggcattacgtgccggcgacgccctgcctcgcgggcaacccggtgttctacgtgtccgactcgggcgtcacgttcgcgggcgccaacgccgccgacttcctcctccgcgccttcgccgccgagccgccgcccggcgcgccgctccggcgccagctctccgcgccggtcccgcccccgtccggcgcgccgccgtccactgcgcgccggagcctggactccgtcaccggcagggccccgcgctggatcgagttctggacggacgccgccgcggccggggaccggttcctggaagtcccaacgggggccacaagcgccgccgcgtccagcgcggcgccggagtggctgcggcccagccttgaggaggcggcctcgatgctgaggcgcggcgggtggggcctctgcgaggtggaggagatggtgacgggagagggtcccagcggcgccggcgaggtgaatgtggtggcgttggcgttgactgtcgaccggtgctgccgggacctgaagagtggagggtggggcgcggaggaagtggtggagatgctgggggcgctgctggggccgaggaagccgcggcgggcggtggcggcgctgccgccggacgtggccgcacggatggggcggctcgccgaggccgtgtcgcgggctgtcgggtcccatgccaaggcgaaacctccgaggccatcttgagaaacagatgttgtagtctaggtcctaggaattcttttccccctgttttccctgtattgagtacgtgcgtgtacgtgtaagtgaactactagtcttgtacaacgagcagcacgtgccttgt

SEQ ID NO: 24624 - DNA, 1748 bp, Zea mays
  Clone ID: LIB3632-048-G1_FLI
aaaaactaaaaaaaatggcgccttcattgacagggaaatgacctgacattgtttcagagctagtccgccgtacaagtacaaggatacagccgcaggcccgcagaggaagaggagagcctactctcctgccatggccgcgccgagtccgctcccccgcttcctgatactcctgctcgccgtaacctcctccgcgtttgccgccgccgcggcaaccggggctccggtggtgggggaggactacgtccgtccgccgccggcgcggtgccaccgcaaggcactccttagcctcttcccttggagcaagaaggaggagtccgccgcctcctccgatccgcagcaggtgcacatttctctagctggagaaaagcacatgagaataacatgggttaccaatgataactctgtcccatctgtggtggactatggaactaaagaaagtacatacacaatgaaatctcaaggagaaagcacatcctacagctacttattgtatagttcaggaaaaattcatcatgttgtcatcggacctcttgaagataacactatttattactaccgatgtggagggcagggtccagaattccaatttaagaccccgccctcccaatttcctttgtcattggctgttgttggtgatcttggtcagactagttggacaacatcaaccctgaatcacattaagcagtgtgagcatgatatgcttttactccctggtgatctatcttatgctgattatatgcaacacttgtgggattccttcggcacattggtggagccacttgctagcaaccggccttggatggtgacagaaggcaaccatgagaaggagcacattccattttttgagtcaggatttcaatcttataatgcacgatggaaaatgccttatgaagagagcggatctagatcaaatttgtactactcttttgaagttgctggtgcacacatcataatgctaggttcatacacagattatgatgatagctcagatcagtatgcttggctaaaggctgatcttgccaaggttgatagaaagaggacaccctggctcattgtgttgttgcacgtaccatggtacaatagcaattgggctcatcagggtgaaggcgacagtatgatggcttcaatggagcctttgctgtacgctgctcatgtggatatggtaatagcaggtcatgtccatgcttatgaacgtgcggagcgagtctacaattccagacctgatccttgtggcgctgtccacataactatcggcgacggtgggaaccgtgaaggcttggcccgcaggtaccgtaacccgaagccagcgtggtcggtcttcagggaagcgagctttgggcacggcgagctaaagatcgtgaactccacccatgcccactggacctggcacagaaacgacgacgaagagccggtgagaaccgatgacgtgtggataaactctcttgctggttcagggtgcatccaggagggcagccgtgaccgtgagtcgaggaagatcctgatgtctccttgatgcttagcagtatagcttgggcctgcgatgtactgtgtatataatgcgtgctacttgataatctaacacctagtaaaagttaatgcgtcgtgctgcttgcctgcgtgtatactggagactggtttgatctggcgcgtttgctgctcttgttgtgttgtaccactatggatgtttgtagcaaagtgacatacgacggtgttgtaatggactgaagatgaatagatgatgttccagt

SEQ ID NO: 24625 - DNA, 1542 bp, Zea mays
  Clone ID: LIB3632-049-B2_FLI
gtcaaccgccgccaagcccggaaccggctgccgccacctgctagcactcgccacacgcgcggcgctggcgtgccctcgccgccgacagtgtcccgcccccgccgtcggccgacccctcgcggcctcgccctcgacgatcggccctcgccggctcgacgcgtgacgccggcgccgccacccaccgtccgacggcctagccggagtcggacgcccccgggctcgcgcctcgccttccaacagtccaagcgccgcattcgcgcgtggccaaccccaaagtctgaagttcgatccacatccaccgatccgcagaggcgcagactacaggtctctcctacagctgccatccccgtccgcctcgctccaccaccggtggccgcacacacgtctggcgtagggacacagccgcacaggaagtccccccggccccttcgactgaagcctcctctgagtgggggcatctacctctccttccctttaggttctcgttcttcagtgcgtgatatcaatccactgaggcgctgggtgcagttaatttcccaaactatatttgggggtgttcagcaaaaaccgcgtcaactgcacccgtgcgggtgagggatcactagaggctggactcgtgctagagatggtgaaggcaaaagcaagggtccgctatgagcctggaccggcttttgaggaggtcaaagaagaagccatgcttgatatatcaccaacagactcgacagagttttggttaattcagtggcctaaagaccagatagatgttttggattttcatggcaaagagctttctctcaagctgcatagtgatggaaacttgggcaacttggaaaattcctcagggaaatcttatgagattgcgagctttgcagctcagaaaccagatgcaaccgtcttcctgccttcagggtcagaaacaaaggctgtggggaagatttcacggcgagtatccttagttcgttatcctaaacctgaggaatttacaaaaccaagttttgggagtcttactcctagcataaagaaatctgcaggttctaagaagaccatgtctcggttcaccggtgtatcaaagaatcccagtagccaaggttcggcgctttcactgggccaaaggagcgcagagccaacacccaaacacaaggggaagagaaaggatgaaagcagcctggggcactcaaatgtgtcgggcaaggccacagaaggatctgaggctcgaggcgcggggagcaacacggcttcagagatgccacagtcgccaccggaaaaatcaaagaagaggaggaagaaggataagatcgttgagtagtagtgtcaccttggcaggtgatcaagtttcccttgaattatcaatcagtggctcgagcagctgtgctggaagttcacgttcaggtttctttatgaatttccggttctcattttatccatgcagaattttttgctggagtgcccggtgttgtttgacctgggagcaacctgttgcgtggtgctgaaataccgctatgtatcgttctgtttttggtatgtgaaaggttatctttgttg

SEQ ID NO: 24626 - DNA, 896 bp, Zea mays
  Clone ID: LIB3632-049-H4_FLI
ccagaagagcggcggcgcgggcggacaaggagcaggcggaggaggagttgtgccaagccacaatgggtatctcgcgtgactcgatgcacaagcgccgagccaccggtggaaagcagaaggcctggaggaagaagcgaaagtatgagcttggtcgccagccagccaacaccaagttgtcaagcaataagacagtgaggagggtccgtgttcgtggaggtaatgtgaaatggagggctcttcgccttgatactggtaactactcatggggaagtgaagctgttacccgcaagacccgtatcctcgacgtggtctacaatgcatcaaacaatgagcttgtgaggacacaaacccttgtgaagagtgccattgtgcaagttgatgctgccccattcaagcagtggtacctcactcactatggagttgacattggtaggaagaagaaaacccctgctgcaaagaaggataatgctgagggacaagaggttgaggcagcagctgaggaaacgaaaaagagcaaccatgtcacgaggaagcttgagaagcgcaaggagggacgtacccttgacccacacattgaggagcaatttggcagtggacggttgctggcatgcatttcttcccgccctggacagtgtggccgagctgatgggtacatccttgagggtaaagagcttgagttctacatgaagaagctacagaggaagaagggcaagagcgctgtagcttagagcattctcatggattgtcttgcaccgaaatgtgtgtcctgatgagtacactttttttggttagtcgtctcaagttcagagcgttatgccatgttttcagtcctgattagtacactgttttctaaaagcgattgagctctagtccaatgtattgataatttctgctgt

SEQ ID NO: 24627 - DNA, 2813 bp, Zea mays
  Clone ID: LIB3632-050-B11_FLI
cgtccccgtcgatcgagcactccactcgactctctagtaccctcctctgcacctccctctctctctctctctctctctactgcctttgtttttgctcgcaagaaaaacccgaaaagaccttgcactttgtcaagtccgtgagtagaagtttggtgtaagcttgtcttcgtacaagatgatgcagagaccaccgctccgtccggaggagtactccttgaaggaaaccacacctcaccttggtggtgcagctgctggtgacaagcttacaaccacctatgacctggttgagcagatgcagtacctttatgtaagagtggtaaaagcaaaggaacttccgaacaaggacatcactgggagttgtgatccttatgttgaggtgaaactaggaaattataagggccagactgggcatttcgagaagaagaacaacccggagtggaatcaggtctttgcctttgcaaaggagcgcatccagtcatcagttgtggagattctggtcaaggacaaggatcttgtcaaggatgacttcattggacgtgttatatttgatttgaatgaggtcccaaagagagtgccacctgatagcccattggctccacaatggtatcggttggaagaccgcaatgggcacaaggtgaagggggagttgatgctggctgtttggatgggtactcaagctgatgaagcattccctgaagcatggcattctgatgcagcctccgtccctggtgatggccttgcaagcattaggtccaaagtgtatctaactccaaagctttggtatctccgtgtaaatgtcattgaagcccaggatcttataccaaatgacaagactaggttccctgaagtttatgtcaaagcaatgctaggcaaccaagtccaaagaaccagggcattggcaagccggactttgaatccattgtggaatgaagacttgatgtttgttgcagctgagccatttgaagagcacctagttttgagtgtagaggacagggtggccccaggaaaggatgaagtaattggaaggacaatcattgcactgcagcatgtaccccggaggctggatcacaggttgctaaccagccagtggtataaccttgagaagcatgtgattattgatggtgagcagaagaaagagaccaagttttcaagtcggatccacttgagaatatgtcttgaaggtggatatcatgtcttggatgagtcaacacattacagtagtgatttaaggccaactgcaaagcctctgtggaaacctagcattggcattcttgaactgggtatattgacagcacagggcctgttgccaatgaagaccaaggatgggcgtggcacaactgatgcatattgtgttgcaaagtatggacaaaaatgggtgcgtaccaggactataatcgatagtttcactcccaaatggaatgaacagtacacctgggaggtgtatgatccatgcactgtggtcacaattggtgtattcgacaattgccacctgaatggcggggaaaaggccaatggtgcgagggacaccagaattgggaaggtccgcatccgcctctcgacactcgaaactgatcgggtgtacacccactcataccctcttattgttctgacacctggtggtgttaagaagatgggtgaggtgcagctcgctgtccgtttcacgtgttcatcactgctgaacatgatgcatctgtactcacagcccttgctgcccaagatgcactatgtgcacccgctgtctgtgatacaggtggacaacctgaggcgccaagccacaagcattgtctccacaaggctgggccgtgcagagccaccgctgcggaaggaaatcgtggaatacatgcttgacgtggactcacacatgtggagcatgagaaagagcaaggcaaatttcttccgtatcacgggtgtcctgagccccctgtttgctgtggcgaggtggttcgatcagatctgtcactggaagaacccgctgaccaccgtactgatccatgtactctttatgatactggttctatacccagagctgatactgcccacaatcttcctctacctgttcctgatcggggtgtggtactacaggtggcggccgaggcagccaccgcacatggacacccgcctctcccacgcagagaccgcccacccggacgagcttgacgaggagttcgacaccttccccacctcccgtccgccggacttggtgcggatgcggtatgacaagctgcgcagcgtcgcggggaggatccagaccgtggtcggcgacctcgccacacaaggcgagcggctgcagtcgctgctgagctggagggacccaagggcgaccgcgctgttcgtggtcttctgcttcgtcgccgccatcgtcctgtacgtcactccgttccgcgtcgtggtcttcctcgcaggcctgtacgtgctgaggcaccccaggttccgccacaagatgccatctgtcccgctcaacttcttcaggcgtctgccggcgaggaccgacagcatgctgtaggcgcggcaggtgcatggcctcatcgctggccggtggtttcgcctctcagttgcagctcacagatggttgttgctctctcttaagtaagtgtatccggaaaaaaaggagctgctagctatcttcgtttactttttgagcttctctgtgttgcatggttggttatgtattcatatggttgtgaacctttcctgtaacaactggacgcatgatgcgtgactgtgtctaggtatgcatgcatgtgtgtgatgcttgaaaactccgagctttagtgtttattgctttacctacttcagcggcagtgctgtcagct

SEQ ID NO: 24628 - DNA, 1020 bp, Zea mays
  Clone ID: LIB3632-050-D8_FLI
ctccatcaccgctggtcggctatgtgcatcgcggcatgggcgtggcactgccacccgacgcaccgcctgcttctgctgttcaatcgcgacgagtatcactccaggccgacgcagccggcgcagtggtgggcggcgggggaggaagccaaggaaatccttggaggcagggacgagctcggcgggggaacgtggatggggtgcacgagggatggtaagctcgccttcctgaccaacgtgcgggaacccagctctctgatcggggccaagaccagaggacagctcccggtcaggtttctacagggcagcctttgtccattggagtatgccacagaaattgcaaaggaagcagatcagtacaacggctttaaccttatattggctgatgtgaactcaggaaccatggtttacatctctaatagacccggaggcgatcctgtgattcaaacagttgctcctgggcttcatgtgctttcgaatgctgcaattaattccccttggccaaaggcaatgcgcttaggacagagtttcaaaaggtatttgacaatacacgatgatgcagaagcctctttaaaacaaatggtagaagagttgatgatggatactgccagacctgatagatctatggtgcctgacaccggcgacgaccctgagtgggagtacaagctaagctcaatattcattgacactgcaaaggaacaggcacgatatggaacacgaagcatggtggcactagcagcgaaattggaaggtgaggtaacattctatgaaaggtacttggagaacagtttgtggaaggagaatctcatacagttccagatggagaaggcacaataggacttgagagaaacttaagaacactcgcaaagactggtcgattgcttattattttgctatcactttatctttaaagtgtatagcaaggcatatacaagagcagtgtataatatggctactattaattacccttttgtgcagatgtacagtaatgtttatccaaataccacaagaagaattggttgc

SEQ ID NO: 24629 - DNA, 1025 bp, Zea mays
  Clone ID: LIB3632-050-H1_FLI
gccacagccacagcatcacgtccactcattagcaaggtagcccgtgctgcacctgcctgccagccgcagctgtcctgcctttgccttcccatagcatagccatggacatttggaagtccaaggtgttgcccaagatcaagctcgtcttcgtcaagagcgccggcaaggccgccgccgccgccgccgagctcgtcaagtccttcgacgagtccaaggaggggatcgatggcgagttccaggagaagaaggctgatctccagcccaaggtcgtcgagatctacgagtctgcccctgcaccactcaaggtcctgatcaaggagaggagcaaggtgtccgggatcaagaagaactccgccgcaatcaccaagttcttcgaggagctggccaagatcgaattccctggagccaagcaagtgagcgacggcatctccaaggccggcccggccctgctgtccggccccatcttcgccacgttcgagaaggtctccacgctgctccctgtcgtcgctgccgaggagccggccaaggaggccccggccccgcccgccactgaggaggcagccacgaaggaagcgcctgttgacgagaagaaagaggaagcccctgcccccgccgccgccgtcgagaagaaggaagagacccaagaagaggagaagaaagaagacacccctgcaccgcccgccgccgagactgctcctcctgctgatgcagcagctgctacagagcagcccgctgcggaggccgcggcagaagctgaggctccacctgcacctgccgtggcggagccggccaaggccgaggaggagacacccaaggcctagctagctagggttcagcaggttcatcttcttgcgcttgctgcccctagctagctagctggtgtaccgtgctctttaatcacgtcaccatccatattgttgttgcatatatatgcacacaatgtttttgttgctccagatgttattgctgtgcaaacccgtgttagatatttatgtatgtatatgtaagcctatattatttttttt

SEQ ID NO: 24630 - DNA, 1655 bp, Zea mays
  Clone ID: LIB3633-001-E3_FLI
gcgagagaagtgtctgaaagttgacatttcaatttggccgcccagtccagtcgtcgccatggcgacctacgacaaggcgatcgagtcctacaagaaggcggtgaccacggcggcgtcgctggcggcgtcggcgatgctggtgcggggcgtggtgaacgagctggtcccctacgaggtgcgggacctgctcttctccggcctgggctacctgcggtcgcgcatgtcgtcgcggcacacggtggtgatcgaggagacggaggggtggaccagcaaccagctgtacgacgcggcgcgcacgtacctggccacccggatcaacaccgacatgcagcgcctccgcgtcagccgcgtcgacgagggcaagagcctcatgttcagcatggaggagggggaggagatggccgacgtgcacgccggcgccgagttcaggtggcgcctcgtctgccgcgacggagccggcaacggcgcgggcaacggcgccggcaacggccacggccacggccacgcccgcggcggcagctaccgcgtcgaggtccgctccttcgagatgagcttccacaggcggcacaaggagaaggccatcgcgtcctacctcccgcacatcctcgccgaggccaagaagatcaaggaccaggaccggacgctcaagatctacatgaacgagggcgagtcctggttcgccatcgacctccaccacccgtccaccttcaccacgctcgccatggaccgcaagatgaagcgggccgtcatggacgacctcgagaggttcgtcaggaggaaggagtactacaggcggatcggcaaggcctggaaacggggctacctgctctacggcccgcccgggaccggcaagtccagcctcattgccgccatggccaactacctcaagttcgacgtctacgatctcgagctcaccgaggtcaactggaactccacgctccgcaggttgctcatcgggatgaccaaccgctccatcctcgtcatcgaggacatcgactgctcgctcgatctgcaacaacgtgcagacgaagctcaggatgctggtaccaaatccaatccttcagaggacaaggtgacactctctgggctgctcaacttcgtggacggcctctggtcaacaagcggagaggagaggatcatcatcttcacgaccaactacaaggagcggctcgacccggcgctgcttcggcccggcaggatggacatgcacatccacatggggtactgctgcccagagtcgttcaggatcctggcctccaactaccactccatcaccgaccacgatacgtaccctgagatagaagccctgatcacggaggtgatggtgaccccagcagaggtcgctgaagtgctcatgaggaatgaagaccccgacgtcgcgcttgagggcctcatccagttcctcaatgggaagaaagaccacgccaaggatgatagtcgtcaaggttaaaatgtggaccatgtgagaccaaaggggacgagaaagagacgacgacgaaaaaaagaaaaaaaaaacatgtcccggtcgtcgatcaaaatctcaatgatgccagagtagcgtggatatcaaatatcagcaccatatcagtagcgccagtataacctgccgacaatgtatggttttcatattttaataagatatcatttttttttgg

SEQ ID NO: 24631 - DNA, 1950 bp, Zea mays
  Clone ID: LIB3636-002-G10_FLI
cacacactgcacgcacacacagacagccatggcggtcgggggcgacgccaacggcggcggcggcggggtgcgtcagcgccagcgcgggtgctcgtgcaccaaggcggacttcttcccggaggagtcgttctcgagctggtcggcgtacgggcgggcgctgcgcagcacggggccccggctggcggaccgcctcacgtcgcggtcgctggagtcgacggagctgcacgaggtgcgcgcccgcagcggcgccgacatgaagcgggacctcacgtggtgggacctggtgtggtttggcgtcggcgccgtcatcggcgccgggatcttcgtgctcactggccaggaggccagggaggacgtcggccccgccgtcgtcgtctcctacgtcgtctccggcgtctccgccatgctctccgtcttctgctacaccgagttcgccgtcgagatccccgtcgcaggtggatcgttcgcgtacttgcgagtggagctcggcgacttcatggcgttcgtggcggcgggcaacatcctgctggagtactgcatcggcggcgcggccgtggcgcgcgcctggacgtcctacttcgccacgctgctgaaccaccagcccagcgacttccgcatccacgcgtcgtcgctctccgccgactactcggagctggaccccatcgccgtcgtcgtcatcgcgctcgtctgcatcttcgccgtggccagcaccaagggcacctcccgcttcaactacgtcctctccatcgtccacatcgccgtcatcgtcttcatcatcgtggccgggctcaccaaggccgacgctgccaacatgcgggacttcatgcccttcggcgtccgcggcatcttctccgcctccgccgtgctcttcttcgcctacatcggcttcgacgccgtgagcaccatggcggaggagaccaagaacccggcgcgggacatcccgatcggcctcgtgggcgccatgacgctcaccaccgcgctctactgcgtcctcgccgtcacgctctgcctcatgcagccgtacgcgtccatcgacaaggacgcgcccttctccgtggcgttctcggccaggggcatggactgggccaagtacatcgtcgccttcggcgcgctcaaggggatgaccaccgttctgctggtcagcgccgtcggccaggcgcggtacctcacgcacatcgcccggacgcacatgatgccgccgtggctcgcgcaggtgcacccgcggacggggacgcccgtcaatgccaccgtcgtcatgctcgtcgccaccgcgatcatcgccttcttcaccgaccttggcatcctctccaacctgctctccatctccacgctcttcatattcatgctcgtcgccgtcgcgctgctggtccgccgctactacgtcgccggggagaccacggtcgccaaccggaacaagctggcggcgtgcatcatcgccatcctggcgacgtcgtcggccacagcgacgtgctggggggtgaacgtgaacgggtgggtgccgtacgcggtgacggtgcccgcgtggtttgcgtcgacggtgtgcctgtgggcgttcgtgccgcaggccagggcgcccaagctgtggggcgtgccgctagtgccgtggctgccgtcagcgtccatcgccatcaacgtcttcctcctgggatccatcgactacaagtcgttcatgcgcttcggcttctggacggccgggcttctcgtttactacctcttcgtcggcctgcacgcgtcctacgacacagccaaggcgctcgccgccgattctgccatggccaaggtggaggatggcgacggcaagccggcacgaggcgccgtccataacggtgagtactgaagggaaatgtaatcgtgaatatgaagtcctatactatggttgttagtcgccgacaagcgaacctaagtttgtacaaatcttcagttatcatcagactgtcatttatttatgtg

SEQ ID NO: 24632 - DNA, 1437 bp, Zea mays
  Clone ID: LIB3637-214-C3_FLI
cgcatcaccatatgccgcaaccgcggtgggtggtcatcccataccctcctccacaccatcccatggtggccgcgccgccgccaccttctctgcagtttgtgaagcattttacgccgccgtcctcggtaacaccgccgccgccgactggatccggcgggaacgggggcgaggataaccggaccatctgggtgggcgacctgcagtactggatggacgaaaactatcttcacagctgcttcggctctagcggcgaggtggtgaatattaaagtcattcgcaatagacactcgggagtttctgagggttatggttttatagagttttatactcacgtttcagcagagaaggcactgcagaatttttctggtcacgtaatgcctaatactgaccgggcttttaagttaaactgggcatcatatagtatgggagaaaaacgctcggaaatttcgtctgatcactcgatatttgttggcgatttggctgttgatgttactgatgcgatgttgctggaacttttttctaacaaataccgatcggtgaaaggagctaaagttattattgatgcaaacacaggccgttctagaggctacggctttgttaggtttggagatgataatgacaaaattcatgcaatgactgaaatgaatggtgtttactgttccacaagaccaattcgtgtaggaccagcgactcctagaagatctcaaggtgattctggcacttctccaccaaggcaatctcatgttgactctactaacaggacggtatatgttggtgggcttgaccccaatgttagcgaagatgaactgaggaaagcatttgcaaaatatggtgatcttgcctctgtcaaaattccttttgggaaacaatgtgggtttgttcaatttgtaaacagagttgatgctgaagaagcactgcatgggttgaatggatcaactattgggaagcaggcagttcgactttcctggggccgcagccctgcaagtaaacagtctaggggtgattctggccaccggcgcaatggcaactgcaacggcatgtactacgggacaccattctacggtggatatggctacgcctccccgattccgcacccaaacatgtacgccgcggcctacgaagcctacccgtactatgggaaccagcagctagtgagctgatgtagtgatgtggcgagatgctctctgctcagttttcctcccttggaggaaacgagtttttggtcccagtaaaagcatagtagctatgatgagatatatgataggtggccataaaaatgggcgcgagagacgagacaggcatatgatggtaacgctacctgcagatttgtgctgctagtagaacctaaaagagcttgtagtagacaaataaaaccttttcttttgtcttggaaattttgactcgctaataaaaagtgaagctatctgttgttgtggc

SEQ ID NO: 24633 - DNA, 488 bp, Zea mays
  Clone ID: LIB3637-214-C4_FLI
gttgagacaggcaggtgatgttttgcagcaggagttcgaggatgtggtggctgggcagcaggagttcgaggatgtggtggttgggcagcaggagttcgagggagctgaagctgttgatgttgggcagttaaccccaccaaggcacaaaaaaagagcagtaggaaagaagttgacgccgaaaaagaaaaatgtgtagctgtgtgtatttctgaaccagtagtgtgtatgtgtattaattgtctcctgtttgcagtgaactagaaatgtgtagtgaacctgcagtgtgtatctggtagctgtgaagtgtagtttctggtagctgtgaacctgcagtgaactagaaatgtgtagtgtgaacctgcagtgatttctggttgctgtttctggtagctgtatctggtactgatttctggtagctgtaatgtgtagtttctggtgtttgcacagccaaaatggtaatgactgaaacacactgctggatgttgggt

SEQ ID NO: 24634 - DNA, 959 bp, Zea mays
  Clone ID: LIB3637-214-D2_FLI
gcggcggcgcgggcggacaaggagcaggcggaggaggagttgttgcaagccacaatgggtatctcgcgtgactcgatgcacaagcgccgagccaccggtggaaagcagaaggcctggaggaagaagcgaaagtatgagcttggtcgccagccagccaacaccaagttgtcaagcaataagacagtgaggagggtccgtgttcgtggaggtaatgtgaaatggagggctcttcgccttgatactggtaactactcatggggaagtgaagctgttacccgcaagacccgtatcctcgacgtggtctacaatgcatcaaacaatgagcttgtgaggacacaaacccttgtgaagagtgccattgtgcaagttgatgctgccccattcaagcagtggtacctcactcactatggagttgacattggtaggaagaagaaaacccctgctgcaaagaaggataatgctgagggacaagaggttgaggcagcagctgaggaaacgaaaaagagcaaccatgtcacgaggaagcttgagaagcgcaaggagggacgcacccttgacccacacattgaggagcaatttggcagtggacggttgctggcatgcatttcttcccgccctggacagtgtggccgagctgatgggtacatccttgagggtaaagagcttgagttctacatgaagaagctacagaggaagaagggcaagagcgctgtagcttagagcattctcatggattgtcttgcaccgaaatgtgtgtcctgatgagtacactttttttggttagtcgtctcaagttcagagcgttatgccatgttttcagacctgattagtaaaagcgattgagctctagtccaatgtattgataatatctgctgttgtcctattgcggtgatgtttatttgccctgttcgctagctgcaatagttcctatttgagcagggtatgattatttgttgatg

SEQ ID NO: 24635 - DNA, 1272 bp, Zea mays
  Clone ID: LIB3637-251-A12_FLI
gcggctgacttgcgaacccaccggaccaaccaggacttggagcgtgcggcgtcggagttcgccggcggtgaggagcagaagaggaagggaaccaaagatgggctgctccatctcggggctcaacgcgctctacgatgcggccacgggcggcggcgacgtctggatcaacgagcgccgcttccgcgtccttcgccagatcggcgagggcgggttcgccttcgtctacctcgtcagagagcaccagcccgcctccgatgccgcgttcgctaggcgtgaccccgcccacgtctcagaggatggaacgtatgccatgaagaaggtgctgatacagagcaaggagcagttggatctgagtcaacagggagattggagccatgaagcatacctacttttccctgttcatctggatggtactttgtttgacaacgctaacatcatgctgtccagaagggaattctattccacagctgatgttctgcaaatattccagcagatgtgtgaagggctgaaacacatgcacagctttgatcctccatacgctcataatgatgttaagcctggtaatgttcttataacctggcgtaaaggacaagcacctgttgcaactttaatggattttggaagtgcaaggcctgcaagaaaggaaatccgttctcgttctgaggcactacagttgcaggaatgggccgctgagcattgctctgctccttaccgggcccctgaattatgggactgcccaagccatgccgatattgatgagaggacagacatctggtctctaggatgcactctttttgctatcatgtacaatgtttcaccatttgagtatgctcttggtgaatctggaggaagtctgcaacttgccattgtaaacgggcagttgaaatggccagcaggacccaaacctccttatcctgatgagcttcgccattttgttatctggatgcttcaacctgaagctgtaatgcgccctcacatttctgatgtggttcttcatgttgacaagctcattgcaaaatacttgccctagatcaccctggagttcctctcatttctttgttatacagtacagagccaatatgatgtaaaattggcccatgcttgacgtcattcagtccttggataggctcaatattgattcttttgtagaactttcaggatattacatcagtctaatgtctgtggatctttgatactcatggagtcacggtgtcatgtaaaaatgtcaaactgaacatcaaagcagctatatgatatccttgcacttgggct

SEQ ID NO: 24636 - DNA, 1080 bp, Zea mays
  Clone ID: LIB3637-252-E8_FLI
ccgagctcagcttagctccactccagctccaatcacagtcgtgaccagagcgcgagagctagctagagggccgtgaaaatgccgatcaataggatcgccctggggagccaccaggaggtgtaccacccgggcgccctcaaggcggcgttcgctgagttcatctccaccctcatcttcgtcttcgccggccagggctccggcatggccttcagcaagctgaccggcggcggcccgacgaccccggcgggcctgatcgcggcggcggtggcgcacgcgttcgcgctgttcgtggcggtgtctgtgggcgcgaacatctccggcgggcacgtgaaccctgccgtgaccttcggcgccttcgtgggcggcaacatcaccctgttccgggggctcctgtactgggtggcgcagctgctggggtccaccgtggcgtgcttcctgctccgcttctcgacgggcgggcaggccacgggcaccttcgggctgacgggcgtgtcggtgtgggaggcgctggtgctggagatcgtgatgaccttcgggctggtgtacacggtgtacgccacggcggtggacccgaagaagggcagcctgggcaccatcgcccccattgccatcggcttcatcgtgggggccaacatcctggtgggcggcgccttcgacggcgcgtccatgaaccccgccgtgtccttcggccccgccctcgtcagctgggagtggggctaccagtgggtgtactgggtcgggcccctcatcggcggcggcctcgccggcgtcatctacgagctgctcttcatctcccacacccacgagcagctcccctccaccgactactaaaagccgaagccgaccgacctaggggtgcgcagcgcagctagcgcatccagctctctctccccgctcgccgccgtttagtttctctcgtgcacgtgcatgcatcgtcgactgtctcaggccgccgctgcgccggcgccgctcgcatcgtttgcttccttggaccagcagtcgtcgccgtcaggctgaactgcttgtaaccgtgaattccggacccgtttgcttctgtaagatttgtgcatttgcctgagt

SEQ ID NO: 24637 - DNA, 1575 bp, Zea mays
  Clone ID: LIB3689-001-G9_FLI
cgctcctactcctttgggtgacagccgtgcttgtggctcatggtagggctcaaggacccacaccggctcccagtacatctgcacctacgccagcaccaatgtgtgctccggctccaacactagcaccaacgcctgctacgacacctacaccgtcttcaactccgacacctgccccgacccctaccctagctccgacgtctgcccctacaccagcaccggcacctacacctacgccagcactagctccgactccggtgcctgctcccacgccagcaccaacacttgcccctatcttggctccgacacctacccctacgccatgtcggggctctacagccagggcttctcccctgcgcgaaacctctcccctcagattagaagcaacccggatgtcgatagccagtacttggcggagctgctggcggaacaccagaagctggggccgttcatgcaggtgctgcccatatgcaacaagctgctgagccaagagattatgcgggtgtcaagcattgtccacaaccatggatttggcgatcatgacaggcatcggtttagaagtcctagtccgatgtcttctccgaaccctagagctaatctccctggcaatgggttcagtacttggagcggactacaagagagattaggttttcctcaacgagctagcatggactggcaaggagcaccaccaagtcctagcacccaagttgtgaagaagattcttcgtctggaggttccggttgattcttatccgaatttcaattttgtggggcgcattttaggccctagaggtaattctctaaagcgtgtagaagcatccactgggtgccgtgttttcattagaggaaatggttccattaaagatccagggaaggaggacaaactacggggaaaaccaggctatgagcacctgagtgatcctctgcatatcttgatagaggccgagttccctgccagtatcatcgatgcaaggttgagacatgcgcaggagattatagaagaattgcttaaaccagtggacgagtcccaagatttctacaagaggcaacagctcagggagctggcgctgctgaactcaaccctgagagaggacagccctcaccctgggagcgtttctccattcagcaacggcggtatgaaacgcgcgaaaacaggccagtagagaaacacccgtggtctcctacctggctctgtccaggtgtgttacgcggtcgtcgtcgcgagagacgccatgcctgtcttggggagggcaatgttttgccatgggcatgcgtgaaggaagcaatgcgccttcactgtcggagtccgtcgtccggtgccagctaggtttcacctccatacaggggaaactgctgctgggaaagatgagatagatagttgcggtcgcggatcgttggttggttgttgtatggtgtagaacattccttctatttgttattgacggtttgaccctagtatgtggtggtacactgcgaagttgctaaactagatgcctgagctttatttaggtggtgcattgaccttgtatcataaccttttgacattatcgagttgcaaaataaggaccatcagctttgt

SEQ ID NO: 24638 - DNA, 1372 bp, Zea mays
  Clone ID: LIB3689-001-H1_FLI
gctgcaaaggcatataaagagaagcaatcaaaggagctgcatggtcgtgaagtaagacttgacttcgctaaaggaagaagtacacaaactcctcgcagcggcaatgatggatctttccagaaggctgctcggggtaacagcagctcaatatttatccggggctttgataaaaatctttcagaggatgagatccggagctctctcgaacaacattttagtgattgtggtgagatgacaagggtctctatcccgactgatcatgaatctggtgcaataaaaggaatggcttacatagacttcaaggatcaggactctgtgtctaaagcccttgagctcagtggctctgacattggtggtggctatgagctttatgttgatgaagccaaaccaagaggcgatggccagcgtggtggtggtagatctggtggccgttctggtgggagatttggtgaccgttctggtggccggcgtggtggtggtagatttggtgaaagatctgggggcagggatggtggcggcagattcggtggccgacgtggtggtagggatggcggcgctgctgggcgccggggtggcggcggcgaccaagttcgacgacgtggtgcagcccagctgggccaacgaccacgtggtgtacgacggcgacctcctcaagctccgcctcgactccagctccggcggagggttcgtgtcaaggaccaagttcctgtacggcaaggccagcgccgacctcaagctcgtgccgggggactccgccggcgtcgtcacggctttctatctgtcgtcggccggggacaagcacaacgagttcgacttcgagttcctgggcaacgtgaccggcgagccgtacctggtgcagaccaacctgtacatcgacggcgtgggcaaccgggagcagcgcatcgacctgtggttcgaccccacggccgacttccacacgtacgccgtgctgtggaaccccagccaggtggtgttcatggtggacgacacgcccatccgggtgtacgagaacgccacgctgcaccgtggctttggtaacaagcacagcgctggcactcccagtgcaggaaagaagactacttttggtgatgattgatgatgaacgcggaggatgcggcaaaaggatccaatgaaattgtgtttttttggtcttgttgtggtaccgtaactggaatttggtattttttgtctactatttactgtagtggtttctggattttccttgtgttgcctatgctgcaatacaccgttttgttgttgcgatacatctgtagtttggttttgttatccacctgtcgtttataagaagcggctgtactcaggctactatgccgaactgaaatgggaatggagcaaaacgaaatcttagttc

SEQ ID NO: 24639 - DNA, 2510 bp, Zea mays
  Clone ID: LIB3689-203-G5_FLI
tccttcaccatcctaagctagccaagcatgtggaggctaaagatcggcgagaggccaagcaacccgctgcttcgctcgcccaatggcttccttgggagagaggtgtgggagttcgaccccgccgcaggcacgccggaggagcgcgccgaggtcgataggctgcgccaggagtacacccgcaaccgcttcacgcgacggcaatgcagtgaccttctcatgcgcatgcagtatgcaaaacagaaccttcataatacaaaccttccggctatcaagattgaccaggattcagacgtcacagaagaaactatactaattacattgaggcgtgctcttaatcaatattcttctttgcaaggacctgctgggcattggcctggggattacggcgggatttcgttcattttaccactcatgatatttgcattacatgtcacacgatcaatggatgaagttttgtcaatagagcatatacgtgagatatgtcgctacatttataacatgcagaatgaggatggaggctggggaacacataccttgggaccaagctccatgtttggcacatgtgtaaactatgcaaccttaaggattctaggagaggtgcttgatggagaaaatgatgcattatccaaagggcgttcttggattttgtctcatggaagtgcaactgcagcaccacaatgggcaaagatatatctctcgatgataggtgtatacgattgggctgggaacaatgcaatcattcctgagttatggatgcttccacattttctcccaattcatcctggaaggttttggtgcttttgtcggatggtttacatgccaatggcttacatttatggaaaaaagtttgttgggcctatcactacaactattttagaaataagaaatgagctctacaatataccatataataagatcaactggaacaaggcttgcaattcttgtgccaaggaagaccttatctatgagccttcatggttgcaaagtattgcaatggcttatttgaataagtttatagaaccattatcaaatctttggccaatgaataagctacgagaaagagctatgagtgacctcatggaacatatccactatgaagatgaaaccagcaactatgttggcttatgccctataaacaaggcattaaatatgatatgttgttggatagaaaaaccaaactcaaatgaatttagacaacatctcccaaggattcatgatttcctatggcttggagaagacggaatgaagtcaaaggtgtatgttggttgccatagttgggaaactgcgctcatagttcaggctttttgctcaacagggctcaccgaggagttttgttcgactcttcaaaaagctcatcagttcttaaaaaatgcacaggttatcgaaaacattcctgattacaagagctactaccgtgaaagaactaaaggttcttggactctatccaatggagaaaacttttggcctattgctgatacaactgctgaggcacttaaggcaatactgttgctgtctaacattccttcagaacttgtcggggatccaataaaacaagaacgactatatgatgccgttgattgcctcctttctttcgtgaacaaagatggtacattatcatcagctgaatgtaaacgaacaacttcatgggtggagtttatcaatccttctgagagttttcgtaatatcatcgtcgactatccatatcctgaatgcacatcatcattaattcaagctttagtgctgtttagaggcaagcatccaatatatcgtcgtgatgagatagacaaaattatcaaaagtggtgcatcattcattgagaaagtacaacgaaaggatgggtcctggtatggttcttgggctgtgtgtttcacttatgcaacattctttgctataaaaggattagttgctgcaggaagaacataccggaatagtttggctattaggaaagcatgcaacttcttgttgtcaaagcaactaggaaccggtggatggggagaaaactatcttggttgtcaaattgaggagtatgttgacagtggcagtccacatggagtcaacactgcacaggcgatgctagctttactctacgctgggcaggttgaacaagacccagcgccactataccgtgctgcaaaagaattaatcaacatgcagatggagaacggagaatttccccaacaagaaattgttggcaacttcaactcctcacttttcttcaattacccgaactaccgaaacttatttcccatctgggctttaggagaatttcgccgccgacttgttgcaaaaaaaggttaagatgggtatcttaagctatttctaataattgtatttgggatacaagtatccatgtatattttatttttcgtgatgatgggaatgtaacacaaaataaaatttgtatttagtacgtatatgttaatatttgtaagattatcacaaacaagttgataatcatcagtgatctggttcctcaaattcaataacaaggatgcaaaatgtttggtagc

SEQ ID NO: 24640 - DNA, 1610 bp, Zea mays
  Clone ID: LIB3689-203-H8_FLI
cgcagaggcgcagagacaggcgtcttcgtactcgcctatctccgcgactcaaagcttcttccatttcctaccgccgccgctgcagctccaccccattccgtcgacaccatgagggagtgcatctcgatccacatcggccaagccggtatccaggtcggaaacgcgtgctgggagctctactgcctcgagcatggcattcaggctgatggtcagatgcccggtgacaagaccattgggggtggtgatgatgctttcaacaccttcttcagtgagactggtgctgggaagcacgtccctcgtgctgtttttgttgaccttgaaccaactgtcatcgatgaggtgaggactggcacctaccgccagctcttccaccctgagcagcttatcagtggcaaggaggatgcagccaacaacttcgcccgtggtcactacaccattggcaaggagattgttgacctgtgccttgatcgcatcaggaagcttgccgacaactgcactggtctccagggcttcctcgtcttcaacgctgttggtggaggaacaggctctggccttggttccctcctcctggagcgtctgtctgttgactacggcaagaagtccaagcttggtttcactgtgtacccatccccccaagtttcgacctcagtggttgagccatacaacagcgtcctgtccacccactccctcctcgagcacactgatgtggctatcctgctggacaacgaggccatctatgacatctgccgccgttcccttgacattgagcgcccaacctacaccaacctcaacaggcttgtgtcccaggtcatatcatccctgactgcctccttgaggttcgatggtgctcttaacgtggatgtgaatgagttccagaccaacttggtgccctacccgaggatccacttcatgctttcctcctatgctccagtcatctctgctgagaaggcctaccacgagcagctgtctgtggccgagatcaccaacagcgccttcgagccatcctccatgatggccaagtgcgatccccgccatggtaagtacatggcctgctgcctcatgtaccgtggtgatgtggtccccaaggatgtgaatgctgctgtggccaccatcaagaccaagcgcaccatccagtttgtggactggtgcccaactggctttaagtgcggtattaactaccagcctccaagtgtggtgcctggtggtgacctggccaaggtgcagcgcgctgtgtgcatgatctccaactccaccagtgttgtggaggtgttctcccgcatcgaccacaagttcgacctcatgtacgccaagcgtgccttcgtgcactggtatgtcggtgagggtatggaggagggcgagttctctgaggcccgtgaggatcttgcagcgctcgagaaggactacgaggaggttggtgctgagtttgatgagggtgaggaaggtgatgatggtgatgagtactagaagtatcctgatgctgtcatcgtcaggcttgtgtgctgctcttgtccccgttgtggtttgcaacacctgatgttgtaagactttctggttatgtccgccccgctttgccactgggttattaagaacgtcgttatggatggttgtct

SEQ ID NO: 24641 - DNA, 1132 bp, Zea mays
  Clone ID: LIB3689-204-C5_FLI
cccacaccgggcacaccccccgagctcagcttagctccactccagctccaatcacagtcgtgaccagagcgcgagagctagctagagggccgtgaaaatgccgatcaataggatcgccctggggagccaccaggaggtgtaccacccgggcgccctcaaggcggcgttcgctgagttcatctccaccctcatcttcgtcttcgccggccagggctccggcatggccttcagcaagctgaccggcggcggcccgacgaccccggcgggcctgatcgcggcggcggtggcgcacgcgttcgcgctgttcgtggcggtgtcggtgggcgcgaacatctccggcgggcacgtgaacccggccgtgaccttcggcgccttcgtgggcggcaacatcaccctgttccgagggctcctgtactgggtggcgcagctgctggggtccaccgtggcgtgcttcctgctccgcttctcgacgggcgggcaggccacgggcaccttcgggctgacgggcgtgtcggtgtgggaggcgctggtgctggagatcgtgatgaccttcgggctggtgtacacggtgtacgcgacggcggtggacccgaagaagggcagcctgggcaccatcgcccccattgccatcggcttcatcgtgggggccaacatcctggtgggcggcgccttcgacggcgcgtccatgaaccccgccgtgtccttcggccccgccctcgtcagctgggagtggggctaccagtgggtgtactgggtcggccccctcatcggcggcggcctcgccggcgtcatctacgagctgctcttcatctcccacacccacgagcagctcccctccaccgactactaaaagccgaagccgaccgacccaggggtgcgcagcgcagcgcagctagcatccagcgctctctccccgctcgccgccgtttagtttctctcgtgcacgtgcatgcatcgtagactgtctcaggccgccgctgcgccggcgccgctcgcatcgtttgcttccttggaccagcagtcgtcgccgtcaggctgaactgcttgtaaccgtgaattccggacccgtttgcttctgtaagatttgtgcatttgcctgagtacacctcgatctgcagcatgcgtgtgcttg

SEQ ID NO: 24642 - DNA, 784 bp, Zea mays
  Clone ID: LIB3689-204-D8_FLI
tgcagtcaccactcccaagccagtacccacagtcctacgagcagtcgcacgcaagtgtcaagagacaaaacggtcgacatggctcgcacgcaatctgccgtagcggtcgccgtggtggccgcggtgctgctgctggcagcggcggcgacgacctcggaggccgccatcacctgcgggcaggtgagctccgccatcgcgccctgcctctcctacgcccgcggcacggggtccggcccctccgcgtcctgctgtagcggcgtcaggaacctcaagagcgccgccagcaccgccgccgacaggcgcgccgcctgcaactgcctcaagaacgccgccaggggcgtcagcggcctcaacgccggcaacgccgccagcatcccctccaagtgcggcgtcagcatcccctacaccatcagcacctccaccgactgctccagggtgaactaaaacctagaccacgcgcgacgacggccgcctgatcgatcgaccaaccattccgccgtcgccgccggccggatcatcgatcgtcgtcatgatgatatctatcaatctacgcgtgatgatcgatggctacttgtctactgctatgtactactaaataaaatctctccgtgtgtgcacgtacgcttgcatgtgcatggtagcatgtatgtacgacgtcgtccatgtatgtgtgtgtgacgtgtgagacagagagagagagagagagagagagagacaggatcgatcgagagacggtcatgtccttttggctgtttggtttattcatatcacaacttttgagtgt

SEQ ID NO: 24643 - DNA, 1678 bp, Zea mays
  Clone ID: LIB3632-051-G11_FLI
ccaaaccctaaccctagcagcggtgccacaaccgcccgcgttcccggccggagaggaagccgagccagcaaggatgccgcccgggtcggcgacgcaatttcggtacacgcagacgccgtccaaggtgctgcatcttcggaacatgccatgggagtgcaccgaggaggagctcgtcgacctctgcaaaccctttggccgggtcgtaaacaccatgtgcaacgtcggcgctaaccgcaaccaggcattcgtcgagtttgcagatcaaaaccaggcaatttcaatggtgtcctattatgcttcatcttcagaacctgctcaagttcgtggtaaaactgtatatatccaatattcaaacaggcaagaaattactaacaataaaggcactggggattcttctggcaatgttctacttgtcacttttgaaggtgttcagcctaatgatgttaccatagaagttattcatttggttttttcggcatttgggtttgttcacaagatagctacttttgagaaagcagctggtttccaggcacttatccagtatactgatgccccaactgctcttgaagctaaaaactcattggatggaagaagcatcccaaaatatttacttccagaacatatcggtgcctgccacatgcgcataaccttttctgcgcataaggatttgaatatcaaatttcagtcgcatcgcagcagggattacaccaatccttaccttcctgtgaaccaaacagcaattgaggggattgtgcagcccacggtgggccctgatgggaaggtaaaggagcctgagagcaatgtacttttagcatcaattgagaacatgcaatatgctgtgacggtggatgttctgcacactgtgttttctgcttttggagctgttcaaaaaattgcaatgtttgagaagaatggtggaatgcaggctctaatccaatatccagatataactaccgcagccgttgctaaacaagctttggagggacactgcatatatgatggcggttactgtaagcttcatctgtcatactctcgtcatactgatctcaatgtaaaggcacatgatgagagaagcagggactacactctttcagaccctaacgtgcagctgcaagctgctgcacaaacgccagttctaaggtctccgggagtggcatggcagaacactgcatcagtaccagctgctcctttttatgcaagcacagcgacttcaactcctattggagttggacaggtggctgcttggaatcctaacatgcaggcagggagttttgcatctgcatcgactgcataccccaaccaaccattaatggccaactccatgcctcactatcctgctattggatcgagttccggtgccccaccagtatcatttcaggcttcgcagcagatgacacagtatagcatgccccctggtgctccgccgcacgcaccaccagctggccaatcaatttacttcccgaagtaagcggttttggttcaatattatcagagagcaatcaggcattgttacctgcgacaattgtggtccgcaaatgcaatcttgcgaattttgcaagtgcgctgtagtacttgtaacttgcgagcgcccttcgcaagaatgcatcagcgtttgctgtgtctgtaaaactgtcaaaaatagtgtttacctattagcctgcatggtatattgttggtg

SEQ ID NO: 24644 - DNA, 988 bp, Zea mays
  Clone ID: LIB3632-051-G9_FLI
aagttccacggcggggactcctcgtcgtcgtctgactcggacgacgagaagaagaaggggtcttcttcggcgtcggcgacggaggccatgaaagccaagatctaccgtctcttcggccgcgagaggcccgtccactctgtcctcggcggcggcaagcccgccgatcttgtcctatggaggaacaagaagatctcaggcggggtactcgctggtgccacggccatctggctcctgttcgaggttatggagtaccatctcctcaccttggtgtgccactgtctcatcgtctcgctggccatcctgttcctgtggtccaacgcctccagtttcatcaacaaatcttcgatttgtggtgttgctgattttcaggtccccaccaaacattcctgaggtgaaaatccctgaggatgtgtctgttaatgttgcactgacactgagatacgagatcaacaggggctttgctaccttgagggagattggacatggacacgatctaaagaaattcctaattgttatcgcaggtctctggctcttttcagttcttgggagctgttgcaacttcctgacactgttctatattgtctttgtggcactgtacactatacctgttctgtatgagaaatatgaggacaaggttgatgcttttggtgagaaggctatgatcgaactgaagaagtattatgccatcttcgatgagaagtgcctatcgaagattccaaagggcctcaaggataagaagcactagattggtagtaaggtacttgatatgaatcaacacccacgttaagtcacaccttccttgaaggatggtgcttggtcctggtctctagttgatagtatataatctgtatgggcaactctggtgtgactgacactttgatctgctgaaaattgttgatcttgtttttggtttcaactttcagcatacttgcctggaagcttgaaacatatcacgcgctctatcaatgtcatgtgaactttgccatac

SEQ ID NO: 24645 - DNA, 2593 bp, Zea mays
  Clone ID: LIB3632-052-F1_FLI
gccgtcgttgacaccagctagtagcagccagcactagtcgctactagctagatagccatatcaccagcatgtggaggctgacggtggccgagggcggcggcccgtggctgcgctcgacgaacggcttcgtggggcgggcggtgtgggagttcgaccctgacctcggtacgccggaggagcgcgacgaggtagagagggtacgccaggagttctccgaccaccgcttccagaggagagagtcggccgacctcctcatgcgcatgcagtgcgcaaagcagaacagatctcaacgtcgtgatctgccacgcatcaagcttggggaggatgagcacgtcactgaagaaattgtactgagctccttgaggtcggctctggaccagttctcttcactgcaagccagcgatgggcactggcctggtgatttcagcgggattatgttcatcatgcctggtttgatatttgccttgtatgtcactggatcactgaatgttgtcatatcaccagaacatcggcatgagatttgccgctacatctacaaccaccagaacgaagatggtggatggggcacacttatcttgggttcgagcaccatgtttggcacatgctcaaactacatcaccttgaggcttctcggtgaggagccatacgccaacaacagtgtgttggctaaagggcgtgcttggattctatcccatggtggtgcaaccttgattcctcagtggggaaaaatatggctttcggtacttggattgtttgattggtcaggaaataatccaattttccctgaactatggtccattccccagtttcttccatttcatccagggaaattctggtgctttgcccgtatggtatatctaccaatggcttatctttatggcaagaaatttgttggaccaattacaccaactatattggcactaagagaggaaatctatgacactccttatggaaagattgactggagtgatgctcgtagtaaatgcgcaaaggaggacctcatctgtccacgcacactgttgcagaatgttatttggacttcactttataggtgtgtggaaccagtattgagcagttggcctatcaacaagctgagagagagagctctgggaaacatcatggagcatatccattatgaagatgagaacacacaatacctatgcatatgtcctgtgaataaggctctaaacatggtctgctgctgggtagaagatccaaattcagatgcattcaagcgtcaccttgcaaggataccagacttcttgtggatttcagaagatggcatgaaggcacaagtatatgatggctgccagagctgggagacatcattcataattcaagcattttgcgctacagatcttgttaatgactatggttcaactcttcagagagcctatgagtttatgaaaaattcacaggtcatgaggaaccatcctggtgaccaacgttattggcatcgccatagatcgaagggttcatggacactttcatctgcagacaatggatgggctgtatctgacactacaggagaagcacttaaggctgtactgttgctgtcaaagatctcaaacaaaaacaaccttgttggggatccaatagaaagagaaaggttgcatgacgctattgattgccttctatcttttgcgaacaaagatggcaccttttctacatatgagtgcaaaagaacttattcttggttagagattctaagtccttgtgagactttcccaaacattgttgtcgattatccttacccagaatgcacttcatcagtgctccaagctctgatattgttcaaagacttatatcctggttaccgcacagaagagatagaagcattagttagaagtgcagcaacgtttattgagaccaaacaacaagaagacggttcatggttaggtaattggggtatatgtttcacctacggggccttcttttcgattaaaggtttagtcgcttctggaagaacgtacaagaacagcccttgcatacggaaagcatgccacttcatattgtcgaagcagctcagtactggtggatggggagaaagccatatcgctattgaaactcaggtgtatgtaaatctcaaaggtgaccgtgctcacgctgtgaataccgcctgggcaatgctcgctttaatttatgctggacagtttgaacgagatccaacgccattacatcgtgctgcaaaggaattgatcaacatgcaactggagacaggagagtttcctcagcaagagcatgtaggatgcttcaactgcagcctctacttcaattacccaagctaccgcaacttgttccccatctgggctctcggtgagtaccatcgtggccttcgtgcaaagaaagacaagtgagtccgtgtgtctatatatatatatatatagagagagagagagtacgtatagcattgtgaggaataaaacaggttgcgtcggtggtgagtgcgcagaaacaagatgtgcttttatgtaggcgtaccacagtgtacaatgttggtcgttgttagactgtaaggctatcatgacgttgtatattgtaatatatatatagtgttccatatgtttcaaattatataagacgttttatcttc

SEQ ID NO: 24646 - DNA, 955 bp, Zea mays
  Clone ID: LIB3632-052-F12_FLI
gcggcacagctcaaggacagcgcagcacgcaagcgggaccgcaccgaagcagcacacagcacacaagatcacacatcctactgctgcgccgcacaatgggcatctgcgtgtcgtgcgacgcggcggacgagggcgccgcgacggcgagggtggtgctccccagcggcgagctccgggagtacgccccgccggccacggccgggacggcgctgcaggcggccggcggcgagggcccctggctcctctgcgacgccgacgggatggcgttcgagggccccgtcgccgtcgcggcggtcgcccccggcgaggagctccaggccgggcagatctacttcgtgctccccgccgagatgcggcgccgccgcctcacccgcgaggaggtcgccgcgctcgccgtcagggccagctcggcgctcgtcaaggccgcgcagccgtcctcgccctgccgccggctccggcgcggcgcggtggcgccgctcgtgttcccggtcccagaggaggagtacgcggcggcggacgcggtctcgcccgtcgcggcggcgaagccgcaccagaagcggagggtggcgtgccggggcgggagggcgtccaggttctcccccgacctgaccgcgatcccggagagcgagtgatatgtctctggtggtgagtggtgacgggttgctcgccggcgctcggtcggacggtgtggccgcgccggagcggagatcgacggtgcgggaagtgttgtagatgcagagctcataaatgagaaatgtgagtaggtgtttttggcgcggcggcaacaggatacgcgtgtagagtgtacgttacgtgtaggtttaggtgcatgcaagtgtaaatacacgggatctccgtgcggtgtgcccagtcacagtttggaactcagcttttattagtgctcgtgttcaggctttgtgtcgtgcatcatggaataaatctctccttgtttgtg

SEQ ID NO: 24647 - DNA, 692 bp, Zea mays
  Clone ID: LIB3632-052-F3_FLI
gccaccctctatgtctctacctctatatataatgcttcaacggctccgtcccgtcccaagtcctatcaacagcgtgctcgagattacagagatgccaactggtaggctgagcggcaacatcacccaggactgggagccggtggttctgcgccgtacgaagccgaaggcggccgacctcaagtcgtcgaaggcggtgaaccaggcgctgcgatcgggcgcggccgtggagacggtgcgcaagtcagcagcgggcatgaacaagcactccgctgcggtggcgcccgcgcgtaagctggacgagacgacggagcccgctgcggtggagcgggtggctgtggaggtgcgcgcggccattcagaaggcgcgcgtggccaagggatggagccaggcggagctggcgaagcacatcaacgagcgcgcgcaggtggtgcaggagtacgagagcagcaaggcggcgccggcccaggccgtgcttgccaagatggagcgcgctctcgaggtcaagctccgcgggaagggcgtcggcgcgccactggcggccgtcgggaagtgatctgatgtgatggacttgtgcagattgcaacgttgatagcttaacctctttttttgaatcggctggttcggatgtgcagtttgtgtttgtaggatcgtaattgggggaatattatatgatgtgaaggacttgtttcgaa

SEQ ID NO: 24648 - DNA, 1093 bp, Zea mays
  Clone ID: LIB3632-052-F9_FLI
gtgctcctcctccggcgattcgctcccttcctcttcccccggccacgcacttccccgccccccgaccccgcaacctctcaccgccggtccccgccctccgaccctccacgcgcaaatagcccgcctccatccactaggaggatccccgatgagctaggagaagtgttgatttggatattcgtggagtgtgcaatggtggactttgttcgacggctcgcctctgccctgctcaagtgctgcgaccttgacatacccaatcggccaaagggcctcgaggaccccgaacgcctggctagagaaactgtttttaatgtgaatgaaatcgaggctctgtatgagctgttcaagaagattagcagtgctgtggttgatgatggcttgattaacaaggaagaattccaattagccttgtttaagaccaacagaaaggatagcatgtttgctgaccgggtatttgacttgtttgacacgaaacacaatggaattctcgagtttgaggaatttgctcgagccctttctgtgttccatccgagtgcaccaatcgatttcaaaattgattttgctttcaaattgtatgatctcaagcaacaaggtttcattgaaaagcaggaggtcaagcaaatggtggtcgcaacacttgctgaatcaggaatgaatctttcagatgatattattgaaggcattattgataagacatttgaggaagcagatacaaagcacgatggcaaaattgataaggaggaatggcgcagccttgtcttgaggcatccatctctgttaaaaaatatgaccctcccatatctccgggatatcaccacaacatttccaagctttgtgttcaactctcaagtagaggatgcgtgaggtcccagcgtctacggcaccattgaagcccctggggcacagcagatcaggttctgtgggggcacttagttgtttttgtttccttgaaaatgtaaattttatgtggtggcatgtcctcctgtatagtgagtattgctattgtgcacagaattggggcatgaagcgtttcttgtctgtgtttataaaatattcttcaaacatattgctcataaaaactactcaaagtaag

SEQ ID NO: 24649 - DNA, 1063 bp, Zea mays
  Clone ID: LIB3632-052-G1_FLI
aaactgcaaaccagcaacgcatcccgagccaagcggcagatcgttatcaggcggcgtcacgcgctcacgcctgtctcctcgcccccttcggccctccctcctcccggcgagctcctctaccacgggtgtaccaaccaaccaccagtccaccaagcgcgcgggcgccatcaggtagaccggcccctgcgttagacccaacccaaccctatctaccgtgacgctcgatcggcttcgggttagtttgcgccgtgaggctgagtcatggaagtgccgccactgccaacggcgtcggaaggggagcgccgaagcgtagcgacggggtcgtgcctccccaggctggtctccggcgtcctctcgggggccctcaccggcatcttcgccgttgctggaggcctgacgggggcgttcaccggcgcattggccggccgagcttccgacagcggcgtcctccggggagccggcctgggggcctttgcgggggcggtactatccatcgaggttctcgaggcttcgcgcgcctactggagcgcggaccgatcgagcccgcagagcacgtcctccatgggggatttcatagaacagctccttcatgctcgatttgtgcaagaccagtatgagccatcggcatatatggcctatcgttggcaggttggcattgccgacaatgatgatatgtttgatgtccttgaagatgttttatccgaagggctctcacaagatactctaaagaagttgccacatcatgtggttcctgcaccaattggtgaaagcttgtcttgcgctatttgcctgcaggatgttattagcggagagacagcgaggaagttgccaaagtgctctcacaccttccatcagccttgtgtggacagatggttcattgaccatggttcatgcccagtatgtagacaggatgtgtaggtagatcatgatcgattctgggttatcatgcctttgtaaagttgctaccctcgtcatatagaagaaagatacagtacgtagcatgtaaaaagtcctgcacttgttcctattatgaaaaatggtttacacatcagtaattgagttc

SEQ ID NO: 24650 - DNA, 1167 bp, Zea mays
  Clone ID: LIB3632-053-E11_FLI
caaggccccaagcccccaacacggcaacaccgcaccacgaccacggactaccgtctcctctcctttcctctcctgcaactgcaagcgaccacccctccacccccatccacccacccgcccgccgacgcttggatcccctcccttgtttgccgtgtccccgcccaaaccccgtagccgccgccacagcaatcgctgccgccgccgctggaggccgggccgtgggggctgaaatgaaggaggtggtgctccacgtgtatgacgtgaccaacagtgactccgagaagacgaacaacaccatcctccagatcaaccgcatcttcaaggaccgcatcggcctcggcggcatcttccacagcgccgtccaggtctatggcgaggacgagtggtcgttcgggttctgcgagtccggcagcggcgtgtttagttgccccataggcaagaaccccatgtacacctaccgggagcgcatcgtcctcggggagaccgagtgcggcatcgccgccgttaaccggatcctgcgggagctcagccgcgagtggcctggccactcgtacgatctcctctccaggaattgtaaccatttctgcgacgtgctctgcgagaggctcggcgtccccaagctcccaggttgggtgaatcgctttgccaatgccggtgatactgctgtggttgttgctgagaacacagcagttaagttcaggcaggctaaaacagaaatcgtgaatgccagtagagtagcatacagatttatggcaggcctgacttccaaaaatcaagcctcacctgagtctccgggtaacaatcaaaacagaggcagccctagtttccagggagcttggttcaagaacatcgtctcagctggtgcaaagccttcatcgagtggatcgacacgcacacattttcaggacgctgatgatggaacccctttgcaacatcaaagttcaacagagcaatcaacacagttgtagttgcttcccagcatatcaaccaacaattgaattgaatctgtcaatctgttgtgtaacattagctaatatctgttcgaaacctgttgttaaattgtatcagtagtgtaacagttgctgagatttgttcaaaaactgctattttgcatttgtccgtgaatcagttttttgcagcattgttgaagttgaacgctctgatgtc

SEQ ID NO: 24651 - DNA, 3191 bp, Zea mays
  Clone ID: LIB3632-053-G1_FLI
gccagatccacgggcctcgcagatctggcggccatggagaaggcgtgcacattgctagtgtacttcgataagggctcgccgtccatggcgaacgagatcaaggcggagctcgagtccggcgacggacccgccaaggccgacgccatgcgccgcgccatcttgctcctcctcaacggcgagtccctaccgcacctcttcatcaccgtcgtccgctacgtgcagtcctgcgacgaccacgctgtccagaagctgctcctcctctacctcgagaccgtcgacaagcgcaacgctgccacgggaaagatcctcccggagatgatcctcatctgccaaaatctccgcaacaacctgcagagccctaacgagtacatccgcggcgtcacgctgcggttcctctgccggctcaccgagcccgagctgctcgagccgctcgtcccctccatcctcgccaacctcgagcaccgacaccacttcgtgcgccgccacgcgctctccgctatctcggccatctacagcctccagcagggggaccagctcatccccgacgcgccggagctcgtcgagcgcgcgcttgcctccgaacaggaccccgccgcgcgcaggaacgcgttcctcatgctcttggctgctgggcaggaccgcgccgtgggctacctcttcaacaacgccgaccgcgtcgcggagtggcccgatctgctgcagatggccgccgtcgacctcatccgcaaggtctgccgctccaagggccgtgccgacaagggcaggtatatcagggtcatcatctccctcctctcagcgtccagcgcggctgtcgtgtacgagggcgcgggggcgctcgtgtccctctcctctgcgcccacggctgtgcgggccgccgccaatacatactgccagctgctatcctcgcagagcgacaacaatgtgaagctcatcgtcctggaccgcctgcacgagctatgctcctctcacagggaggtgatggtggatatggtcatggatgtgctgcgcgcgctcgctagccccaatgtggatgtcaggagaaaggttctggatttagtcctggatctactcaccctgagaaatgttgaggaggtggtgctctacctcaagaaggaggtggttaagacacaggctgctgaggtgaagggtgatgaataccgccagatgctagtgcaggccatccataactgtgccaagaagtacccagaggtggctgcattggttgtacaccttctcatggacttccttggggatcctaatgttgctgcagcactcgatgttgttctatttgtgcgcgagattatagagactaatcccaagcttcgtgtgtccatgatccagaggctgatcgacatattctatcagatccgggcatctcatgtctgctcttgttctctctggatccttggagagtattccctctctctgcctgaggttgagagtgccatttctaccatcaagcaatgccttggggatcttccattctacactgtctctgaggaacgtgagacaactgattcatctaagccatctcagccagtggtgagctctgtcaccgtgtcttcgaggaggcctgctgttctagcagatggaacttatgccacacagagtgctgccactgagattgctgtttcagctcctgcttcagctcttgggtccttggcttccacccagaatctcagatctctcattctgtctggtgatttcttcttggctgctgttgttgcctgtagcctgaccaagcttgtgttaaggctggaggagattcagccagcaaaggttgaagtaaacaaggttagtactgaagccctgttgatcatggtgtccatcttgcagttgggacagtcatcttatctcccacaccctattgacaatgactcatatgatcggattgttctctgtgtgaggcttctttgcaatactggtgatgatgttaggaaggtctggttacagtcttgccgccagagctttgtcaacatgcttgctgagaagcaatttagggagactgaggagatgaaggccaaggcacagataacttatgcccaaccagacgatcttattgatttctatcacctaaagagcaggaagggaatgagtcagcttgagctggaagatgcagttcaagatgatttgaaggctgcaaccggccaatttactaaggatgcagatgatactgacaagctaaaccgtattcttcagttgacaggattcagtgatcctgtgtatgccgaagcatttgtaactgttcatcattatgatattgtacttgatgttacagtcgtaaaccgaacgaaagaaacactccaaaacttatgcttggaattagcaacaatgggtgacctaaaacttgttgaccgtcctcaaaactatacattggctcctgagtcaagcaagcaaattcgagccaatatcaaggtctcatcaacggagactggagtcatatttggtaacatagtttatgaaacatcgaacgtgatggaacgatctgtggttgtcctaaatgacattcacattgatattatggattacatctcacctgctacatgtgctgatgttgcattccggaacatgtgggcagaatttgagtgggaaaataaggtggcggtgaatactgtgatccaggatgagaaggaattcttgaatcatattattaagtccacaaacatgaagtgtctaacaccaccatctgcgctcgatggagaatgtgggttccttgctgcaaatctctatgccaagagtgtgtttggcgaggacgctctggtgaatatcagtgttgagaagcaggccgatggcaagttgactggctacatcaggataagaagcaagacccaaggaattgcgctcagcttaggagacaagatcaccctaaaacagaagggaggcaacagctagctcagctacgagtcgttgatcactgtggtctgtggcaggcacatatcacccccgttaactcacctgaacacaaaatttgctagttagccaccaattttcagggttgcctcacctgacaatttgctggttgcccaccaatttttaggatagccaattattttggatgcgctgttgataatagaaaataaggatagggcactagtctaagttgtagtatttttgggtcatttcatgtgccctacacctttttgacaaaatattataaaatagaacactattaaagctgttttttatgagtt

SEQ ID NO: 24652 - DNA, 1522 bp, Zea mays
  Clone ID: LIB3632-053-H11_FLI
gctcctgcttgccggaggccgggccggcggcgatggggcacggcgctagctgcggccgaccaagcgaggaggtagacttcttcggcgcggcgcagtccggggacatggcccgcctcgccgccgctcttcgctcccgccccaccttgctcagccgcaccacgctcttcgaccgcctctccgcgctccacatcgccgccgcacacggccacctccaggtggtctccctggcattggatctttgcgtgcaccccgacgtcgttaaccgccacaagcagacggcgttgatgctctcggcgatgcacgggaagaccgactgcgtccgccggctgctcgacgccggcgccaatatcgtgatgttcgattcctcgcacgggcggacgtgcctgcactacgcggcgtactacgggcacgcggactgcctccggaccatcctctcggcggcggccaagtccgcgccggtctcggaatcctgggggttcgcgcgcttcgtgaacgtgcgggacgacaccggagcgacgccgctgcacctcgcggcgaggcagggctggcggcgctgtgtccacgtcctactcgaaaacggcgccatcgtgtctgcctccagtggcgccttcggattcccgggcagcacgccgctgcatttggccgcgcgcggcggcaacctggactgcgtccggcaactgctgtcctggggcgccgaccgcctccagcgagactccgtcgggagaattccgtatgaggtcgccgcgaagcgagggcacgtcgcgtgcgcggcgctgctgaacccgtcatccgcggagccccttgtctggccgtccgctctcaagttcatcagcgagctggaacccgatgccaaatctttgctcgaagcagccctgatggaggccaacagagagagggagaggaggatcctgaaaggcgccaagaatgcattgccctcgccctcgcaccccgattccggcgctcatgacaccgccatagctgaggctagcgacgcggaggtgtgcagcatctgcttcgagcaggcgtgcagcatcgaggtccgggagtgcgggcaccagatgtgcgcggcgtgcacgctggcgctgtgctgccacgccaagcccaatccggcgacgcagtcccagccgctgccgacctgcccgttctgccgcggcggcatcgcccggctggtggtggccacgcggacgagggccggcgacgacgaggagcggtgcaagctggagtctcccaggcactgccggtcccgccggtccatgagcctcagcggcgacgcgggcagcaccagcaccctcatgggcagcatcgcctcctccatcggcaagatgggccgccggcgaacagagagcagcgagcaggtcgacgacaagccgtagcaaaatcattgtttcctttcatgcatccatccatgcgtaatccacatgaaatcggtgcgtatgataatcctgcaatgtcggcgtcgaacaaggcagcttttgtagattattttttggcaagtgagctattcacctgtgtaggttcattc

SEQ ID NO: 24653 - DNA, 1415 bp, Zea mays
  Clone ID: LIB3632-054-D12_FLI
cggagcctgcacgcgtgtttctccacatgccctctccttctcggatcctctaccgtaatctcccggcgacgccgccgccatgtcttcccagtcttctgcaggaggtccggcgatccatcatccccactccaactaccacccgtacatctttcagcatgaccctccgctccactctaattcccgccgtcgccgccgtaaccatgatgacccatatcaaccctatctgcctctaccccacgctcactcccacggagccactgccgtcgttaccggcaccgttcgttgccatgtcccccgggatccacttgtgctctcacacctccaggagcgcctctttccgactctccctcaacatcacccgatcgcgggtccacccccgacgaagcgggcccgccgcgcgccagatactccgtgggatccgccgccgccaacgctgcagccggcacttgtcccggtggcgctagagaggcctccggatgtaggacattctgccggggcgttgctttcgcgtgacgagatcgagaggcggtctccatcaagaagggacgggatcgattccgcgcttgaggccaggctgcgtgcgtcctactgcgcctacctgcattgcctcggcaaccggctcgggttgccgcagacaacaattgcgacggctgtggtgttctgccatcggttcttcttccacagatctcatgcctgccatgatagatttttggttgcgactgcagccttgttcctggcagcaaaggcagaagaaacagcatgccttttgaatactgttcttagggcttcatgtgaggtttctcaaaatcaggaattcaatcttcttccttacatgctatgtggtcaggactggtttgaacagtacagagagagtgtaatacaagcggagcaaatgatacttacaacacttgattttgaactcgaagtagcccacccatatgcttccctatcctctgctttgggcaaactaggactcacacatactgttctgtttaatgtggcttggaatctgatcaatgaagggctacgaagttcactttggcttcagttcaagccccatcatattgctgctggagctgcattccttgctgcaaagttcctccactatgacatcacattccatccaaatttctggcatgaattcaagacaagtccatatattgttcaagatgttgtccagcagttgaaggagctactttaggatacaacattcaatgtatttacataatactcagagatcctcttggtttatacgctgtagtgagtagtgatcactgccaaaagtacgtacacattagcatgtggtcactttcatcaattactgaacatctttcatgtaggtttttacaaccacagtgctatgtacaaaaggggaagatgttattcaaaagttgcccttttagttttggggaggt

SEQ ID NO: 24654 - DNA, 1129 bp, Zea mays
  Clone ID: LIB3632-054-G8_FLI
ctcgcttggggcgatcaagctaacgggatttgaggagatctaggccagccgcgggcagcagccatcagccatgagcgaggtgttcgagggctacgagcggcagtactgcgaggcctccgcctcgctctcccgcaagtgcacggctgcatccgccctcgatggagagaggaagaagcagaagctctccgagatccagtccggcgttgaggaagctgaatcgctgattcggaagatggacctggaggcaaggagcctacagcctagcattaaggctggtttgcttgcaaagctgagggagtataaatctgacctcaacaacgtcaagagtgagctcaagaggatatctgcgcccaatgccaggcaggctacccgggaggagctcctggagtctggaatggctgatactctcgcggtgtctactgatcagaggggaagattgatgatgacaactgaaagactgaatcagtccactgacagaattaaagagagccgaagaactatgttggagacagaagaacttggtgtctcgattcttcaggaccttcaccaacagaggcagtcactactacatgctcatactactgttgaaagaactgtgccgcttgctaaccatccagacccaaacaacgccaaaagctgccatgctggctgctgggctaccggggtcggggccgcgctgcgggcagaaggcgaagcggtggtggaccgcggagcgtggagggcaggagcggagcacgtagggcaggggcggaccgactcgccgatgcctagagcggcagagcccccaaggggataggacggcggagctggtcttgggcggttctggcggcgctgaggagagcggagatgaacttgttcgtcagttcgtgggaggctgggattaataggattttctaaattttggtatgtttgttgggctgaatcgaggtattgcccaagcaacactgagcaatattgggccctccacccctgtaaacagataaacatcgcttagagaggtttcttgcccccatgaaccacctagtaagtttttggtgtgtttggtttgaggacaagggtggatgtgatatgtccatccatagatttcaggatatgaatagaatatccatgttgtctgtttggttggacg

SEQ ID NO: 24655 - DNA, 1733 bp, Zea mays
  Clone ID: LIB3632-055-A7_FLI
gagaggtcaagaactacggcacgaccgccgacgtagcagagggatctgttcgcctcccgtaccgagacccccctaccctttcgtcgacgactaggcttgcggcgaccgcccttggcttcgccgtcggcgagcatcaccaggtccggccaccgcttcccttgcatttttatccggatctgcctccttcactgcacgcatgtattacgcccactggctcggattcgattcggcatctagggtttgggtacggcaccctggggtctgcttctgtcagaacctcgatgctctatgcctctatccgattgacagaatggatgtgtagggactgacgattggcgggggagcgaatgcggagatgggctgatcagaactgcgacaaggtccggttttctctctaaaccgcggtctctggaggtgggtttgctttttccgtagtcacagatggacgacgacgacggcagcctgggcattcggaactggggcttctatgacaccgtgaaaggcagcctcggcctgcagctcatgtcgcccatgccacctgatcgggacacgaagccactgctcccgagagctggtttcttgcagcagcatgggcatcacaatgccccacaccagctccacgcacagcagccgcagcattaccgtgactccgctggtggcggagtctctggtggcacacctgccgagcagcaccctatccacatggacttctcgcgcaatgaagcttggctgcacccatcacaccaccagcatccccatgaacagaaggtccttcattctcgccctatcggaccagctgggcatgttgggcatccaggccatgttgcccatcctgtgcatgccgtgcatgttgtgcatcaccatcctactggctatgggatgatatcagatgcacaacatactcttcagatgatgcaaccacagcttgagtcacagcttcaggagcctcctccttgcaaggaagacgaagcaccacctccactggttgaggatcactccgtggttagtaccgggccacccgtgaagaagaggcagcggggccagaagcagagctgtcagcctaagtcaccaaagcctaagaagcctaagaagtctgctgtcccaccggagggtgggacaattaatgggcacgcgacccggaggaggggacctaagaagaatgtggggatgatgattaacggtattgagttggaccttgccaacataccaacaccagtgtgctcgtgcaccggagctccccagcagtgctaccggtggggtgcaggtgggtggcagtctgcatgctgcacgacttctatttcaacgtatccactgccaatgaacacaaagcgccggggcgcacgtattgctggaaggaagatgagccaaggtgcattcaaaaaggtgcttgagaagcttgctggtgaagggtacaatcttgttaatccaattgacttgaagacgttttgggctaagcatggtacaaataagtttgtaacgatcagataaagaagccgtgctatgtttgtcgctttgtaggttgtagagctgcagttaggcctgatttattgtttgtatgcctatgtgccagtctgcagacatttgtagtagtagtttttagccatgtttagtttcgttgtcttaattgtcatgtctatctcgagctttggatatcgaccaactgaagtccttgtatcctcactttgcaaattgtattgtacccataatagtctctaatttagggcatcaagatc

SEQ ID NO: 24656 - DNA, 1215 bp, Zea mays
  Clone ID: LIB3632-055-B11_FLI
cccacgcgagcaccccattcccatccatggcgaccaccacctcttcctcctcgctgaccactcctctcctccgcccgaaccccaataccaaccctgctcccagatctctccaactcctcaggagcaggaggtgcgctcgtgccgtaactaccgccgtagccggaggtgcggtgccttacggggctaatccgcggcgcgggatttggtcgatcagggatgacttggtggtgccaaggtcgccctacttcccagtggagtccgcggcggggcaggagcgtgggccgtcgcccatggtgatggagcggttccagagcgtcgtcagtcagcttttccagcacagaattattcggtgcggaggccccgttgaggatgatatggccaacatcattgtagcacaactgctctacctcgacgctattgatcccaataaggatatcattatgtatgtgaattcgccaggagggtcagtgacagctggaatggctatatttgatacaatgaagcatatcaggcctgatgtatccactgtttgtattggactagctgcaagcatgggagcttttctacttagtgctgggaccaaaggaaagcgatacagcttaccaaactcaaggataatgatccatcaacctcttggaggggcccaaggacaggagactgatcttgagattcaggccaatgagatgctgcaccacaaggcgaacttaaatggataccttgcataccacactgggcagcccctggataagatcaacgtagatactgaccgtgactacttcatgagcgcgaaagaagcaaaggagtatggccttattgatggagtaatcatgaatcccctcaaggcccttcaaccacttccagcttccagttagtcatgaagtgtgctagaactccgtcaaacatttttgttgtatcaatgtgtctgttggaagccctggctacgtaatattctacgtccaaatgcatcaaagattgtacaaaacaagatatgcggttaggatatccatccttggtgatggatattggaactaaattaacagtattagggttagtttgggaactccattttcccttgggattcctattttcccaagggaaaatgaactaattttccttgggaaaatgaaattcccttgggaaaaatgtggtttccaaactaacctaacccttagagttaatttgtcaactctatttttctaaggaaattcctctcat

SEQ ID NO: 24657 - DNA, 1501 bp, Zea mays
  Clone ID: LIB3632-055-C3_FLI
cttttactgacccgactcactctctctgaaaactaggaaccccactcccctcccgaaactaccgccgccgccgctgccgccgcgatccaggtctcccgccccgcctgagatctcgacctcttcactcctcgccgctactgctcgccctcccgcgtatcctcgtatcagctctcaggttttcagcctgatcaaaccggtgtacccagccgtgcatgactgcattggttcggctcgccggaagagcagcttcgcggagcagggtcggcatagcggcggcggcggcaccccctcctgtcggcttgtccgtgcagcgccggagggcgttccagggcgtgagaatggagacggggggcagcaagggcggccgtggcgctctggtggtcctggaaggcctggaccggagcgggaaaacttcgcagtgtgcccggctgctgtccttcctcaaaggcaaaggctacaatgccgaaggatggaggttccccgatagggccaccagtgtggggcagatgatctcttcctacctcgcgaacgattcgcagcttgatgacaggacgattcatctgctcttcagcgccaaccgctgggagaaaagagctttgatggagagcaagctacttagtggaactactctcattgtagaccgttactcctattcgggagtggccttttcagctgctaagggccttgacattgagtggtgcaaggctccagaaaatggacttattgctccagaccttgtaatatatcttgatgtacagccagagaaagcggctgaaagaggaggctatgggggtgagcgatatgaaaagatagagttccaaaagaaagttgcagagcattaccattcactccgtgattcgacatggaaggtggttgatggtttccttcccatggagactgttgaagaaaaactgagagatttagctacgagctgtattcaggactgccaagggaacccacttaccaatctggcctggtgaagtgccttatgcacaaagtaatggcggccacacatcgtcttgtgtgatcaaccatggtcgggatagaattaggcatccggaagcattggcctttccatttgctctatcagtattccttgtgcttatttataatttcaaagcgtgttttttctttcctaaagttaggccccggttaaaacctctagagctaattgttagctaactaataagttgttagttgattttagctgggttgagacagctacaactaatgactatttgagaggtatagctaataattagtcggtctattatctgatctgttttaaacctttcaggtaattttagatgccaactagttttagaggtttggaacaggatcttagtctgtatttctgtcggtgtacggattttgtgtaacgtgaaacatgtgagagtgcaaaacacttgaatttctatgcttcatgtacctgcgaatgctgctgggtgaagaaacattggaaaaggaatgaaaaacagtagcactataaatttggggtttc

SEQ ID NO: 24658 - DNA, 1556 bp, Zea mays
  Clone ID: LIB3632-055-C8_FLI
gacgaagccgacgataaggagaacagagactccggcgagccccagccacggtgaagccgcgcgaattgcaggagcgaagcaaaggagatgcttctcgaggagctgctccggtgccaaatccacgagtggtacccggccttccgtcgccactccatccccaccgtcatcatcccgctccccgccgccttcctccgctacctcgccggccagcgggcctaccccaacgccgacgccgacgctgaagatggcgctgatgaggagccactaccgttcctccttccggcgataacttccggccgccagcccttcgcgcccatccacgcgcaccaccccgaccccgactctctcctcaactccgacttgttcttcggctccagcagcgaagacgtcttcgaccccgacgccgaccacccgctccggccggaattcccggagctggaggtggccatcgacgccgccatcgccgagctaggcggcgccgcgctccccaagctcaactggagcgcgcccaaggatgccaccttcatgtctgccgatggcacgagtcggtgcacgtgcttcgccgaggttgccatgctgctccgctcctccgactgtgtagcccacgaccttgcctccgcgcgacaatcatgcaaggatttcgtgcgcccggagggtgctcgacggaatgcccaaaaagttagtgccggttctgaggaaggtgctcgaccaaatgccgatgggattcgtggctgcgaaggcaccaatggagcaccaagtaattcaagcaagacaggtgaggagggaggcaagacaaatgatggggactgtgatgttgaagatgcaaccgaagaagaacataacgagaatacttgggtggacgatgggttccaatactaccttgccctccgcaagtggtacccaggcctacgccctgagtcagagttccgatgcttcgttcgggagcagaagctggttgctgtgtcccagagagacccatcagcttactacccatcactgcctggatggagttccgaggtgcaaccgaaaattgaggctttcttcaacgaagtgattgagccacagtttgcttcaaacaattatacgtttgatgtgtatgtgaggacagatgggcgagtcaagctcatagatttcaatccatggggtggttataccttgccgctgctgtttacttgggaggagcttgaggagaaggggagagggtctgagctggagtttcgggtggtaatgcagcagggtgcagtgaggccaggattgatgacagctgtgccatatgatatgctggattggggtgaggggagtggctgggatgtttttctgaagaaggctgacgaggagcttgacagacagatatgaactccctggatggtgattcatgattgtggttcgaaaaaaaagtcttaattatgctgtaggcacacaatttaaagtgatgactgctgttttttttacctgctactgtgctacatactagcagtcacctcctttcttaaaattgctatgcagtctcttgccatttatacttttctctttttttttgttactattatggtgct

SEQ ID NO: 24659 - DNA, 1523 bp, Zea mays
  Clone ID: LIB3632-055-F4_FLI
gggaggagcaacctagcggcagccacagcagcagcgtagctgtagccacagcagagcagcggcggctgcgttcagacgactactacttgttcctcctcctcctcctgctccttcccccaaattccacccccctcaaataataaacaaatcaaagcaagcgaggaggtgagcagcgtccgcaagggaacagggaccgcgggggttgcaggcttgcagccgtgggggaggggagcagatccgcgagatccggcgcgccgccgatgacgagcggcgccgggggagccgcggccgggatcgggggcaccagggtgcccacgtggagggagcgcgagaacaaccgccggcgccgcgcgatcgccgccaagatcttcgccggcctcagggcctacggcaactacaacctccccaagcactgcgacaacaacgaggtgctcaaggcgctctgcaacgaggccggctggaccgtcgagcccgacggcaccacctaccgcaagggatgtaaacctctggcaacagagcgtccagatccaattgggaggtctgcatcaccaagcccctgctcttcatatcaaccaagtccgcgagcctcatacaacccaagcgcggcatcctcctcgttcccaagctctgggtcctcctcccacattactcttggcgggagcaacttcatgggaggcgtcgagggcagctcccttatcccgtggctaaagaacctctcgtcgagctcctcgttcgcctcctcctccaagttcccgcagcttcaccacctctacttcaacggcggttccatcagcgcgccggtgacgcctccatccagctctccaacccgcacgcctcgcatcaagactgactgggagaacccgagtgttcagccaccgtgggctggggcgaactacgcgtcccttcccaactcccagccgccgagccctgggcaccaggttgctccggacccggcgtggctagccgggttccagatttcgtctgctggcccttcgtctccaacttacagccttgtggctccgaatccgtttggtatcttcaaggagaccatcgttagcacctcaagaatgtgcacccctgggcagagtggaacgtgctctcctgtaatgggcggtgcgccgatccatcacgatgtccagatggctgatggtgccccagatgacttcgccttcgggagcagcagcaacggcaacaacgagtcgcctggtctcgtgaaggcatgggagggggaacggatacacgaggagtgcgcctcggacgagcatgagctggagctcacccttgggagctcaaagactcgtgcagatccttcctgatcatgctgcaagagacaagtcttcacctgttttttttttactttcatctttattcggacggtgctcctctgctttatgagttcaatgtttgtagaaagagggaagggattcagagaccttatcctgctcctctggagatgatatccatcctctttcaaggatatgaactttattctagcttaagcaaattgttaacttatttatttc

SEQ ID NO: 24660 - DNA, 2246 bp, Zea mays
  Clone ID: LIB3632-055-G12_FLI
ggagaccagagagggagagagatgctgcaggtggaggaggcgctggcggcggtgctgtccgcggcggcgggccacgcggagccgcacgccgtgccgctgcagggcgcgctcgggctcgtcctcgcggaggacgtctgcgcgcccgatccgctccctcccttccgcgcctccatcaaggacggatacgccgtcgtggcctccgatgggccaggggagtatcctgtggtcacggagtcgagggcgggcgacgacgccctcggcgtggtcgtcgtccccggcacggtcgcctacgtcaccaccggagggccggttcccgatggcgccgatgccgtcgtgcaggtggaggacaccgagcagctccctggcggagcggatgggtccaagagggttaggattcttgcgcgggcctcccaaggacaggacatccgcagtgtgggatgtgacatagagaaggattcgattgtgctcaagtctggcgagcatataggtcctgcagaaattgggctacttgcaacagtgggtgtaaccactgtcaaggtgtaccctcgaccaacaatcgctgtattctccacaggggatgagctagtgcagccagccactgccaccctcagccgtggtcagattcgtgattccaatcgagccatgcttctagcttgtgctgttcagcagaaatgcaaagtggttgacctgggtattgcagaagacactgaagaaagtctcaaggagcatatggatgcagctttgcgttctaatgctgatataatcattacttctggtggtgtttccatgggcgacagagatcttgtcaaaccttgcctggcaaagatgggtaaaattcactttgagaagatccagatgaaaccaggaaagccgttaacctttgctgagatcaccacacaagacacgccaaagccatctaaaacagttcttgcatttggtttgcctggaaatccagtgagctgtattgtttgctttaatctttttgttgttcctgcaatccgtcttctctctggctggtcaaatcctcatctgcaaagagtgcatgtgcgcatatcacatcctttaagagcagacccacatcgtacagagtttcaccgtgcagcaattagatgggtgcttgatgatggatctggtcgacctggttttgttgctgagagtactggccatcaggctagtagccgtcttcttagtatgaaatctgctaatgccctgctcgaaataccatccactggacaaatattggcagctgggacatctatccaagccataattatttcagacataataacttcttcagataaactgcctactccttcaaatccgtatccatcttgtggtccttctgcaaaaagtatttctgcagatgtatctcagattgcatctccacaggatgctgaagttaaagtcgcaattctgactgtaagtgacactgtttcatcaggtgctggccctgataggagtggcccaagagctgtatctgtagtgaattcttcatcagagaaactgggtggtgcaactgtggttgccactgcagttgttcctgatgaagtggacaagatcaagggcattctggtacaatggagtgatattgaccatgttgacctcattctgacattaggtgggactggcttcacacccagagatgtcacaccggaagcaacaaaaatggtgatacagaaagaagcgcctggtctcacatttgttatgcttcaagaaagtttgaagattacaccattcgcaatgctatcccgggccacagctggaatcagaggatcaacacttatcatcaacatgcctggcaacccaaatgctgtggcagaatgcctggaagcactcctcccagcgctcaagcacgccctgaagcagatcaagggtgacaagagggagaagcaccctcgccacactccacatgccgcagcggtgcctgtggaccagtgggagcggagcttcagagccgcatcatctggtaatggtggtgggtgctcatgtgatccctgaggagccctgatcgactgagatacccaaaagagtggaaccaaacacgagacagtaggagagctctgtgtcctccgtgctccattgcattgcctgcgtgcctgcgtccagttcgatgttgaagttttgatcttgtcctttggtatgttatatggagatgcgggagtccttgactgttacttgctcacgaacttctttcactgtgctacaaataataatgtataatatgtaatctcattgtctggccgttt

SEQ ID NO: 24661 - DNA, 1836 bp, Zea mays
  Clone ID: LIB3632-055-H7_FLI
ggcagatctccagtccccggccctccgtcccctcctcctgcgaaggctcctccagcaccactagctagagctaaccccgtgctgctgctgctgctactacctgctgccgcgcgccgttcgttgccgtgcgggcgtgttgtggtccgctgatctcgttcgcgggacgccggggggtggtggtggtggcagcggtggttggtggtgcgcggcgtgaaagaaagaaagaaaaaaaaaaaaggcccgccgctttgcgctgctctgcttccgtaggtgtcacgagatttggccctagcctttcgctttcctttttcatctcgctcacaagggaagggaccgagggacgagggagacgttggggaggggagcgagcgagccgtaacatccgagctgttccaatggcgacccctgccgttgctttcgtcgccagcgctttgttggggcggtggtagcgctaggagcggagcagtactaggttggtaggtggttgtagctttgcgcgtgacccgagcgcgcgctcgctcgctcctgtgcctctctacctcgcttgcgtgcgccgggaaggcagtgggtggctggtcggttctcgcaagaggttgctggtgctgttcctcctcccccggttgatgagcatggggcattgctccgagcagcggacggggttcgaggtgactaaggactggaacggcgccgaccagttcgcgatccggtccccgcggggggcgtccgttcgggtctgcctgcacggcgggcaggtcgtctcgtggaggaaccaccgcggcgaggagctcctcttcagcagcagcaaggcaatcttcaagccgccaagagcgacccgtggtggcattccgatatgcttcccacagtttggaaactgtggaacattggagcagcatggatttgcaaggaacaagatatggacaatagacgatgaggctccacctctaaattatggtgataataacagcaacaaagcttctgttgaccttctgctaaagccatctgaagatgacctgaagtgctggccacactgttttgagttacgtctcagagtctctctttcaatggatggagacctttcactgatatcacgggtcagaaatgttaatgggaagccattcagtttcgcatttgcttaccatacatacctttctgtttctgacatcagtgaagtgaggatagaaggtctggagacccttgattatcttgacaaccttagccagcgggaacgttttaccgaacagggagatgccataacatttgaatcagaggttgatcgagtctatgttggctgcccaggcgtaatagctgttcttgaccatggaaagaaacgcacattcatcgtgcggaaagaagggcttcctgatattgttgtgtggaacccctgggagaagaagtccaagacgatggcagacttcggcgacgacgagtacaagcagatgctgtgcgtggatgcagccgcggtcgagagggccatcacgctgaagcccggggaggagtggacggggaagctggagctctccgccgtggcgtcgaccaactgcagcgaccacctggatcgcccgggcaggctgtagagcgctgggtgggtgggttcgttcgcccctgacgaaaggcatgtactagttttttttcatgtacatgggggcgctaggtccggcccttgcaggctgcagtatcatctacctgtcaggtgtgtcatgtgtgagtttaaacttatgtcagatccaagtattgctgtgatcgacatgttcgatgttcctggactgcgaagtctcaagcgcaggctgttcgtttggctggctttaatccgaaacggcatctatagattgtagctgc

SEQ ID NO: 24662 - DNA, 2167 bp, Zea mays
  Clone ID: LIB3632-056-C6_FLI
cccacaccgcactccgcaccaaccaaccccggccggccagcccacgagccccatcccgccatccgcccgcgcggcgagcgcagagccgagccgagctgccggaacgcaggcagcggccaccgggaggcctccgaaacgcagcggaacacctgaggaggcggcttcccggcgaatgctctaggaggaggcgcggcgccggcggagatggggtccaagtacacgcgcgggtgctgcggctggctgatcgtggcgctgattgcggcgctggtggccacggccgcgatgttcgccatcatgaagcgcaagcccgggggccgccacatcaagccgctgccggtgccggggccgccgggggccatcgactccaagtacggcgacgcgctcggggtcgcgctccagttcttccaggtccagaaggcggggaagctggagaacaaccagatcccgtggcgtggggactcggcgttgaccgacgggaaggaagcggggctggatctttccaagggaatgtatgatgctggggatcacatgaagttcaccttcccgatggcattcacggcgacggtgctctcgtggtcggtgctggagtacggggatcagatgagcgcggcaaagcaactggaccctgccctcgatgcactgaagtggattacagatttccttattgctgcacatccttctgacaatgtgctgtatatccaggtcggtgatcctgatctggaccacaattgttgggaaaggccagaaacaatgaccgagaaaagacctctcacacagatcaacaagaagactcccggatcagatgttgctgctgaggcagcagcagccatggcagctgcttcaatggtcttcaaatccagagataccacgtattctgatgtgcttcttcagcatgctcagaaactattcacttttgctgacacttatagaggcctctcaagcgagagctatcccaagctccaggatttctataactccaccagttacgttgatgagcttctatgggcagcgagttggctctaccacgccacaggcgaccagacgtatctcagctatgtaactgtacagaacgggaaaagttatgctgattggggaaggccaacatggttcagttgggatgacaaaaatccaggcacacaggtgcttttgtccagactaaatttcttcgggtccaaacagatatctaatgccgaaaatgaggggttgaaaatgtatagagatactgcagaagctgtcatttgtggtctgattccagattcgcctcaagccactgccagcagaactggaggaggcttggtgtggataagcgggtggaattctctccagcatgccaccaacgctgcgttcctatctgttgtgtacagcgactacatgctctcgacgcggacagcggcagtgcagtgcagcgggaagtactacagccctaccgatatacgcaactttgctgcatcacaggctaactatatcctgggagacaacccgatgaagcttagctaccttgtgggatatgggagcagctacccaaagcaagtacaccacagaggggcgtcgatccccgcggatgcgaaaacaggctgcaaagggttcgagtatctccactcacccagcccgaacccaaacgtggctacgggcgccctggtgggtgggccgttccagaacgacaccttcgtggactcccgtgacaacgccgtgcagacggagtccagcacctacaacagtggcaccctggtcggtctcctctccggcctcgtcaccacttcctccgtggtacagtcgttcacctagagggctcctcctatgttctggcctggagcgatgcgtgtacgagtacgattgcagtttttttgcttggcgtggctgatggtgatgcgcgatctgtgactgtgagagagaaagcttggttgccaaccgttcagttcagacggatggcatatgcaggatgcagcagtagtttagtagtgcccacgcgtttcttctgttgtgtgtgtacaatgacggtgctgctcctgcagtgcagctatagtttttcaccgcgtgctcctatctggtttgctggtgtgcctgtaaggctgtagctacgagtaatgtattagactatttgtaggtcgtatttcatttgttcattctgtggtgaggtagttcagcagagctttgtactgtaccgatg

SEQ ID NO: 24663 - DNA, 560 bp, Zea mays
  Clone ID: LIB3632-056-D9_FLI
aagatgccggcggggcacgggctgcggtcgcggacccgcgacctgttcgcgcggcccttccgcaagaaggggtacatcccactcaccacgtacctgcgcacctacaagatcggcgactacgtcgacgtcaaggttaacggcgccgtgcacaagggcatgccgcacaagttctaccacggccgcaccgggagcgtctggaacgtcaccaagcgcgccatcggcgtcgagatcaacaagcaggttaatggccgcatcatcaggaagcggatccatgtccgcgtggagcatgtgcagccctcccgttgcacggaggagttccgcttgaggaaagccaagaatgaccagctcaaggcggatgccaaggcccgcggtgaggtgatcagcaccaagaggcagcctgtgggacccaaacctggcttcatggttgagggtgctacactcgagacagtcactcctattccttatgatgtggtcaacgatctcaagggcggttactagagagaatttttgtaccttcagcagttcaaacgagctggcaaacttatctgaatctttttgat

SEQ ID NO: 24664 - DNA, 1672 bp, Zea mays
  Clone ID: LIB3632-056-H11_FLI
ctccgcgccctgccacggcgcctcgagctctggctgccgtgccttgcggcggtcgagagtaacccggccccgccacccttagctccgccaccgccggacgaggcgagcgccggctcaggcctcgatgcgagggccgggggaggtggcggtggtggtgacggaggtggcggcactgatcttgggtggttgagggctttcccgcatgtgttcactgcgtcaatggcaaacttcctattcggttaccacattggggttatgaacggtccaatagaagatattgcaacccagcttggttttcaaggaaatccgttcctccaaggtcttgtggtgagcatattcattgttggtgccttttttgggagcttaggctcatctgcattagtagataagttcggctgcaagaggacccttcagatcgacagtattccattgattattggagctctcctgagtgcgcaggctgattctttggatgagatgcttttgggaagattccttgttggcatcgggatcggcgtaaacactgttcttgttccaatatacatctctgaggttgctccaacaaaatataggggcactttggggactctgtgtcaaattggaacatgtctaggcataattgctgcactttccttggggataccttctgagagtgatccacattggtggcgaacaatgctttatgctgcatgtgtacctgggattcttattgttgctgggatgcaatttgctgttgagagtccacggtggcttgccaaggttggaaggttcgatgatgctagaaaggttgtagagagcctttgggaaccttctgaagttgagaagtccatggaagagatcaaagctgttgtgctaaatgatgattcacggggcagctggtcagaccttctggtggaaccacataatagagttgcattgattggaggatcccttttctttctgcaacagtttgctggaataaatggtgttctttatttttcatcattgacattccgtgatgttggtatcactaatggtgctttagcaagcttatatgttggaataatcaattttggaggggcactagttgcttcaaatttgatggacaagcaagggcgaaagaagcttttgataggaagctaccttggaatggcttttgcaatgttccttatagtatatggtattagcttcccgcttgatgaaggagttgcccacagcttatcaatcgctggaactcttttgtacatttttacttttgcaattggtgctggaccagttaccggtatcattataccagagctcagcagtgctcggacacgctcaaaagttatgggcttcagtttcactgtgcattggatatgtaactttctggtgggactattttttctggagcttgtgaacaagtttggggttggagcagtctatgcaggttttggtggggtctccctgctgacagcactctttgcctacaatttcatagttgaaacaaaaggacgttcgcttgaggaaattgagatgtccttgagcagtgctacccctggcaagcaagagtagaacatctcaattgtatggacaaactgaacaactgacgggaggaatttaataagagcagagggggcctaatcccatgaatcttcagcagcagcagtttgttgcaaacaacatcaactcctatagataatgagcacaatca

SEQ ID NO: 24665 - DNA, 695 bp, Zea mays
  Clone ID: LIB3632-056-H5_FLI
agaggtgggttggcttctcctcccccaccggttcgtgttcaggttctggttcgtgggcgagagggaagagatggcggcgtcggacgttgagtaccgttgcttcgttggcggcctcgcctgggccaccgacgaccactccctcaacaacgccttcagcacctacggcgaggtcctcgagtcgaagatcatcctggatcgggagacgcagaggtcccgcggcttcggcttcgtcaccttctccacggaggacgcgatgcgcagcgccatcgagggcatgaacggcaaggagctcgacggccgcaacatcaccgttaacgaggcccagtcccgcggcggccgtggaggcggcggtggcggatacggtggcgggcgccgtgatggaggcggctacggcggtggcggtggaggctacggcggtggtcgtggaggctacggcggcggtgggggatacggtggtgcaaaccgcggcggcggctacggcaacaacgacgggaactggaggaactgagcggtggggtccgctgaggcctagttatcttgttcgcttctgctaccgtgttcaccctagtctagagggggtttatcttcgtctgtggtcgtctcgtgtccgtatgtttcgtttcgtgttcgttgttgttgttgcccatctgtgtttttgaccgcaagctcgctcctctgatgttgttagtgatgtc

SEQ ID NO: 24666 - DNA, 1687 bp, Zea mays
  Clone ID: LIB3632-057-A3_FLI
gccgcagaccgggagtagtcgacgcgccgtcactgaatcctcagatcacggctagccgtaatcacgccactctgctgactcccggcgagcagtgtaacattttccttcagccatgggcaaggagaagactcacatcaacattgtggtcattggacatgtcgactctggcaagtcgaccaccactggccacctgatctacaagctcggcggtattgacaagcgtgtgattgagaggttcgagaaagaggccgcggagatgaacaagcggtcattcaagtatgcctgggtgcttgacaagctcaaggccgagcgtgagagaggtatcacaattgatattgctttgtggaagttcgagaccaccaagtactactgcactgtcattgatgcccctggacaccgtgacttcatcaagaatatgattactggcacttcccaagctgactgcgctgttcttatcattgactccactactggtggttttgaggctggtatctccaaggatggacagacccgcgagcatgctctccttgctttcacgcttggagtgaagcagatgatttgctgttgcaacaagatggatgccaccacacccaagtactccaaggcccgttatgatgagattgtgaaggaagtctcttcctacctgaagaaggttggatacaaccctgacaagatccactttgttcccatctctggtttcgaaggtgacaacatgattgagaggtccaccaaccttgactggtacaagggcccaaccctacttgaggctttggacttgatcaatgagccgaagaggccttcagacaagcccctgcgtctccccctacaggatgtgtacaagattggtggtattggaactgttcctgttgggcgtgttgagactggtatcatcaagcctggtatggttgttacctttggtcctagtggccttactactgaggtgaagtctgttgaaatgcaccatgaggctctccaggaggcccttcctggtgacaatgttggcttcaatgttaagaatgttgctgtgaaggatctgaagcgtgggtatgtggcctccaactccaaggatgaccctgccaaggaggctgctagcttcacgtcccaggtcatcatcatgaaccaccctgggcagattggcaacggctatgccccagtgctggactgccacacctcgcacattgctgtcaagtttgcggagctcattaccaagattgataggcggtctggcaaagagcttgagaaggagcccaaattcctcaagaatggtgatgctggtatggtgaagatggttcccactaagcccatggtagtggagaccttttctgaatatcctcctcttggtcgctttgctgtccgtgacatgaggcaaacggtggctgtcggagtcatcaagagtgtggagaagaaggatccaactggagccaaggtgaccaaggctgccgcaaagaagaaatgatgtgtctggctggttctgtgtttgcttgagggatacctagtggaaacgtaaaatatctcgtcttgttcacgtcattgtctgaactatgctcgcaacgtttgcctggtcgatttagaactgttattttcgttaaaaccagagtgttatttaagacttatccgaacatctggtgagccatatatggttactagttttgttactacccttgttggtgttgtgtgcttctttagc

SEQ ID NO: 24667 - DNA, 1294 bp, Zea mays
  Clone ID: LIB3632-057-C5_FLI
atccaccaccgatctggtctcactgcatcctcctcccctcgccgtccaagagcgccggtccgatgggtcgtccgccgagcaccactggtgctccggccttccgcttcctcccttccgaggtggcggagatggaggcgcgcttgctgcagctcaacaacggcatccccacccgcgccatgctccagactctcgccgataagttctccgcctcgcccgagcgcgccggcaaggtggccatccagcccaagcaggtgtggaactggtttcagaacaggcgttactcgcatcgggccaagaccaccagggtcgtgccgtctccaccggctaagatgaccccctcgggggccgatcaccaccagcacgccgctaacgcctccgccttcagggccgctcagccctcttctgtcgctgttgctcaccatggctcctcctcgacagggaagaaccctatggaaggtgtctcagttgagtttgaggccaagtcagctcgtgatggtgcatggtatgatgttgctgcctttctgtcacataggttgtttgaatccggtgacccggaagtgcgggttcgtttttctggatttggggcagaggaggatgaatggatcaatgttcgcaaatgtgtgcgacaacgttctcttccatgcgaggccacagaatgcgttgctgtgcttcctggggacctcattctttgttttcaggaagataaagagcaggctctctattttgatgctcgtgtccttgatgctcaaaggagaaggcatgatgttagaggttgccgttgtagatttcttgttcgctatgatcatgactcttctgaggaaattgttccactgaggaaggtgtgccgccgaccagaaactgactacaggcttcagattctgcatgctgctagagcggcagccgccagtgcagatattcacactccacccagagaggctaaagtggagttggcatccaatgctaagagcccatatgagcaaaaaccccagaagcagtacaagatgatggacgtgaacactgatgaggaggtgaccatggtctccaccttggaacaggatgagacacaaggcaagactgtagcccccgtaccgtcagcaactgcagaaacccgcaattcaagttcagacgcggtgatgaaggatgcggaggcttcgtccgtggctcaagacgatgatgaagtgcaggtggttgacaagatgaaagaggggtagctttttttcgcactttttgtgtttggaggacttgatgttgtcgtacagagttttctaatttagtttgtagtatatgtttttct

SEQ ID NO: 24668 - DNA, 1871 bp, Zea mays
  Clone ID: LIB3632-057-D11_FLI
gacacaagcaaagcgagcacagacagacaccgttacgcgagcacgcaacgcgacgaggagaggagaggagacgcttaccgagcgaagagcactaggctccgccatcgacgtacgcacgcaagcgcgtgaagcgtcctcgactcgcctttcggttcggttcctcgccgtcgcggccgtcctcgtcgggcgaccgctctctcggcattctttctatctggttgctgtgtgtggattggaggccttgtgagctcgcggaggcggcgcggttcatggccgtggcggagcggttcggaactcggtggccgccgtctcgattcttcgttgctgtgctcctcgtcctgctcacagatggcggagcggcgtggaagagagcagaaggcctgtcgttgggcatcaactacgggcagatcgcggacaacctgccgtcgccggcgagggtgtcgtacctagtccggtcgatgcaggtgagcaaggtgaagctgtacgacgcggacccgtacgtgctgagcgcgttcgtcgacacggacgtggagttcgtggtgggcatcggcaacgagaacgtgtcggcgatggtggagccggcggcggcgcgggcgtgggtggagcggcacgtgcagccgtacctcccgggcacgcgcatcacctgcatcaccgtcggcaacgaggtgttcaagggcaacgacagcgcgctcaaggcgagcctcctgccggccatgcagtccgtgtaccaggcgctgaccgcggtgggcctgcagggccgggtgaacgtcagcacggcgcactcgctggacatcatgggcagcacctacccgccctccgccggcgcgttcgggcccgacgccgtgccctacctccagccgctcctggccttcttgtccgcggcgcggtccccgttcctcatcaactgctacccctacttcgcgtacaaggccgacccgggcaacgtgccgctcgagtacgtcctgttccagcccgacgccgccggggtcaccgacgccggcacggggctcaggtacgacaacatgctgtacgcgcaggtcgactcggtgtacgccgccatccagaagctgggccacaccgacgtcgacgtcaaggtctccgagaccgggtggccgtccaggggcgaccccgacgaggccggcgccacgccggagtacgccaggacgtacatcggcaacctgctgcagaggatcgagatggggcagggcacgccgatgaggccgtcggcgcccgtcgacgtctacgtcttcgcgctcttcaacgagaacctcaagcccggcccggcctccgaacggaactacggcttgctctaccccgacggcacgcccgtgtacgatgtcggcctgcggggataccttccacccatggattattcacaaggcaccagagaggcggtccgtttcttcgccttcatcagcttcgtagccattgcatcgatcactctcagcttatcctcctgagagcattgccgtaaagttgataaagaaagcgcggagactgaggacctcttgctgctaggatagcagatcgatcacaagccctcggagaagcaactaaagtcggcatgtaccatcaggcaagctttagaagcagaaatttgtctctgacttgttacacggccagccaaaacggtatcgaagtggtttttgatgacatccagcagccaaaactggctccgcgcgctgacagtaaagtagaactgactgaagattgcggccgacacgcacccaatgcacgcatagtagaattttccatttaatttgttctagagatgtcttctttatccaactccgcaactgtatatttgtatatcggccaaacagaaaggacataaattcaggtcaaggctggccatttatacttagtttttt

SEQ ID NO: 24669 - DNA, 1380 bp, Zea mays
  Clone ID: LIB3632-057-D3_FLI
ataaggggcgacgaaaatggctccaacgaccgccaccaaggacgacagtggctacggcgacgagcgccggcgcgagctgcaggcgttcgacgacacgaagctgggggtgaaaggcctggtggactccggcgtcaagtccatcccgtccatcttccaccacccgccggaagccctgagcgacataatttctccggcgcctctgccgccgtcgtcgtcgccctccgccgccgccatcccggtggtggacctctcggtgacgcgccgcgaggacctagtcgagcaggtgaggcacgcggccgggacggtgggcttcttctggctggtgaaccacggcgtggcggaggagctgatgggcggcatgctccgcggggtgcgccagttcaacgagggccccgtggaggcgaagcaggcgctctactcgagggacctcgctcgcaacctgcgcttcgcctccaacttcgacctcttcaaggctgctgcggccgactggcgcgacacgctcttctgcgaggtggctccgaacccgccgccgcgggaggagctgccggagccactcaggaacgtgatgctggagtacggcgcggcggtgacgaagctggcgcggttcgtgttcgagctgctgtccgagtccctcggcatgcccagcgaccacctgtacgagatggagtgcacgcagaacctgaacgtggtgtgccagtactacccgccgtgcccggagccgcaccgcaccgtgggcgtcaagaggcacacggaccctggcttcttcaccatcctcctgcaggacggcatgggcggcctgcaggtgcgcctcggcgacgggcagaacggcggctgctgggtggacatcgctccccggcctggggcgctcatggtcaacatcggtgaccttctgcagctcgtgaccaatgaccggttcaggagcgtggagcaccgggtgccggccaacaagagcagcgacacggcgagggtctccgtggcgtccttcttcaacacggacgtgaggaggtccgagaggctgtacggccccattccagaccccagcaagcccccgctgtacaggagcgtcagggcccgagacttcatcgcaaagttcaacaccataggactcgatggccgcgcgctcgaccacttcaggctctagctacctggctacgtttcagattcgtcctttcatttgctttggtctctaattaataattccaaataataagcccgcggatggacctctgtctgtctgtctgtaatttagtttccaagtttaggtagtgtttggttactagggactaaaaattagtctctaaaaccaaacacccccttagtttgttgtggtaataattcctgtatcaattatgtcataaataaaagctagggaaccttgat

SEQ ID NO: 24670 - DNA, 1088 bp, Zea mays; identical to SEQ ID NO: 13948
  Clone ID: LIB3632-058-B10_FLI

SEQ ID NO: 24671 - DNA, 1324 bp, Zea mays
  Clone ID: LIB3632-058-D7_FLI
caagcctcctctccaagcttcgaatcgtagagaaaagcaagcccgcggggccgacccggtcggcatccgaacccaacgcctctgagagccttaaaccccgacccgagcctgtcagactgacatcgctcgaccattttcccatttccattcccatcccaattcccagcggtttcatttccacctcctccttttccaatttcgactcgattcgaaacaggataccaaatgcatgatcgatcccacaagccgcagccggcggaggccggcaacggcgggccggctggcgagggcggcggcgggaacgtggatcgggtgctcttcaagaacctcgtcgagatggtgccgctcgtcgagtcgctcatggaccggagggtcaacccggcatactcgcgtcgcgcttcgctggtctacacgccggcgccgcccaagaaggcaagcgatttgaaaagtgtcaaattgccacagagcgtatcagccaaaaagcggagagaccctggtgatatagccaagaagagcaccccagattctaacggcgacaacggttcagttgtgccattatctctgtcaggtgctgaaaatatgcccaaggatgaggttgctgtgctaagcgagcagatcaatgacctacaaaagaagctgcttgagaaggaggaggcactgaggtctgcggagagctctgtgactgagatgaatgcagcatatgcaactatcgatgaactcagacgcctggtggctgacaaagaagctttgatcagatctaccaattctcagttgcatgatgcaaagattatgcttgcagacaagcaagcgtctttagagaaacttgaatgggaggtgaagatgtcaaataaaaaggtcgaagatcttcaaggagatatgtcgaatatgggattcgagataagctcattgatggtatttttcgaaaaaatttcagagaatgtttcaggtgactcttatgatgatataataccatcatcatatgaattagagacacttcaatcaatgagtgaaattgacaagattgaggtcgacaagctagacaaggaaagggttacatatgctgaagctctggcggcagcgagagagaaccctgacgaggagcacttgaatatagctgcggaggcgaggtcaaggctgcaggtccttgtactttagtgtccccttctgattatagcgtttgtatgataatgttgaactgctgatgtaattgtatgtgttggcttgagttgaggtgctcgtggaatccttccggtgattgattcagcactgtaaactgacagctgtttcatgttgtaaccatatttaaggcatgtttgatttcttt

SEQ ID NO: 24672 - DNA, 1440 bp, Zea mays
  Clone ID: LIB3632-058-F4_FLI
ccagcccccctccctctcctttcttcacttggaaatccatggtgtaggcccagagagatctagctagagtttcctgcatccgcctccgccccccaccgcctccacctccgccccccaccgccccgccccacagcaggaaggatggaagccccgggctccccctacgcctcctcgccggaatccgcccccaagcgtgccccacgctcccctccgcagcagcagcagtctccctccgaggaaggagatgacaaggagaaaccaacacatttgagatttctagtgtctaatacggcagcagggtgcatcattggcaagggtggatcaaccattaatgattttcagtcccagtctggggctcgtattcagttatcacgtagcaatgagtttttccctggtacaaatgacagaatcatcatggtttctggactgtttgatgaagtaatgaaggccatggagctgattcttgagaaactgttggctgagggtgaagaattcaacgaagcagaagctagacctaaagttagacttgtagttcctaatagctcttgtggtggtataattggtaaaggtggagcaacaataagtcgtttattgaagaatcacatgctggaatcaaaatctcgccacaggataacaactatgttggtttgcatgataggcttgttacaatcacagggacctttgataaccaaatgaatgcaatagatttgatactgaaaaagttatctgaggatgttcactatccacctaatttgagctccccatttccttatgcaggccttactttcccaagctaccctggtgttcctgttggttatatgattccacaggtgccatatagtaatgctgtgaactatggacctaataatggttacggaggaaggtatcaaaataacaagccaactacacctatgagatcacctgctagtaatgaagcccaagaatctttgaccattggtatagccgatgaacacattggtgctgttgtaggtcgagcaggaaggaacataacagagatcattcaggctagtggtgctcggatcaagatatcagataggggtgactatatatctgggacatctgacaggaaagtgacgattactggaacacccgaagctatccggaccgcggagtccatgatcatgcagagggtgtcagccagttcagagaggtgatgagccccttctgaaggaagggcgtaggccattgctgtgtccgagcacagcagcgtgtttgatgcaagttaggaggatgtgggaactgctttccttttattttccccccttttttcttttttcctagcaagctcgagcagaaaaaagaaacaagctgttattgtttgttgcattgcgtccaaccgatggttttatgttagtataaactgctagtcgaagataattaggtgcagcgtttgaattgatttgggtttacggttgagtt

SEQ ID NO: 24673 - DNA, 703 bp, Zea mays
  Clone ID: LIB3632-058-F7_FLI
gagagtctcgaccaacccatacgcacctaccctccgccaccgttcccccctccccatctcgcccgccgttctcgtccttgtagatctcctcgcacctcgcccattcgcttcaccaagggtttaagaccggcggcgatggcggcgaagctggcgcagctgcgcacacaggtaacgcgtgcggcggagttcgcttcgaagcacggctgctcctactacaaggaggtaatggagaagaacaagcagtacgtcgttcagccccccaccgtcgagaagtgccaggagctctccaagcagctcttttacacccgcctcgcaagcctaccaggtcgctatgagtcattctggaaggagcttgattgtgtcaagcaggtatggaagaacaggaaggacctcacggtcgaggaccttggcattgcgagtttatttggagttgagctctatgcatggttctgcataggcgagattgtcggcagaggtttcaccttgaccggctataaggtctagatgatttccactggtcaagacctgctttataattgatactcttagctgatgcttgtcgaaacgacgacgatggtacctgccttggttcacaattttgtttctttgtaagagtttacctagtgctgaatgccagcaaagacgggcacatcgttgcaacattgcctcaataatttgctcgctcaattgttgattttggtgc

SEQ ID NO: 24674 - DNA, 2045 bp, Zea mays
  Clone ID: LIB3632-059-A7_FLI
ttcgttcgctcgtccacatccatcgcccccctccctctcgctcctttccccccgccttcccctcccggatccccttgggcagccggatccggcgaggcagaaggcgcggctcccacagatccgaggcgcctccgctggggactcgtccggtttcggtgggctcgaccttacaggcggggggcgtaattctgacaggacgacggagccgggtggtgcatgagcgctgagaggccccgccgccgctctgcgtaggagcacggtgcgccgccgtgaggcgccatgatcgagcagttcgttaatttcgtcatccggccgccccggtcagaatataatccagatcagtatctatgggagaaagagtttatccttgctggacgtaaatacaaacgactagacttggagcttacaaatgcaagaggctatatcttaaaatgcagccactatgttcctgcttttatcccagagaatactgccctcccatgtgtggtctattgccatggaaatagcggatgccgagcagatgcaaatgaagccgctgttatacttcttccttcaaatatcactgttttcacacttgacttttctgggtcaggtctatccggcggggattatgtcagtttgggttggcatgagaaagaagacctcaaatgtgcggtgtcatgtcttcgggacaataaacaagtttccactataggcctttgggggcgatcaatgggtgccgttacatgcctactctatggagcagaggacccttctattggtggcatgatattggatagtgccttcactaacctgtatgacttgatgatggaacttgttgacgtttacaaaattcgagttcctaaattcacggttaagatggctgtacagtacatgcggcgaatcattcagaaaagagctaagtttgacataatggatctaaatgttttaaggttggctcccaagatgtttatccctgtactatttggacatggtctgaatgatatgtttattcagcctcaccattgtgatcgtattcaccaggcatatgggggggataaaaatataattaaatttgatggtgatcataattctccaagacctcaatcatattatgattcagtttctatattcttctacaaatctttgcatcctcctctgctgcctgcagcacgatcaaagcttcatatgggagcatttaaagttggtaacataaccaatgagaatttcttctttgaaatcatcaatggtctacggccagcaaacactgcaggttgcagttcatcaaccgatgcacctaacatcccacatgatggcacatctgtaattgaattgttgtctgatagcatgaaccaactgtccattaagaatgagaatcacttggactttcttttagatgaaaaccacagcctgccagagattgatagtgatagtgttggatcacgattgcaggataaaagaagtaggcgcaatgaggagtcattttcattcacaagctctaacagagaaagttggggcagatgttcatctttaggagcagccagtgatgaatcattctcaggcgataataatgataagcagaatttgacagtcaaggctttggctacgcctgtaagacaaaaccagaggcaaagccagaggaaaccgattgagaaagctaagcagaagaagattcaagccctatggaagatgtgcctagggcaatctccgcagcacaagaggaatagatcgtctggaaccattacaacttcatagctctgacaactctactgaaccactgattgtccaccatagattctcccttattctgacctactcattgccacgttgtaacctatataccctaggtgaatatatgctacatgaccgcattgtagcatgccaggatgttcgaaagctgagaaagcacttgtatcatctcttgtaattgcctgaaacaagtgtaattgccatctctggctcgttgtcgcatgcaatttcctttcccctcttgcatcctgtgggccttgtatcatctcctgtaattgcctgaaacaagtgtaagtgccatctctggttcgttgttg

SEQ ID NO: 24675 - DNA, 981 bp, Zea mays
  Clone ID: LIB3632-060-B1_FLI
gaaaactcttcattctcctctcctccgccgcgccgccaacttcccctcccgtcaactccggctcccgcgcgagatcgagctagcgtttggggttctcgagaccggctgccatggcgacagagcaagaggcggagaactacacggtggaggaccttgtggccctgaatccgtacaaccccgacatcctcaacgaccttgagaagttcgtcaacgagcaagttgcgtctcaaacatataacttggatgcaaatctcagccttcttcgcctgtaccagtttgagccaggaaggatgagcatacatattgtggcccacatactgatcaaggctctcatggcaatgccggcccctgacttcagtctttgcttattcttaattcctgaacatgtgcaaatggaagagcaattcaaggcattgatagttctttctcactatctagagactgctaggttcaggcagttttgggatgacgcagcaaacaaccgccacatattggaagcagttccaggttttgagcaggcaatccaatcctatgcaattcatgtactttccttgacataccagaaagttccaaggcatattcttgcagaggcaatcaacattgaaggtctcgctttggacaagtttcttgagtaccatgctgcgaactcaggttgggtaattgagaagggtgggcagtctcaagtgattgttcttccacgcaatgagttcaatcacccccagctcaagaagaacacagctgataccgttccatttgagcacctaacacgcatattccctgttcttagctgattcaggcgtagtgagagatatacaatagaactcagagcgagtgaagcttctctaagcaattgtatcatctcctttgtggtataccgtattttaagatctcggtatacctgttcttttttatggctgaattggtacctgcaacttggttattactataacgaaatgaccagttatgagattggtcggccct

SEQ ID NO: 24676 - DNA, 938 bp, Zea mays
  Clone ID: LIB3632-060-E5_FLI
cccctgaaaaaaaaattattcatggatcctccaatgcatgcagaaagacatctggaacgacgaggaagacagtgttctgatacaagcgcacaaggaggtaggcaacagatgggccgagatagccaagcggctgccgggccggacagagaactccatcaagaaccactggaacgcaaccaagaggaggcagttcgcacggaggcggagccgtgccagcgcctccacctccacctccaagggccctcctaaaccaggcacccttctgcagaactacatcaaaggcctcggtattggcccagtaagcaaccggagcgccgcaccgcttcctgagcctaccacaccgccgccgccgccgccgtcttcgcctgaaactcccggcggggcgaggtcagcgaagcaggctggtgaaagtaccacgctggaggtggaacgccgcagcccgtcgtgcgacgtgctggtggattcttcccagtgcaccaccattcttccacctactagcgtgcatgggtacgacgagtacagcaactgcagcggcgagtcccaccagtcctgcgaggtgctcctcgcccctatcatcagctgtggcgacgacgcgttctcggttggaatgtgcggcggcggcggcggcctgttcgacacggacgacgcggacgccttcttgcaagcgtacggcgtggccgccgacgacgtcgtcgacggcatcggcatgggctactacgtcttcaacgacggccatgtcgaccacgcggccacggtcgacgctgagatcgacatggagacgatgatgatgatgtgggacgacgacgacgactacgccgccgccctagggttagggtgtgctgctgggccggctggtgtggagagtgctgtgcgcgtgaaggaggagatggacctgcaggtggagacgatggtggcggccacgcacaagtgcggcgatg

SEQ ID NO: 24677 - DNA, 884 bp, Zea mays
  Clone ID: LIB3632-060-F6_FLI
ccagaagagcggcggcgcgggcggacaaggagcaggcggaggaggagttgtgccaagccacaatgggtatctcgcgtgactcgatgcacaagcgccgagccaccggtggaaagcagaaggcctggaggaagaagcgaaagtatgagcttggtcgccagccagccaacaccaagttgtcaagcaataagacagtgaggagggtccgtgttcgtggaggtaatgtgaaatggagggctcttcgccttgatactggtaactactcatggggaagtgaagctgttacccgcaagacccgtatcctcgacgtggtctacaatgcatcaaacaatgagcttgtgaggacacaaacccttgtgaagagtgccattgtgcaagttgatgctgccccattcaagcagtggtacctcactcactatggagttgacattggtaggaagaagaaaacccctgctgcaaagaaggataatgctgagggacaagaggttgaggcagcagctgaggaaacgaaaaagagcaaccatgtcacgaggaagcttgagaagcgcaaggagggacgtacccttgacccacacattgaggagcaatttggcagtggacggttgctggcatgcatttcttcccgccctggacagtgtggccgagctgatgggtacatccttgagggtaaagagcttgagttctacatgaagaagctacagaggaagaagggcaagagcgctgtagcttagagcattctcatggattgtcttgcaccgaaatgtgtgtcctgatgagtacactttttttggttagtcgtctcaagttcagagcgttatgccatgttttcagtcctgattagtacactgttttctaaaagcgattgagctctagtccaatgtattgat

SEQ ID NO: 24678 - DNA, 1155 bp, Zea mays
  Clone ID: LIB3633-002-A2_FLI
ggacactgcggccgggcgatggcgagcgtggagggcaagagggagacggtgctggtcaccggcgccagcggcttcatcggatcgaccctcgtcggcctcctcctcgaccgcggctacaacgtccacgccagcgtcctcaaccccgatgacaaggcggagacggagcacctggtcgccctgggagccggcgccggcgagggccggctgcgagtcttcccgggcgacctcctcgacggcgccgcgctcatggccgccgcgcggggctgctcgggcgtgttccacctcgccaccccctgcaccgtctaccccgtgagcgacccgcaggggcagatggtggtgccggcggtggagggcacgctcaacgtcctgcgcgccgccaaggaggcccgcaccgtgcggcgggtggtggtcacctcgtccagctccgccatcatacccagccccgcgtggcccgccggcgagccccgcgacgagcggtgctgggccgacgtcgactactgcaagaagaacgaggtctggtaccctgtttccaagacgctggcagagaaggcggcgtggaggtttgcggaggagaacggggtagacgtggttgtcgtcaacccggtgactgccatgggcccaatgattccgcccaccatcaactgcagcatgatcgtgctcctacgcctgctacaaggttgcacggaggagtacagggacatctggatgggggcggtgcatgtgcacgacgccgccatggcgcatatcctggtgttcgagagcccggcagcgtccgggaggcacatctgcgcccagtccatctcccactggagcgacttcgcggccaaggtcgccgagctgtaccctgagtacaaggtgcccaagttccccaaggatacccagcctgggctggtgcgacagggagccgaggaggggtccaagaagctcgtcgcgttggggctgcacttcagccctctggagaagatcatcagggacgctgtggaggccctcaagagcagaggctacatttcgtagctagccgaccgacggcagctatagtggagtagtatgcctgtcgaatttcgattcccaagtggcaaattctgcaaaacgagttcgccaatatgaacaataaataaagaacgttgtgataaaataaagcagattttctgttgc

SEQ ID NO: 24679 - DNA, 1468 bp, Zea mays
  Clone ID: LIB3633-002-B11_FLI
atccccctgtcccgctaggattcccccgaaaccctcccccaaaaccccagagcggagaagagcgcaagatgttcggcttcgggcaccacggccaccacggccagaacccgccggcgcacggcggcgtgcaccagcccaccttcaagatcttctgcaaggccgacgaggggtactgcctcaccgtccgcgacggcaacgtggtgctggcccccgccaacccgcgcgacgagcaccagcactggtacaaggacatgcgcttcagcacccaggtcaaggacgaggagggcaaccctgcgttcgccctcgtcaacaaggccactgggctcgccatcaagcactccctcggccagtcccacccggtgaagctggtgccgttcaacccggagtaccaggacgagtcggtgctgtggacggagagcggcgacgtgggcaagggcttccgctgcatccgcatggtgaacaacatccgcctcaacttcgacgccttccacggcgacaagggccacggcggcgtgcacgacggcaccaccgtggtgctgtgggagtgggccaagggagacaaccagagctggaagatcctgccctggggcgacgaagcctacgccgcgggaggcagcagcgccgccaacgcgccccgcttcggcggcggcggcgagcccaccgtccgcatctactgcaaggccgacgaggggttcagcgccacggtccgcaacggcgccgtgtgcctcgcgcccaccaacccgcgcgacgagtaccagcactggatcaaggacatgcgccacagcaacagcgtcaaggacgaggaagggtacccggccttcgcgctcgtcaacagggtcaccggcgaggccatcaagcactcccagggcgagggccacccggtcaagctggtgccctacaaccccggctaccaggacgagtcggtgctgtggacggagagccgcgacgtcggccacggcttccgctgcgtccgcatggtcaacaacatctacctcaacttcgacgccttccacggcgacaaggaccacggcggcgtgcgcgacggcaccaacatcgtgctctggaagtggtgcgagggcgacaaccagcgctggaagatcgtcccctggtaaatgtgctgttctgtggctgcaatggtcatcaccatgatctggagctttgaaggcatagccacctgtggtcagcagctgctgccgtgttgctagaataaagttggtggcgatcgatcgatcgatctttggtgatgggtgtccctccctgtgtgtttgtgtttagttccagtcgtttgtgaggaagtcagttatgtttgagtgagaggggtacttcgctcttcggttaactctgtacttgtcatgaggagagttttcatacccggagtgtagaactctgtactgtactcggatccttccttttccatccaagtgggttttattttatcaaccgtatctatactcgtggttttgctgtt

SEQ ID NO: 24680 - DNA, 1090 bp, Zea mays; identical to SEQ ID NO: 24227
  Clone ID: LIB3633-002-C12_FLI

SEQ ID NO: 24681 - DNA, 1408 bp, Zea mays
  Clone ID: LIB3633-002-E9_FLI
ttcacacggggttcatggaaaagggtccggacatggcaagggccgtggcaagaaacagccgaagaaggaggtggttgacttggagactctcctcgtccactgtgctcagtctgtggccaccgatgatcgacgtggtgcaactgagctcctgaagcagatcagacagcatgcatcgcccaatggcgacggtgaccagcgtttggcgcactgcttcgccaacggccttgaggcgaggcttgctggcaatggaagtcagatttacaagtctcttataatgacgaggtttccctgcaccgatgtgctgaaagcctaccagctttacttggcagcttgcccattcaagaagatctcccatttctttgccaatcaaaccattatgaatgctgtggagaaggcgaagaaagtccacatcgtggactatggtatatactacggctttcagtggccgtgcctcattcaacggctctctaccaggcctggtggccctccgaggctccggatcacggcaatcgacacaccgcaccctggttttcgcccagcagagcgcatagaggagacgggaaggtatctaaaagattatgctgagaccttcaatgtgcccttcgagttccgagccattccatctaggttcgaggcggttcagatagaggatctccacattgccaaggacgagctgctgatcgtcaacagcatgttcaaattcaagacactgatggacgagagcgtggtggctgagagtccaaggaacatggtcttgagcacaatcaggaagatgaacccacatctgttcattcatgggatcatcaatggctcctacaacgcacccttctttgcgtctcgcttccgggaggccttataccactactccgccatctttgacatgctggagacgaacatcccgagggacaacgagcagaggctgctcatcgagtcagcactgttcggtcgagaggcaatcaacgtaatctcctgcgagggcctggaaaggatggagaggcccgagacatacaagcagtggcaggtgaggtatcagagagctgggttcaggcagctcccgatcaaccaggacatcatgaagcgtgctcgcgagaaggtcaggtgctaccacaaggacttcctcatcgacgaagacaacaggtggttactgcaagggtggaaaggacgcatcgtgctggcgctctcaacgtggaagccagatcacaggtcttcctagctcctcctcgagggcggctacatggttgcagatcgagcactgcactgtagatggatggaggcctgttcgtatctttggatgcttgggctggttgttcctgggatgcaacatatagctaggctaggctgtgctattcgaactactaaagcatgttttgcactgtctttatatagtgatgccatcaagggtccctgt

SEQ ID NO: 24682 - DNA, 987 bp, Zea mays
  Clone ID: LIB3633-002-F10_FLI
ccgccaccaggtgcagagtctttcgtcatctcttctccggcgaagaacccccagtcgcccaccagatcacttgttaaactttgttgaggggtgatggcggtttctttcgcaaacctcagctccgaggcagggcttaaaaagcttgatgagtaccttctcactcgcagctacatcactggctaccaagcttccaaggatgacttggctgtctacacttcgttttcgtctgctccctcgtccaagtatatcaacgtagcaaggtggtttaatcacattgatgcgctcgtgaggctgagcggaattactgcagagggccaaggtgtgaaggttgaatcgtcagcagttccttcagccccaactccagatgttgctgaagcacaggccccagttgctgaggaggacgacgacgatgatgttgacctttttggtgaggagaccgaagatgagaagaaggctgctgaagagcgtgctgcagctgccaaggcttctggcaagaagaaagaatctgggaagtcatcagttttacttgatgtgaagccatgggacgatgagactgacatggccaagctcgaggaagctgttaggagtgtccagatggaagggttgctctggggcgcatccaagcttgtcccagttggatatggtatcaagaagctgcaaatcatgatgaccatcgtcgacgaccttgtctctgtcgacactctcattgaggactatctgtgcgctgagccagttaacgagtacgtacagagttgcgacatagttgccttcaacaagatctaggcgtgactttcgatcagtccttcccctggggtgctggcgatggtggtggctgggcaatgcaccagcctaatttatccatagctatatgtctgctttgtgtggccagtgatattgccgtgagtatttttggatcctattcgagtcgaatgtaccagtaccagagttaatttgctttaattcgaaacaccgttccagttggaattc

SEQ ID NO: 24683 - DNA, 1094 bp, Zea mays
  Clone ID: LIB3634-001-A11_FLI
cgcaggcagaggcaccataccagtcaaccaccaccgcttcgttctcctcccacaccgctcgccttcgcctccttctggttcccatcttctatcatccccgagctccagttctccacacctcacgtctataaataataaataaggcgcccgcggtgcccatcaattcgtgtcaccgcgtcccgagagcgcaaatcattccgcgcgacgcaaaaaccctagcccagccaccgatccctctcatggcaaccaccaccacccaggcgagcctcctcctccagaagcagctaagagatctcgcgaagcacccggtggatgggttctctgctgggctggtcgacgacagcaatgtcttcgagtggcaggtcaccatcatcggaccgcctgacactctatatgatggaggttacttcaatgcaataatgagcttcccacaaaattacccaaacagcccgccatcagtcagatttacctctgaaatgtggcatccaaatgtctatcctgatgggcgggtttgtatctctattcttcatccacctggtgaagatccaaacggttatgagctcgcaagtgagcgatggacacctgtgcacacagtagaaagcatagttctgagcattatatcaatgctctctagtccaaatgatgagtctccagcaaacattgaggcagctaaggaatggagggaacagagggaggatttcaagaaaaaggttaggcgcatcgtgcggaaatcacaggaaatgttctgaaggaaatgggagtcctggtgaagttaaccatgccatgtcaggctgcaggattttgctgccaatctcaaagtgctcatctgacaccagcgtcttgtgtattttccatttatcatctgttcattggtgacaattgcctccagaaatgcaatgggacgtggtcggcttgaaggttctgcttgtgtcgtgtggcttgcgctctactaatgtttggcaaacctgaagtggtaccggttatcgtaaatttggtggtgaacctggcataagcaggcaccattcatgtcagctagccgttttgaaaacatatcagcccttgttggtttcttatcaaaatcaattggttggagg

SEQ ID NO: 24684 - DNA, 1094 bp, Zea mays
  Clone ID: LIB3634-001-C4_FLI
gcctcccaagtcccacccccactccctcgctcaccagaggaactagcggaccaggcaaagccgagccgcaccgcaaccgcgaagatcttgcgtggcctccttttcccagctcgtcactgtgccgctcgtgccctacactcccggtccgcccaaccaataatccatccatccatccatccaccaccaccccgctgcggcgatgtgcggcggcgccatcctctcgggtttcatcccgccgtccggggtggcggcggcggcggcggcggccaagaagcagcagcagcagcagcagcggtgccgtgtgactgcggacctgctatggccggggcccggcagtaagggagctccccaggacaaggaggaggacttcgaggccgacttccgcgagttcgagcgcggcctcggcgaggatgacgtggacagcgccggcgaaggcggcgaccccgaggtccaggagcttcctccgccggagccgacgaggtttgccttcgccaccgcggccaaggcggcagttgatggcgtgatgactcctcctccaaaggatgtccaaggagatagagcagtaaaaaagcgcggccggaagaaccagtacaggggaatcaggcagcggccttggggcaaatgggcagctgagatcagggaccctaacaagggcgtccgcgtctggctcggaacctacaacaccgccgaggaggcagctagggcatacgacgccgaagctcgcaagatccgcggcaagaaagcgaaggtgaattttcccgatgacgcgacaggcactcgtcacaggccaacgaccgatgagatctttaacaacctgaagaacgacgacaacaacaacaacgatgatctgtttgcgatgtttgcgttcggtgacaataagaagaaggttcctgcagcgaagccagccgccgccgagggtggcagtggcagtggcagcttcctcgtccctgcgcctgcggtggcggtggtgcccggtaataagaggaggtcgtccgcgaccaacactatgctctccgtctccgacgaccagcgcagcaactcctacggctccggctcctccgacttggtggggtcgtggtcgtgggacgacgacg

SEQ ID NO: 24685 - DNA, 1428 bp, Zea mays
  Clone ID: LIB3634-001-C7_FLI
caataggacgatcgagcaagaagcaagcagcagtaacaagaaaccatcatcgatccatgtatccaccaatggcggcgctcggaggacggcggaggagggcgtcgtcagcggccctccagctagccttgtttgcggtggccctggtctccctggccggcccagccacggccgcggggaacaagaccgggcaggtgaccgtgttctggggccggaacaaggccgagggcacgctgcgcgaggcctgcgactcgggcctctacaccatggtgatcatgtccttcctcgacgtctacggcccgcagcgcggcggctaccagtaccacctggacctgtcgggccacccgacggccggcatcggggacgacatcaagcactgccagttcgtgggcgtgccggtgacgctctccgtcggcggcttcggctccggctactcgctcccgtcgacgcaggcggcgctggacctgttcgactacctctggaacgccttcctcggcgggtcgaagccgggcgtgcgccgccccttcggcgacgcgtggctcgacggcgtcgacctgttcctggagcgcggctcgcccgccgaccgctacgacgtgctggcgctcgagctcgccaagcacaacatccgcggcgggcccggcaagccgctgcacctgacggccacgccgcgctgcgggttcccgcccgccggctacctgcgccgcgcgctcgacacgggcatcttcgagcgcgtccacgtccggatctacgacgacgccgactgcgaggccaggtggcacctcgcgtgggacgagtggacggcggcgtacccggccaccaggttctacgtcggcctcacggcgtcggagatgacgcacggctgggtgcaccccaagaacgtctactacgacgtcgcgccgtccgcgcagaaggcggacaactacggcggcttcatgatctgggaccgctactacgacaaactctccaactacaccagcatggtcaaggactacgcttgattggatttctcgactcagttcagagcagacatgcatgctagctgcgtcagccgcttcgatctagctcaccgacctatataagccgaagtactgtgtagtgtgtttgcattttattgtaagaaactaagaaggaataaattggcgaataaacaagagtaaaatacaccgggttgttgagtgaaattcagcattaagggtgtgtttgtttcagcttatagattatataatctggattataatttaaattatataatttagattataatctagatatattataatctatatgtagttgtttgctagtctagattatacaaatgtagattattcataaagacagcagtacccttgtttgtttatgtgaggtgagaaaagaaggatggtatatattgtaatttctatttacataacaatgggtagtgggacttttgcc

SEQ ID NO: 24686 - DNA, 971 bp, Zea mays
  Clone ID: LIB3634-001-E8_FLI
cgacgatcgagaaaatcctagggttttcctctctcgccgccgccgacttaaagaggacagaggagtaggcgaagtagcgccgggagagtaacatgggcacgccggagacgtcgcgggagccgtgcccggaccggatcctggacgacgtcggcggcgcgttcgggatgggcgccgttggcggctccgcttatcacttcatcaagggcatctacaactcccccaacgggatgcgcctgtccggaggcgcgcagaccgtgcgcatgaacgcgccgcgcgtggggggcagcttcgccgtctggggcggcctcttctccaccttcgactgcgccatggtgtacgcgcgccagaaggaggacccttggaactccatcgttgcgggcgcagccacgggcgggttcctctctatgcgccagggcatgggggccgcgggccggtccgcgctcatgggcggcatcctgctggccctcatcgagggcgccggactcatgctcaaccgcgtcctcgccaacccgccgctgcccgccgacgatcccaaccttacagcggccatgggcggcaaccctttcccgggcctgccgcaggcgccgccggtcgtggcacctccggaagcgacgacctccagcggcgtgggtggcttgttcgggggactgtttggcaggaaggaggaggagaagaaacccagcgcaggcgggggcaagtcggagatcttagagagcttcgatacgcccagcagtccgataccatcgttcgagtacaagtgaggaaaaggtgcgatgtgtagttaattgcagttttgtttggatttagaaaaggtgtgatatatattcgattattaagttcgtgattgtttttcccttttttgtttgtcctgtaagcgtgagtaggcaacgtccatctgtgtgcaccagataggttgcatagggattatgattgtgttctgccgtggaagttagaaattgcttgggttcagc

SEQ ID NO: 24687 - DNA, 599 bp, Zea mays
  Clone ID: LIB3634-002-A2_FLI
acgacttgtttcattgattcttgaagagatcgagcttcttttgcaccacaaggtcgaggatgtcttgcaactgcggatcaagctgcggctgcggctcaagctgcaagtgcggcaagaagtaccctgacctggaggagacgagcaccgccgcgcaggccaccgtcgtcctcggcgtggccccggagaagaaggccgcgcccgagttcgtcgaggccgcggcggagtccggcgaggccgcccacggctgcagctgcggtggcaactgcaagtgcgacccctgcaactgctgatcacatcgatcgacgaccatggatatgattattatctatctagcttgtggtggtggttgaacaataataagcgaggccgagctggctgccatacataggtattgtgtggtgtgtgtgagagagagagaaacagagttcttcagtttgctatctctctctgcatgtttggcgtcagtctttgtgctcatgtacgtacgtgtgtctacctgcatgttggttgatccgattgcatctgctgtaaccatatattaattggtccacgatgatatgatttgatactatatatatactaaaaccggacttcttatt

SEQ ID NO: 24688 - DNA, 677 bp, Zea mays
  Clone ID: LIB3634-002-B7_FLI
cacaaacataacagtcttacagtacgtagcagcagcctagcacgacgatggtgtccggcagcatcagcgaggagatcgccgtggccgtcccggcggagcgcatgtggaaggtggccttcgccgagaccaagtcggcgctcctgcccaaggcctgcgccggctacgtggacgccgtcgaggtcgacggcgacggcgggcccggcagcgttaccaccatgaagcttaacccatcgctgggtgagaacaagacgctcaagagccgcgtggtggcgttggacgccgcggcgcgcgtggtgaggacggaggtgctgcagggcggcacggtgagcgcgcagctcaggacgcacttcgccgagatcagggtggaggccgccggcgagggcgcctgcgtcgccaaggtcaaggtcgactacgagcgcctcgacggcgcgccgctcgcgcccgaggacgaggccaggctcgcgcaggggtacgtccgcctcgtcaggatggtggaggcatacctcgtcgcgcaccccgacgagttcgcctgagccgccacctttcctacgtacgtgtatgatcatgccatatggccgtgagtgttttggtttggaataacgggaggaaaggctcctctgtttggttgcttcaattcgcttcgaatcgagtatagaccgacgtttgtgagttggtgt

SEQ ID NO: 24689 - DNA, 2640 bp, Zea mays
  Clone ID: LIB3634-002-C6_FLI
gtccccatcgagcgctcccctcgctgcccgggtctcccccaccctttcgcttcgccgcctccggggttctccgcgccgtgcattgattctaatgggaaagttcgcataactgaaactttgccgtggatcttgtgaattttagtgggaatttgatcgtggaaagtttatgaagttttgttgggattatggatgcataagatagtggtgtatgtgatttgcccatagtttctgcagcctcattgttttccatttgggatcaataaaacttcatgctcatggatagggctgatacatcaggttttgtcagtggtggtatacattacatgaacatccatgtgtattttcattttgtgtatactatgtgcttcctcagtggtgaagttgtaaagctggagttctgatctctgttggttggattaagtatctggtctctggataacatataaatttcttcctatcataatcctaccttatttataataagcaggatggaccttaataggacaaatctttggtttcatggaaaggaacatatagctactgcttcattctcccaggcccaaccatctgccataaattgcaggaatgaagaactatctatgtcagccgtgaacttgggttacattaggagctcagaaatagcacagaactctagaaaatcatttcagcatggcgatcaaagtttgaccgctccagatgatagctgcaggctggcccttggacttgggccaacaccaaatctatattctgctgatagtcactcatttggtggaaacaaagcttatcaatcagcaactttgctcagtcaacattgtgccacaaccgatcctggtttaatgttgggtctttcaagatgtagctcaagaaatttgcaatctacaagggcgagtggcagcaagaattattcacctgcaaggaagactggtatcatcttaccacttattgatgagggatcaacttcagcaaaaaggaaaaaaggtggctatttgctaccacttctgtttgtgccaagatcagaagatctttgtcttaatggaacatctacagacaccgatgcccaacaacatattggaactgaatgtgatactgaaagcggtcataatagatctctgaatcttcacgagattcagcctagcgctgatctatccattacagctggttgttcttttgctgcaacttctgatgtagtagccgatacaagtgatgagcagaggagtcatcagcgccatccaaagaaatgcaggttcaatggttgctcgaaaggtgcaagggatgcatcaggactttgcatttctcatggcggtggccagaggtgccagaagcctggttgcaacaaaggtgctgagagtcgaacggctttctgcaaagctcatggaggagggagacgctgccaggagctaggctgcaccaaaagcgccgaagggaagacagagttctgtattgctcatggtggtgggcgccggtgtgggattgaggaatgcccaagagcggcaagggggaagtctggattctgcataaaacatggtggagggaaaaggtgcaggatagagggctgcactcgtagtgctgaaggccatcctgggttgtgcatctcacatggaggtggtcgccggtgccagtacccaaactgtgataagggggcccaaggaagcaccatcttttgcaagtcccatggtggaggcaagaggtgcatgtttgatggctgtaccagaggagcagagggcagcacgtccttctgcaaagggcatggtggcggtaagaggtgcctctttgagggaggtgggatgtgcccaaagagcgtccatggtggaaccagcttctgtgttgcgcatggagggggcaaacgctgctctgttcccgggtgcaccaagagtgcccgcggtcgctctgattgctgtgtgaagcacggtggtggcaagcgttgcaggttcgatgggtgtgacaagagcgcacaggggagcactgacttctgcaaggctcatggagggggcaagcgatgcgcttggagcaccggctgcgacaagttcgctaggggaaggagtggcctatgcgcagcgcatacgaccctgatggcttccaaggtagtgcaccatcctggacatgcacgaagcatggtcgggccttgccacttcagcggcggcgtctctggttcgtcagcagctgatagcaacatggatcatgccatctcgtcatccggccatggcgcatggtcagactgcgtcgactcgtcgagagacatgcagagcgccggcaggctcctaataccacgtcaggtgcttgtccctggttcactgaaggacgctccttcgtgtggtctagcaggcaacggccaggacgacggagggagccggaaccagagctgtgggctcgtggtgcctgagggaagggttcacggtggagggctgatgtccatgcttggagttggaggcaacctgggaagcaatcctgatggttcgaaagcctgaaataccaaggatgagacgtagaagcacataatttaggttattttgcatgcctctgttatgattcttgcaatggaacatatacatgaatcttcaaatggccattgtgtaactatagtgcttgccaattggccattgtagtatttgctatgtacaagagtggttttggcatctagtc

SEQ ID NO: 24690 - DNA, 1098 bp, Zea mays
  Clone ID: LIB3634-002-C7_FLI
caccgggcacaccccccgagctcagcttagctccactccagctccaatcacagtcgtgaccagagcgcgagagctagctagagggccgtgaaaatgccgatcaataggatcgccctggggagccaccaggaggtgtaccacccgggcgccctcaaggcggcgttcgctgagttcatctccaccctcatcttcgtcttcgccggccagggctccggcatggccttcagcaagctgaccggcggcggcccgacgaccccggcgggcctgatcgcggcggcggtggcgcacgcgttcgcgctgttcgtggcggtgtcggtgggcgcgaacatctccggcgggcacgtgaacccggccgtgaccttcggcgccttcgtgggcggcaacatcaccctgttccgagggctcctgtactgggtggcgcagctgctggggtccaccgtggcgtgcttcctgctccgcttctcgacgggcgggcaggccacgggcaccttcgggctgacgggcgtgtcggtgtgggaggcgctggtgctggagatcgtgatgaccttcgggctggtgtacacggtgtacgcgacggcggtggacccgaagaagggcagcctgggcaccatcgcccccattgccatcggcttcatcgtgggggccaacatcctggtgggcggcgccttcgacggcgcgtccatgaaccccgccgtgtccttcggccccgccctcgtcagctgggagtggggctaccagtgggtgtactgggtcggccccctcatcggcggcggcctcgccggcgtcatctacgagctgctcttcatctcccacacccacgagcagctcccctccaccgactactaaaagccgaagccgaccgacccaggggtgcgcagcgcagcgcagctagcatccagcgctctctccccgctcgccgccgtttagtttctctcgtgcacgtgcatgcatcgtagactgtctcaggccgccgctgcgccggcgccgctcgcatcgtttgcttccttggaccagcagtcgtcgccgtcaggctgaactgcttgtaaccgtgaattccggacccgtttgcttctgtaagatttgtgcatttgcctgagt

SEQ ID NO: 24691 - DNA, 973 bp, Zea mays
  Clone ID: LIB3634-002-C8_FLI
ttttgattttagccgccgccgctgctcatctcacatccctcgagaagacgcctgctcctcgccgatcgatacgatggccgtcttctccgacctccacaccgccgacggcctcaagtccctcgaggctcacctcgccggcaaaacctatgtgtctggtgactccattactaaggatgacattaaggtcttcgccgcggtgccgtcgaagcctggcgctgagtttcctaatgccgcccgctggtacgagaccgtctctgcggctgtagcctcaagattccctggtaaggctgttggtgtaaatctgcctgcgggatcagctcctgcggcagctgctcctgcggatgaggctgaggatgatgatgaccttgatctttttggtgatgaaactgaggaggacaagaaggcagctgatgagcgtgctgccgctgccaaggcctcttctaaaaagaaagaaagtggtaaatcctccgtccttatggatgtaaaaccatgggacgatgagactgatatgaagaagctggaggaggctgtccgcagtgtccagatggagggtctgacttggggagcatcaaagcttgtgcctgttggatacggcatcaagaagatgactatcatgttgacaattgtcgacgatcttgtgtccatcgacactctaattgaggaccaccttacgcaagagcccatcaatgagtacgtccagagttgcgacattgtggctttcaacaagatctagagttcagtttctgagtttgggcaacggcagcggctcagctcgtcaagtttgtgctgggatgccagtttatcccttctagtctattacagaaacgttgttcggagctgagtctattataaacatcttggtctgagtttattgttgagtggtgccagtttttttcaatatacatttatcttaaaaacagcggtactgatgtttttttgtctaaagttaatgagtttgcaatggttctgagtc

SEQ ID NO: 24692 - DNA, 1345 bp, Zea mays
  Clone ID: LIB3634-002-D3_FLI
gttcgttctgcgcgggaaccgccgatgggggacgccgtggaggacatcgtcatcgccggcgcgggcctcgccggcctcgcgacggcgctcgggctacacaggaaaggggtgaggtgcctggtgctggagtcgtcgccggcgctgcgcgcgtcggggttcgcgttcaccacgtggaccaacgccttccgcgccctggatgccctcggcgtcggggacaagatccgggagcaccatttgctctacgagcggatgatcgccttctctgcagctactggtgaagcagctgcagaagtgagcctaaagattcagagcaaaagcgggccacacgagatccggtgcgtgaagcgggacttcctgctgcggacgctggccgacgagctgccggagggcaccatcaggtactcggccaaggttgtcgccatggaggaagacggcgtcggcggcgccaagaccctgcagctgcacctggcagacggttccaccataaaggccaaggtcgtgatcgggtgcgacggcgtgaactccgtggtggcccagtggctgggcctgccgaagccgatcctgtcggggcgctcggccaccaggggcctcgccgagtacccgggcggccacggcttcggccccgagatcctgcagttcatcggccacggcttccgctccggcgtgctgccctgctccgacacctccgtctactggaactacacctggtacccgtcccccgcggacggcgacgccgaggagagcgtggccaagatgcggagccacgtggtcgccaagctgcggggcgccaaggtcccggccgaggcgctggaggtggtggagcggagcgagatgagcgacgtggcgtcgtcgccgctgcggttccggtccccgctggcgctggtccgcggcagcatcagccgcggcggcgtgtgcgtggcgggcgacgcgctgcaccccatgacgccggagctcgggcagggcgggtgcgcggcgctcgaggacggcgtcgtcctggcccggtgcctgggcaaggccttcgccctgctcggccaggagcgggatgaggggcgggtcgtcacggcggcgctggaggagtacgcggcggcgaggcggtggcgcagcatccagctcatcaccgccgcctacgtcgtcggcttcatccagcagagcaacaacgccgtggtcaggttcgtcagggacaggttcctgtctcggctgctgtccaagacgctggtcgccatggcggactacgactgtggggcgctatgatctgccggctgccgcccctggactggtctgcaagcaatctacgcagcacactcgttctagaaaaactaacgtaataaatcgctggtgtcaagtc

SEQ ID NO: 24693 - DNA, 969 bp, Zea mays
  Clone ID: LIB3634-002-D9_FLI
cgcgtttccaacaggccagtcccctcccactcccagtcccatctcgacgacatggccgcagccgcagggccatcaagctctgtgaaggagacgctcccgccggccctcggctccacctcccagccacctcccgtcttcgatggcaccaccaggctgtacatctgctacttctgcccgttcgctcagcgcgcctgggtcaccaggaacttgaagggtttgcaggacaagatggagctggtggccatcgatctgcaggacaaaccggcttggtacaaggacaaggtttacgcacagggcacggtgccttccctggagcacgacagcgaggtcaggggcgagagcttggacctgatcaggtacatcgacagcaactttgacggccccgcgctgctcccagaggatgctgcgaagaggcagtttgctgacgaactgttcgcgtctgccaacgcgttcaccaaagccctctactcgccgttgctgtcccacgcggccgtgtcagacgaagttgttgcggctctggataaactcgaagctgacctatccaagttcgacgacgggcccttcttcctaggccaattcagcttggcggatgtagcgtacgttacgattctggaaagggttcagatatactattcccatcttaggaactacgacatcgcccaaggcaggcctagcctcgaggaattcatcgacgagatgaacaagatcgaagcgtatgcgcagaccaagaacgatcctctgttcttgcttgatcttgccaagaaccatcttaagattgcctgaagatgtgacaaagcagccttagtccgttgatcggtggaagaccactcgtcagtgttgagttgaatgtttgatcaataaaatacggcatgctgtaagggttgttttacaatattgataatacactctactgttcagttgttgaactctatttcttagccatgccaagtgcttttcttattttgaatc

SEQ ID NO: 24694 - DNA, 1952 bp, Zea mays
  Clone ID: LIB3634-002-E12_FLI
ccggaggcgggggtcattcagcaccacgctgtgagcggtcgcgcagagtggaaggttttggaaggaggagatatccgccagcgattcgacctgtgagcggtcgcgcagagtcgaaggttttggaaggagcagatacccgccagcgattcgacggaggagagccaccaaaggactgcacgctttgaggactgaggtaaagcttgtcaactcccgcggtctttcgcaaaagtttcttgcgggcatggatcggttcgggaactacaagaactaccagacaaggcgctatgaggatggagacgacgatgcaaagcaaatgctgaggccctgggaagtccccaaaggagactggttcccctctgacttcatcgttggcgctgccacttcagcataccagattgaaggtggttggaatgaaggtggaaaggggccaagcacatgggatcacttctgccacagttttccatctttgatagcggacgggagcaatggggacgttgcagcaaattcataccacatgtaccatgaggatgtaaggttgatgaaggaaatagggttggatccctataggttctccgtctcttggtccagaatactgccaaaggggacgctcgaaggaggtattaatcaggatggcatcaactactacaaaaaactcatcaacttgttgctagcggagggcatagagccatttataacaattttccactgggacacgcctcaagcactggtagacaagtacggtggctttttagatcggaggattgtaaaagattacacagatttcgctatggtgtgcttcgagaacttcggtgacaaagtgaaaaattggttgacatttaacgagccccaaacgttttcttctttttcctatggaatcgggttgtgtgccccagggcggtgctccccaggacaaaaatgtgctaacccaattggaaactcacttatcgagccatacattgttggtcacaaccttctcctagcccatgctgaggctgttgatctttacaacaagcattacaaggatgagaacggacgtatagggattgcatttgatgtaatgggtcgagtgccatacgaaaagtcagcgtttgtggatcaacaggcacaagaaaggtcctgggacattaacctaggatggttcttggagccattggttcgtggtgactaccccttctccatgagatcgttggtgagggatcgactacccttcttcaccgtcgaagagcaagaaaggctagtgggttcctatgacatgctggggttaaactactataccgcaaggttctccaaacacattgatatctctccaaactactcaccggcgctcaacactgacgatgcctatgctagccaagaaacgtatgggcctgacgacaaacccattggtccttggatggggaatccgtggatctacatgtaccctgatggcctaaaggatctccttatgatcatgaagaacaaatacggaaacccacccatctacatcactgagaatgggatgggtgacgttgacaatggcgacctacctatggaagatgccttgaatgaccagaaaaggataaattacctccagcgccacatcgcagttattaaggactcaatggaattgggggcagatgtgcggggctacttcgcttggtctctggtggacaactttgaatggaccgcgggctacaccgaacgttacggcatagtctacgttgaccgtaatgacggctacaaacgctacatgaagaagtcagccaagtggttgaaagagttcaacactgagaaggctggcagcgcctaatgatgtgccatgcataaaagaccgggtctgtgtgatttgaattctatatttttatttgcacctccacaggaggtagtggagtcatgttctccaacaccgtatattgttccagttcactgttaccgtattatgtaataaatgaagtgatcaatttctctgtttc

SEQ ID NO: 24695 - DNA, 1319 bp, Zea mays
  Clone ID: LIB3634-002-E5_FLI
ctgcctcctagccggtggagcccgcgcatccccgcccacagacgcgctacgccgcgtctccccgcgcgcgggggccggtggcctctgccagcagctgctcctgccgcagggttacccgtgcaccgagcacaccgttcaaacggatgatggctttcttttgtctcttcagcatattccacatggcagaaatggaattgcagataatactggacctccagtttttcttcagcacggtcttttccagggtggagatacatggttcataaactccaatgaacaatcacttggatatatccttgctgacaatggttttgatgtttgggtcggaaatgttcgtggcacacgttggagtaaaggccactctactctctctgttcatgataagcttttctgggattggagttggcaagaccttgctgaatacgacgttttggcaatgttaagctatgtatatacagttgcacagtccaaaattttgtatgtgggacattcacagggaactatcatgggtttggctgcgtttacaatgcctgaaacagtaaagatgataagctctgctgcgcttctttgtcccatttcttaccttgatcacgtcagtgctagttttgttcttagagcagttgccatgcatcttgatgagatgcttgttattatgggcatccatcagttgaacttccggagcgatatgggtgtacagatattagattcgctgtgcgatgatgaacatttggactgcaacgatctgttatcttcaataacaggtcaaaactgttgtttcaattcatctcggattgactattatttggagtatgaaccccatccgtcatcaacaaaaaatttgcggcatcttttccagatgatcaggaaaggcagcttcgcaaagtacgactatggatggtggggaaacctaaggcgctacggccagctgcgtcctccctcattcgatctaagcagcataccggaatcactgccgatatggatggggtatggaggccttgatgccctggctgacgtaacagacgttgagcgcaccatcaaagagctgagatccacgccagagctcttgtacattggtggttatggccacattgatttcatcatgagcgtcaaggcaaaggaagatgtttatgttgacttaatgaggtttctcagggcccagcagggaatgcacagtagctattaggacgcacgtcacgtacgccttcaaataaatgcttatgctatgatgacagtacgaccatgtaaatacggacacagcatagcatgtaaatacaaacagtctattgcattgcatgtaaagtggtgtgtggattgttctc

SEQ ID NO: 24696 - DNA, 717 bp, Zea mays
  Clone ID: LIB3634-002-E8_FLI
gagaccatcacgacaatcggcaaaaatggcggacaacgactcccccgtcaccctccgaactcgcaagttcatccgcaaccctctgctgggccgcaagcagatggtcgttgacatcctccaccccaaccgtgccaacatctccaaggaggagctccgtgagaagctcggttctctctacaaggcccagaaggaccagatctccgtcttcggtctccgaacccagttcggtggcggcaagaccaccggcttcgctctcgtctatgactctcccgaggccatgaagaagttcgagccccagtaccgattggtgcgggttggtctcgccaccaaggccgagcgtgcctcccgacagcagcgcaagcagcgcaagaaccgacaaaagaccctccgtggtacggcaaaggtcaagggtgccaaggccaagaaggagaaataaacgactcgatgacttggcttgggcttgtgtatatcctcgggctggttggggagcagctatggctgcgtgcatgcggtggtgcgtccatttacggtccatcctcgtcggcgtcggcatcggcatagggtacagggacttgctgggcggaacggcgaggggctactctggactcgatgaggaggattgctttcaccagcgtcttttctcaattacactagcatgaaatcaatggtgttcttcgggtttcggaccaaaatcaaaaataacaacgtctctggttt

SEQ ID NO: 24697 - DNA, 1090 bp, Zea mays
  Clone ID: LIB3634-002-F12_FLI
cccacaccccccgagctcagcttagctccactccagctccaatcacagtcgtgaccagagcgcgagagctagctagagggccgtgaaaatgccgatcaataggatcgccctggggagccaccaggaggtgtaccacccgggcgccctcaaggcggcgttcgctgagttcatctccaccctcatcttcgtcttcgccggccagggctccggcatggccttcagcaagctgaccggcggcggcccgacgaccccggcgggcctgatcgcggcggcggtggcgcacgcgttcgcgctgttcgtggcggtgtctgtgggcacgaacatctccggcgggcacgtgaaccctgccgtgaccttcggcgccttcgtgggcggcaacatcaccctgttccgggggctcctgtactgggtggcgcagctgctggggtccaccgtggcgtgcttcctgctccgcttctcgacgggcgggcaggccacgggcaccttcgggctgacgggcgtgtcggtgtgggaggcgctggtgctggagatcgtgatgaccttcgggctggtgtacacggtgtacgccacggcggtggacccgaagaagggcagcctgggcaccatcgcccccattgccatcggcttcatcgtgggggccaacatcctggtgggcggcgccttcgacggcgcgtccatgaaccccgccgtgtccttcggccccgccctcgtcagctgggagtggggctaccagtgggtgtactgggtcgggcccctcatcggcggcggcctcgccggcgtcatctacgagctgctcttcatctcccacacccacgagcagctcccctccaccgactactaaaagccgaagccgaccgacctaggggtgcgcagcgcagctagcgcatccagctctctctccccgctcgccgccgtttagtttctctcgtgcacgtgcatgcatcgtcgactgtctcaggccgccgctgcgccggcgccgctcgcatcgtttgcttccttggaccagcagtcgtcgccgtcaggctgaactgcttgtaaccgtgaattccggacccgtttgcttctgtaagatttgtgcatttgcctgagt

SEQ ID NO: 24698 - DNA, 1967 bp, Zea mays
  Clone ID: LIB3634-002-F4_FLI
ctcgtcggctggtccggccccagcgattcggtttggtgcgcctcgtggtccacgtgcgcgggctttgtgctctctcttccctctgtgtgtgtgtgtgtcagttcatcgggtaggttggtggcggcgtgagagatgaagagctgcggcgggggaggagcggacgggcagcagtgcccgtgcgactactgcggggaggcggcggcggctctgcactgccgcgcggacgccgcgcgcctctgcgtcgcgtgcgaccgccacgtgcacgccgccaacgcgctgtcgcggaagcacgtgcgggcgccgctctgcgcggggtgcgccgcgcgcccggccgccgcgcgcgtctcccccaccccgtccccgggcggcgccgacccggcgttcctctgcgcggactgctgcgagggctgcgccgccgcttccgcggcgcgcgtgccggtcgagggcttctcggggtgcccctcggcggccgagctcgccgcgtcatgggggctcgacctccgccgcgcggccgtggccgtgggcgacgacggcgacggcggcgacgacgacgaccccttcctctcggtgctcgactactccgtgctgggggtggggatggccgacacggacctgcgcgacctctacgtgccgtgcgacccaccgcgggtgcccgccccctacgccggcgcgcgcccgctcaggggcgaggcgctgtgcgaccagctcgcggagatggcgcggcgcgacgaggcggacacgtcccacgcgcacccgcactcggatctgagcccgcgcacgcctcgccgcacctccgcggtttccagcggacgcctgccgtcgggcaagatggcgccccccgcggcgctgccggtgccggctcatcctcctcccgccgcgccgcaggaggtgcctctgccgtacacgtccctgctcatgatggcgtccgccaactgcagcgacctcattggcggcgccgaccgggtgggtgataccgacgaacaactgctctgggactgtgctgcgccctcggtgccgcccacccagatatgggacttcaatttaggacggtcaaggcatcacgatgagaaatctgctcttgaagttggatacggttctaaccatggaggctttatgattaagagttacagtgacatgcttaaggaaatttcttcggggacaacgaaagatctggaagatatttatgaatcaagatactgctcaaccgccgaagatatcatgtcctctaatatctgtcagctgtcatcgaaaaatgtgagcaccgggagcaacaaacggaaggtgaggtcatgtgctgcgtcgacgatggatggaccaacgacctccgggaaccacaaccacgtacccgcttcagcttcaggtccaggagcagcgctcaccagggagatctccttcggggatcagacggtgtccgcccccgcggccgagaccgagaggcctgccgccgtgaggatcgacagcgagacgcttgcgcagaacagggacagcgccatgcagcggtacagggagaagaagaagaaccgcaggtacgagaagcacatccggtacgagtcgaggaagctgcgggcggacacgaggaagcgggtgaaagggcggttcgtcaagtccaccgaagcactcaacgccgccaggtacaacggatgaggcagccatatatatatatgcatggcctgtgaagcccgcgagtttgctgcgcgcctgcgttattacgtgcggtagcaacggatgaacggggagctaggtactgctacctggaggtgctacgtatgtatggcgcggccggaatcgctacgcacgcggcccaagtttaattttgcgttgaagctatagcgatcgtggccattgttgggcagtcaactccagagattgcacggtactgcttgtttgtaacagacgaccctccctttccccttttttctctgttgttgccgtcatcccccccagaacagaaagtatgtagcttacct

SEQ ID NO: 24699 - DNA, 1469 bp, Zea mays
  Clone ID: LIB3635-001-A9_FLI
cggagaggagaggaagaagaagaacccagccaaatcctcagtcttcaggctgctcacagctcgtgccgtccactctcccccgaggcagtctcttgcgttcgctgctcgacatggcgctccaggcggcgacgtcctttctcccctcggccctctccgcgcgcaaggagagggtgagcaggtcggcggacatccgcgcgcagacggcagcggtgtcctccccgtcagtgacccccgcgtcgccgtctggcaagaagaccctccgcaagggcacggcggtcatcaccggcgcgtcgtccggcctcggcctcgccacggcgaaggccctcgcggagacaggcaagtggcacgtcatcatggcctgccgcgacttcctcaaggcgtcgcgcgcggccaaggcggccggcatggacaaggacagcttcaccgtcgtgcacctggacctcgcctccctggacagcgtccgccagttcgtcaggaacgtgcgccagctggagatgcccatcgacgtggtggtctgcaacgccgccgtgtaccagcccaccgccaaggagccgtcctacaccgccgacggcttcgagatgagcgtcggcgtcaaccacctcggccatttcctcctcgcccgcgagctcctcagcgacctccagtcctccgactacccctctaagcgcctcatcatcgtcggctccatcaccgggaacacgaacacgctggcggggaacgtgcccccgaaggcgaacctgggcgacctgcgcggcctcgccggcggcctcaacggcgttggcagctcggtgatgatcgacggcggggagttcgacggcgccaaggcatacaaggacagcaaggtgtgcaacatgctgacgatgcaggagttccaccgccggtaccacgaggagacgggcgtgaccttcgcgtcgctctacccgggctgcatcgccaccacgggcctgttccgcgagcacatcccgctgttccgcctgctcttcccgccgttccagaagtacatcaccaaggggtacgtctccgaggaggaggccgggaagcggctggcgcaggtggtgagcgaccccagcctgaccaagtccggcgtgtactggagctggaacaagaactccgcgtccttcgagaaccagctctctgaggaggccagcgacgccgacaaggccaagaagctctgggagatcagcgagaagctcgtcggcttggcgtgatgcccaccgtggccggcgccggcagccggcgacagtttttcctacctaggacatgctcattagttggtctcactctcagtcgagtagtcgacgtgtggtgcgcccgtgtcagagtgccaagccaagacagaaagtgagtacaaacgtgtaaaatatgtgctactgcgacgtgatggtttgggcagtggactgtatgtatctctactctctaggcttctgctttgctttgcatatttaattttctgctaataagaggacagc

SEQ ID NO: 24700 - DNA, 1936 bp, Zea mays
  Clone ID: LIB3635-001-E8_FLI
tgcatttctgtttctgttatttccatgattgcaggtccaaacaaactgccccccgagccacctcatcggatatgcttcattgctttcatctcatctcatatatttatattagaaaagaaaactctgttcaaccacccgccgagttcagcagcactctcctccgccctcttccaggtccagcagagattgggggcgcgtgggcatcggagattgcctcgggagcgcgtttcctggtcaactaaggccggcatgaagggctgctcagagcgcttgctgtttctgctgctgctgctggcatcgtcgtcgttactgtccgctgtgattgccgcgcagcagacttgccccgccgacctcgacagcaaatgcgatggtggcgcgtctgatgatgattgggagggggagttcttccccggcgtcccgaaaatcaagtatgagggtccaacaagcaagaaccctcttgcttataagtggtataacaaggaggaagtgattctcggtaagaagatgaaggattggatgcgcttcagtgttgcgttctggcacacgttccgcggtactggcgctgatcctttcggtgctcctacaaagacttggccttgggaggatggcacaaattcgttggccatggctaagagaagaatgagagctcactttgagttcatggagaagttgggagtcgacaaatggtgcttccatgacagggatattgccccggatgggaagacacttgaagaaacaaattctaacttggatgagatagtccagctggcaaagcagctgcagggtgagaccaatataaagccattgtggggtaccgcacagctctttatgcatccacgttacatgcatggtgctgctacgagcccagaggttaaagtatatgcttatgcggctgcacaagttaagaaagctttggaggtcactcactacctaggtggtgaaaactatgtgttctggggtggaagagagggttaccaaactcttctgaatactgatatgaagagagaacttgaccatctggctaactttcttcaagctgctgttgactacaagaagaagattggattcaacggaacactattgatagagcctaaaccacaggaaccaacaaaacaccagtatgactgggatgttgcgactacgtttgcttttctacagaagtacggtcttacaggagagttcaagattaatgttgagtgcaaccatgctactctatctggacacagctgccatcatgaattggagactgcacggattaatgggctgcttggaaatatcgatgcaaacactggtgatcctcaagttggttgggacacagatcagttcatgacagacattgcagaggctactttggttatgtcaagtgtagttaagaatggtggacttgcacctggtggtttcaactttgatgccaaattgcggagggaaagtactgatgttgaggacatgtttcttgtccatatctccggaatggacaccctggcacgtggcctccgcaacgttgccaagctgattgaggatggttccctagatgatcttgtccgcaagcggtaccagagctttgatagtgatatcggtgccttgatcgaggctgggaaaggagactttgagacgctagaaaagaaggttctagagtggggtgagcccactgttgcatccggcaagcaggaactggcggagattctgttccagtctgccctatagatggtgccatgtccataggtccaggaataagcaagggtgcgccctcctccgaacacgcactcgtcctcctcatcacggggatgttatggttccgtgcgatggactacctacaataagcatggaactgagataattaggatgtaatctgtcagaaaatttccagaattgttacctccttttgtttagagtggattagtggaatcaaactggagttagttaaagcttatcctgc

SEQ ID NO: 24701 - DNA, 732 bp, Zea mays
  Clone ID: LIB3635-001-F10_FLI
gcctccgacatcgtcccttcgtccccacgagcaaccgataatccgccggcgttgagatgttggtttatcaggatctcctatctggcgacgagctcctgtcggattcattcacctacaaggagctcgagaacggcgtcctgtgggaggtcgagggaaagtgggtcacccaaggtcctgttgatgtggacattggtgccaatccatccgccgagggtggtgaggacgaaagcgttgatgacacagctgtgaaggtggttgatattgttgacacattccgtctacaggagcaacctccttttgacaagaaatcatttgtgtcttacatcaaaaaatacatcaagaatctcactgctgtgttggagccagagaaagcggatgagttcaaaaagggtgtcgagggtgcaaccaagtttctccttagcaagctgaaggacctccaattttttgttggtgagtccatgaaggatgatgcgtctgtggtattcgcctattacaaggatggtgccactaatccgacattcctctatttctctcatggtcttaaggagatcaagtgctaggcgtgcggcgaaattagttacccatgttgggtactatctatgtactattattatatccaaaactatagttgtcctggctgaattgaactcaaaagggtttgtttgagaaaaaattgtcccaagattggattgcttgttaaagctcaatattgttattgaagtgttattgctt

SEQ ID NO: 24702 - DNA, 730 bp, Zea mays
  Clone ID: LIB3635-001-F5_FLI
gtcagtcacagctcacagcaaacaccgcgaagccgcccccgctcccaaacccgaccgagcaaagcgcaaagccccccaaccgcggatcaatccgcagcatcgatggcgcccaaggcggagaaaaagccggcggcgaagaagcccgcggaggaggagcccgcgaccgagaaggcggagaaggctccggcagggaagaagccgaaggcggagaaacgcctccccgcgggcaagtccggcgccggcgagggcaagaagggcaagaagaaagccaagaagagcgtggagacctacaagatctacatcttcaaggtgctcaagcaggtgcaccccgacatcggcatctcgtccaaggccatgtccatcatgaattccttcatcaacgacatcttcgagaagctcgccgcggaggccgccaagctcgcccgctacaacaagaagcccaccatcacctcccgcgagatccagacctccgtccgcctcgtcctacccggcgagctcgccaagcacgccgtctctgaaggcacaaaggcggtcaccaagttcacttcgtcttagattggttgccttccctctcgtttgtactggtgtctggtagtagatctcatctagttgggggtgctgttgctagtcggtcgtgggtccctttggtatgattggccctgttcaatgggtttgcaagtgattagtttgtacatggttgtagtagatatcgtttcagctgtgattcttt

SEQ ID NO: 24703 - DNA, 615 bp, Zea mays
  Clone ID: LIB3635-001-G10_FLI
ctgcagccaaccatctaccagcgactcagcgagcgagagcagcacacacgcagctagctaggagcagcagcagagcagcggcgatggcggcctccatgatctcctcgtcagctctggcggtggcgcctcagggcctgccgcccctcggccgccgcgcctcctccttcgccgtcgtctgctccaagaagaagatcaagaccgacaagccctacgggattgggggtggcctgaccgtcgacgtcgacgccaacgggagaaagggcaagggcaagggcgtgtaccagttcgtcgacaagtacggcgcgaacgtcgacggatacagcccaatctacaacgaggatgactggtctcccaccggcgacgtctacgtcggtggaaccactgggcttctgatctgggccgtcaccctcgctgggatcctcggcggcggcgccctcctcgtctacaacaccagcgccctctccggctaaggatatccaatgcatgcgcttcttgcgattcgtcatgtaaaatcagggtgtctgtctataatctagcctccatggatgctcaaccttcgtcatgtaacaataatcagtgctactcttcattacataattttgatgctatatatat

SEQ ID NO: 24704 - DNA, 2055 bp, Zea mays
  Clone ID: LIB3635-001-G4_FLI
cttctgttaactacattcgcagcggcagcgggagggaggaccagcggcagcgtcgacctggtggtggtgcgcttcgggttcggcgaagggcgacatggagagcacgctcaaggggatacgcggcagcgatgcgccgtgcgttctggacctggacgacgcggccaccgtggcgggcggcgtcgaggacacctacggcgaggatcgcgccaccgaggagcagctcgtcacgccctggaccgtctccgtcgccagcggttacaatctgcttagggatccccgttacaacaagggacttgcgttcacagagagggaacgtgagacgcactacctccgtggccttctgccaccagctattgtatcccaggagctccaggagagaaagatcatgaataatattcgacaataccagttgcctttgcagcgctacatggcactcatggatctccaggaagggaacgagaggcttttctacaagttgctcattgacaacgtcgaggagttacttccaatcgtgtacactccaaccgttggcgaggcctgccaaaaatatggatccatatttagtcgccctcagggtctttatatcagtttgaaggagaagggaaagatccttgaggtgttgaagaactggccagagaggagcattcaggttatagttgttactgatggtgaacgtattttggggcttggagatctcggatgccaggggatggggattcctgttggtaaactttccctttacactgccctgggaggagttcgtccatctgcttgcttgccgatcacattggatgttggtacaaataacgaggagctgcttaatgacgaattttacattggcttgagacaaagaagagccactggccaggagtacactgattttctgcaagaatttatgactgctgtgaaacaaaactatggggagaaagttcttattcagtttgaggattttgccaaccataatgcttttgatcttcttgcaagatatggcaccactcaccttgtattcaatgatgatattcagggaacagcttctgtggttcttgctgggcttattgcagcacaaacattacttggtggttcattggcagatcacacttaccttttccttggtgctggagaggctgggacaggtatagctgaacttatagctcttgagatctcacgtcagacgaaagctcctatagaggagtgccgcaagaaaatctggcttgttgattcaaagggcttgattgtcagtacacgaaaggagtcccttcaacacttcaagaaaccatgggctcatgagcataaaccactcagcaacctcttagatgctgttaatgctatcaaaccaacagtgttgattggcacatccgggaaggggcaaactttcacaaaagacgttgttgaagcaatctcctcatttaacgagagaccaatcattcttgccctatcgaacccaacatcacaatctgaatgcacagctgagcaagcttacacatggagcaagggacaagcagtgtttgcgactgggagtccatttgatcctgtggagtacaatggcaagatacatgttcccggacaggcaaacaatgcctatatcttcccagggtttggcctcggcgtggtgatgtctggagctatccgcgttcatgacgacatgcttctggcagcatcggaggctctggcccagcaggtcacagaagaaaattttgagaaggggctgatttatcctcccttctcaaacatcaggaagatctctgcccacattgcagccagcgttgcagcaaaggcatatgaacttggtttggcaagtaggcgccctcggccaaaggacctggtgaaatatgcagagagttgcatgtacagccccatctaccgcaactaccgttgaattcggatcaactccagttatgtgcaaatcagcagcagctattccgcagcgtttatctcttgcgatgtcatgtaaatcagctccggttagccttttggatgctagtcagtcatggtgctggtgccgtccttccggacaaggataaatttggaataaagtttgagtcgacgattcctccc

SEQ ID NO: 24705 - DNA, 2782 bp, Zea mays
  Clone ID: LIB3635-002-D10_FLI
ctcccggcctcccctccccttccgctccgcctctggccaccgcgcccgcacccaatggcgtcggcggcggggtcctctaacgtgatgcttgcgattcacgagaagaaaacgactgccactgacctctaccgcccgctgcgcctctacatcgcctccacctactcggaacgcgaggccgcggcggccgacgacgaccttagcgtggtgcgcgacgcgctcctcgcctacgcgcgggccctggcactcgttgagccccgcttccccatctcccctgaccgcgcccacgtccactccctcaccttcacctggcacgacgccttcaaggggaacaagaagtgcgccctcgcctccatccacctcgagaaggcctccgtgctgttcaacctcggcgccgtctactcccagatcgcggtcgccgcggaccgctccaccgacgtcggaataaagaccgcgtgcggtgccttccagagtgcggcgggggcgttcgcatggctcagggagagcggggtcgcagccaaggctgttgctgcgggaaccaccaccgtggacatcacgcccgagtgcgctggcatgctggagaaactcatgctcgcgcaggcgcaggagtgcttcttcgagaaggtcataggtggagggaagccaccagcgctgtgctccaaggtggcgcggcaggtgggcatattctatgaagaagcatatgcagctctcagtgcacctcctctaagtcagcactttgataagacatgggtgtcccatgtccagctgaaagctgctcaattctatgccgatgcttgctataggtattcattagatcttcatcagaaagaagaaattgctgaggaaattgcacgtttgaagattggtatgagtgccttggcagatgctaagaaggctgcgaagggagttgctgcccagcttatggattccgtcaacaagctggaaagtaacatgaaaaccaacttggaaagggctatgaaggagaatgatcgtgtttacctgatgcgggttcccgctgctggttccttgggagccctctctgcagcgtcccttgtaaagcctacctctttgtctgaagttttagatgccagtaaggaaaggctttttttcatcacttgtgcctgatggcagcatgaaagcactttctaaatacacagagatggtagataatattatccggacccaggcagagaaattgcagcaagctagtgagatcactagagttaggttgaaggaaatggacttaccagattctattctttcattggaaggaaatataaccttgcccttggatctaaaggaagacgtagaggctgtgcagataagtggtggccctgctggtttggaatctgagttgcagcagcttagggatttgagcagggtcaatcaggaactacttgttcagactgaagagcttctacagaaggaggcgaatgaagacgctcagtttcgtacacaatttgggagtcgttggactagacctcaatcaagcaccctaactaagaacattcaggatagattgaatctgtttgcttctaatctgaagaaagctgctgatagtgattctctgattgaacgaggcgtgaaggagaactatcccttgatgtctatccttgacaaaagaccgatagagtctgcacttccaagtatttccaggcctatcatgtccttggatgggaatgaagatgccattgttggagccctgaaacaaagcttgagacaactggaatctcttggagcgcatagggcaggtcttgaagacatgctcaaagaaatgaaaagaaaggatgatatactgcctaagttgatggctggtgttggatcacatgatgatcttttcaagaaagagattgctaagtatgatcctatctgtgctgatattgctgataacattgtggcacaggaacaattattgctgcaaatacaggcacaaaatgagcaatttgcctctgtattcaatatagaggattacaaagctgctcgtgagagatgttacaagcaaattgctgctgctgttgctaaataccgggagtttaagaagaatattaacgagggcttaaacttttacgtgactctgcaggaagcaataggcaaaataaaacagcagtgcagtgacttcataatgacccgaaacattcaatgccgtgaaatgatcgaagatgtgcagaggaagctagcgggtttcagcttctcgtcctccagccactcctctatgcagaggaatgcttctgtaccacctgatcagagcagcccgtcaccaccaccgcatgctcaggctccctatgcctctccacctggggtagactcaagacttggatattctcaaacggagccaagacctgcttactcacagccataccccccatcctatggcgcaccaccacaacagccttcatatggcgcaccacaccctggtcagtaccagccgccagcgcaccagccacctcctggccatgactacggtcagccggcatatcctggatggcgtgggccatattacaatgcccctcagccgcagcaatctgcgccatatccacagccaccgtacaatgcccctggggcttaccctccgcaccagagcaactattacaggcctcagtaagctatcttatcgttcctgcaactatttgtttgcttcttttccattggatcttaccgttgtggagtatgcatacgagaatttggttggtgcaatatcagattgattagaaggtatagcttgtatgatttgtacgtataataatgtgctggatgtattgtaatacacggctatgcatattgcaac

SEQ ID NO: 24706 - DNA, 2308 bp, Zea mays
  Clone ID: LIB3635-002-G10_FLI
ctgttgggagcttcttcaacatctcgtctctctcatcctccgacgccatccgctcccgccccggccgagccgcgcgttgtgtatgtcactttgctcttacaacaggattccaaaagcaatcatacaggggctatggcgaggccttacaaacctaagaatatcctcattacaggagctgctggttttatcgcctcccatgtcgcaatccgcattaccaagaagtaccccgattacaagattatcgtccttgacaaacttgactactgctctaatctgaagaacctgcttcctgtgagctcatcaccaaacttcaagtttgtgaagggtgatattgcaagtgttgatcttgtcaacttccttcttgtcacagagaacattgataccataatgcacttcgcggcccagacacatgtcgacaattcatttgggaattctttcgaatttaccaagaacaatatttatggtacacatgtacttcttgaggcctgcaggattagtggccagatcaagaggttcatccatgtcagcactgatgaggtctatggggagactgacgaggatgcagttgttggcaaccatgaagcatcacagctgcttcctacaaacccatatgcagccaccaaagcgggagcggagatgcttgtaatggcatatgggagatcctatggactgccagttatcactactcggggaaacaatgtctatggcccaaatcagttccctgagaagcttatcccaaagttcattctcttggccatgagaggggagcccctccctatccatggtgatggagtcaatgttcgtagctacctctattgtgaggatgttgcggaggcatttgaggtcattcttcatcatggagaagttggacatgtttataatattggaacaaaaagggagaggacagtgcttgatgtggcaaaagatgtttgcagactcttcaatcttgaacctgacaaagtcatcatgcttgtcgagaacagacctttcaatgaccagaggtatttcttggacgatgagaagctcaagagccttggatgggctgagcgcaccccatgggaagaaggcttaaaaaaggcaatggagtggtatgtagcaaaatctgattattggggtgatgtttctggggccttactgcctcatccaaggacattgatgatgccagggtgcgagggctcagaggagattaaaggaatactcagccggtttaataacattcaaacaaaggtcggttcaacatcagataatgctccagaaccgcatgccttcaagttcttgatatatggcaggacaggatggatcggcggacttcttgggaaaatatgtgagaagaaaggaattccgtatgaatatggaaatggccgcttgcaagagcgttcttcactagtcctagacatccaaactattaagccaacacatgtcttcaatgccgctggtgtgactggaaggcccaatgttgactggtgtgaatcgcacaagccggacaccatccgtaccaatgttgtgggcaccttgaatctagcagatgtatgtaggaagcatggcttattgatgatgaactatgccactgggtgcatatttgaatacgatgcacatcatcctgaagggtcaggtatcggcttcaaagaggaagatacaccaaattttactggttcgttctactcgaagacgaaggcaatggtcgaggaattattgaaggagtatgagaacgtctgcactctgcgagttcggatgccgatatcctctgacctcagcaacccgcggaacttcgtgacaaagatcagccgttacaacaaggtggtgaacatccccaacagcatgacgatattggacgaactcctgcccatctcagtggagatggcgaagaggaacctgcggggcatctataacttcaccaaccccggcgtcgtcagccacaacgagatcctagagatgtacaagcagtacatcgaccctagcttcaagtggacaaacttcaccctcgaggagcaggcgaaggtcatcgttgctccgcgaagcaacaacgagatggacgcaaccaagctgaagaacgagttccccgagctgctgtcgatcaaggactcgttgatcaagtacgtctttgagcccaacagaaaggtgcccacagactgaagtccgaagggctggcacagctgataccgtacaacacagcaaccattagtgttagactatgtgtgtgggccagcactactttacttttgggctgtcggtctattagggttagagtcctgtgagtctatatattgtacctcatctcttatacaatacatttttgggctgcgagtct

SEQ ID NO: 24707 - DNA, 1859 bp, Zea mays
  Clone ID: LIB3636-001-D1_FLI
cggaccaccactccacaatacacaaagcggctgcggatgtgagtactataaagaaagcgatgaggcgccaggccggtagccaaggatcgagtcgtttaattttctactaggagctagcagcgagcgggttatttgcaacgacggcatcgtcttggcgttggcgggcgtgtttggcaccatgggcgactactactaccgccgccgctcgccgcacctcctcccggcggcggtgctggcgctgctcgccgtcgtcgtcgtcgtgagcagcagcctcccgagtgcggcggcggcgggggcgggccggaatgtgatcacgcacatcaagggcttcgaaggccctctgcccttccacctcgagacagggtacgtggaggtggacgaggagcacggcgcgcgcctcttctactacttcatcgagtcggagaggaacccggcggaggacccgctcatcctctggatcaccggcggccccggatgctccgcgctctctggactcctcttcgagatcggacccctcaagttcgatgtggcggggtacacggaagggttcccgcggctggtctacttcgaggattcatggaccaaggtgagcaacgtgatcttccttgacgcgccggtggggacgggcttctcctactcgcgggaggaggccggcctgaacgtgagcctgacggagtccgggcggcagcaccacgtgttcctccgcaagtgggtggcggagcaccccgagttcgcgtccaacccgctgtacatcggcggcgactcctactcgggctacaccgtgcccgtgacggcgatggacatcgccaccagcagcgacgacgaggagccgccgaggctgaaccttgtgggctacctggtgggcaacgccgcgacggacgaccggtacgacacggggggcaaggtgccgttcatgcacggcatggggctcatctccgacgagctgtacgaggcggcgaagcagggctgcggcggcgacttctacgtggcgccggaccccaccaacgcgcggtgcgccagcgcgatgatggccatcaacatggtgaccttcgccgtgaaccccgtgcacatcctggagcccttctgcggcgcggccgtgcgggccggcggcggcagcatcttccagggctacggcggcggcgcgaggcggtcgatgctggtgcgggacgacgtccgccacccgggcttcttcgccaagcagcggctgggcctgcccgtggagtgcagggacaacgggtaccggctgtcctacatctgggccgacgacccggaggtgagggaggcgctcggcatcctcgagggttccatcgggtcgtggagccggtgcaccatgctgtcgcactacaggcacgacgtgaccaccgtcatcccctaccatgtcaacctcaccaaggcaggatacagggcgcttgtgtacaacggcgatcatgacctagacatgaccttcgtgggcacccaagagtggatcagaagcatcggctaccccatcgtcagcgactggagaccatggttcgccaaccgacaggtcgcagggttcacaagaacatacgcccacaaccttactttcgccactgtgaagggaggaggacacacagctccggagtacaggccgaaagagtgtcaggccatgttggatcgatggacatcagcagcaggccaactctgatgaatatggtgaccacggaattaacgaagtactacagctgtagtcgtcgttggtgtctctccgtcgaattactcatatttagtagtaataataataataataagacgggctttaatttgattcatagctacttagctagggagaggcaggctgcttgtagtacttttggctatgatccatgccagctccgaac

SEQ ID NO: 24708 - DNA, 573 bp, Zea mays
  Clone ID: LIB3636-001-D3_FLI
tcaccaatggcgaggcagctcgttgtgcttgctctgcttttcgtgatcgccggtgtggcgcatggcgcgggggagtgcgggagagcctccgccgacagggtggcgctaaggatggcgccatgcatctcggctgccgacgacccgcagtccacgccgaccagcagctgctgctccgctgtgcacaccatcgggcagagccccagctgcctgtgcgccgtcatgctgtccggcaccgccagggctgccgggatcaagccggaggtcgccattaccatccccaagcgctgcaacatggccgaccgccccgtcggctacaagtgcggagattacacgctgccctagctgatgaagacgtcgtcaacgagaccgtgcgagtgaaccagtgcatgaacgaatgccattatgccatgcaactatgttgcgttgcgttgttggaataataatcgaatccgctagaataaatatgtacgtgcacgacggcctcttgcttgtatcactggactttgcttgtgtgttatacgtcaaatatgttccgtttctctcatataagaaaattatgcaatgcttgttatt

SEQ ID NO: 24709 - DNA, 468 bp, Zea mays
  Clone ID: LIB3636-002-F3_FLI
tatccttcaagatgaccaagcgaacaaagaaggtcggtgttaccggtaaatacggtacccgttacggtgcttccctgcgaaagcaggtcaagaagatggaagttacccagcacgccaagtacacctgcactttctgcggaaaggtcaccgtcaagcgacaggctaccggcatctgggattgcaagtcttgcaagcgcaccgttgctggtggtgcttacaccgttgccacacctgctgccgccgccatgcgatcgactctgcgacgtctccgagagattgctgaggtttaaggatggactctagcggaagaagaaaacggctttgcttttcggtatggtgtacgggggatatggatttcgtgcctacactacgagttgacgatctggacgtcaacacccgatattcgatcacatagaagccgatcgattagcaatgaacaaaaaagaattgcaggcttcagacccattc

SEQ ID NO: 24710 - DNA, 1583 bp, Zea mays
  Clone ID: LIB3636-002-H10_FLI
gtacggtgtcggcggacggccgcgatgggcgggggcgacgacgcggcggcgggcgttggagacgggttcgcgtgggatgccgactcccagctctactaccacgccagtactgctttttaccatgaccctgttgctggatggtactacagcagcagagatagccaatattacgtctacaaaaatggaaattacatgccattgacaacagatctggaaaatgaacccacagccaatcatccatatgatgaggccaaccaagatgtcttggaacactcttcaggcttggaaacaactatacttgacaatgagaatgaaataccaggacctccatcagaatggatggaggaaacactgataaacttgtatttgtcaggctactcaaacaatgaagtcaatgctgaaagttcactagtaatcgcacattcaaatgaggaagacagaattgaaacaaccgggaacaaactagatagcttgacctcggacagtgcttcagcctctctgcatgatgctacatcacagcaaactgaagttgaaacagaaacaaagaattccgcttatgtgtatgaatctttgggggaagaggaagagaaatggcacgctcagtatggtcaggtcgagaggtcaaatgatgatcaacatttacctccaacaattgatatatgggattgggatgtggtccaagaccatgttaacaaaggtcagcccgtggttaggcttgtgggatgtttatctaggggttcaaataagcttcatccttctcttcctactcgtggtggccttgtaaggactgctcctgtgcgtgaagttcatcttgacctcgtgcaagtttcaacagggaagctgtacaggctaaggaaccctagcagaaagtacttagccactttatccgcatatgactcctccaacccaacaaaggattgggggtttcctgatattaatttgaataagcaatccactgcaaagtgccaatctgaagttcttgctgataaatcttgtggcggaggaagtgtctcagctgctaataccatggagccgaacacaaaagtttacagggacagagctgctgagagaaggatcctacatcgtggcttaggggttgggcctggacagaagcagagtaacaccaacaatttcgatgaatacgaggaatcaatcgaggacatggattcaatgggagttgcgtcagctgatttgaatttccaatccagcggtttgctttcggctaagagaataatggagaacatgggctggaagcagggagaagcccttggaaaaagcagaaagggcattgtagaacctatacagccttccatcaacaaacatggtgccggtttgggatggaggcaaacccgctaagatgttcctttgaagattccagtctttgtatttgtatcctctgaaggtaagttccaattgtatcgaataaaccggagggaactgaattgaacttgattctaaattttgctgcttctctcacacagttttaaaaagttgcaacttgtacttaaatgtggtctatgtgtattagcctgtcagatttggtgttcttaattcaagtgcaactacaacggaagaattgaggc

SEQ ID NO: 24711 - DNA, 627 bp, Zea mays
  Clone ID: LIB3637-195-C9_FLI
gccgttcctcctctggctcttcgccaagcggagagtaatggcgccacggcggcagctgccgacgacggcctcgtgatgactgaggaaggtgacgctgacgccacgagcaatggcaacgacgacgacgagatctcctccgtctcagagacgacgggcgcagaggaggaggcgtgtgggacggagggcgacgacgacgacgaggaggagtgcctacagaggcggctgctcggagacgcgcacctcgactacatctacacgcagcacaagggcaagccgtgagccgagcccgtgaccaatgcatctcggcctcggcctcgccggtttgcatggatggcttggtttgttcagagtgcgtacattacatgcatgctgctgggaagaagtcgatgacagacgatccatcaggctgctgggatcgaatctagtgtgtgcgtgttagctgttgcatgacatgaatctctctctctgtgtttggttgttttctcactgatgcctgatgtatataggccggccggtacggtgtgcaagctctactaatagtttggttggtttggtgtgagcaagcttaatcatggccgtcatcgatcgatctactcctcctccttaatcaaatggaacttgctcatt

SEQ ID NO: 24712 - DNA, 1577 bp, Zea mays
  Clone ID: LIB3637-195-D12_FLI
gtagctttgaagccgcagactctgtctccacaacctgaagcccaagcacctcatgatcctcaaacaccagagcaacaacaaagcgggactggtgtaggtgtgtagctggtgagccgggtagtgaaggaggtgtgtaccaggcctccagtgagcaaatgggcatggtgccagatgcatctgcggccggtggcaggaaggtcgagctggatggggacatgcgatggacatcacaggttggcccctccagtgatccatctcaaacactagccaggggatgaatgaggctgctcatggtggacagaacagaagacgaaatgaatcgcaaggggaaactaacatgcgagagaggaggaggtagccacaaccaaagagcttggttcaatacttcaatggctagaataatgaacgatatgaagatcaggtagcattatatatgtcaataagaagcagaggagagaagcagcccgcatcgcaggagacaaggacttcacttgtttggccagttcaggacttcaggatgctgtcgatgatgtccatgctatattccctcgcttcatgcttaacaatgagggagagactaagtgaggggctgaaggccgttggtgctgtcagaatgtttttttggagttttggtggatgatgctcagtgactgcaatgcaaaggatccttctgttttgtatattgaatgagattacatcactgttttttcttagcgatatgttgagctcatgtgctcgtttatgttagtcgatctctggctcttgtagtaacttggaaagcttgctgctttttttaagggcatacatgcctgtgatatgtggtcatgatcatttttctctcctgttattttagttgtcgtatcataaatgccatgtttgcattggtgttccaacatgtcaatattattgaataaatgtttgcattagcggcagcggggacgacgctaagtcgagcaatggcgaagcggcccgtggtggcagtaacggtggagagaagcagggggatgaatccaacggtggcgggatacttagcgttgtggcttccaggattggcgtggccgtgtccggcgccaacggggaccgcagcggcagcgctgaggatggtgccaagacgagcgctggcgaccctggtcacggtagcaagggcgaggagaaggggcgtggtgtgaacggtggtagaatagtcgagcagatcatttccaatctgccctcagatgatcaggcgcctgatgccgatgaagcttccttgctcatcgccattatcgaagattagctccatgttccgaaggctctctaggtcgtcctcaatgccaggatcaaatcatcagctgagccggagactgaaaacaataaagaaaagcaagcagctggtcatagtaaacatcatgtagcgaggcttagcagattgcttttttcacgttagaatcagtccacatgtcctcgacacgggctagatttgttctaggattatttttccagtagtaagccatgtatccatggacagtccacagcgcgacgtctaatgtaacatcatcaaggttcttttgactatcccataagaaaccattccttaagac

SEQ ID NO: 24713 - DNA, 611 bp, Zea mays
  Clone ID: LIB3637-196-A7_FLI
gtccgctgccacggtgccaccgctgtttcccacgccggtcggcggtcgccgctccagttgaatttgaaggagcctgacggatcgatggcggctgcggcggaggtgtaccggcgtttgctgaaggcggtgcagaagcacgtcggtaggggcgccaccaagcagcgcttcctcgacttcggggcggccgagttccgcgcccccgccggcacggaggccggcgctagggcgaggctgcggctcgccggggactacgcctacctcctcaccagcgtccaccaccacaaggatctgctgctctcgtacaatatagctgtggatcgatctgatgaaacgaagaagatactgaacaaatctgccgccagtgtaggcctccagcttcctgatgtctacaagccatgagtgcttcatttctgcatctatgtgtggtccatgagaccatgatactgccatttagctatgcaacttcaccatttaccttgtttccaatgctactgttctctcaactctcaataacgagagatgacatttgtttattaatgatgtcattcatcgatgtatgaattccttctacaaaaatcaattgccagtgtgctatagtctgcacaaaatct

SEQ ID NO: 24714 - DNA, 834 bp, Zea mays
  Clone ID: LIB3637-196-D8_FLI
ccctgttattcctgataagctgacaagtagcatattaaggagctccaagttccagatggacctgttctgcttaagggagagagatttactgaagcagtttgtagaggaggtttctctccatcttgcacaaggcgaaagcagagaaaaggctttgatgctggtaaaattcagatttcactgtgcactatttttcgctgttctatagtttctttgtttgtcattgatacaagtgacattttcccagagttatcaagttgctgaagacttggctagagcgtttactgagcgtacgatcctccaaatatttttggaggatgagatgaatgttccttctggttccctaaaggaggtactgggcttgctgagatctctatatgtcatggtgaacatagatgaatccacatcttttctaagatacgggcatttatcacgtgacaatgtagcccttgtgcggaaagaagtcctgaaactgtgcagtgaactcaggccccatgcgcttgctgttgttagttctttcggaatccctgatgccttccttagtccacttgcttttgactggattgaggcaaatgcactgtcaaccgggagccactgatctcaggtttccacatacgagccaggttatcctgtgaaagtactgaatattgatggcggggcatagataccgtataactacaggagcacttgttgtctcggaacaaattgttgtgaatcctgttttgtataatagttttcttgaatataagcgaacgtagcctaacaggccaaagtccatgtaatggggtttacaacagtaataacttgcagagtgatgtaagcgagttgttgagcagt

SEQ ID NO: 24715 - DNA, 1032 bp, Zea mays
  Clone ID: LIB3637-196-E5_FLI
gaagagcaggcacatcttcaattcatgaaccctggcatggaggatgatccaacttgtggtcctatcctagacaacgttgccgtcaagaagctcttcaccccagacaaaccaaaggataacgtggtgctgaatggagactttgaggagggtccatggatgttcccgaacacgagcttcggtgtgctgctcccaactaaccttgacgagcaaacgtctgccatacctggttggatgatcgagtcaaaccgcgccgtccgctacatagactctgatgagtacaaggttccccagggaaagcgagccattgagcttctgtcaggcaaggagggtatcatctcccagatggttgagaccacccctcagaaggtttacagcctgacgttcacactgggcacagcgggggactcgtgccaaccaccaatggccgtcatggcattcgcgggggatcaggcccagaacttccactactccccaatgggcaacgccaccagccaggctgcgaatgtgacgttcactgcacgcgctgagagaacacgtgtggcgttctatagcgtgtactacaacacgaggagtgacgaccacagctcgctgtgtggcccggtgattgacgatgtccgggtatgggcattgaacgccgcggctgggttgaaggcaagtattggactggttcttggcattgttggtgtcgttggcatggtgctgttctgaaatctgaatctctcggtggcagtggtcttgagaagtatggatgtataatttcttctgttagctggagcctggaggcttactagttttggtagtaagcttgaagtttgttgagtgatatgagcttaggttaaaaagctacgagaacctacatggtattgcttgtgttactttattggtgatttccgaagtaacatgcagttgtatggtattgtgtggcttgtttgccctagcttgtaatatgagatgtcagaattattcgaagatcatctcttcatatcaatatattagtaggatgcccgtgagttgcgacggcataaattattc

SEQ ID NO: 24716 - DNA, 673 bp, Zea mays
  Clone ID: LIB3637-196-F11_FLI
ccggcgttgagatgttggtttatcaggatctcctatctggcgacgagctcctgtcggattcattcacctacaaggagctcgagaacggcgtcctgtgggaggtcgagggaaagtgggtcacccaaggtcctgttgatgtggacattggtgccaatccatccgccgagggtggtgaggacgaaagcgttgatgacacagctgtgaaggtggttgatattgttgacacattccgtctacaggagcaacctccttttgacaagaaatcatttgtgtcttacatcaaaaaatacatcaagaatctcactgctgtgttggagccagagaaagcggatgagttcaaaaagggtgtcgagggtgcaaccaagtttctccttagcaagctgaaggacctccaattttttgttggtgagtccatgaaggatgatgcgtctgtggtattcgcctattacaaggatggtgccactaatccgacattcctctatttctctcatggtcttaaggagatcaagtgctaggcgtgcggcgaaattagttacccatgttgggtactatctatgtactattattatatccaaaactatagttgtcctggctgaattgaactcaaaagggtttgtttgagaaaaaattgtcccaagattggattgcttgttaaagctcaatattgttattg

SEQ ID NO: 24717 - DNA, 842 bp, Zea mays
  Clone ID: LIB3637-196-G2_FLI
taatgtcatttttgtttatcatgtttcaatatgaataatctacaggataatggcttagtgccaattgtggagccagagatccttcttgatggagaccatgggatcgaaagaactctcgaggtggcagagaaagtgtggtctgaggtgttcttctacttggcccagaacaatgttctgtttgagggtatcctgctgaagcccagcatggtcactcctggagccgaccacaaggagaaggcttctccagaagccatcgcaaagtacacgctaacaatgctcaggaggagagtgcctcccgctgttcctggaatcatgttcctttctggtgggcagtccgaggtggaggcgactctgaacctgaatgcgatgaaccagtctccgaacccatggcacgtatcattctcctacgcccgggctctgcagaactcggtgctgaagacatggcaagggcgccccgagaacgttgaggcggcgcagaaggccctgctggtgcgcgcaaaggccaactcgctggcacagctaggtcgctacactggtgagggtgagagcgacgaggcgaagaaaggcatgttccagaagggctacacctactaacgtgccagcgagaatatttccatgacgttatacttattgttttggtgtttacattatagattatacttatcgttttggtgtcacgtttttgttttttttttttttggggggggggggggggggtgtcattcgagtgaataaaagccaaattgttggtgccaacaacctctaccgttgtagaaccctgagaaggaacatgtactctgagaacgtcaagtgatatttgcaatctggtaaattgtgttcct

SEQ ID NO: 24718 - DNA, 1638 bp, Zea mays
  Clone ID: LIB3637-196-G8_FLI
tggctggttagttcaactaagatattacatgtttacagacatgctcttttccccctttttcctatttaatttacaaaatactcagatcttttagtgagtgcaatgttagctcacagtttagggtttagggttttctttttgcacataagttgtggctcatgagttaacatgtttctctcttcagcgctatctgtgttaacatgtgtggtgcacgatgcctaaatgcttgcagtgataaaaatgtgatagttctcctcttgatgacatatttgtggtttccataatatgtgtaaattaaatacaaaggtagtgatgtggcgtctctgttgctgcaattgccaagtggatgaaacagatcggtgtgagagtcatgtcaaggccacaaccaacaaaattgacggggtgacgaagggtttgagggattctgctactgcaaaagtcgagccacacgatgatgctccccctatcgatgtcgatgttctatccttggatgatctgataaaaaattgttgactttggttcaagagccttgataggtgaaggtatttatgggacattgtactatgcaactcttggtaatgtaacaaaaatgacagtaaagaaactttactgaaaatgaacccattgtcgagttcttggtcgaggttggtgttgccattgattattgatcacgggggttactaccaaacaatgatgcttacttctgatgccaagtctcattggtttcaaggatgacacatgaaaactttgttgacatgttgggggaccgtatcaagcgtaatcttcgcatagtatcctacgaattcgcgaccatgggttctctccatgatgttctacatggaagaaaagtatttcaaggtgctcgacctggcccaacgtttggttggatgcagcgagtgcaaattgttgttgacgctacaaaaggactcgatattttcatgggaaagttcatcagtccattgtccatagggataatagaacaattaatatcatcttgtttgaaggcttcaaggcaaagatagtagacttcagatatggctgtccacttgcacttgaactcacatcaagccttcggatatcatgccgcacaataataatcctttttttaaaggcgatgaggcggctaaactaaatagagtggggttaagtccctaattgccttgcctgcagttgacttgcaacattttccctgggatgtccatttcaagccccacaagctctagaagcttaaagccatccatgtctggcatgtgcacatcgctgatacaagatcaaacaagttcttgttttgactcaacatggtcaagatcacaacagtctgattcatcgttgtgactgcaaatacgaaacaatgtgtcttacaggagagcagcggagttgatgcgtacccaaggtagcggaggaggatcagccatcagggtgagcctcgtgagtaggaaggtctcggcacggcccgaccgacttcgcgacgtggaccacggcgtggagtgcgcacaacacaacatgctgacttgtacttgttttgcttaaacaataaaccatttctcaataattttcccattatactgcttatgaaatgttcattgtgcacatgatttcctgtacatcggttagtgcttattttcaaacgttagtacc

SEQ ID NO: 24719 - DNA, 1086 bp, Zea mays
  Clone ID: LIB3637-197-D5_FLI
gttgatttctcttgtgctgctgtggtggtgtttgttcatctggtttggccttttgggtttatggcttctgtggaagagagctctcttcagtccactctaaaatggctgtagggtttcattagctgccgactcatccattcacctgccaagaaccatgggcaagcggtaggtctggtcttggtagccgagtgggtggcgcgggagctaaaatcaaactctacgctgtttacggttggactgaagggtgctcccttcaatttgcccaaacactcctcgtgcatgaaatcatctacctcagcaccaataataatcttgattagatgccccgtcgcaattaattgccgtatgctcatcagttctttctaagcagaaacaaattaattaagcttgattcgtacaatgcccttctcgtcctccttttttttttttgctaaatttagtttgttattgtttgaaaatagttctacaagtatttctggttcatttttgtggtattacatgcgcagcgtagtacttgcaggcacagtgtacgtactttctttcttgtccaggacagtactgagatcttcgtcttctccgcttctcaaatgatgggcgcattggctttaccacatctcaaatgtgtcatggatttgtctgtaaaacataatgtattgttgcttagatcatgtccagtacttcaaaaaaacactgattgtatactgtatactgcactgttttgagtttgaatatgtgtatgcagcatcggtaagctgctagattataccacaataaaaattgctctgggacttaaaaaaagctagctttactggtatagctcatatgctatagtgttgttgatgtgacaggagtctcacagggagccgtcgcaatttttcacattctctaaagcgaaggacaactgaagagtgaagaggcattatgttatttgtgattttgtgtttaagatatactttatttctctttgcaatccatgtttcaggatacaccaacactacttgacatgaaattgtttttacgtatttggatacaatacaatgtattagttctgtaaacttctttttaaatataattaccttttacttc

SEQ ID NO: 24720 - DNA, 1807 bp, Zea mays
  Clone ID: LIB3637-197-F8_FLI
cgcctctccttcgaatcttggttggaacaatcgcgtattacatcgggtgaatcgtcctctcaaggtttctgtacacccaaaaaaaggccatacgtccctacagtgtgtgcgtcattcatacccatctgtgtggacagaaggaagcctgttattggaatgtcctttcattcttgtaatgacgcagaggagttctacaaatcatatgcacatgatggagggttttcagtgcgtgttggttctcaaaataaagctcttggtgaggttattaacaagagatatatgtgttcaagggctggttttaagaaggtgaaagaggccgatgatccccctaaaaaccaaaagaaccacgcactaacaagatgtggttgtgatgcaaacatgtatgtcaagttgggcccggataagaagtaccatatcacttcaatggttgaggagcataatcatccactttgctcgcctaataagattccttttcttcgatcaaaccgtgttgtgagccaaagagctaagaatacattgtttacatgccacaaagcaagcataggtacctcacaggcattcagaatcctacaagttagtgatggtggatttaataatattggttgcacaaagcgagatcttcagaattactatcggggacttagagagaaaataaagaatgcagatgcacagttatttgttgcacaactagagagaaagaaggaggctaactctgcattttttatgattttgttgtcgacgaggagggaaagttgctctacatattctgggctgacgctacaagcagaaaaaattattcactttttggtgatattgtgtcatttgattccacatatagcacaaaccactacaatatgaagtttacaccattcactggtgtcaaccatcatatgcaaagtatctttcttggaggtggattcctaataaacgagaggattgagtcgtatgaatggttgttcaagacattcctagtggcaatgggaggaagagccccatgactaatcataactgatgaggatgcaagcttgaaatcttctattggctctatattacctgagaccatacacaggttctgtatgtggcacatattggagaaaattcctgaaaaggttggccacacaaaaactgcagaagaggatttttggaagcttttgaatgattgtgtgtggggttcagaaactggagatgaatctgagaggtgaaaagcttaatgaactacctttggcttactttttaaagagattcgaaaaaagatgcaagagagagatcgtgtacgatgaagaaggaaacttgttggacgagaagccattagatgctaatgaagttgaaacaaggagaaagatagcagctgtgcgaaacaaaattgaagacatgattcaacaagcaaagagttcaaaagaaggcatggatttcttagtctcaagcgtgatgaacatggaaggaactcttggtcagattgtacctagcacgatgcagagtagacagcaagagtacgaaggtttcattggttgtcaaattccagaacaagtacatattcatccaccaactgatgtccgatccaaaggaaggagtaaaagaattaagaaatctaaagaactaccaaagtcacgaaagcgaaagaatgccaaccatgagccagcagctccatagatgttgatttgtagtattttgttttcagttagtatcttctggactgtactgttttttgggcacttttctggttagtagttcagcatggtgacattgtttccagtcatgaaacaatctttatttcacatggtctatataatcagtttacaatcacttt

SEQ ID NO: 24721 - DNA, 822 bp, Zea mays
  Clone ID: LIB3637-198-B7_FLI
ggcattgcaaatctgtcaccgaagctgtcaatagctagagagagatagagagagagagagagagcagggtgcggcgccggagcggaggaagatgagcgggagcagcaacagcagcctggagacgcgcacgttcctggacgaggtgcgcggcctggagaagaactggatggtcgacctcggccacccgctcctcaaccgcgtcgccgagagcttcgtcaaggccgccggcatcggcgcagtccaggcggtcgcgcgggagtcttacttcatggccatggaaggggagggtgggggcacgggagccgtgtccgactccaccggcgccaggaagcgatcgttcccggatctcaacggagggaacagcagcaagtcagctgaggctatggtgaaaagcgtgagcaaagagtctctccagtgggggctcgcggccgggttgcactcggggctgacctacggcctgacggaggcgcgcgggacgcacgactggaagaacagcgtggtggcgggcgccctcaccggcgcggccgtcgcgctcacctcggaccgcgcgtcgcacgagcgggtggtgcagtgcgccatcgccggcgccgcgctgtccacggccgccaacgtgctctccggcatattgtgagccgctcagccggcaaattagctgtccggagttttaactacctgcatcttaacttctcaagtctgccattgttatgctagctgttggagcttggaagtcttcagtgtagcactcgttgtaattggcatcttgtatgcttgatttcctgtgctatcacggggtacaaataaatcgaaaaatcatgtcgaacc

SEQ ID NO: 24722 - DNA, 635 bp, Zea mays
  Clone ID: LIB3637-199-D7_FLI
attgtgcactcataattttgcaagtgcatctatggataccttcacttattcctaacggatgtctttcaggctgtcacgtgattcaagagtattaatgatatacaaaagtttgctttatggcaagtcaagtaaccaccaattttgggcaatgacagggatgtgcagtggtggtctcttaaaagaattttgtgttccagcgtagctatttccactgcaaactatcaaatcattacaaactggcattccatggcttccactagttgagtccccatgataaccaatccttgttatcatatacttcttcaagtttgacgtcagcaacgtggtcatggtgaccggcgggaggaacaccgggcgtgtaggagtgatcaagaactgggagaagcacaagggcagcttcgaggtcatcgacgtgctgcttggagctttttgcatgctatttctagttttctcttatttgttgtacaagaaaacatagaatgaaattcaaatttggtggtcgcaaaagtgtggagacttgaattcatataaagttaggcttaacattaatgcaaaaagttgtattttagttttgatttagagtacacttatgtatgccttgtttgacaatacttatttatgatatattgaatggt

SEQ ID NO: 24723 - DNA, 737 bp, Zea mays
  Clone ID: LIB3637-200-F3_FLI
gtgctgtcgtgcctgatttcagtctcggtgaacttcagcacttttctcgtgatcgggaagacgtctcccgtaacctaccaagtccttggccatctgaaaacatgcttggtcctcacctttggctatgtcctgcttcacgacccgtttagctggagaaacatacttgggatcctaatcgcggtaatcgggatggttctgtactcgtacttctgcactagagagactcagcaaaaaccagcagaagcctccccgcaagccgttcaggcgaaggagggtgaatcgaacccgctgatctcggactccctgagcgctgccgaaaacggaggcagtgccaccgacgacgaacctctgaaggtaccaatgtggagctcgaagtactcgaaggcgtgaagtggctgttctggtattagtgcacacggtgctatacagaattcagcttggtaggcagaccgcagatactagggttggaaggcaaccctgttcctgttccatttttggccttctattttttcttcttcctggcacaaatactataaatatgtgctgtcagtaaatggatctcactcttgagaagaatacctcagctcgagaccgagtgttctgttctgcttgaaagctagtatttgtttgtgctccactccacatgtaaagtggtagatggacatgatctcaacagtagtagtttgcattcttttgtactagtgatatacaatatttatgtattcctcgtgttccct

SEQ ID NO: 24724 - DNA, 777 bp, Zea mays
  Clone ID: LIB3637-203-B7_FLI
gcgaaaaatggtactcttcttcgtgcctattctgttttctgcaccatacagaagccagatttgaagtgctggaatgctatgataggaggatatggcaaccacggggattctgaaatggcattcaaactatttggtgacatgattcgtagtgatctgcaacctgaccatgtaacatacatctcactcctttctacttgtagccattgtggactggttgagaaaggaaagctttattggttctgcatgataaatgacggcattgtaccagggttcaaacactacactagcatggtgagtttgttgagtagggcaggtttattggaggaagcagttgagttaattaataaatccccttctgccaagagatatcctgagctatggagaattctactaagctctagtgtgacatttaaaaatctgtcaattggtgttcatgctgctgaacaagcactggagctggatccagatgatctctcaacacatatactgctttcaaacctttatgcttctataggaaaatgggatagtgtgtctgaaattaggagaaagatcagagggctcatgattgaaaaggagcctgggcttagctggattgagattgagaaaatggtacatgtgttttctgcagacgatgaatgccacacacgcattgatgattgtcgtgatgagttacttagaataatggaaaacatggtactgttggatagttatgaaaatgaaatagtgttaaatggttaggttgcctttgttgttaatggaaatggggttgacttggtc

SEQ ID NO: 24725 - DNA, 1249 bp, Zea mays
  Clone ID: LIB3637-203-E7_FLI
cacgttttcattgttatttttcttttacccagactctgctatctgtatcctgtcctgtaacttctaaaccctcccttctatctttgaaagggtaacacctttttttactttaataaaaaactttttactatttgtaatattttgttttttctcgtccaactgcatttgtatttataaatacttcacgtgccacatagtctatcagctaagtgctaaggcaactaggcaagtatggatatttttaaatatacgattttagcttaacaggattttgtgccacttctgtgcctatgtctatgttagtctaaagggcattttcgtcatctcagtgtttgacaactatgcaatatgacctcttgcaaataatccagtagagtacatactgccggtcttgcaataatttagcactatcacataataatgattagagatgtagttaggccctgctgcaagggacgcttttctggattcttatggacttagtttggagttgaaacgttccttgcaatattcctgcaatttctttttcatccaagttccaagcatgccctattaactcctgttctggatatttattgacatgtacttaacccaacataggtgccatgtcgtgttgattctccagaagagtgtgccaaaataatatatgcaaacaagaacctacgtcttggttctgggattcttattgcagtaccgatccccaagcagcatgcaacttcagggaaaattatagagtctgcaatacagacagctctaaaagaggcaggggataaaaggataataggaaatgcgatcactcccttcatgcttgaaagagtaaaagaactaactggaggatcttccttggaagctaatattgcacttgttaagaacaatgctcttattggtgcgaacattgctgttgccctttctaaccttcagcagagagaaataagcagaatgggaagatccgcgttgtagggttacgctcgcggatggagtagcacaggaagcaaaccatttacgaggatggaagctagctgcaggttgggaactggatgtgattgagatgtgtctgagtctgacaagaataggttgcctgccactttggcaccgtaatgagatgtaggccatcaatgtactataattagatgttttttgggatgtaatctgaatttggatggttctctatactgaaatcatctgctttgtgagcggaattatggaatggttttggcacttccatttgatacatgtagtatgtgcatgc

SEQ ID NO: 24726 - DNA, 608 bp, Zea mays
  Clone ID: LIB3637-203-G1_FLI
ggaggaggagacgtcacgcctgcgcggctgcgcccaccatggacgaggaggagttccggcgcatgctcgacctcttcccggtcgtccgctcccgagactactgctgctccgatcttggaacatccagcagaggaaccagacagcgatcacgagttcaggaggcaactaagggcgataataaggactcgtccggtggacgagatatgtttatgcagaaattgaagatggctgcggagaataagattggagcgacaaaggcagagttcttctgcaagacattcgaagaagttcatgagaaacttgttcacagagagctgaatttggatgctgctaagaagttcctgagcgcatatgagagctgatgatgaacaataggtagatgctgcttaagggtcggtagttgccaatgatctggaaagttgttgatgctgttgagattttgatcacaggcaaacttttaacaacaggtagatgctgttgagcgcatactgataccgcctgattggttcaccgatcgcccgtagccagctcgtatgcagccaggctgtccagagactgttatttgggccgtagaagtggatgcactcaaaataaatgttgcgtttact

SEQ ID NO: 24727 - DNA, 1418 bp, Zea mays
  Clone ID: LIB3637-203-H2_FLI
ctcaacttaaacgatctcatgcaaccaatcaaatgtactgaattatatgtacacaaccagactagatcatgtggacaaccaatcaaaccccaaatatcttgttaaaactgaaactctcccgcctacgattagacactcgtaaattgaagatgaaaaaaaaaacggtcctccatctatcaatgatgatatctaggctatccagacataaatcccggcaaagagaaaagctgctcgacatggacctctctctccgttcggcctccatgatttcaacatgatcatagacaaggagtgaccaatccctaaacccaaattaatataaaaaagaacccattcccaaacgaccacacactacacagctcagcccagcctccctttcccttgaagcctctccaccaacccagagtcagagagagaggaccaaggcacaaggcaggcagccgtcagcgagccaggcagccagccatgggcaaggactgcggcaaccacggggacgatgacttccggcagtcatgccggcgcctgctggccatcctgctgaccatggcgctgctggtgggcgtcgtggcgctgatcgtgtacctggtgctccgccccacgcacccgcgcttctacctgcaggacgcggcgctgcggcagctggacctgagcaacggctcggccccgctgctgtccacggcggcgcaggtcaccgtggcgtcccgcaaccccaacggccgcgtcggcgtctactacgaccgcctcgacgtctacgccacgtacaagtaccagcaggtgacgctggcgtccaggctgcccacggtgtaccagggccacggcgacgtcgacgtctggtcgcccgtgctggccggccccgccgtccccttcgcgcccttcctcgccgacgcgctcgccaaggacctcgccgcggggtacctcgtcctgcagctcaggatcgacgggagggtccgctggaaggtcggcagctgggtgtcgggccactaccacatgttcgtcacctgcccggcttacttcatcagctccggcgccggctccggctaccgcggcgctgtcggcgcacacgggctcaggttccagaccaccacgtactgccgcgtcgaggtctagactctagcgagcgagaggtcgatcaccgccgagaccgcccgacctccacgtgctctgctccagccgcgccgccgaggtaggccacaccttgtcatgtcgcatactgcaaagcggaaacaaatgaagtgatacagaggttggaaaaaaagaaaaagaacaagtgtgaggtgatttagtgagggttaaccagtgtatcggtgtgattacatatatgttttttgttttgttttgtgtcgcgatctttgttcagttcagcgttcagttgttcataatataaattctaaaaagttcattcagttcaggtgagacgc

SEQ ID NO: 24728 - DNA, 1125 bp, Zea mays
  Clone ID: LIB3637-204-G2_FLI
caaggatcgcattcgccaagcaacggcgggtcggcggcgcgggggcgatggagacgcggctgccgcggcgcggctggaacaaacgcttcgtcctcccgctcgcgctcctctgcctcgccgtgctgctccccggcgcgctgctcccgccgtccgcctcggcgtcgtcttcgtcgccggccgcgggaggtggcagcaggaaacgccggtgggttgggtttgactactatgtactggcgctgcagtggccgggcaccatctgccgcgagaccagcaactgctgcgacaccaatggctgctgccgatcacagcctctcaagtggttcacgatccatggtctttggccacagtataactatgggggctggccatcatgctgcagaccaaccagattcaacataaataagatcttaatgttgatgccgatactcgagaagtactggccgtccttgtactgcggttcttcttcaacctgctttggtggaagggggccattttgggtgcatgagtgggaaactcatgggacctgtgcttaccctgaaatacaggatgaatatgactacttctccacagcactgtatctctacagcaaatacaatgttacgaaagctctgagaaaagcacgtatccggcctacaagcggcagaaaatacgccgttggccatattgttgctgtcattgaatatgcgtttggggcaatgccgtcactcgtctgtaagaacggctcagttcaagaactcaggctctgcttccacaaggattatcagcctcgtgattgcacgcttgaggccggctctgcaccgaacggcagaagctactgccctcgctacgtcacgttcccgtcgtataaaccgtccgtggtggccaatactacggaggggatcaacaaccaatccaatggcgaggttccgagctacacgcgtacgtctgactctgagtagcgtccaggactccaggttctgtgggcctctgccgagccgagtttgtatcaatagagcgcgacgccacggcgtgcttgcaaaattaccggcccggtatggtcctgtatagttctttcattcacagtatcaaatgactggccaccgcgcaccgggatttggaaatgaaatgtgaatgttaatggatatt

SEQ ID NO: 24729 - DNA, 699 bp, Zea mays
  Clone ID: LIB3637-205-D12_FLI
cccggtgttactttaatatcagcgaaatgggtttttctgcgtacctttgttatatggctatgtatctcatttttgtggagtttggaatttactggatgcacagagagttgcatgacataaagccactatacaaacatctgcatgcgacccaccatatttacaacaaggagaacaccttgtctccgtttgctggactcgcgtttcacccactggatggtattctgcaagcgataccgcatgtgcttgcgctcttcctcctcccaacgcacttcaggacgcacatcgctctcgtgttcttggagggcgtgtggacgacaaacatccacgactgcattcacggcaaggtatggccagtcatgggcgctgggtatcacaccatccaccatacgacttaccgccacaactatggccactacaccgtctggatggactggatgtttggtacgctccgtgagccagatgatatcctcaagaaggcctgagttcgtcgtagctgtggttttcctacggtgctggatgtgcttggtctgttctgtccccagtgcctctaatccgctgagcctgttcagcgctctgtttctgtaggctttggtgtgctatttagtttgctaggtttatatgttgtgcttattctgtaatttagtgatgtttgtctgatgacgcaacggagttcaggacgaataaagaaagatttgctag

SEQ ID NO: 24730 - DNA, 720 bp, Zea mays
  Clone ID: LIB3637-205-G11_FLI
ccgacccaagacgacgacgatggcgaaactgaaagtccgaaacctagcgtctctctctctctctctcaggctgttgagttcacgggcggccgatgctgagctgcgccaggcgcgcggcgatgtccgccccgccaagcgccggcgcggcctcctccctcgccacgcgcagcctcgctagcctctccgcgacgccctcgacccctgcagcggggctcaccctcgacgacgcggaggcggagatggccccgcagacggcggcgcacgcggcctcgtcgacgaagcagagcgcgaactcggcgccggactcgggctccgcccacgacagcgtcgcgccgtccagcctctcgaaggcgtcgccggggaggatcgggtacgcgaacacgatacgcccctgcggatgctgctgctggcactggccgtcggcgtcggggcccgccgcgtacaggaccagggatttcccctgcgggcggaggaacgtgacggcggcgtatgcggcgccgaggttgctccagtggccgcctcctccgccgacgccgccggggaggtgcaggagctgcacggggaatgcgccgccgctcgccatccgataggctcgattcgtgggagtgggacggcggaaaggaccgcggaaataatgtcgtctggtgcgtctgatctctgccgcttgtttcccatccgacgtttgcatatcatttctaatagttgtgacttttgtgtgat

SEQ ID NO: 24731 - DNA, 649 bp, Zea mays
  Clone ID: LIB3637-206-B7_FLI
gagtttttagcgtggacacacttgtcaagcctcttcctcctgtaatggcatacagtgtatcccgcaatataaacttcttcttccggatcttcacacagttttgggatgaagaaggaattgccaatgcccagaagtcccttggactggggaacgaggacggctcccgccgaatgcgctgatcatggtcaaaccaagttttctgtaccgggttcagaactcttttgccctagacactggagacgtgttatacgcctcgaaagacatggcatgggacatttttagggaaatttggatccataccattaaaagatcaccactttggatccataccattactatatcacttacatgtggttccacatgagtcaatgacatgtggggtccatggtatatatctaaagtttggatcttttaatggtatagatccaattgttccacatttttaaggttggcttgcaattttgcttatcctagtgtgtctgtttcatgtatgtttgaagtccagatcttgtgcttgcaaaatagaggagtcgaggtggcacatcgaactccaggccaatggaacgaaatgcctacctgttcatttccacttcaacagttccattgtatactagtcaaagacgagcttgggcatatctttttctgcttc

SEQ ID NO: 24732 - DNA, 1309 bp, Zea mays
  Clone ID: LIB3637-206-C12_FLI
cgcccgcccggccgccatggacccgcgcttcccgccgccggcgccgtcgtcctgcttcggcgggggcggggagctcccagcacgggggcaccaccggcgggcgcactcggagacgttcatccggctgcccgacgcagacctgctgctggacccggacgccgacttcggcttctccgacatcgacttcccctctctctccgacgactcgcccgcggcgtccgacccgacgccgcagccccaggccccgccgctccagccgccgctgcagcaggcggcttccccggcgtccgcggcgccgccgaggccgccgagcggggcgcacatgcggagcctctccctcgacgccgccttcttcgacggcctctcgctgcagggaggcggcggcggcgggggggtaagagggggcatggcggggcacaagaggagcggctccatggacggggacacctcgccgttcgagggcgagtcggcgccgccgtccgtgctgccggactacgccaagaaggccgtgcccgacgacaagctcgccgagctcgcgctcctcgatcccaagcgcgccaagaggatcctggcgaaccggcagtccgcggcgaggtccaaggagaggaagatcaagtacaccagtgagctggagaggaaggtgcagacgctgcagacagaggccaccacgctttcggcacagctcacgcttcttcagagggacacctctggtttaaccactgagaacagggagctgaaactccggttgcaggccatggaagaacaagctaaacttcgagatgctctaaatgatgccttgagggaagaagtccagcggcttaagatagccgcagggcaggtccccaacatgaacgggaatcccttcaatggaggactatcacagcagcagcagatgccaagctatttctcacaaccacagcagatgcaatacttcagcggccaccagggccagcatcaccatccgaagcatgacccccagaattcttcaaacggcggtggccagcccttgagtgactccatggatttcatgtgaggactcaggggagacagctcaggagtgttgcctgagatcacataccaacttcaactaaagtaatgtaaatgtagctgatgtataccatattcagtgttatgatatgaaccattgtagtttagctagctgttccttgtaccattaatcaaaagttcattcatggtgacaaacctatcatcgcttttgttctggcgttaaagtaaattggcttgactggttgacgagctgtcgttgtaaagttgttcctgtaacagtgaaggaatggtttgcggttgg

SEQ ID NO: 24733 - DNA, 707 bp, Zea mays
  Clone ID: LIB3637-207-F5_FLI
gagcaaccgataatccgccggcgttgagatgttggtttatcaggatctcctatctggcgacgagctcctgtcggattcattcacctacaaggagctcgagaacggcgtcctgtgggaggtcgagggaaagtgggtcacccaaggtcctgttgatgtggacattggtgccaatccatccgccgagggtggtgaggacgaaagcgttgatgacacagctgtgaaggtggttgatattgttgacacattccgtctacaggagcaacctccttttgacaagaaatcatttgtgtcttacatcaaaaaatacatcaagaatctcactgctgtgttggagccagagaaagcggatgagttcaaaaagggtgtcgagggtgcaaccaagtttctccttagcaagctgaaggacctccaattttttgttggtgagtccatgaaggatgatgcgtctgtggtattcgcctattacaaggatggtgccactaatccgacattcctctatttctctcatggtcttaaggagatcaagtgctaggcgtgcggcgaaattagttacccatgttgggtactatctatgtactattattatatccaaaactatagttgtcctggctgaattgaactcaaaagggtttgtttgagaaaaaattgtcccaagattggattgcttgttaaagctcaatattgttattgaagtgttattgcttagt

SEQ ID NO: 24734 - DNA, 1233 bp, Zea mays
  Clone ID: LIB3637-209-A3_FLI
ctcgccgattccccatctcgccctgcccgccgaagagcgcgcaagccccatctcgccctgcccgccgaagagcgcgcaagcaccaccgtcccggcagcgcggagatcggtccactccatccacgcggcgtcaggcgagcggggcgtacggacgctgcgaccgatggatctcaaggatagcctctccaaatttaagcaacagcaggagagatgtcagtcatcactggcgagcatagctgcttcgacctcaaagccaaagcacagggcccaaccagcgcatgctcctaacgtcccagcaagaccatcacaacctattaagttttcaaatgatacagaaaggctgcagcacatcaattcgattaggaaatctcctgttggagcacagatcaagcttgtcattgaacttctttacaagacaagacaagcttttactgcagagcagataaatgaagcaacttatgttgatattcacggtaataaagctgtctttgacagcttgagaaacaaccccaaagtaagctatgatgggaggcgtttctcttacaagtccaagcatgacctgaagggaaaagatcaactgcttgttttgattagaaagttcccagaaggtcttgctgttgtggaagtcaaggatgcatattcaaatgtattggaagatttgcaggctctgaaggctgctggtgaggtttggctgttatcaaacatggactcccaggaggacattgtatacccaaatgatccaaaagcaaagatcaaggttgatgatgacctgaagcaactcttccgtgaaatagagctgccacgtgacatggtcgacatagagaaggagctacagaaaaacggtttcaagcccatgacaaatactgccaaacgacgagcagctgcccagatcaatggcgtaaaacccaaggctaagcccaagaagaagcagcgtgagatcacaaaacggaccaagctcacgaatgcccatctgcctgagctgttccagaatcttaacacttaaacgtgctacagtatctgacgacggaagatggttcattttactcctatttattgctacgttgtgtgtatgtgttatgcagctatgctgtatggcttatggttatgagcgccacaaatttgtttgtcaagattctggatgatatacttatgcattctgacataataggaggcaaaacctcaagattttccttatttttattttatcaattacagcattttctgagtttgcggc

SEQ ID NO: 24735 - DNA, 966 bp, Zea mays
  Clone ID: LIB3637-209-G11_FLI
gcctcccccagacacttcgccgccggcaagatgggccgcgtgattcgcgctcagcgcaagggtgcggggtccgtgttcaagtcccatacccatcaccgcaagggccctgcccggttccggtccctcgacttcggcgagcgcaacgggtacctgaagggcgtggtcaccgacgtcatccacgacccgggccgcggcgcgccgctggccaaggtcaccttccgccatccattccggtacaagcaccagaaggagctgttcgtggctgctgagggcatgtacactggccagttcgtttactgcggacgccgtgctacactctccattggcaacgtcctgccgctcagggggatccctgagggtgccgttgtctgcaacgttgagcaccacgtcggggatcgcggtgtcttcgccagggcgtctggggactacgcgatcgttatcagccataacccagacaacggcacatcgaggatcaagctcccctctggtgctaagaagattgtcccaagtagctgccgtgccatgattgggcaggtcgctggtggtggcaggactgagaagccaatgctgaaggctggcaatgcctaccacaagtaccgcgtcaagaggaacagctggcctaaggtgcgtggtgtggccatgaaccctgttgagcatcctcatggaggaggtaaccaccagcacattggtcatgcctccactgtccgccgtgatgctcctcctggccagaaggttggtcttattgccgcaaggagaactggtcgtcttaggggccaagctgctgctactgctgccaaggctgacaaggcctaaatttgcgttacgcagcattagccatcttatatagattaaaaatatttttcctgcatggatcttaattttgtatcattctgatagcgatgaactgatgatactatggacattccagtttttgttgcaagctattgatgatattttttcttcttt

SEQ ID NO: 24736 - DNA, 731 bp, Zea mays
  Clone ID: LIB3637-210-B8_FLI
ctccgatcgacctgctccctccccaccaccgagcccatggcggaccagctcaccgacgaccagatcgccgagttcaaggaggccttcagcctcttcgacaaggacggggatggttgcatcacgaccaaggagctgggcactgtcatgcgctcgctggggcaaaatcctacagaggctgagctccaggacatgatcaacgaggtcgatgctgatggaaacggcaccatcgatttcccagagtttctcaaccttatggctcgcaagatgaaggacaccgactctgaggaagagctcaaggaggccttccgtgtgtttgacaaggaccagaacggcttcatctcggccgccgagctccgccatgtcatgacaaatcttggtgagaagctaactgatgaggaggtggacgagatgatccgtgaggctgatgtcgatggtgatggccagatcaactatgaggagtttgtcaaggtcatgatggccaagtgagccacagaaccataatctgaaggcagagaagattctgcattgcatattagtcaagatgcaactttttattccatcgacttctagtgaaacattctgctagttgtagttgctgaaaatggcaatgtagttcctgctttgttcttccctccagtgtgttttcataactgttgtttcatgtgaacttgtaatgattgccctctctgctgtgtcttgattgcagttaaaatcatatgtagtttcacccc

SEQ ID NO: 24737 - DNA, 578 bp, Zea mays
  Clone ID: LIB3637-212-A9_FLI
tccacatgagataggaataaccgaacaagcccttctatggccgggaggattgtcgagtgttcctggaataaggaagagaagctttgggcctgtgtgcgtattagatctgataaatcgactccaaacgacatcaacacataccggaaggtgatgagtatatatcacggataagaaaagcttctccacgcggacgacaaaataaaagtaagagcaccttgaagaagaatttgaagtggaagtggaaggggagcttgttcctccatcggaaccttctccaactgaggttgtcactgaaggtcctccagaaggtgtcccatttggatttgctgctaactgcaatatcctggtcgaagaacccgactctcctcctcaccaaggagaaactatcaacacatatgagttttgttaaactcataatggtgacttttacttgtgtacattatgtgggtgctgcgggaagatggtttcttcccagttgatgtaataagttagcactttaactctacctcgggcatgtaataataaatactttgtggtttgtaaacttattagcttgttaatgtatattatcttattgt

SEQ ID NO: 24738 - DNA, 1052 bp, Zea mays
  Clone ID: LIB3637-212-B2_FLI
cgacgcgctagctagttctattgccgcaccccagatctccaggagggactcgttcgttcagctaactacactgcacgcaatggccaccacggcgaccgaggcggcgccggcgcaggagcagcaggccaacggcaacggcgagcagaagacgcggcactccgaggtcggccacaagagcctgctcaagagcgacgacctctaccagtacatcctggacacgagcgtgtacccgcgggagccggagagcatgaaggagctccgcgagatcaccgccaagcacccatgttcctgaacatgctcatcaagctcatcggcgccaagaagaccatggagatcggcgtctacaccggctactccctcctcgccacggcgctcgccctcccggaggacggcacgatcttggccatggacatcaaccgcgagaactacgagctgggcctgccctgcatcgagaaggccggcgtcgcccacaagatcgacttccgcgagggtcccgcgctccccgtcctcgacgacctcatcgcggaggagaagaaccacgggtcgttcgacttcgtcttcgtggacgccgacaaggacaactacctcaactaccacgagcggctgctgaagctggtgaagctgggcggcctcatcggctacgacaacacgctgtggaacggctccgtcgtgctccccgacgacgcgcccatgcgcaagtacatccgcttctaccgcgacttcgtgctcgtcctcaacaaggcgctcgccgccgacgaccgcgtcgagatctgccagctccccgtcggcgacggcgtcaccctctgccgccgcgtcaagtgaaaacatggcctggcctggcctgccccaccaccgccaccgacggcgccgccggccgcatcctcattccaatcataatagacgacccgcagcattaattatccaccggctttttttttggctctttcttgcccctgtaatctttctcctcctcttccttcttgggaattgtcgccgccgtttcgatacgtaaatcacgagatcggtaatacagtaatgctcctcaattttac

SEQ ID NO: 24739 - DNA, 561 bp, Zea mays
  Clone ID: LIB3637-213-B12_FLI
ccgagatcgggggtgcggccaagcggtggtgagcgcgactgggcggcggccgtgctggagccagtgcggtggatgcggatgctgtgccgggagctgggcgcgacgttcgtggctggggtggtgctggtgtacggcctcagccagggcttcgccggctccttcttccgagtggcgtcggactactactggaaggacgtgcagcaggtgcaaccagccactgtgcagttcctctccgtcttcttcttcattccatgggtgctcaaaccgctctgggggatcatgaccgacgtctttcccgtctgcgggtaccgccgccgcccgtacttcctcttctcaggaatacttggaacggtttcagctgctatcgttgcagtgactattggattgccaatgagttctgctgtactttgcttgatgggaatctcaacagcagtcgccattgctgatgtaacaatagatgcttcaatcgcaaagaatagtattgataagccggcgctggctccagacatgcagagcctctgtgcattctcatcatctctaggtgcacttgttgggtatggt

SEQ ID NO: 24740 - DNA, 1164 bp, Zea mays
  Clone ID: LIB3637-213-E2_FLI
aaagagctctgaaaagagatggctgtcccacaagttgacaagaaaatgcttggtgaacttgaagccatgggattcccaactgcacgttcagttagggcactccatttttcaggtaattccaatcttgaatctgctgtgaactggcttctggaacatgaaagtgacccagatattgatcggctaccactggttccaagagaaataagcattgaatgcggtgacacatcagatgaagtaagaaatgacgttgaaggaatgagggatactgtgcaggagcagaaacctaaagaacacactgaaactgggagacagaatgagacatcccagctggaacgagaaccaaatgcagatgggcaggaggaagaagatagaaagaggatattagcactatataagcaaaaacgagacgaggaagggagagcaagagggcggatacggagtcaattacaagaggatcagagggagaggattcgagctgctaaagaccttatggaagcaaagagaagtctcgaggaaaatcaaaggaagcgggtgatggagagtcgggtagcagatcaagaggaggagaaaagagcgagggagaggatacgccagcgtatagctgacgataaggcagaaaggaggagacggcttggtctgccgcaggatgatcctagggatcccgccgcaaccatgacgcctgcaaaggtaaagcctgctggacgcgccgtcgttgcgtcagagcagctgagagactgcctgcgaaccgtgaagaagaaccacagggatgaccctgctgcagtggcaagagcgtaccaggtgttgctcaagattgttggcaacgtagcgaagaacccaggggaggagaagttcaggaggatccggctcagcaaccctgtgttcaaggacagggtgggcagcgtgcgaggcggcgtggagttcctggagctgtgcgggttccgcaggctcagcggcatcggctacctggtgatgccgagggacaaggtcgacgtggctctgctcaccgccgccggcgtcgagatcgcgtcggccttggagaacccctacttcggcctgctctccaagtgaagcgaacggccgctgtcgctgcttattgctaaaccatgatgtactgtacagctacaatctggacgatgatatttgatccgttcccctcttgccttc

SEQ ID NO: 24741 - DNA, 530 bp, Zea mays
  Clone ID: LIB3637-214-F9_FLI
gttggagtaagcaccagatacctcgccgagaagttcccatcagctcaagctgttgggctcgacctatcaccgtactgtcttgctgtggcggcacaaaaggaagaaaaactgtcacggccaaagcctattcgctgggttcatgccaatggtgaagcgaccggcctgtcttcagattcatttgaccttgtctcccttgcttatgtgcacgagcgataaccggattggtgaaggaagcattcagggtccttcgcccaggaggaacaatcgccttaacagacaattcgccgaagtaaagtacttgaggtaagcttcagcagccatcagcagcaccaggtttcaacgacacaccttagatggtgacatttatttccatgtattccaggaactatccccagttttgttcactctgatgaagagtaccgagccttttcctggacagttcctggaattcaacatgctgcaattcaacatgtattgtgagcttgttctctttttttgttctatatcttatgggctctaatttcattaac

SEQ ID NO: 24742 - DNA, 1139 bp, Zea mays
  Clone ID: LIB3637-215-A11_FLI
catttcccatcccctgccgcgctgtttacgcccacatctccttccgtttctcggcatcgtcgacacctccatcggcctccgatctctccacgagcctccgctccaatccgaggatctgcggcggtgggcagtggtcggccggcgatggcgcaccgagtggacaacgagtacgactacctcttcaagatcgtgctcatcggcgactccggcgtcggcaagtccaacatcctttcccggttcacccgcaacgagttctgcctcgagtccaagtccaccatcggcgtcgagttcgccacccgcaccctccagatcgaagggaaaaccatcaaagctcaaatatgggatactgcggggcaagagaggtaccgtgcaatcacaagtgcttactacagaggagccgtgggtgcacttctagtctatgacatcacgaagaagcagacatttgaaaacatacagaggtggctccgcgagctccgtgaccacgcggactccaacatcgtgatcatgatggtcggcaacaagtccgacctgaaccacctgaggtcggttccagaggaagatgggcaggcgttagcggagaaggaaggcctatccttcctcgagacatccgccctcgaagcccttaacgtcgagaaggcgtttcagaccgtcctctccgacatccatcagatcataagcaagaaggcgcttgcagcccaagaggcagcaggtagtggacctccaggtcaaggaaccaccatcaacgttgcggattcgtctgccaacatgaagggagggtgctgctcttcctaggtgtgcagacaaagacatgctgctgctgctgcaaaaaagagagagagaaacctcatggatcgtacgatactttaggtgttatgtaggtgacgactccttttggcctgtaactccggtgggttgtaatcacagttcatacttctgcaaagaaatcctcctctcaggtagatatggcgtgtagtttttgaaattttggtagagagcgatggttggcagacttgcgtggagcccagcttggtgttttctttcagtgttctatcttaagtagccctctgctggaaaaaggacccagatatttcttgtatttgtactcgagtttgcggtgttaccagatatactttgattcc

SEQ ID NO: 24743 - DNA, 962 bp, Zea mays
  Clone ID: LIB3637-217-E10_FLI
ctcttctccggcgaagaacccccagtcgcccaccagatcacttgttaaactttgttgaggggtgatggcggtttctttcgcaaacctcaacaccgaggcagggcttaaaaagcttgatgagtaccttctcactcgcagctacatcactggctaccaagcttccaaggatgacttggctgtctacacttcgttttcgtctgctccctcgtccaagtatatcaacgtagcaaggtggtttaatcacattgatgcgctcgtgaggctgagcggaattactgcagagggccaaggtgtgaaggttgaatcctcagcagttccttcagccccaactccagatgttgctgaagcacaggccccagctgctgaggaggaggacgatgatgatgttgacctttttggtgaggagaccgaagatgagaagaaggctgctgaagagcgtgctgcagctgccaaggcttctggcaagaagaaagaatctgggaagtcatcagttttacttgatgtgaagccatgggacgatgagactgacatggccaagcttgaggaagctgttaggagtgtccagatggaagggctgctctggggcgcatccaagcttgtcccagtcggatatggtatcaagaagctgcaaatcatgatgaccatagtcgacgatcttgtctctgtcgacactctcattgaggactatctgtgcgctgagccagttaacgagtacgtccagagctgcgacatcgttgccttcaacaagatctaggcgtgactttcgatcagtccttcccctggggtgctggcgatggtggtggctgggcaatgcaccagcctaatttttccatagctatatgtctgctttgtgtggccagtgatattgccgtgagtatttttggatcctattcgagtcgaatgtaccagtaccagagttaatttgctttaattcgaaacaccgttccggttggaattctgtt

SEQ ID NO: 24744 - DNA, 1722 bp, Zea mays
  Clone ID: LIB3637-218-D6_FLI
cttgcttttctgtatcttattaccggttacttggacaaggtgggcttcatgtgcaaaattgctggacagaacaacaatttgatgggacagttccacaatgcgttgtatcttggggatgccaagaagcgtgttgagatcttggagaatgctgggcagctgcctcttgcttatgttaccgctgccactcatgggctcacagaatttgctgagaggattgctgctgaattaggcgagaatgttccttctctacctgaaggaaaacccaaatcactactgatcccccctgcacctctcacagcctgtggtgattggccattgctgagggtaatgcgcggtatttttgaaggtggattggatgctactggaagggcggatcttgaggaagatgatgaagctgctggtgctgattggggtgatgaggagttggatattgttgatgcaagtgaggttgtggccaatggtgatggttttgatgtagaagagggtgaaccaaatgaggagggtggtgaggaaggtggctgggacctggaagatctggaacttccacctgaaactgagactccaaaagctgttggcaatgctcgttctgctttatttgttgctcctacaccaggtattcctgtcagccaaatttggactcagagatcttctctggctggggagcaagcggctgcagggaactttgacacagcaatgaggttgcttagccgccagttgggtatcaagaactttgttccactaatgcccttgtttcttgatctgcacatgggcagtcatacatatttgcgtgggcttgctgccgctcctgttatatcagttgcagtagagaaaggttggaatgagtccgcaagtcctaatgtgaggggccctcctgcgcttgttttcagcttctcacggatggaagacagactcaaggctgcctacaaagccacaactgagggcaagttcccagaagcactgaggcagttccttagcatcttacataccattccagttatcgtggtggactcacggagagaagttgatgaggtgaaggagttaatcgagatagtgagggagtatgtccttggtctgaggatggaactcaagagaaaggaactgagggatgatgtgacccgtcaacaggagttggctgcttacttcacaaactgcaagcttcagagagttcatatgaggcttgtgctcgctagtgccatggctctttgcttcaagcagaaaaactatgcaactgcggcacactttgctaggatgcttcttgagaacagccctcaggaggcccaagcaaagaaggcccgacaggtgctgcaagcttgccatgacaaggacgattcccaccaactgaactatgacttcagaaatccattcgttgtttgtggcgctacgtatgttcctatctatcgtggccaaaaggatgtttcgtgcccatactgtggatcccgatttgttccttccatcgaaggacagctttgtaccatatgcgagcttgctgcggttggggcagatgcatcaggcctcctctgctctcctacacagtcgagataagcgatggtagttagaggtcccctatattctttctagcgtctcaagttccaagatttcatcatatatatgttaccagagagtttactgattgtaaggaataagtattatacatgctgttgagtttttcttttcttttttgttctgttaccataatttttgtttgccttaggggctgctgtc

SEQ ID NO: 24745 - DNA, 1301 bp, Zea mays
  Clone ID: LIB3637-221-H8_FLI
atcatcagtcattcaccttcccggctttccacaaactcaaaccctgctacccatgaccgccgccgccgccgccgcccgcgcggcgcgccggcacttctcttctcggctccagactaccacctcgcgccttctccatgcaagtgattctcaggcagcggcgcgggagacatccgggagcttcatccaccccgccgctgtcgtccacccggatgcagccatcgggcaggctgtctcaataggtcccttttgcactgttgggccttcagccagagttggtgatacctgtcagttacatgccgggagccatgtcatgggccatactgagctaggggagggatgcattgttcaaacactggagatgaatgctttctacatattggtagaaataatgagatcagagagtactgctctgttcaccgctcttctaaatcttgtgactgcacggttattggtgacaataatctcattatgggttcgtctcatattgctcatgattgcaagattggtaacaataacatctttgctaataatactctatttgctggtcacgtaattgttgaagattggactcacactgcaggggctgttgttgtccatcaattttgtcatattgggtcatactcatttcttggcggaggctccgtggttgcacaagatgtgccaaggtacatgatggttgcaggtgatagagcagaactccgtggtctaaatattgaaggtctcaggcgcaatggattctccgaccaagaggtccgtaggttgaggaaagcttatcagagagtatttatgccaactataactagcaagagtagctttgaagacagactggctgaattggagcaggaagttgagctgtcggaatctcctgctgtgtcctgcatggtcgaatcgatccgcatgtcgtttgttcaaggacatcgggggatttgcaaattcagaagttggaacagctcttgaatgtgccaattcttaaattatcttggcagttacctcagacgttacttaggtgcatattcaatcttggcatcgatctactatatactatactatacccgaacagatgatgcattgccaagaccctgaaagttggattaatccatgtcaaatctgagtgaccaacaagatgttcttcgcatgcacgtatgggaacattctagaagccctgtatacgtgtgaatgttcacggtaccaagtagtgcgctaatttgctagaatgtacatgttggcctggatcagaggttcaaatctgtataatattgccataagttgccccaaacttttcaacgattattctttgggat

SEQ ID NO: 24746 - DNA, 590 bp, Zea mays
  Clone ID: LIB3637-222-B11_FLI
cgcctatctcgccaagcaccgccgcatcaccgaaggttcgcaaagatggcggtgccgctgctgacgcagaagatcgtgaagaagagggtcaagcagttcaagaggccccatcttgaccgctacaagtgccttaagccaagctggcgcaggcccaagggtatcgactcccgcgtcaggcgtaagttcaagggatgcaccttgatgcccaacattggatatggctccgacaagaagaccaggcactaccttcccaacaagttcaaaaagtttgttgttcacaatgtctccgagctggagctgctgctgatgcacaacaggacttactgcgctgagattgcccacaacgtgtccacccgcaagcgcaaggagattgtcgagcgtgctgcgcaaatggacatcgtggtcaccaacaagcttgccaggctccgcagccaagaggacgagtgaaatgttgggtagttttgattgtgctctgctggtgttgaagatgttactgagattgatgttcttctgtaccatttctatgcttatgatagacttttcatatggacaaaattatgctatgagtgaaaagagttatggggagtgcc

SEQ ID NO: 24747 - DNA, 532 bp, Zea mays
  Clone ID: LIB3637-222-E12_FLI
cacaggctcaccccaccaacagcaagcgaaaatctcccgatcccctctggtctccgcggcgaagatgtcggggcgcggcaagggcgggaagggcctgggcaagggcggcgcgaagcgccaccggaaggtgctccgcgataacatccaggggatcacgaagccggcgatccggcggctggcgcgcaggggcggcgtgaagcgcatctccgggctcatctacgaggagagccgcggcgtcctcaagatcttcctggagaacgtgatccgcgacgccgtcacttacaccgagcacgcgcgccgcaagaccgtcacagccatggacgtcgtctacgcgctcaagcgccagggccgcaccctctatggcttcggcggctaggctaggccggccgcgcctcgctgtcgtcgctgcggttctattgtttttgcaattcgcaagtagtggctcggtggcgaaaatgctggttactgtggcactagatcaagcatgttgtgcgtgtctgaagaaatgccaattgtgacttgctgtttgttc

SEQ ID NO: 24748 - DNA, 1460 bp, Zea mays
  Clone ID: LIB3637-223-A10_FLI
tcactgtctgctgcaagctgctgtagtcttgaccagctactagtttgtgttgagggagaggcacagaatatatttaatgacatccataatttgttaaccatccaccgaagcgaaatgacgcacttcactcaagaattaagggagagtttccaaataagcttggataggacaaaagaaatgtccacctatattattgggctctttgacaagtacgttgaggaaacctccaaattgcacagtcactcaaataatactcatgaagcacaaatgaaaagcattgaagactttcagatggtttatgaggtgagccattaaccctccttttgtttgctgcaaaatttggtagggtgtgtatcgcataccatctccttgtgcaggagcaatcaaaatcagtggagcagaagcttttagcggagataagcagtttagtatctaaacatattactcgacaaagagagttggtgggcgttagattgagctctctgggcgatgctgcccgtggaaataaggcatttttggatgaacacacatcggccatggagtttgtcacaaaagatgctaagaggaagtgggaaacgtttgcagagcaggctgaaaatgactgcaaagctggctccagcttttctgcagctaagcatagccgcatggaaaccatgcttcaggagtgcgcatgcactgttgactccgccgttcagcaatggaagaagtcacatgctgctgttaacgatctcagcagaaagcaagttgctgaagttgaagcactcgtcaggactgcaattgagaacaacgagcaacatgaactggaagttgcatcttctcgagctgtggctgaagaagacgcctccaataacagcaaggacatagctcagggcgttgaaaatctgttggaagaggcacggaattcaagttcaagagtggtctcaacggtggaggctcacttcggtgagctacagatgctgcaagagagccactcgagccaggctgccggtatcaacatgcacgccgacaaggctctccaaaccagttacaaggactacgaaccctcaggtgaaactccggtgaggtctgagccgaacgtgccaagcaaaggctcgattgaatcgctgcgagccatgcccgtggagaccatgatgaatgagttccgtgagaaccatccgtatgaacatgaatcgagcaaagaatctaagttatctcagatacctcgcttgccgctcgcgacaatcaactgagacattcacttccctatgtgcagtgtacttttattagtagggcgtcaatttgccggttttggtgtcccttgtgcacttgtgctaggttaaccatggggtgtgagctgccttggctctctccagtgcatttcccttttttcccgcattcaattatctgtaatgttctgttgtgccttgtacgatactgatattgtacagcatcagatatgtgccaaagctagcttgaattgc

SEQ ID NO: 24749 - DNA, 1373 bp, Zea mays
  Clone ID: LIB3637-223-D10_FLI
cgccgcctccgacatcgtctcttcgtccccacgagcaaccgataatccgccggcgctgagatgttggtttatcaagacctcctatctggcgacgagctcctgtcggattcattcacctacaaggagctcgagaacggcgtcctgtgggaggtcgagggaaagtgggtcacccaaggtcctgttgatgtagacattggtgccaatccatccgccgagggtggtgaggatgaaagcgttgatgacacagccgtgaaggtggttgatattgttgacacattccgtctacaggagcaacctccttttgacaagaaatcatttgtctcttacataaaaaaatacatcaagaatctcactgctgtgttggagccagagaaagcggatgagttcaaaaagggtgtcgagggtgcaaccaagtttctccttagcaagctgaaggaccttcaattgtaagttctatcaataaatacattgcatatctattattagcttagtaatgctatgtgaagtatcctctgcaagttctatacccaaatctattggtaatacatttcatatctattgttaacttattatagcaatgcagcgtgaactactatactatctttttctaatatgaattagaacttggtattctcatacacaaatgtatatctagactttgtgatcccacgtttgcagattgtaccatcctatctttttctaatatgaattagaacttttggtattctcatacacaaatgtgtctccagactgtatgtccctagactttgtgatcccacattgggcagattgtttttgttcatgtaatacactggtctggctgtaacctcctgtttgcctgaaaatgctgctctaccctcttcatgctgcttgcattattttggcacaatagttttttgacaatagcttaacatattacattttattcctaccacgatttattcacaactctctagtttggtctaatgttggcttttgtgtaaggacagtcctttttaacaggtaatttagtctaatgtttgtttttttgttaaatctaatgttgacattgttgtcatttacatgtctaatattgacattgttatttatgtttttaacagttttgttggtgagagcatgaaggacgaagcgtccgtggtattcgcctattacaaggatggtgccactaatccgacattcctctatttctctcatggtcttaaggagatcaagtgctagattagttacccatgttgggtactatatatgttctattgttatagccacaactatagctgccctgcctgaactgaactcaggtttttttaagaaaaaactgtccaagattggattgcttgttaaagctaaatattgttattgacgtgttattgctt

SEQ ID NO: 24750 - DNA, 738 bp, Zea mays
  Clone ID: LIB3637-223-F10_FLI
gctcgccaaaccctagccgccgagtgccgccccccgcccgcccgccctccgccgcgcgtcggacggtgccgagggaagaggcaccatgaggttggagaagtgctggttctgctcctctaccatctaccccggccatggaatccagttcgtccgcaacgacgccaaggtcttccgcttttgccggtcaaagtgccataaaaacttcaagatgaagaggaaccctcgtaaggttaagtggacaaaagcatacaggcatttgcatggcaaggacatgacccaggatacaacctttgagtttgagaggaagaggaacaggcccgagcgttacgaccgcaatttgacggagcagactctgaaggctatcccgcttattacaaagattaggcatgaccgtatgggaaaacacatctcaaacagacataaacctggtaaacgcaaggagatggaaaaggattccaaggagctggagcaggacatcggcatgctcccgaagaagcttattatcaaccatctcgcggctgagaaaacgaaggtcaaggttgaagttgttcagcagcagacagaagataacgcgatggaagagtagtgcgtggcattttgtgtgcttgtgttttcatgtctgatgcagatccttttgtatttgcgtaagaagctatgtagttgatgaaagatgtttatttaatatatatattaatggatggattcgtggactgaatatcagcaagtttgttgttctgg

SEQ ID NO: 24751 - DNA, 188 bp, Zea mays
  Clone ID: LIB3637-225-E5_FLI
gcactttgaatagagttcattttatttgagtgttggtggttagccttaggttttatatatagtttgatacactcgtccgagggttttttgtagtgtggttgctgcgcattttgctttggacagatggacgaacttcgcctgttgtatgccgtaaatctacctaatacatggtaatgctgttgtttccc

SEQ ID NO: 24752 - DNA, 1211 bp, Zea mays
  Clone ID: LIB3637-226-A10_FLI
taacctagctagctaaggacaagcaatggaggtggccgcagcagcgagctacagctactacggcttggaggcggccgacgacgacgtcgacaacctcagggccacggagctcaggctcggcctgccgggcacggaggcggcggcggcggaggaggaggagccccggcaggcccagaaggtggcgccgccgccgtccacgcccaggggcaagaagcgcgacggcgtcagcgccgcgccgccggccgccaaggctcaggtggtggggtggccgccggtgaggtcgtacaggaagagctgcttccagcagcagcagcaggcggcggcggcgagcgccaagggcaagccagcggcggcggatgagggtgctccgggtccggcgggcggcggggtgttcgtgaaggtgagcatggacggcgcgccctacctgaggaaggtggacctcggcacgtgcgggggctaccgccagctgcgggaggcgctggaggccatgttcctctgcttctccgggccgggctcgggctcgggcgacgcgtccggcggcggcggcggcagcccctccgacttcgccgtcacctacgaggacaaggacggcgacctcatgctcgtcggcgacgtgcccttcagcatgttcatcggcacctgcaagcggctgaggatcatgaaggggtctgaggccagactaggcctcgggtcagccaagaacaacgactgagggagagggagacgaccattgtgcagacccgaccgagatccacgcacacggcggcgcggcttgtgctttttgctctgggattgttgttgtccgtccgagaggcatggggtagtatgggcatgtgttgtaccatccccacctcgtctgccatcaatggagcagcaagatagaaaagcttttgtgcttgcttggaacgagaagatgaagctacttgcttggattggaacgagggggcggagatggagagagacagaaaaactttatagtgtgtttggtttgtggagtcactctatgcttcatgaagtggtgcatcatatgttcattttattaattttggtgtaatcaactcactcctcatgtatatactaattattagcttatgaggaatggggtggtgatggatcaacccattctatttcaaaaaccaaataaaaaagtgaggagtgagaagaagatgtatcacttcatttctcaaaccaaacagcctcttaagttgtgc

SEQ ID NO: 24753 - DNA, 987 bp, Zea mays
  Clone ID: LIB3637-226-F6_FLI
gcggcaggccatgatggtgacgttcgcgttggcgctgctcatgggcatcgccgtctacttccgcatctgggcccgccagtccagcgacccctccttcaccgccgacgaccgcgaggagctccggttcgcccccaattcctctccaccttccttcttttcaccgcctacggtttatagttttctttatcttattgagccatgaacagaaagaaaaatggaaggaatcaaagcggttttgctcggatttctgatcacgcgatgaacgatccaagtgtttcatctaatttctgaatttgatcaaccgatttcctgaactattcaccgagatgagattggagacttgctaaggaggcaatttgaacaagcaaacctagaagcgatggatgaatctgccgaatggaggatgaaatatgataaagaaatagagaaaaacaggcagttgcatgatgaactttcaaaggttaaggcctcattagctggtgcagccaggcatcttgagttgttgcagaaggataacgagttgcagaagcggcagaccgaatcactgaggcagcaatgcaattgcactctccattgaaaactaggcaaggttaagggcaaggaaggaatgccttttgtttgtccagcagcaccagagggaggaaaactagattgaggtctaggaattaggacgtacgaaaaggattgagaacatagctctggtagaccaagaccatagtgaccgtctgttataccaatggcgagctgcatatttccgtcccaagtgatcagttgcagtttcatgagtgccaatgcaaatcgcccaagtcaaaacgcaaaagatggcaccatggcagatatatagttcctgtttcagagcaaggattcagtttgtgggtaattttgcagtggcagtttgcattttccgagtacctgaccatctgtaaatatgcgttgtactcgggatcaaatttataacactttataacaacaaacaagttacagatc

SEQ ID NO: 24754 - DNA, 1181 bp, Zea mays
  Clone ID: LIB3637-226-F8_FLI
ccccaatctcaccctctactccaggcgaactgtcgcatccgccgccgcggccaccgcggcctcgccctcgccggcaggagggcacggccgccgccctttgcgctacgccgtcctcggcgccggctttgcgggtctctccgtcgcgtggcacctcctcaagcatagcccgagggattcccgcgtgtcagtggacatctacgacgagaacggggtcggcggaggcgcgtcgggcgtctcgggtggacttctccatccctactcgcctaaagtgaagcttctctggaggggtgctgagttctggaaagaaagcatggatctccttcgcagcgccgagcaagcaaatggaacctcggtatcaaatacaactagtcaagatgataaccttatctggagaagggggattgtacgaccgcctacaactgagaaagctgcagccatattgctggaggtactgctggattgagattatgcagatatgctaagtttacatgccactggcactgaacatcaaccctaagaaatatctgcaggcactgttctctgcatgccaaaatctggcagatgaagcctcctcattaccaagtgagcagaaagaaatcaagctttacaagcaacatgttgataatctacaccttttggcaggcaattatgattcggtgatcatctgccttggggccaaggcttgctcacttcctgaacttgcaaataagttgcctcttaggacctgcagaggagttatcgctgaatttcagttgccatccactacagtagaagaatatgacagtcaaagtgcttcaatcttatctgatgcatggctagcattccaaggtccccgaactgtttctatcggatcaacttggcaatggatttctgagaacgattcttcaactgtttccgatgaagaatctcttactgcaatcgaagagttgctccctaaagcttctggcgtatatccaagaattagtaaatgggattttgtacgcgcaagagctggaatacgagccatgcctccacttacaacaaatgggtcattgccacttttgggttgtttggatgatttactaggcaataagagcaactgcacattttggctagttggtggacttggtgcacgaggtcttctgtatcatggtttggttggaaagttgactgccaaagctgcgatttcctgtaatgaaaac

SEQ ID NO: 24755 - DNA, 757 bp, Zea mays
  Clone ID: LIB3637-226-G2_FLI
gttgcccgcaacccaaagcggatcaaaccctagatctcgtccccgttcctccgatcctcatggattcctcctcctcctcgtccagcctgagccagcagcccgagttcgattacctcttcaagctgctgcttatcggcgactccggcgtcggcaagagcagcctcctcctccgtttcaccgccgactcctttgaggacctttcccccaccataggtgttgacttcaaggtgaagatggttaccattggtggcaaaaaactcaagcttgccatctgggacacaggcgagatggctggtggtacgagcagcatggcaacgtggcggccggcatggcttgtgcgcggggcgataacgcgggagaccagtgtgggctccatcctctcctggctggctcaacttccaggcatctggggaggagcattagggctgcagtggcgcgtggtgagggctgtggcggtgcggtgcgggacagcaagaagcctcgttgtgcagcatgaatggatgttgcactttcttttctaagcaataggatggtgttggatggtgcatagaggcacgaaagttacatggggacttaccagagggcagaggcaggttaccgaatccgagatcaataataccataaaagaatcgttttggtctgtccttttcccccacaattatttcgaagagctaaccattccactggacagtgtcattctcgttctgattttgcccagctttatcctatctatttatacatcttccattctttgagt

SEQ ID NO: 24756 - DNA, 649 bp, Zea mays
  Clone ID: LIB3637-227-B2_FLI
gcctccactaccccactcccaggcgccgcacaggtacgtcgccggcggcgatgacgacgcgcttcaagaagaaccgcaagaagcgcggccacgtgtccgccgggcacggccgcatcggcaagcaccggaagcatcccggaggtcgcggtaacgccggtggcatgcaccaccaccgcatcctcttcgacaagtaccatcccggctacttcggtaaggtcggcatgcgctacttccacaagctccgcaacaagttctactgccccgcggtcaacatcgagcgcctctggtcgatggtgcccgccgaaaaggcggcggaagccgtcggcgacaaggccccgcagatcgacgtcacgcagttcggctacttcaaggtgctcgggaagggggtgctgccgcccaagcccatcgtcgtcaaggccaagctcatctccaaggtcgccgagaagaagatcaaagccgccggcggcgccgtcgtgctcaccgcctagttttcagtccttattcgcctcttggttttgagatctatatctggactagcagtgctttcttgtctcacctatttgtgttaagaagacgtagtttttaaatccattgctccttcctgtttggacagtgctttcatatcagatatttcaggtatattagagct

SEQ ID NO: 24757 - DNA, 613 bp, Zea mays
  Clone ID: LIB3637-227-D12_FLI
agtgtgtccgctccccctcagtcctagcggtagcgtgcgcgcgggagacgtagatggcggcttcggcggcggcggcggcgacaccggtggcgccgacagaggggacggtgatcgcgatccacagcctggaggagtggagcatccagatcgaggaggccaacagcgccaagaagctggtggtgattgacttcactgcaacatggtgtcctccgtgccgcgccatggctccaatttttgctgatatggccaagaagtccccaaatgttgttttcctgaaagttgatgtcgatgaaatgaagaccattgctgagcaattcagcgtagaggccatgccaacattcctgttcatgagggagggcgacgtcaaggacagggtcgttggcgcagcaaaggaagagctagcaaggaagcttgaactacacatggcctcgtagatcagtgatgccgtaatgtagtattcgcctaaataagaggacgcctcgcctcaactctgagaaaactagtgcttctgtgatggtaattcgtatgagagagtgccccctttggtggtacttcttcgtatgtagtattaactcctgtcttaatatgttgccctgcttgtgcttttcatacc

SEQ ID NO: 24758 - DNA, 1264 bp, Zea mays
  Clone ID: LIB3637-227-D4_FLI
gctgttggatttaacttcccagttgcactgtcattaattcattaccttttcgcttttgctttaatgtctgttctcaaggcattatacttgctgccaattgcttctccttccaaatccactcctttctcctcattatttgctttaggtgctgtcatgtctttctccactgggcttgccaatatcagcttaaagcataacagtgtaggtttttatcagatggctaagatagctgtaactccaaccatagtggtagcagaatttattcttttcaagaaaaaggtttcccttcgaaaggttagcacgctggttgttgtctcatttggtgtggccgttgcaaccgttactgatttggagttcaatttctttggtgcttgtgtagcactagcttggattattcctagtgctgtaaacaaaatcctgtggtcaaatttacaacagagtggaaattggacagctcttgcgttaatgtggaagacaaccccaattaccatatttttctttattgttttgatgccattgttggatcctccaggccttttatctttcagttgggatttcaagaacagcagcacaattatcatatctgctttgttcggtttccttcttcagtggtctggtgccttggcacttggggcaacctcggctctcgctcatgttgtgctgggtcagttcaagacgattgttataatgctctctggttatctggtatttaaatctgatcctggattcaccagcctgtgtggagctgtcattgccctcgcagggatgtcagtgtacacttacctggggatgaaagagtcagccgccagcggtaggagaaattccttaaattcaaggcaaaattctcatttgaagaagcccaaggctattatagatggagaaaatccagaaacaaagcctatggattctgtgtaaaatgagtgccgtcctcctgctaggtttaagaacctgccattggaagcaatgaggtttggtgagcatacttatggagtgagtttccttcaccaaccagttcatccgaaaacttcatttcgctttctttagttcttgcttggagttctattattctttaggcaatggtggtcaaaattgttttcatcgttgatcacattcattgcacgtaggaattatcattgattctagttttaggtaactttggttactgttccaatccatatcctgtcatgctttatttgtttacttgccgtgtggattctgttcctcagaaaatagatgaaaggtggctgaaaatggttcctggttg

SEQ ID NO: 24759 - DNA, 1333 bp, Zea mays
  Clone ID: LIB3637-227-H10_FLI
gtcgttttcactctgcgtctccgcatcaaaacccttagctgcctcgcaattcttttttttttttcccgttcaccggagaaagaatggcgctgccgacagctaacccgggcttccgtctcggctgccaggagtctcccgcgatgggattgaggtcggcgccgcggttggcactgcgtcgtcccggcgcggtctccgggcacaggagtaggactggcagagggaagtttccagtggcatccacaagtctagatgactatcttccaatgcgaagcactgaagtgaaaaatcggacattaactggtgatatcacaagcctcagactaatcactgcagtgaaaaccccttatttgccagatggaagattcgatctggaagcatatgattctttgataaacatgcagatagagggtggttctgaaggcgtaatagttggtggaacaacaggagagggtcacctaatgagctgggatgaacacattatgcttattgggcataccgttaactgctttggcactagaattaaagtgataggcaacacaggaagtaattctaccagagaggctgttcacgcaacagagcagggatttgctgttggcatgcatgcagctctccacatcaacccctactatgggaaggtatcaactgaaggattgatctctcattttgaggctgttctgccgatgggtccaaccatcatttacaatgtgccatccaggagtggccaggatattcctcctcaagttatcgagacactctcagattatccaaacatggcaggagttaaagagtgtgtcggacatgagagggtcaagtgctacaccgacaaaggtataacagtatggagcggtaatgatgatgagtgccatgattctaggtggaaatatggcgccactggagttatttctgtagcaagcaaccttgttcctggcctcatgcgtagtctcatgtatgaaggggagaatgcgttgctaaatgagaagttgttgcctctgacgaaatggttgttctgtctgccgaatcccatcgcactcaacactgctctggctcagcttggggtggcaaggcctgttttcaggttgccgtatgttcctcttcctcttgataagaggattgagtttgtccggatagttgaagctattggacggggaaactttgtgggacagcaagaggcacgtgttctcgacgatgatgattttgttttgatcagtaggtattagtaagcgagcttgtttactttggtgaataaaatataatagcatcatgttatgaggatttttcagtcttttgtaaagaaataaaacagctaatcctgatttggcttacagtttcctgt

SEQ ID NO: 24760 - DNA, 830 bp, Zea mays
  Clone ID: LIB3637-228-B5_FLI
ctcgatcccagcatccgagagagctccacaggccaggtccccatcgccgcggcgcttgccccacctctcccccgcccggtagtagcctcgccgccgttgccgagatggggttcgtgtccttcgtcgggagggtgctcttcgtcgccgctttcctcctctccgcctaccaggagtttaatgaattcggtgctgatggtggaccagcagctaaggcccttcggcccaaattcaacgtgtttgtcaaaaatgtatctgctcatctgggagtagctgtgccacacattgagttgaagcatgtgattgctgctacaattggtcttaagggtcttggaagcctcctttttattttgagcagctctctcggtgcttatctcctgctgctgtaccttgctttgatcactcctatcatccatgacttctacaactacgatatggagaaggcagaatttgcaggcctctttgcgaagttcacccaggatttggcgctgatcggagctctgctcttctttctgggcatgaagaactccatcccgaagcggcagggcggcaagaagaaggcccccaaggcgaagacgaactagggctgcttagatagctgcacgcctcaggcggggtgtatcaggccacaggtctatttcgaagcaggcccagcgcgatgcagcgaatgccatcgagctgcgcttttacatgtttatcatcagattccattttgcgggcacggcccggacaaaggtgtgaccggggtgggttaggcgactagattgcacgattatgtacttgcgatttgtttgttgaactgggttgccgacagttaatcttcatttgatttt

SEQ ID NO: 24761 - DNA, 974 bp, Zea mays
  Clone ID: LIB3637-230-H11_FLI
ttttgattttagccgccgccgctgctcatctcacatccctcgagaagacgcctgctcctcgccgatcgatacgatggccgtcttctccgacctccacaccgccgacggcctcaagtccctcgaggctcacctcgccggcaaaacctatgtgtctggtgactccattactaaggatgacattaaggtcttcgccgcggtgccgtcgaagcctggcgctgagtttcctaatgccgcccgctggtacgagaccgtctctgcggctgtagcctcaagattccctggtaaggctgttggtgtaaatctgcctgcgggatcagctcctgcggcagctgctcctgcggatgaggctgaggatgatgatgaccttgatctttttggtgatgaaactgaggaggacaagaaggcagctgatgagcgtgccgccgctgccaaggcctcttctaaaaagaaagaaagtggtaaatcctccgtccttatggatgtcaaaccatgggacgatgagactgatatgaagaagctggaggaggctgtccgcagtgtccagatggagggtctgacttggggagcatcaaagcttgtgcctgttggatacggcatcaagaagatgactatcatgttgacaattgtcgacgatcttgtgtccatcgacactctaattgaggaccaccttacgcaagagcccatcaatgagtacgtccagagttgcgacattgtggctttcaacaagatctagagttcagtttctgagattgggcaacggcagcggctcagctcgtcaagtttgtgctgggatgccagtttatcccttctagtctattacagaaatgttgttcggagctgagtctattataaacatcttggtctgagtttattgttgagtggtgccagtttttttcaatatacatttatcttaaaaacagcggtactgatgtttttttgtctaaagttaatgagtttgcaatggttctgagtct

SEQ ID NO: 24762 - DNA, 584 bp, Zea mays
  Clone ID: LIB3637-232-A2_FLI
cattatagttgaagcatagtagtagaatcctacaaaaatgaagatcattttcgtatttgctctccttgctattgttgcatgcaacgcttctgcacggtttgatgctcttagtcaaagttatagacaatatcaactacaatcgcatctcctgctacagcaacaagtgctcagcccatgcagtgagttcgtaaggcaacagcatagcatagtggcaacccccttctggcaaccagctacgtttcaattgataaacaaccaagtcatgcagcaacagtgttgccaacagctcaggctggtagcgcaacaatctcactaccaggccattagtagcgttcaggcgattgtgcagcaactacagctgcagcaggtcggtgttgtctactttgatcagactcaagctcaagctcaagctttgctggccttaaacttgccatccatatgtggtatctatcctaactactacattgctccgaggagcattcccaccgttggtggtgtctggtactgaattgtaatagtataatggttcaaatgttaaaaataaagtcatgcatcatcatgcgtgacagttgaaacttgatgtc

SEQ ID NO: 24763 - DNA, 897 bp, Zea mays
  Clone ID: LIB3637-232-A4_FLI
gtcgccggcgccgccgcgacaggaggaaggagggagtagcagcggcaggggaggtccggcgatctcggctgctgtggcgcggtaagggaggaagcggagccgcgacaggatgcactcgtttgggcaccgcgccaacgcggtggcaacgtttgcggtcaccatactggccgcgatgtgcttcgccgcctccttctccgacaattttaacaccctgacacccaccgcatccgtcaagatcttgaatataaactggttccagaaggaggccaacggcaatgacgaggtcagcatgacgctgaacatttcggctgacctttcatctcttttcacgtggaacacaaaacaggtatttgtttttgtggcagcagagtatgagactcgacaaaatgctttaaatcaagtttccctttgggatggcattatacctgcaaaggagcatgccaagtttttgatccatacaacaaataagtacagatttattgaccagggaagcaatctaaagggcaaggaattcaacttgacaatgcactggcacattatgccaaagactggcaaaatgtttgcagataagatagtcatgacaggctatcagcttcctgagcagtacagatagtcatatagatcatgaacagtagcagaggcctgcaaaaagtgatagttgcatagctgatgctgaactttttgttctaatctagttggaacatgtaatcttataagcttgtacttaagctgaaccaggcaaaactaagttgcaaatttgagatatttattgctcaacttttaagaataggtctcggttaatggtgagaagacttttcactgagccaaaggtcttgggtttcgaactttcgatgcagtctctgagcaaaatgcagggataagacttgtcttggttct

SEQ ID NO: 24764 - DNA, 978 bp, Zea mays
  Clone ID: LIB3637-232-A6_FLI
caagaaagcgttgtcggcggatgcgccggtgttcgattaccgctccaccgcaggcggcaacggggccaccgacgatcccttttacgttgggtttgggaaccagcagcgcaagagagggaatggatacatcaaccaaggaaggaggaggacaaatgataggttgaggcgtgcagacagagaggacagcgttaggcgaactgtttatgtctctgaacttgatcatactgtgacagaggagagacttgctgatatctttgctacctgtgggcatgttgttgattgccgaatttgtggtgatccccactcagttcttaggtttgcatttattgagttctctgatgaagagggtgcaagaactgcacttaaccttggaggcacaatttttggtttctaccctgttagagttttgccttcaaagacagctatcttacctgttaatccaaagtttcttcccaggacggacgatgagaaggaaatggtcatgcgaactgtctattgtacaaatatagataagatggttactcaattagatgtaaagaaattctttgaagaactttgcggtgaggtctctcggttgagacttctaggagacaatgtacattccacaaggattgcttttgttgagtttgttcatgctgagggtgccatcatggctctgaattgcagcgggatgattttgggaactctgcctgtcagggtgagtccttctaagactccggtgaagccacgtgtaaatcgaatgggatctaactgactctgcctaagctcaaccggaaggcatggccataagctgaaggcttccgcggtcctgtgcatcatgatgcatctgcttacattcttacaaacactctgtttgtacccttttgcaaacctgttggaagggaactggttaggtcaggcccttttgccttgcatttcagacatgatggaaccattgagaatgactattcggcaatcaaccatcaagtaacttctgtc

SEQ ID NO: 24765 - DNA, 1391 bp, Zea mays
  Clone ID: LIB3637-232-B12_FLI
ggttgctcgcctctatcctcattgaaaatctttgaaagaggtttcgatcccgaaaccgccaagggcccgccccgcaagtgcatggcagtgaacttcctggccaatgagttgtcggacctgtgcatcggcaagccggccgtgaagtcgctaccgctctccgccgccaccggcgaccttgccgccaccctccggagggtgacccgctctggcgccgcagcctgcgtcgcggtgaccggaccatcgcgcgccgtcgtcggccgggtcggcctcgcggacgtgctctgcttcctctgcaccgaccccgaggcgctcgcgcgccccgccgcggtcttctccaagccggtctccgcgctcctgcctaaggacggcgccggagaggtccgccgcgtcgatccccgctccagtatcttggaggcccttgatgcggttctgagcggggcgcaggtgctggccgtcccactccgcgctggcgggcgcaagaagcagctcgttggcgccgccgacgacggcgacttctgctggctcacgcaggaggacctcgtgcgctactttctcaactacatctgcctcgtctacaatgtggcggcgcgctccgtgtcctccctcgggctcgtgcgcgccgacttcctctcggtgcgccccggcgaggcggccctgtccgccgtgcccctcatccgccgcgccgtcgccacggagacggcggtcgccgtggtcgccgaagacgggcacctcgtcggcgagatctcccctgcccttctcgcggcctgcgacgagacggcggcggcagccatcgccacgctctcggccgccgacctcatggcctacatcgaccactacgtgtcgccgccggagcacatcctgcgcgccgtcaaggccgggctgaaggacaagggcctggacgccttgcttgcgctggttgaggacgagacgctgtcgtccttctcgtccctctccgcgtcctcctcgtccgacgaggaggcaggccgggcgcagctgaggcgcccgtcgtcggggagctacgggcggcgggcggctgacgagccggtggtgtgcagccccgcgagctcactggtggccgtcttggtgcaggccctcgcgcacagggtgagctacgtctgggtcctcgacgaggacaacgactgccgcctcgccggcatcgtcacgttcgcggacgtgctgagggtgttccgggagcagctgctgtgaggtctgacgagtgcttactgtttcctggctcccatcttgtggtgtcatggaattgagaagaatatgagctcttgtttctgaaacatttttatttgaagagtatgtgtttgcttgcttggtagccagttcagaattcagatgaacagctttgacattggtgcgttttcattaaatttcttcctatt

SEQ ID NO: 24766 - DNA, 1234 bp, Zea mays
  Clone ID: LIB3637-232-C6_FLI
ggacactgagctggtctgtttagttggaaagccatctgtacgtttttcgccgatcatggaggatgagaggaacacccagcagcaccagggcggtgagcaggcccaggaccaggagaacgaggtgaaggacaggggactcctggacagccttctcggcaggaacaagcacgacgaccaggagaagaagaaccagcagcagcagcaggcggaggaggagctggcgaccggcatggagaaggtcacggtggccgagcccgaccacaaggaggaggggcacgaggccgccgagaagaaggacagccttctcgccaagctgcaccgcaccagctccagttccagctcgtcgagcgacgacgaggaagaggaggtgatcgatgagaacggcgagattgtcaagaggaagaagaagaagaagggccttaaggagaaggtcaaggagaagctggcggcccacaaggcccacgatgagggcgaccaccaccagacgcccgcgccgcccgtggtggtggacacgcatgctcaccaccaggagggagagcacttcccggcgccggcgcctcccccgcacgtggagacgcaccaccccgtcgtcgtccacaagatcgaggacgacgacacgaagattcagaccccaccacaggcaccggaggaggagaagaaaggcctgctggacaagatcaaggagaagcttcccggtggccacaagaagccggaagacgctgctgccgccgccgccgcgccggccgtccacgcgccaccgccggcgccgcacgccgaggtcgacgtcagcagcccggatggcaagaagggcttgctgggcaagatcatggacaagatacccggctaccacaagagctcgggtgaagaagaccgcaaggacgccgccggcgagcacaagaccagctcctaaggtcgcagcgtgtgcgtgtccggcgatcagaagcgttgcgttggcgtgtgtgtggttctggcttgctttaattttaccaatgtttgtttcaaggtggatcgcgtggtcaaggtccgtgtgctttaaagacccaccggcagtggcagtgagtgttgctgcttgtgtaggctttggtacgtacgggctttatttgcttccaagtcagggtctggatgttgtgtactacttgggtttgtcgaattattatgagcagttgcgtattgtaattcagctgggctacctggacattgttatgtattaataaatgctttgcttaattgagag

SEQ ID NO: 24767 - DNA, 648 bp, Zea mays
  Clone ID: LIB3637-232-E8_FLI
ttggacttgctgttcaacgagcatgcgaaagccaggcagaacctctgaagtttttgtatcccttggaatctagcataaaggagaagattgagtcaattgctaagttctatggtgctagtggcgttgaatattccgagcaggctgagaagcagattgagatgtacaccaagcaagggttctccagcctccccatttgcatggcgaagacccagtactcattctcacatgtcccgtccatgaagggcgccccgaccggctttgttctgccgataagagacgtgagggccagcatcggcgctgggttcatctacccgctcgtgggcaccatgagcacgatgcctggccttcccaccagaccctgcttctaccagatcgacgtcgacactgccaccgggaaggtcatggggctgtcctgaattgaagttcctgatggtaccattcagagaacgtaaattcggggcattcctggatcgagttaaataagagccgttcctggcatcctgcaagttcagtggcgcttcctttttttacttgattttgtaaaccggagactgtaaatgtgcttgaaccgtgcttttagacccatgcctcaaatcctgcatccaataagtgtctttgaacagcctgaggctgctgagactgttgacc

SEQ ID NO: 24768 - DNA, 1122 bp, Zea mays
  Clone ID: LIB3637-233-B5_FLI
cgtcccctccccctcctccgacggcgacgagctccctcgccctcgcccacccccaccaccatggcgtgctaggttacggctccgcctgccttctcctggaccaccgccacccaaccaccaccacctcctcggcctctccctcgcacgcggctccgtcgaccgtcgtcccggcccccaccctccaccaccacttccatggccatgcagcaggagcgccgcacgtttccctttcccctcccacgagggcgtcgcctcctcctcctcatccatggtcgacggcggcggcctgcgaagaagagccggagccgcatcacgatcatcgccaacaagcaggccaaggcggcagaccgccgagggggaagggagcggcggtgagcgaggggtcggcggcggcgctgggggtgggcgccgtgcggatgaagaaggcgggcggcggaggaggaggcaaggcgcggcggaaggtgcgcgagccgcggttctgcttcaagacgatgagcgacgtcgacgtgctcgacgacggctacaagtggcgcaagtacggccagaaggtcgtcaagaacacgcagcacccaaggagctactaccggtgcacgcaggacaactgccgggtgaagaagcgggtggagcggctcgccgaggacccccgcatggtcatcaccacctacgagggccgccacgtccactccccgtcccgcgacgaagacgacgacgccgctcgcgccaacgccgagatgagcttcatctggtagcctgcagatccggctccgaccggcggctatctttcagtgcatgcaacgtcgtctactcggccgcctccggtctaagtttcgccagccaccagcagcagctgaatatcctgaatttagctattatatccatccatgcatcgaagaactctctcatcgatcgtgtgtgcatgtggcatgtctaggcattatatgtattgctatgtcgatcgatctttatatatatacgcgaatgatgtccgtcgctggtacgtagggtgtgaactgcatggtcctcctagctactgtcgtagttaattagctaataatatagtagtgcatccaggttatggactaaataatacttatatacatagcagctacctgacactacagt

SEQ ID NO: 24769 - DNA, 847 bp, Zea mays
  Clone ID: LIB3637-233-C4_FLI
gtctcggcctgggcgtggcggcattccagcccagcttctgccacccggccggcaatgccgcggcggagcgggaggccagcccgaccgcggcggacgagagggagcggaggtgctctcccgccggcagcccgacgtcgagcggcagcggcagcggcagcgggaagcgcgtcgcggcggagaggtcggccggcagcggcgacgaggacgacgacgggggtgctcgcaagaagctgcggctgtccaaggaccaggccgccgtgctcgaggagtgcttcaaaacgcaccacaccctcactccggtaagggcgtaactaaggcttcatccttcgatccgacagacgtcgccgttcctcgccgtctgtcggtcggctgatttgatcttggcggtggccggtgggtgggtgggtggctgaccaaggttgtgtccgtctcggcgctgcagaagcagaaggcagcgttggccagccgcctgggcctccgggcgcggcaggtggaggtgtggttccagaaccggcgcgcccggaccaagctgaagcagacggaggtcgactgcgagtacctcaggcgctggtgcgagcagctcgccgaggagaaccggcgcctgggcaaggaggtcgccgagctcagggcgctgagcgccgcgcccgcgccagcggcccctctcaccgccctcacaatgtgcctctcctgcaggcgcgtctcctcttcatcctgctcatcctcgccgcctaacacgcacgcgcatgccgctgcagctggcactggcaggagcgtggcggcggcggcggcgacgacgttgcccgcccaccggcagttcttgtgcgggttcagagacggcggggcggcc

SEQ ID NO: 24770 - DNA, 692 bp, Zea mays
  Clone ID: LIB3637-233-D2_FLI
cctggattcatggaacgacacaagcaggcagcacatcgtcccgaagctgacattcctggaccagctctgcgagctgtccccgtacgtgccaaggagcaccttagaagctcacatcccatacaccatcctgcgctcgatataccaccagctgtacggaggctctctgctggcctcggaaccggcggagcagtccccaaggcagtcgcctctcatctctctggcacacgcgtccccgtcgtccgcaaggcagaaccgaccagagacaacacccaggtcccacaccttcgacccaggctactacagctcgtcggggtcccagcacgacgatggctacgacgcggataggagggccggacggctgctgcggagcttgaggcgctctggaccgctcgacttcggtgcgagcagaaaggcgaagaagttcgtcgagggctccagctccgggagcagccatggagctggctcgctgcagaggttcgcagtgtccagatctggccctctatcgtacagatagggggccgcatgtaatgtaaactctagagcagtagatcttgctatgcgttgtgctgtaagtaaaacccattaattgcttaatttgtgttgactgtcgttaggcaagtgatttgaattagctgttgctcgtttggtttgtgtatcaacaatactattattcgttgatttttcttgatagc

SEQ ID NO: 24771 - DNA, 609 bp, Zea mays
  Clone ID: LIB3637-233-H2_FLI
ctcccctgaccgtgcttgcaaccttgcaaagcaggcctttgatgaggcaatctccgaactagacagcctgggagaggagtcctacaaggacagcactctgatcatgcagctcctgcgtgacaacttgaccctatggacttccgacaccaacgaggacgccggagatgagatcaaggaagcagctgctgcccccaaagaatccgcccccgagggccagtaagacggatccgatctcccgacctgatgcgtgtctgctgatgtcggggagtttaccaggactgtgccgttcttgatttctgatagcttatcttctagtacacctcgtgttgttctcttcgtcacggcgccggtgcgtgtgcgctgaagctgcctgccattgccattgccgctgtttttaattaagcacacactctagatgttatgcccgcatgctatgtttcgattctcaaagttgataaatgatggctggatgctggttttcgtgctccaagcctgctgcttcttccagggaaaaaaagacctgcccttgttgcagcgttgttgtttagaatgacctatatttgactggtattctgttacggtggctttgcaaagctgtttgtttggttt

SEQ ID NO: 24772 - DNA, 1039 bp, Zea mays
  Clone ID: LIB3637-234-H9_FLI
ccgacctttccccctcccccgcattccacctcgcggagatccagtccagccctagggtttcgccagcggcgagccaaactccacgagcgggggaagaggggaaagcagggacgacgagggggcagccatggggcagcagtcgctgatctacgcgttcgtggcccgtggcacggtcatactggccgagtacacggagttcaccggcaacttcaccaccatcgcctcccagtgcctcatgaagctccccgcaagcaacaacaagttcacctacaactgcgacggtcacactttcaattacctcgtggaagacggattcacatactgtgttgttgctgttgaatcggtggggcaacaaattcctattgctttcatggatagggttaaggaggatttcacaaaaaggtatggtggtgggaaagctgctactgctgcagctaacagcctcaatcgagagtttggatcaaaacttaaagaacacatgcagtattgtgtggatcaccctgaagaggttagcaagctggccaaagtgaaggcgcaggtttcagaagtcaagggtgttatgatggaaaacattgaaaaggttctggatcgtggagagaagattgagctgcttgtcgacaagaccgagaatcttcgctcacaggcacaagatttcagacagcagggaacaaatgtcaggagaaagatgtggttacagaacatgaaaatcaagctcatcgtcctgggaataatcatcgcactcattctgatcattatcctctctgtctgtcatggtttcaaatgccattaagcacagaccagaatactgatacattcaactgcacctattatactgctgcttggagcaaaaaaaagtatgatcttttgttgtttcgctagtgtgctgtggcccggtcattatgcataggtgttttacattgtcgtagtgtttgataaatgatggatggtgactgggtttgttgtgtcaactgtcataactattgtgcatttttggacgctatatgtgtagccttgatatgaatagatttactgtacttat

SEQ ID NO: 24773 - DNA, 1454 bp, Zea mays
  Clone ID: LIB3637-235-H5_FLI
ttcctgtcccgtgtttaccttcacccagcggcgctgcccctgtcgtcgtcttcccgctcgcttccgagcgccgccctccccttctttccccatcgcctcccttccaccccctctcatctccgtctcccgcgccgacgacttaagtagggtttggccttagggttcaggcaagatgggtgagcgcaaagtgctgaacaagtattacccgccggacttcgacccgtcgaagatcccgcggcggcggcagcccaagaaccagcagatcaaggtgcgcatgatgctccccatgagcatccagtgcggtacctgcgggacatacatatacaagggcactaagttcaactccagaaaggaggacgtcgtcggagagacatacttgggaatacaaatatttaggttttacttcaagtgcactaaatgctctgctgagatcacattcaaaacggaccctcagaattctgactacacagtggaatcgggggctagtcgcaattttgaaccatggcgtgcacaggacgaggcagcagacaaagaaaagattaaacgagatgctgaggagatgggtgatgcaatgaaagcgttggaaaatagagcaatggattcaaagcaggatatggacatccttgcagctttggaagagatgcggtccatgaagtctagacatgctggtgtctctgttgaccagatgcttgaaattttgaagcgttcagctcacgagaaggaggaaaaagcaattgcagagcttgatgaagaagatgaggaacttataaaatcaatcactttccgaaactctggattctatgtaaagcggatagaagatgacgacgacgatgatgatgaggatttggctcctggccaatcaagtagaacaataaagatcaatgaatcttctgaatctgtgactaagccaacagatgttttaagcaaaaataacggatcagaggttgccaataaagaagggagcaagagctggatgcccaaatttattgtgaaaccgaagtctgcaagcgcagatcctcataagagacagaagattgaatccacggctgtccaagacaccgggaaaggccaagatgatgaacaaaaaagtgaacctgcgaagcaaaccaatgttctccagtccctctgccagaactacgatagtgatgatagtgaatgaatgaggacaccgccctcttgaagccataacagtcctggttgccaatgctgtattataccagaggatgttaacacatgtagttccccaaaccactggcattgtaccatcatggcacatgatatttatcacaaatctctgattgtcaatgggccaactacaagtattggctcttacaaatatgggctatccagatagagctgcgttattggataaaatgatagttgcagaaagtcagatctgcggtttgtacatcaaacagccatacacaagcttgtttatgcagcatcactgaatt

SEQ ID NO: 24774 - DNA, 993 bp, Zea mays
  Clone ID: LIB3637-236-E3_FLI
cgtgatcctgcccgacggtgaaaagtacaaaaatatggacacgctgatgaaggtgtttgacaaggcagtcgagtcccgttttgaccgccggtgcacatttgtagcactgggtggtggtgtcattggggacatgtgtggttttgcagctgctgcattcctccggggcgtcaatttcatacagataccaactactctgatggcccagggagctagcttcaggcattgccgaggtagtaaaatatgggctcataagggatgcaccattctttgagtggcaagagaagaacatgccgaaattgttagcaagagaaccaaatgctttggcatatgctatcaagagatcatgtgaaaacaaagctgaagtggtggcacaagatgagaaggaaagtggccttcgagcaacactaaacctgggtcacacatttggccatgctattgagactgggacaggatatggagcatggctccatggggaggctgtcgcagctggaacagttatggcaactgacatgtctcaccgcctggggtggatagatgactccatcagaaaacgtgtggttgacatactaaagcaagccaaacttcccattgcacctcctgagaccatgaccgtagagaagtttaaaaacatcatggctgttgacaagaaggttgctgatggtctgttgagactcatccttctgaaaggaccactagggtgctgtgtatttacgggggattatgaggggaatgcactcgatgaaaccctacatgcattctgcgacaactgagacatcccagttttggacatcacttctgtatgctagtactaggctatgtatcaatcagagaaaatattgtggtgtacattatcttcactgcctcattggtatatttttgtcagaaataatggtatattgttttaagtgctggtttgagtttgtagagaaccatggctaatcaactgcggtgcggtcagttgttctctagtaataatagtaaagaagcttcact

SEQ ID NO: 24775 - DNA, 1090 bp, Zea mays
  Clone ID: LIB3637-239-B11_FLI
cgagtgtacacaccagatgaacccggtaagcaagtccggagcgctgtcaggaactcaggatcaagaacatcagcaagtctcatgtggctttcaagttccaaacgactgcaccaaagagttgcttcatgaggcctcccggcggcgtacttgctccaggggaaagtatcatagcaacaggtaactgaatttgacaccaattatgtgttgattttctgtttcctgtcactgccaccaggaaagcgaaggatgtgatcaagtctgtgaagaagtgtatagggagcaggagcaagaccactcaactctttactgttatgctattggagatgcttctgaataattgcggagagcctgtccataggcaggtcattgataatggccttcttccaatacttgtgaagatagtgaagaaaaagacggatttaccagttcgagaaaaaatatttcttttgttagatgcaacacaaacatcccttggtggagctaaagcaaggttccctcagtactatgaagcatactatgagttggtggtgaaaaaggtgtcgggtccaatggcaaacctcttcactataagggaacaccattccatcgtattatccctggcttcatgattcagggcggtgacatagttagaggtgacggcaaagggagtgagtctatatatggaggcatcttcccagatgagaatttcactgtaaaacatacacatccaggtagccatatacttcttttttccttgacctccatggtgtgccacggttcagcaagacttctggaatgttgtatatcgtagctagcttatggccagtcgaattgactctgatcccttgagttgtgatgtggagacacatacatctgaaaaatctttaggccatgttcggttagggtggattgaaggggattaaatttccttccattcaaatttgaattcaaatgaataggagggagttgttcgcttcggattaaagctaaatgtttggactgttgtagctgtaatctatacagacaaaaatattgtagaagtgttgtttcatttcaaggaagagaacacgtcgtgaaagatcagatataaaaacaattcagctttttgtat

SEQ ID NO: 24776 - DNA, 1117 bp, Zea mays
  Clone ID: LIB3637-239-B6_FLI
gaggcacaaaccaaatgtacaattcgccgcgccagaaggtttcgccttcctcgtcttctcagttctcacttctcagccccaaggcccaagcacgagcaccaaatgctgcgtgccgcgatcgttgcagggttgccggcacggctcgccaccaagaggccacaggcggtaactgtggcggcgagggttgcgcttacgagtaccgaggtgaggtcgccacttctcaggtgtgggcgagtcccggtgccggggaggagagtgtgcttatgctccgctgccgccgacgatagcggctcggaagcggagtcctccgcggcggagggcgaagaggctgcgcgtggggaggaaggcgagggggaaaatgtctctgcgatcgtgcccgctgtcctccgccccgaggattgccacacggtcatagctttgcctttgctacagcgaccactatttccaggattttacatgccagtctatgtaaaggacgcaaagctgttgcgaactttagatgaaaatagcaaaaaatctacaccatatgctggggcttttcttgtcaagaatgaggaagataatagcattcatgaattgaaagggaaagaattgttgaattgtcttcatgatgttggcacgcttgcccagataacaagaattcaaggagatttggtggtgctacttggtcaccatcgtatacagatatctgagattgttagttagacccctcactgcttcctatttagtttctctaacacttcttctttttgtcattgtatgttaataaagactaaactatacaggttgttgatgagccacttacagttaaagttgatcatctcaaggtatatataccataacttttagcgtcccaatcttaaaaagttattgatgtacagatgttcaaacatttcaaaccctggaaacaggggcagatggttttaaaagtcgtccggttgatccaggtgaccgaccagccaactaatcgcgattaggatgtcgaccaggacgattagtcagtgcatggtcggcccctggtcgtcctaaacgtcatgtactgttcagactatatataattatatatagttatatacactacagtatatagctatataatatataatatatttattgg

SEQ ID NO: 24777 - DNA, 1708 bp, Zea mays
  Clone ID: LIB3637-239-D10_FLI
tctagttgaagatctcttgggagattttgaataccaactccaagctccttatattatgtaccgaaatgctgctcaagaagttataggaatttggttttacaactctcaggagtgtcaagaagttgcaaatctttttagcaggattctgaatgctttctcgaaggtgccaccaaagccgaagattccccctgttcaaagtgaatttgaagaggtggaagcagcacctgtgttggttgacggccctctagaaccgcaaacgtcaaatatcatgtcaactactactcacattcaagaggatcctttatctgcatttttcagtgtatggaacttgttctcattagttttacattgtatttgggtcccttcactccattaacttttggctgcttttcggctaaagattgttacctactttctccagcatataacatctttagtttttgttttgtgtgtttaaatgtgcatctctggaaacaggcagctgcaaatgctggtggcaattctgctgtagctgttgcaaggcaaccaattcaactttttggtgctactccggtggctacacatgcagctactagtatcactacaatacaatcgccaggcttgcattatttgcttccttcacaagcctcatcggtttctgggatgcctgctgatgctcatggttctataggaaggtccacaaaccttgtaaatccatcacttttctcaccattgacgtcttcacagacaacaatggtgtgcactaattctgtagtagcaattgctccacctcaacatcctcagactgctcagcagccgcaaagtgctcccttgcttcagccttttctattacctacggcttcaccatctccaccatatgggactccattacttcaaccgtttccgccacctaatccatcgccatctcttgcgtctgcaccagtcttgagtccaacactgtctagagacaaagtccgagatgcattactgagacttgtggaggtatactgttctgtttattttatttcgatgtatgatttgaatgcattgttcttttttctgattatgaggatgtgcaattattttattgttgggtttgaatatattgcttgttcaagtctttttttgtctttggtatctagctgaagtataggcatacatggatgacaagctaagcacttggaatgtagttctgctagacttgtgcttaattcaatattaaactagaacaggcttgtagatatttttatatctcttgaactgtagtacactaaggtgctgtttggttcacatatttgtaacgtgatgagtagttgataacattagatcatgtttgtttagtccaaccgtaatgggataccacattaggaattaataccgacatattcaaacttgttaccactggtacttgagtgtgtacattaccgttgccatttacgttacattttatgaaccaaacaacacctaatatgtttctagctgtattctttcatctgagacacgaagtttattatttgtgccagaacgatgaattcatagatttagtctacggcgagatcatgaacagacagtaatggattttcaaggtacagtcctctccatcaggctagcttgtgcttggactctgtcattatctgttgtctaggctacttcaagttatcttgtaaattcattgatgaaatccttcggtttgtggagcttgtgctattaatgtacttttgatatttac

SEQ ID NO: 24778 - DNA, 1347 bp, Zea mays
  Clone ID: LIB3637-239-F10_FLI
ctgcgcgccgcgagtgaattccgctaccccaatcaatccgacgccagagagagagtgggcgactggcgacgcggtcctccggtcccccccaattcccaacggccggcggcgcgacaccccgatccggatcccatcgcctgccgggagcctcgattcgggcggcggggacgacgattcgaccgcgtcggtaaccaggcaggggaaaggaggggatgagcttccaggacctggaggcgggccacgtccggggggcgccgcccggcggcggccggaggagcggccgggcggggggcgccggcgccggcgccggcgcgtcgcaggccgtggcgtcgggcgtcttccagatcaacaccgccgtcgccacgttccagcgccttgtcaacacgctcggcacgcccaaggacacccccgacctccgcgacaggatacataaaacacggcaacacataacacagctagtgaaggatacatcagacaagcttaaacaagccagcgaggcagatcatcgcgttgaagtcagcgctaccaagaagattgctgatgcaaagctagctaaagatttccaagcagtcctaaaagaattccagaaagcccaacgattagcagcagagagagaagctgcatatgcacctttcatttctcaagcgggcttgccacagagctacaactcaagtgaagtgaataatggtgctgataggttggcagagcagcgcacacagcttctagaatctagaaggcaggagttggtcttcttggataatgaaatcgtgttcaatgaggccatcattgaggagagggatcagggaatacaagagattcagcaccaaatcactgaagtaaatgaaatcttcaaagatctcgctgtgctagtccatgaccaaggagcaatgatagatgacattgattcccatatagagaacgccgttgtagcgacttcgcaggctaaaggccagctttcaaaggctgctaaaactcagaagtcgaactcttctctgatatgcttgttgctcgttattttcggagtggtcctgctcatagtgataatagtacttgcagcctaaaagcttggaaggcagctggggttccgaaatctgatcgagagcttattgcgacaaattccttcataagttatttttgctgtgctgctaggaatgattcctggtacccaggcggtgattggcgctctgcttgtggtgtggcggtatatgtggtgatgatgaaatctgatgcataaaagtactctttcctgcaagtgtagtgcctcatgcacgtttttgtttatatattgtgatgtatgagtgcgtgatgtagaacaaggttggattatccgtggcatgaagtttctcc

SEQ ID NO: 24779 - DNA, 1092 bp, Zea mays
  Clone ID: LIB3637-240-B1_FLI
caaccgcgcaacttacttccccgtcgcgatttgcattgccctcctcttggcccccgatctcgccgtgccctacccccagacccgctccgccgccaccggagagatcgcgccccccattcccacaatctaatccttccgtccctcgaggagccgagccctccgcgcggccgtgggatggggcggtgacaacaccggtgagtggcgtggggcagggagccggtggcgagggcatatcatggtgcagtgcctggacggggtgaggcagctgctcgcggtcctgctcaagtgctgcgacgtcgagctcaagcagccgcccgggctcgaggaccctcaggttctcgcgagggagaccgtcttcagcgtgagcgaagtcgaggctctctacgagctgttcaagaagataagcagtgctgtcatcgatgatgggctgattaacaaggaggagtttcagttggcactatttaagaccagcaagaaggagagcctgttcgcagaccgcgtatttgatttgtttgacacaaagcacaatggaattttaggatttgaagaatttgctcgtgctctctcagtatttcatcctaatgctccccttgatgagaaaattgacttttcattccggctgtatgatctcaagcagcaaggctacattgagagacaagaggttaagcagatggttgttgctacacttgctgagtcaggaatgaatctttcagatgaaattgtagagagtataattgacaagacatttgaggaggcagacacaaaacatgatggaaggattgacaaggaagagtggcgcagtctagtcagtcggcatccatctttgctgaagaacatgactcttcagtacctcaaggacatcaccacaacatttccaagctttgtctttcactcccaagttgatgataactgattttcatgggattattttggcaagaagcattagaagatattctcgtggggttctgatatggttttctttttcaattattgggttgttggattgactgagatcgtagtgctcataagtatgttggatgttggattcgagaactcaaatcttttgtcaaccatgtttctttcaaaaataac

SEQ ID NO: 24780 - DNA, 1498 bp, Zea mays
  Clone ID: LIB3637-240-C12_FLI
cgatcactcgctgctcccctctctcgccggagctccgggccggatggcggcggcagcagcagctcctcccgcctccgtgatcgcgtgatggacgcacacaccgccgcgctccgccgatggacgacgccggaaggccaccaccacacgctcccgtggcggtgaccgcctccgcctccgcctccgccaccgccgcgcccgcccctccccaaccctcagccactgctgccgtcgacaggtcctcccccgaccccgacgcgctctatgaagaggggatgtggcaacagatggccatggacagcggtgccactatgcaacctgggtcatatcctgagcgaccaggtgaacccgactgcacttactatctcaggactggattgtgtcgatttggcatgagctgccgattcaatcatcctcccgataggaatctggctattgcctctgccagaatgaagggagaatatcctgagagagcaggacagccagagtgtcagtattatctgaagactggaacatgcaagtttggccctacatgcaaatttcaccatcccagggaaaaggctggaattgcagggagggtgcagctaaacacatcaggatatccactccgcccgaatgaaaaggagtgtgcatattatttaaaaacaggacactgtaaatatgcaaatacttgtaaattccaccatccggaacttttcaatgtggtgccttcgtcacgtggttctcctatttatacctctgtacattcctctgcgagtgctggtccgcagtcctatactggaactatgccaagctgggctttcccacgagcttcttttataccaagccctaggtggcaaagtccttcaaattatgcgccgatgattgtacctcagggccttgttcaaatgccgagctggaattcatatactggtcagctgcagtcacctggggctcaacaaacttatggaagttcacaacaaggcgaagctagtacaggaaatcagggaatgctatcaccctacagatctagttcgtttcctgtgcctcaatatgcgctgcagagagagaatgtatttcctgagagacctgatgaaccagaatgccaatattacatgaagacaggagattgtaaattcggtgcagtgtgcaagttccatcatccccgggtgagatcactgccccctccagattgtgtcttaagtccaatgggtcttccactacgtccaggtgaagaactgtgcaaattctattctcgttacggcatctgcaagttcggcgccaactgtaaattcgaccatcctacagtggttgctccaatggtctatgcttgacctacttcgatttataaaatccatggcactgcctcaggcgctgtgaatgtttctcctaacttcctgccgggatcaaagttctgtaaattgagttgctaccggagatgtacagccccgtttttttttggttaatccagatctttgggaataactctcgaaaccgaataaactttggatacagagatgcc

SEQ ID NO: 24781 - DNA, 690 bp, Zea mays
  Clone ID: LIB3637-240-F9_FLI
cctgaaaaaacccttgcgccgctgagctgagtccccttcccttctctcgtcgcctccgcctccgccttcagtttagcctccaagcaggggcgccgcgcggggtattctgtccgtcgttgaggatagagagtcacttgcaccgggggagcggagatgaagccggttgtggggatcgtggtgtcgaacaagatgcagaagtcggtggtggttgcagtggaccgcctcttccacaacaaggtatacaaccgctacgtcaagcgcacctccaagttcatggcacacgacgatgacaacacctgcaacattggcgaccgggttaggctggatccttctaggcccttgagcagacacaagcactgggttgttgctgaaattctccgcagagctaaggtgtacgttccaccagctgcaacagcgtccagtgaacgtggtagcaaatctcaacaagctggtggtgctaccaaatgatccatctgaagttactcagaacaagatgcagtcacggcttgtttttctttcgctgtatgtttgtttccttgtggaatgtggttgccatgtttagcatgggagaaaaaatagcaagcagccagcatctttgcttaattactgttgttcttctgtggtgtccttcgtttaacggtactagccattaaggatgtagttaccagattcaacaagaccaatggattc

SEQ ID NO: 24782 - DNA, 1297 bp, Zea mays
  Clone ID: LIB3637-240-G6_FLI
tattcttcttcgcctccctttcctcctcagcacccaaaccccgaccttcagggttccgccgccatgccgcagggagaccacatcgagcttcaccagaagcgccatggcaagcgcctggaccacgatgaacgcaagcgcaagcgcgaggcgcgcgaggtgcacaggcgctcgaaggacgcccgcaatttgattggtgctaagggcaagaggttcgccaagaaacgctatgctgagaaggcgcagatgaagaagaccctgaaaatgcacgatgaatcaaataagcgacagaaggttgatgatgatgtccaagagggtgctcttcctccttatctactcgatcgtgatcagacacagcgtgctaaggtactcagcaacacaatcaagcaaaagaggaaggaaaaggctggcaaatgggatgttccgctgccaaaggtgattctcaaatctgaacacagcaaacccatttctggttgattaaatgagttacatatttcttgtcctttcaggtcagacctgtagctgaagaagaaatgttcaaggtgctacgaactggcaagcgaaaaaccaagcagtggaagagaatggttaccaaagccacttttgttggagctggatttacaaggaaaccaccgaagtatgagcggttcattcgaccaactggtctgcgtttcaccaaagctcatgtgactcacccagaactgaagtgcactttcaaccttgacataatttctgtgaagaaaaacccaaatggtccgatgtacacttctcttggtgttatgacaaggggaacaatcattgaggtactccaagcatttttaccagttattgtagtcaatactcttgtgtagtgactgtattaggtgctagccatggttcactgagattacctctttatatcaccccctcccctcccctctctcgaaaattgctgctcacaatagtcatctttcaggtaaatgtcagtgagcttggtctggtaactcccgctggaaaagttgtttgggggaaatatgctcaagttacaaacaacccggagaatgatggctgtatcaatgctgttttgctagtgtagaaccatagtgagattttgtttatggtggtgaatcgtcccatttgtatctgctcttgataagatgctcccttctgaccgatctcatggctaatcccaggagttgttttgctgcaccgtggtccatgggcgagcattctatatccttgccatgtgcgacaaatgacttggctattatagcctgctataaagttgactaatacaaattagcagcatttttcttgagct

SEQ ID NO: 24783 - DNA, 1320 bp, Zea mays
  Clone ID: LIB3637-241-A12_FLI
gagatttcggacccaaaccgatgcgctccggtcccggtcgtctttctttcgggcctctccgagtggtcaataaaccccgcctcccttctgtcatcccgtacgtctcgacctcgcagccgcaaacgcgaaaccctagcctcgagctctatctccggccacagctggtcaggttagcgacgaaggatgagcaggcgctggagccgcacgatctacgtcgggaacctccccggcgacatccgggagagggaggtggaggatctgttctacaagtatggtaaaattgttgacattgacctgaaggtccccccaagaccacctggttatgcttttgttgagtttgaagatcctcgtgatgctgaggaggcaattgctggacgggatggatacaactttgatggacaccgtctaagagtggaggctgctcatggtggtagaggtaatgcttcctcgcatgatcgttcaagtggctttggtggcggtggtggagcacgtcgtggtgtgtcgagacactcagagtatcgtgttcttgtcactggactgccttcttctgcatcatggcaggatttaaaggatcatatgcggaaggctggtgatgtttgtttctctgaagtgtatcgcgaaggcggtggcaccgtaggaattgtggactacacaaattatgatgatatgaaatatgctataaagaagctggatgatactgaattcaggaacgcctttgggcgagcctatataagggtgaaggaatataacggcaaacgtggtcgctcctactcacgtagccgaagcccaagtcgtagttacagcaaaagcaggagtccgagtaaatcacccaggactcgccgttcatcatctagatcccggtcaagatctgtttcttctcgttcaaggtccccatcaaaaggacgttctccatcaagatcaccagcaagatcgaaatctcctaatgtttctccagcaaatggtgaagcagcaagccccaagaagcagagcccaaacaggagcccatctggctcacgctctcctgatgcgaagcctgaataaaattgctatgctgttaaaggattgcagatggagtcaggagctcttcttttcttaacatttgtcctctgttctagtaccatcagtgtcttatcgcagtacgagattggatgatattaactatctgtatcagcttgtatcgatggactccaagtgttgtcactcttgttgtctagtgtgctgaaggacccatttacttttgctaaacttttccattggtgattgttggatgcatggtgtggatttgtgctgtgttggctaaatcatgttgttctagacctt

SEQ ID NO: 24784 - DNA, 998 bp, Zea mays
  Clone ID: LIB3637-241-C8_FLI
caaccactacggcagggcagggcaggggagggcagtagagatacggcgtctcctctcctacagtttctgacttggccagcgcaacggcagctagttcaattgaactagagcgctttatagatagaaaagaatatatatactgtagaatagaaccacagaaatccatccagaaacaaccgagaagacctgcggtgctgcggggaagagagaactcagtggtgaagaagaaggaggaaaaatcaccatgctggaccatctcgtcgggctgctgaagctgcgcgtggtgaggggggtgaacctcgccgtccgcgacctccgatccagcgatccctacgtcgtcgttcgcatcggcaaacagaaattgaagacacgggtggtaaagaagagtgtcaatccggaatgggacgaagaactcaccctctcaatcgaagaccccgctgttcctattagactggaagtttttgacaaggacactttcgtcgatgatacaatgggtaatgcagaggtggacatccgcccattagtcgagattgtgaagatgaaactccaggacgttgccgacagaaccgtggtaaagaaactggtgcccaacagacagaactgcctagccgaggagagctcgatatatatatcggaggggaaggtgaagcaagacatggttgtacggctgaggaacgtagagagcggggaaatagagctccagcttcagtggatcgacctccctggctctaagggtgtatgagtggggggcggctatgagctctgccttgccctgctgttttcgcggatctccaactctttttctacttgaaaagaagaactagtggtttgcgtgcgctcgctcgcgtagagctgtcagttgtatgtaagaagttatgattgcgttggcgtttagtaaaatatcgtcagggagatgtatgtgcatgaacatctgagaatcaagactataaaaatgtgtacaatgcatgtactaaatgggtgtttggtttctatagatt

SEQ ID NO: 24785 - DNA, 653 bp, Zea mays
  Clone ID: LIB3637-241-D10_FLI
gcagggtggagctcctgtttctcaccctcctgctctaccagagccacctttgcccaccgtttcgttcgctcatccacatcttccaagtgaacatggaacagggataagtcctgctccaagtgaagaggcggcaacactagcagatcctgctgggatgtcacaagtggcacctgcacctcatgcatcttacgccgccaggatgcagggcgatgctccctgccgctggattctttttctcctcgcgctatgcaccataacgagcctgctagtacgatgaaaggagtacacgggccggccaacatcagcaaccgccgccgctgtttgtacgtgctaaagaggaccgaccgcacgggtctcccaccggcaaggcgaccatcagaagaccataacgagctcgcccctcgttgcttggtagctgtcagtttgtcgctgcatgtaaatattggatgggtttacaaaaccgcgagacgcgtggtggtcaaagccacagggggtggcaggcccttgtccagcgtgtgtgtagtgctgctgccgctgctgctgattctcaagtctgaattcggcagacgcggcctcgtcaaaagtgtaaagaacctccagttccggagggttcgttccgcatctatccacgcgctcagttttgctgtggcggt

SEQ ID NO: 24786 - DNA, 663 bp, Zea mays
  Clone ID: LIB3637-241-E10_FLI
gcacgccctggtataaaagaggcgagggtcactgatgcaggacctcccgcagccgccacctcaacccaggaacagagcgaggcgacgccgcggcacctcttctccggttgtgaggaagaacaactccttccttgtgaagcagttcggcaacggcaatgccaaggtgcagttcaccaaggagccgaacaacctctacaacatccactccttcaaacactcgggtttggcgaacaagaagactgtgacgatccagccagctgcaaaggactcggctgtggtcctctctactaccaagaccaagaagcagaacgcacctgcgaagctcagccacaagtctgtgatgcgcaaggagttccgcaagatggccaaggctgtgaaaaaccaggttagtgacaactactacaggcctgatctgaccaagccagctcttgctaggctaagctcggtgtaccgcagcctccaggttgccaagtccggtgtcaagaagaagaacaggcagtcctaagcgctaagtttgtgttctgtcagggggcatgttggtgctcgtagtcccagcttatatttatctatgttccaacagttttgagacttgttagaactgagcaaaccatgttaagatgctgctgtgtgtcattccttaaaaaaattgccttgcactttgtg

SEQ ID NO: 24787 - DNA, 779 bp, Zea mays
  Clone ID: LIB3637-241-G6_FLI
tttccctttccgttagcaggatagagagggagaggagcagaagatagcagagggccagaggcgcagaaggcagtcgcggacaggaggaagaggaagaagaagcggcagcgagcgaggatgccgtgcctgaacgtgtcgaccaacgtgaacctggagggggtggacacctccgccatcctcgccgaagcctccaagtccgtcgccaacatcatcggcaagcccgaggcctacgtgatggttgttctcaagggttcggtgcctatggcatttggaggtacccaggagccagcagcttacggtgagctggtttccatcggaggcctgaaccctgatgtgaacaagaagcttagtgctggcatcgcttctatcctggagtcaaagctgtctgttcccaagtcacgcttctacctcaagttctatgactcgaaggctcatcctgcacaagaaaatgctcaatgtttgcatgctttgcatcaagagtagatcatcgctcggacttcggttggaacggctccaccttctagacttgaggtctgcagctgaaataaaagaaattcgtggaatcatggtacctaatgcccatggctattgcctattaaggacaatgtcataagatgtgtcttaatcggtgctgaactgagaaacagtaactgttgtcgtggaactggaagtggggtgctggcgtgtcagagtgcttgcttcctacctagcatagcatgcctgtgctatcttgttattggtattggcttgatatcagtctatattatcatttacggagt

SEQ ID NO: 24788 - DNA, 974 bp, Zea mays
  Clone ID: LIB3637-242-G3_FLI
gcggacgccgagctgcaagtaactgcaccgactttcaaccggaagagccgagccgaaccaaagtcgcctcgtcgtctccaacctcccctcgcctcttgactaggccagggttccatcccacccccgccgccatccgatccgatggagggcggcgactcgtccggcgccggcgccggctccggtggcgccgtggcggcggcggccaagtggcggagcgacgcgtcgcggtcgttccagtactacctggaccgctccacgcctcacgccacggggcggtggctcggcacgctcgccgccgcggcaatctacgcgctgcgggtctacatggcgcagggcttctacatcgtcacctacgggcttgggatctacctcctcaacctcctcatcggtttcctctcccccatggtcgaccccgagctcgacccctccgccgccgccgaggggccggcgctgcccacccgggggtctgacgagttcaagcccttcatcaggcgtctccccgagttcaagttctggtatgcaatcacaaaagcttttgttgtagcttttgtgatgactttcttctctgtgtttgacgttcctgtcttctggcctatactcctctgctactgggttgttctctttgtccttacaatgaagcgccagattgtgcatatgatcaaatacaagtatgtgcctttcagtatcgggaaacagaaatacggtgtgaagaagagtgtcgcaagcaccagttcctcgaaagactgattatgagtctacctcagtaggaacttggcaggggaacaagatacggtggatgatgatgtgctaaatacctaagtgtaatactccattcatatgtagatgtagacggatattcgctcctgtttctgactctgggctcactgtttaattcgatattgtgcttagattgctccctcctatgcttgtatagcgaattccgcatctcagataaattatttcgtttatttact

SEQ ID NO: 24789 - DNA, 1498 bp, Zea mays
  Clone ID: LIB3637-243-C11_FLI
gctctcgctctcagacgactgggccgccgccgcttggtgctgaggctttggttggtctcttcggcggcgacgagcacccaccagcagttctgtagaaatggctgatggtgaggacatccagcctcttgtctgcgacaatggcaccggaatggtcaaggctggttttgctggcgacgatgcaccaagggcggtttttcctagcattgttggccgtcctcgccacactggtgtcatggtagggatgggacagaaggatgcatatgttggcgatgaggcacagtccaagagaggtattctcacgctcaagtacccgattgagcacggtattgtgagcaactgggatgacatggagaaaatatggcatcatactttctacaacgagcttcgtgttgccccagaggagcaccctgtgttgctcactgaggctcctttgaacccaaaggccaacagggagaagatgacccaaattatgtttgagactttcaatgttcctgccatgtatgttgcaatccaagcagtgctctcactctatgctagtgggcgtactactggtattgttcttgactctggtgatggtgtgagccacactgtgcccatttacgaaggatatgcccttcctcatgcgattcttcgtttggatcttgctggtcgggacctcacagactccctcatgaaaatcctgactgagaggggttactccttcacaacctctgccgagcgagaaattgtaagggacatcaaggagaagctggcatatatagctcttgactatgagcaagagttggaaactgccaagaacagctcctcagttgaaaagagctatgagctacctgatggccaagtaatcaccattggtgcagagagattcagatgccctgaggtcctcttccagccatccatgattggtatggaggctgccggaatccatgagacaacatacaattcaatcatgaagtgcgacgtggatatcaggaaggacctctacggcaacattgtgctcagtggaggttcaactatgttccctggaatcgctgatcgtatgagcaaggagatcacttcccttgcaccaagcagcatgaagatcaaggtcgttgcaccgcctgagaggaagtatagtgtctggataggagggtccatcctagcctcgctgagcactttccaacagatgtggatatctaaggaggagtacgatgagtctggcccggcaattgttcacaggaagtgcttctaggcttcgcaagttccttatcgttgcctagtctcaagttatgtccccttcatttctcaagatacgtgtggcagatttgcatggtacggttcatttatcaagttatgcccaccccctctttgtatgttgtggctccatgtgcgagcacgctgtctgtcgtgacacctggttcgtcagatgttttgtcaaacttgcttggcttgattggttgtacttgtacctgtaagagctgatagttatatgaatggtttggactgtcctgctgtttat

SEQ ID NO: 24790 - DNA, 810 bp, Zea mays
  Clone ID: LIB3637-243-C2_FLI
gtcgtgcctgacgtcgtcggtggacgccgcgtcaaggctgccgctgatccaccagatccattcgccgctacgttcagatataggctaccgctgatccattcgcagccacggaatctcctacgttcagctcaatacagatccatttgataagatgtttagaggttctcctaagatagtagctttatctaaagctgctcaaaagaaggcttctcctaaagctgcaaaatcaaagaaatgtggcggtggtgttgagagagctgcatggaatgttgaattagagaagagtcttgttgacttgttatttgaacacaatatgcctccatatagggctcaaaatggatggagtccagatgcttggaataaaatagtttctgaattccacaagaagcatgaatatgttacattcaacaagatccaaattcaagaaaaggagagagaattaaaaagggaatacaagatattgaaggaggcgagaaaacaaagtggagtttcttggaatgaaaaaagatgcatgatcattgctgaaccaacgatatgggacaacattatcactggtccaaggataaagatattatcaacatctctagaggaagagaaagtcaaatcacatcttcagtctgtgcaggctgtttattcagtttcagtcaataaggcttagcttgtagtgtgtgtggtctgaaggttgcatgtgcatgtagagactgtttcttcgttctgtggaggctgtgcagttttcagcttatttcttcagtcgtttcagactctgcagacatgtgctcgtctctactttgttaaaaaaattattcagac

SEQ ID NO: 24791 - DNA, 818 bp, Zea mays
  Clone ID: LIB3637-243-F2_FLI
gttttccagtcgcatcgtgaaaggttttaagggcaaagccctcggagcgtcactgggagaagagaaacggcggcgcgaagcggaggagggtgagaatatcggagttcggcgatgtcgaagcggcagggaccgccgaaacaccagaaccgctacgcgtggaagccgaaccttggtcagaagataaacgaaaccgagcccgggggcaggttccgacctctgtcagaaatcaccggcgtctgccagcgctgccgggatcaaatcgactggaaacgcagatacggaaaatacaagcccattgttgagccagcaaaatgccagaagtgtaataagcgaaacgtccggcaagcataccataacgtatgcagagattgctccaaggacctcggcatatgtgctaagtgctgcacatgtgttaacgagcttgtcggaagggatgcgaatgaggaggaaagtgaacgcaagtcactagaagaggctgtcagaggtgctagggagagggaacgacgtacacttcttcgtattatgaacaaaggcaaaggtggggagagtggaccgtcagtcccaaagattgctgacagaagtcgagaaggtgatatctttcctgctgcatcacttgatgaatacgccgaacaaactagagagcaagaggaagatgactcagatgtagaggctggagattttgtggaagattaaatttggaatgctttatgctgtaaagacgatactttctgtgatgcctgtggtcggattgtcgcgcatttccttatgtttgttcgaaagcttggaattggaagatgttaaactgcgttgatttaatt

SEQ ID NO: 24792 - DNA, 835 bp, Zea mays
  Clone ID: LIB3637-244-C1_FLI
tccgctgcagccatgagtaagttgcagtctgagtctgtcaaggaagccatctcccagattgttggggatgccaaggagaagaataggaagttcactgagactgtggaacttcagattggtctgaagaattatgatccacagaaggacaagcgtttcagtggctctgttaagttgccccatatccctcgtcccaagatgaaggtgtgcatgcttggtgatgcccagcatgttgaggaggccgagaagatgggacttgactacatggatgttgaggctctcaagaaaatgaacaagaacaagaagcttgttaagaggcttgccaagaagtaccatgctttcttggcatcagaggccatcatcaagcagattccccgtctccttggtcctggtctcaacaaggcaggcaagttcccgaccctggttactcaccaggaatcccttgaatccaaggtgaacgagactaaggcaaccgtcaagttccagctcaagaaggtcctttgcatgggtgtcgccgtcggcaacttggcgatggaggagaagcagatccagcagaacatccagatgagcgtcaacttccttgtttcccttctgaagaagaactggcagaatgtgagatgcctgtacgtcaagagcaccatggggaagccatacagggtgttctaagtatgctcttttgtgaagtctgctaggttctggcaccgaggttttattgaattaaactcttgttaagagtatgtttttggacgatcctatatttcgtcctggcgctactatgtttcagaatggtggtactactataagtattgcttgaaaggatcaatataatttgcgtgtc

SEQ ID NO: 24793 - DNA, 1309 bp, Zea mays
  Clone ID: LIB3637-244-E1_FLI
gaaaaggaagacgcagcaccgctagagctgagatgtccttcttcttccgcatggcgtcgcggctgcggccgtcgacgccggaggaggtggtgcgctccatcaaggactccttcctcgcgctccacacgcgcacccacgccaaggctctggaagaggtcgagaaaaatatgtcatctttgagattgttgatctttggtgatggagaagtcgaaccaaatgaagagcaggtcctgcaaataacccttgagatttgcaaggaggacgtcatttccctgatcgtccaggatctgccttccttgggctggggagtaagaaaagatctagctatctgctggtgcatcttgcttaggcagaaggtcgatgaaacttattgctgtgtgcagtatcttgaaaatcatctggagcttttagatttccttgttggttgctacaagaacttggatattgcattgaactgtggaaatatgttaagagaatgcataaagtaccctacacttgcaaaatacatattggaatctggtagctttgagctgttctttgagtatgttgagcttccaaactttgatattgcttcagatgctctgaacaccttcaaggatctgcttaccaagcacgaagttgtagtcgcagagttcttgagttcccactacgagcagttttttgaactctactcaaggctcttgtcatcaactaattatgtaacaagaaggcaggcaatcaagttcctttcagagttcctgctagagactcataactctcaaataatgaagagatacattgtggaagttcgttttttaaatattatgatcaatctactaaaggattcaagcaaaaatatcagaatatgtgccttccatgtttttaaggtatttgttgccaatccgaacaagcctcgatgtatcgttgtagctttgctagacaatcgtagagaagttctgaagctactccacaatcttccttcaagtaaaggcgacgatgaactcgatgaggagaaagacctaatcattcaggaaatccagaagttggcataacacaaaagcatcaagttatcgtttagcaatgcaagactctccttatagaggacatattgccaaggccagaaccatgtatatcacattgcacatgtagccttcaagagttgtatttttggaggttttttcttttcttttggtctcagaaaaccatagcaaagtattctctttttgaaggaattatatacatgattttggtgaccaaggaccgttggattaattgagctagacccataactaatctagcaatgaattaaagaattctaaggaccatgttg

SEQ ID NO: 24794 - DNA, 742 bp, Zea mays
  Clone ID: LIB3637-244-E11_FLI
ccgcctccgacatcgtctcttcgtccccacgagcaaccgataatccgccggcgctgagatgttggtttatcaagacctcctatctggcgacgagctcctgtcggattcattcacctacaaggagctcgagaacggcgtcctgtgggaggtcgagggaaagtgggtcacccaaggtcctgttgatgtagacattggtgccaatccatccgccgagggtggtgaggatgaaagcgttgatgacacagccgtgaaggtggttgatattgttgacacattccgtctacaggagcaacctccttttgacaagaaatcatttgtctcttacataaaaaaatacatcaagaatctcactgctgtgttggagccagagaaagcggatgagttcaaaaagggtgtcgagggtgcaaccaagtttctccttagcaagctgaaggaccttcaattttttgttggtgagagcatgaaggacgaagcgtccgtggtattcgcctattacaaggatggtgccactaatccgacattcctctatttctctcatggtcttaaggagatcaagtgctagattagttacccatgttgggtactatatatgttctattgttatagccacaactatagctgccctgcctgaactgaactcaggtttttttaagaaaaaactgtccaagattggattgcttgttaaagctaaatattgttattgacgtgttattgcttagttgtcattgtctttcagctagtc

SEQ ID NO: 24795 - DNA, 672 bp, Zea mays
  Clone ID: LIB3637-245-B10_FLI
ctgaccttaaaaaactcttgggcgtagaggggcaaccaacttttgtcaagcatgtatactggggaaatgcttttcctttgtatggccatgattatagttctgtattggaagctatagaaaagatggagaaaaaccttccagggttcttctacgcaggaaatagcaaggatgggcttgctgttggaagtgttatagcttcaggaagcaaggctgctgaccttgcaatctcatatcttgaatctcacaccaagcataataattcacattgaaagtgtctgacctatcctctagcagttgtcgacaaatttctccagttcatgtacagtagaaaccgatgcgttgcagtttcagaacatcttcacttcttcagatattaacccttcgttgaacatccaccagaaaggtagtcacatgtgtaagtgggaaaatgaggttaaaaactattatggcggccgaaatgttcctttttgttttcctcacaagtggcctacgacacttgatgttggaaatacatttaaatttgttgaattgtttgagaatacatgcgtgacgtgtaatatttgcctattgtgattttagcagtagtcttggccagattatgctttacgcctttacagtgaccaaggagtcaagggccccacatattatatttatttaccactgctttccttg

SEQ ID NO: 24796 - DNA, 796 bp, Zea mays
  Clone ID: LIB3637-246-A10_FLI
gctagtcgcccaaactacgcaaccgatatattccccagcacccccgttccagccgtccaaccgagacaccgcgtgcgaaccaagcagaccccagcagaagaagcgaagtcgtcgccggagcaggaggaagagcgagcagcaagatgtcgtggcaggcgtacgtcgatgaccacctgctgtgcgacatcgaaggccagcacctcagcgccgccgccatcgtcggccacgacggcagcgtctgggcacagtccgagaacttccccgagttaaagcctgaggaggttgctgggatgataaaggactttgatgaacctggaactcttgcaccaactggtctttttgttggaggtacgaagtacatggtgatccaaggtgaacctggagttgtcatccgaggaaagaagggcactggaggcattactatcaagaaaactggcatgtccttgattatcggtatctatgatgagccaatgactccagggcaatgcaatatggtggtggagaggctcggcgattacctgatcgaacagggcttctaagtttgtcataatgctattttggtcattgggcacttaagtttgcacctcatttggttctgtaatatgtgggcttgtgcatgtgcttggcgtattgcatgcagtgaataatttatcttcgcgttgggttggtgacaatgttgggaacggatttgaattggggtttatgcttgccatctcctcatatctcgaactcagctgctgtttcactgagtaatgtacatttccctggtaatggtacttgtgcactctgctgcttt

SEQ ID NO: 24797 - DNA, 979 bp, Zea mays
  Clone ID: LIB3637-246-B6_FLI
gcgagacggagaggcagcgcgctctggggctgttccggcgggcggcgaggctgggctccgcggcggcgatggtggacgccgggctgatgtgctgggaggacgggcgccgggaggaagccgtcggttactaccggagcgctgcggacctgggacatcccattgggatgtgcaaccttggggtctcctacctcgaagtgctgctaaatgtttccgcagctgatccacccaaggccgaggaagctattagatggttttatccatcagcatctgcaggcaatgctcgtgctcaatacaacctaggcctttgcttgcagaacggcaagggtgtcaagcggaatcagaaggaagcggcaaaatggtatttgcgagctgcggagggagggaatgtacgggccatgtataacatttccttgtgttacagctatggtgaagggcttgcacaggatccagtgcgtgctaagaggtggcttcaactagctgctgattgtggtcacaagaaagctctttatgagtgtggtattaagctttgtgcggcaggagacaaggtcaagtgtctcatgtatctagagctggcgacacggcgtggagaagctgctgctgctcacatgagggatgtaatacttgaatcgctctctgttgtgaatgcgcagcgtgccatgtcggatgctgataaatggaagcctaggacactccatcctagacctagaaggtgaggaaatgacacacgccaaagtgcagaagaaccatatcatcaagatgtccataccctagtcgtctgtggccagaattgaagcacggaaggtcaaagcaaacatgtatgcttcctcggcgcccacatccacaggaatgtcagtagccatcctgtggctctctgtataaagccatccattggcagatgtaataccaggagaacttgtagtacagaaagttctgtagcaaatactacttcctcacttccaaaatgctaccttaattctcg

SEQ ID NO: 24798 - DNA, 544 bp, Zea mays
  Clone ID: LIB3637-247-B7_FLI
aaaatactatatcaagtaaagcaattgaagagttttgcttcattgggatgcttcattggaaaatacattaacacgcctcttattgaagaacacagctgcggcgagctgggatggatcaagcacttgggtgagagttcttcgcgcagggctggagtgctacttccagtattgcttgcagctcgaggagttgatgagatgcaacggcggaatgccaaggaatcataaaagcatacggaggaactatgtataagctacaaagaagcactacaaagaagcataaaaagaatttttatagcataagccaagtgttctgatgattttgttttttcaattgtattttctgttattggttcagcatgcacatatattgacatgatttatggcatggcatctgtcatctttgttatatttatgacatcattcttgattgatgtgtgcgacatgaatgatggatctttttaacatcctgaccatcattgtgtcgctcattatcgtattttgtatatcatttataggttcacagatatgaaacgatagatttctt

SEQ ID NO: 24799 - DNA, 676 bp, Zea mays
  Clone ID: LIB3637-247-G6_FLI
ttctcatccctctctggatctccccctgctaacgaagacagacgcagaccaccaccagtaatgccgaccgcgaggcgcacgcgcatcccggcgttcggggagtggaaccaccaccaccacggcaacggcggcggcgcgtgggcgccggcggtcatgaccccgtccttcgacttcggccacgcaataacaacgccgcacaaagcgccgcagacgcaggggaggcggcgaggcgccgccgacggtgtcgtccacgcggccaagctggatgcggctgcggcggcggcggagcctcaccaaggccacacgcagaccacgaggcggagcaaggtggccgactccggagcctacgcgcaggccgcggcggcggcggcgaggaggtcctgcttcgcgctggccaagcccgtcgacgacgacctgtacggagtccctcccgacatgctctacggaaagccgccgccgccgggagcgagggtacgtacgtacgcacgcacgcacgcacattactagccatgatttatttgcggtccattttgcatcgggaaaaaatgaaaaaaaaaatgcatgctaccttaatgtaaaatcccattaattaaagagtttgttcagaggtctctagtggttaaaaagttcgtccctttacgaatttatatgtatattatcttttacgaatttatat

SEQ ID NO: 24800 - DNA, 1080 bp, Zea mays
  Clone ID: LIB3637-247-G7_FLI
gtaaaaccgtgacagtatcataatggcataagaggttcttttattttgtttgaacattctagtcagagtaagttatgtatctgttttctacatgctgaaggttatactcaaaccacttgtgaaatggctctcaccctatatctttctttagtgaatcaatgttggtattttagtagtagacttcagtcgtcagccatacttagcttttttctgctagtactgtactaatgttttgttcctccaagagaccgggaagtaaaatttaattggttcatatctttggtttatcattgtgttttttttggctattgcagtacttatgttaccaaagcaaggctagtaaatcataccggaaagaatggtgatggcgtcttggtcttgggtctgctagatgcatgcctactgccttatcgcaaagctagcttacctggtcatacgaatttgtagtcggttctgatctaattgcaagtgcatctagtaacttggattttttcgcaaaaaaatatcgggtgttcacgcctggcccctgcgcttgcagctactgaagagacaggagcaaagagttaacaggagatgaatgcccctgaccgttatgagcgtttcgtcgtgccagagggcaccaagaaagtgtcctatgagagggatacaaagattgtgaatgctgcatcattcactgtcgaacgcgaggatcacactgcagttgcacagagacccaaatgttctctttgccgggtataagctccctcacccactccagtacaagatcattgttaggatccacacaacgagccagtcctccccgacgcaggcctacacccaggctatcaatgatctagacaaagagcttgagtaccttaagcaagcttttgaggatgagaagaacaggtacgaggacaggatgaagcaggggttctagatgaatggaatagtgtgggagataaacttcctgtgttagttttatcctaggcgagtcaacaatgaaacgaacgcccaaggattgtgaatgtctgatccctgaactaaggttgcttgctgtcgttttactgtcatgcttgtgtcaatattcgtattattgcaaac

SEQ ID NO: 24801 - DNA, 1076 bp, Zea mays
  Clone ID: LIB3637-248-D8_FLI
gtagtgtagtgtaggggtagcccgcttggtgtgccactacagttttttttttaaaaaaagccattacgctttcctagaccgcacggctcagtcaccaacccactcatcactcctcactcactcactcaaaacgaaagccagctcagctcatctgctcacacctcacaggctcacacccacaggccggccgccacagcaccgcggatagcagagcagagcggtgagctgcagagcagggtagccgaggtcgtcgtcgtcgtcgtcactcgtcagccatgagcaaggacaagcaccacaagcacgagcaccacctgcggcgttgctgcgggtgcatggcgtcgtgcctcctggcgctggtcctcatcgtggccttcgtctcgctggtggtgtacctggcgctgcgcccctcgaagccgtccttctacctgcaggacctgcagctgcgcaggcccatctcgctgggcgacccgtcgctgacggcgtcggcgcaggtgacgctggcctcccgcaaccccaacgaccgcgtgggcatcttctacaagcgcctggacgtgttcgtcacctaccgcgacgaggccgtgacggtgcccgtgtctctgccgccgcagtaccagggccaccgcgacttcaccgtctggtcccccgtgctgtcggccgagtccgtgcccgttgccgcctacgtcgccgacgccatgaagcaggacgtcgccgcgggcttcgtcgcgctgcaggtcaaggtggacggccgcgtcaagtggaaggtcggcagctgggtctccggcagctaccacctcttcgtcagctgccccgccgtgctctccgcgggctaccccggcgtcaacaacaccgtgacgtcgctcaagttcgcccagcccacaggatgcagcgtcgaggtgtgagtttgtgaccaaacaagtgccctccctgtcctgccccctacgtattgttgcgtgctactcaaatttcatctctgggtgcgccggccgccgttaactgggttcttttaattttgttcatgtctcgttgtcaattctcattctcttgtgggccgggggaataaattatttgctttcgcc

SEQ ID NO: 24802 - DNA, 845 bp, Zea mays
  Clone ID: LIB3637-248-E12_FLI
ctctgctccagctaaccgcctgcctgccttttcttctctcgtccaccctaggtctcagtctctgctcgcgctcttgtggagctactaggtgaccgtcgcgaccgccctacgccacgtgctcgatccagcctcgtcggcttcttcgcacccgtcaccggcggtcagcacccaccaggttcataaatggcagagacggtgttcaccccctctttggaagataaatttggagctgctatggcaattgtaaagaatgatatcagcggcaatatcacaaggctggaaaacaagtattcttcagatccatcaaagtatggacacttgtacagcatggttcaggaagaagttcaaaacaagaccgcgaaaggttcctcaagctgcacaaatggtcttctgtggctcacgagggccatggatttccttgttgagttgttccgtaacctgcttgagcatccagactggaccatgactcaagcttgcactgattcatacaccaagaccctgaagaaatttcatggctggcttgccagttctagttttacggtggccatgaagctctctcctaatagagataaattcatggaggtcattagtggaactggtgatatcaatgcagatattgagaaattttgcacaaccttctctccttttctcaaagaaaatcacgagtttctggcgagcgttggtcttgatgatatgaaggcttcgtagagcgatctccaaggtggtgattacaacaaaataagcgtgtcttatcaaactcaagtgttgcagaggatatacctgttttctgtagccatctccccattgaaaattatacagggtgataataatttttccgcatgatt

SEQ ID NO: 24803 - DNA, 1367 bp, Zea mays
  Clone ID: LIB3637-248-H8_FLI
gttctctctgtgttggactcgatggggctctcatccaaaccactccaccgctgcccgatacctgttgcggatgatccaaatgttgttgtcataccaaagaggactcccaacacaattgtgaagaagttggcatatataactgttgacaaacaggataaagatccctcaccgctgtttggaggacgtcaaaactggaaacagagggaggagagctttaaactgaactctaccatgaaggttcactgcggatttatgaaaaatagtggtgcagatatggatatcattgatgtcaagtacatacagaaatgcaaattcgtggttgcctctggtattttcgatggttacgacatccctcaccagccatccaatatcagccgccggtctcagaagctgttctgcttcctgatggtggtggacgaagtatctcttgattttatccaaaagaacaccaccgtcaagatcgacagcgctggagggaaatgggttggcatatggcgacttctaacagtgcaccgcctcccattcgacgaacctagaaggaacgggaaaatacccaagatcttgacgcacagactattccctcaagcttggtatagcatttggattgacgggaaaatggagctcatagttgatccgctgcttattctcgagaggtacctctggcgtggaaaatacacattcgcggtggctgtccacaagcatcataggagcatctacgaggagggcgacgcgatcaagcgacggaagcgctacgcccgccctttggttgatcttcagatgaagatgtactattacgaggggatggagccttggagcccgaagaaaaagatgcctggcgatgtgccggagggagccgtgctgatccgggaacacacagcgacgaccaacctgttcagctgcctctggttcaacgaggtgaacctcttcaccccacgcgaccagatcagcttcggctacgtggcgcgcaggctcggcgacgctctcgagctcttcatgttccccaactgcgagtacaactcgctgttcgtcctgcacaggcacacgagggagcactcgtctaaggtcgagtgggccaaaacggtcgacgagatcgtggagaaggggctgagggagagtagaggagggttggggctgtggactccgtaccctgcggacctcagctccgtggaactccctgctgtaagaagaacttcgccggcaggataaggctaggctgtcaaagaccacaaagctcccagcctagcctgccgagcctgtggtctttgattcgttcatggttgtacagagtagaactccactgtttgtttgtttgtttggcgtagattatgtaggctgacgcttggagtttgttgcttccagttctgtac

SEQ ID NO: 24804 - DNA, 602 bp, Zea mays
  Clone ID: LIB3637-249-C1_FLI
ccgagctcctcgaaaccctaggagcgtgcttgaccggcggcggcgaggtgatggcgatggaccctgacgcggtagcgaaggccttcgtggagcattactaccgaacgttcgacaccaaccgcgcggcgctggttgggctgtaccaggagacctccatgctcaccttcgagggccagaagttccagggcccgtccgccattgccggcaagctcggatctctccctttccaggcctgcgagcatcagatcgtcaccgtcgactgccagccatcgggtccccagggaggcatgctcgtcttcgtctccggttccatacgcaccggccccgaggagcaccccatcaagttctcccagaatgacatgttccgcctgaactatggctaaagacagccgatactcttgtgatgaaggaattgtttaagggtttcatgttgaaacgatgaatacttaatgttgccgctactctggtctcttttgtatcttctttgttggctgcttcactgtattacaagaaattgctagacttggattatttcagttgttttgaatcatgtactggttgcaccatttctttgtggaatgtgaattgaaacggtcgtagct

SEQ ID NO: 24805 - DNA, 1229 bp, Zea mays
  Clone ID: LIB3637-250-C11_FLI
gtctttggttgctccgagttcctcgcctggttttcggcaaggccaaggaaaggtggtcacttcacttctgtttttttttttttactgccgccgcaaacctccgctcctgtgccataccgccattccattcttaatctgggcgccgaagaagagaggacgggagcgaggtccggtcgaagaatcgtagcggattgggggaggggggagcggcggcggcggcggcggaggccggtcggtatgattcaactgctgttcctcgtgctgttcgcggagggcgcggtggcgctgctcctcatggtgaaggtcgggccgctgcgggagcttgcgatgcgcggcgtggaccaggtgaagacgggcaagggcccggccacggtcaagacgctggcgtgcacgctctccgtcatcctcatgtccagcgtcgccagcatcctcaagatccagaacagggggctcaagctcggcaccgtcagccccatggaccaggtgctctggaggacgcacctcctcgaggcatccctcatcggatacacgctattccttgcatttgtaatcgaccggctgcaccactacctgcgaaagctgatgacactgaggaaaacatccagcacatccagagaggaggtggagaaacttcagatggagaaccggtcgctccgcgaaaaggaggagaagtcctccagtgagacgaagaggcttcagcgagagattgcgaggctgaatgagggcatgaagaagctgaaatctgagaccgaagagcacgagaggaaggcgtcggtggcagaggcccatgtcgacgcgctgcagaagcagtcggaggagctgctcctggagtacgaccggttgctggaagacaaccagattctgcagactcagctacttagcagaggctaagctaaggagcttggtttgttagcaagactcctttaccaggtagtgtcgtagagccaaggacttgcccgattctgaatgcttacatgccgcggttctaaatttcggcatgtccattgtggttcttggcgtccatgctgttcctaacttgtgatcttgttgatgtatggatgcagcgtgtatttttagagttcatgtttcttccatttccgatagatggaggtacatgatgtaaggtccaggaacgacgggacgtccttgaggaattcggtagtcaaggctctcagaatgtgcttgaaaaaaatcggagtggcatgttacgcagattctgattcgtcctg

SEQ ID NO: 24806 - DNA, 1247 bp, Zea mays
  Clone ID: LIB3637-250-F8_FLI
tgattactagtatttagtagtgagtttactagaagagtgctatacccctttaaaatgctattaagcgtctattatgctactgattttttttcgcaatcccgtatttgtagctgagaatcatgaaatttaatgtcacagtggcatagagagttcacccaagcaatgttagcacagtgtgaaaatgtagttaagctgaacaacaattcaaacataaaagaaatgaactggaataaaggacaactacaaaccaaaaaacatgattaacatggtttatgagttgcgagttgatgctgttgaacaactaaacaaaactggttctttctcttacacatggaaactctgcggggcatttggttatcccttgaggggggaagtctaaaatagattttgaacgtcttgggccattttgtatgctataatgacaattttgagaaatttgtttagttgtaaaggaggctgttcagacagagaaggcaccaccagcactaggcccttattctcaggccatcaaagcaaataatcttgtgtttgtttctggagttcttggcttgaatcccgaggtttgcttttgcactgtcgttctatcattttcttgtttttttctacattgcttgtatcagtttcctggtttttccactggacgaaccgatcagtttgctggttgtaggtgaagagacaactaatatgcctttctgttttcagaccaggaagtttatctctgaaaatgttgaggagcaaactgagcaggttatgaaaaacatgggcgagatattgaaagctagtggtgctagctattcttcagttgtgaagacaacgatcatgttggctgatctgcaggatttcaataaagtaaacgagatctatggcaaatatttcccggcgccagcacctgcacgatcaacctaccaagtggcggcgctgccactgaatgcccggattgagattgagtgcatcgctgctctctaatcagatcatccaaccactcattaaatcatcaataagcacccaggaatttgtggtagaggtacctgtaccagttcagtgtctgaaaactgcgggtaacaaacctttgtgtcccggataagtgatgtgtgtgtgtgtgtgtgtgagtgaacagtgcatctagtaggagaattgttgcgtggtttgttacttggattcttcgctctttagacaagaagtaccatggcatcaacatcaatagcctactgttttcttcccaataagaatgaattggcttccccaac

SEQ ID NO: 24807 - DNA, 1092 bp, Zea mays
  Clone ID: LIB3637-252-G6_FLI
gaaggcttctcctaaatgcagtggggcaaaaaagagtggaagttctccaagagtagtgaaacaaagagcggattggaatccaggccttgagaggtctcttgttgacattctccatgaatttaaagaaagtggataaagaggtgacaatggttggaactccgaagggtggaatagaatggtcaaggagtttcatgtgaggaacaagtatgtctcctttacaaagtctcaaattcaggataaagaaggtcagctgaagagagactacaagatgctcaaagcagcaaagcaacagagtgggtccacctggaatgagaaaaggaatatggttgaaggaccaccagctttgtgggagaatcttatggtgacatttcctaaaatcaagaagtttaacaacaacaaggcaaccttcccgctctttgatgctttgggagagctttatgatggacacttggctgaagggacttggaattgcacttctcttgaggcaccgcaagaggaagaaccgaatgagcaacttcaggatgcagaagatggaccacaagactttgatctgaatgttgttcatgatgtagatgatgaagttgatgatgcactcactgaaaggaatgaagatatgcttgaaggaagggctaatactctatcacgagatgaagaaagtggacaacgaagacctgctgcgtcaagaaacaagcaagaaaaggaaccaaagaagcctagaaagactgacaacatagaaaatatgatgaacaaatacctagaaatgaggagcaagcaagtagaagatgaagctgcaagagaaaaggaagcaagagaaaaggagacaagagaaaaggaggcagctcaaagtgaagatttctccatcaaaaggtgcatatcagttctgaacacaatggaagaagtgaccaaactggagaaggcaaaagcatattcagtcttcaccaagagcaaagagaatagagagactttcatatgtgcatgtgaagcggatcaagaatcagctttgatttggctaagaaatgagatggcttagtaggtatgatatttgtgtctttaccttccactcaaccatattcacttgggcctttatattcc

SEQ ID NO: 24808 - DNA, 851 bp, Zea mays
  Clone ID: LIB3637-254-A6_FLI
cacaccacaggcataacagaacagaaccatcgatcgagcttggttgctcggcagcagctagcaatggccgccaatggaggtgatgagctgaagctgctgggcgtgtgggacagcccgtacgtcaacagggtccagatcgtgctcaacctcaagggcctcagctacgagtacgtggaggaggacctcctcagcaagagcgagctcctcctcaattccaacccggtgcacaagaaagtgcccgtgctcatccacgccggcaagccggtcgccgagtcgcaggccatcgttcagtacctcgacgaggctttccccagcggcacgttcccgtcggtcctcccagccgaaccctacgcacgcgccaccgcccgcttctgggccgccttcgtcgacgacaaggtcgggtctccatggcacacggtcctgttcgcgcgggagcacgggaagaaggcggacgcggcgtcgcggatcgtcgcggcgctggagacgctggagggtgcgttcgaggactgctccggcgggagggactacttcggcggcgacgccatcggcttcgtggacgtggtcctcggcagctacctgggctggttcaaggtgttcgagaagatggtcggcgtcagggtcctggacgtggcgaggacgccgctcctcgccgcgtggggggagcgtttcgcggcggcggaagcggccaaggacgtcctgccggatgacgttgacaaggtgctcgagttccttcagaagttcctggattagatgcgcgccaccatgtgctccggtgtccaactcccaatgtttgtttgctttggtcattttcggtgcgctgttaatgggcctcggatgtttgccagttgatt

SEQ ID NO: 24809 - DNA, 1272 bp, Zea mays
  Clone ID: LIB3637-254-C10_FLI
ccgagacgacgaccggcagagcgcgccctcgcggcgctacccgacacctgcgacgaaacgccccgagtccactagtcgaggagtgcgtcgacgcaggggctcgggaacgcggtgtcgccatcgcggagccctagcgagatcgtcgggaaggtccgaaagcgagcacgtgtttgtgtaacctttctccccttcttccctttgccggccggcccttcagcggcgacaagtgcccaccaggcggtggtttacgttgagctgaggagtgaggaagatgtctggaaatccagtcggcgtcgacaacacttctaggaggaaatttgacaaggaagagtacttggagagagctcgacagagggagaaggatgaagctcggaaaggcaaggaaaggggtcctcctgtgcaaagacagcctttgaaacacagggactatgaagttgatcttgattctcgtcttggcaagactcaggtggtgaccccgattgcaccattgaatcagcaggctggatactactgttctgtatgtgaatgtgttgtcaaagattcagccaactatttggatcatataaatggcaagaagcatcagagagcactgggcatgtctatgcgtgttgaaagggcatcacttgaacaggtccagaaaaggtttgaggcacttaagaaaaggaaggatccaagtgcctttactgaagaagatttggatgagagaataatgaaacaacagcaagaggaggaggaacggaagcgtcagcgcaaagaaaagaagaaagagaagaaaagagaacaggcaacccaacatgaacctgaggacgttgatcctgacatcgctgccatgatgggttttggtgggtttggttcctcgaagaagtgacagctctgtgttggccgcatccctttggtgaccttctgccctgaagatattgctcaaccccataaacacctgtgccatgaaaaatcgtttttgccagaatcctgataagatttgaacgaagtgcactggatgcaaggatactacgttttggcactgggatactgaactgcgtgtatgggagttgattatcaaaaggaatatctaagggtgttttggataaacctgtttatttgctacttcgggtgttcctgccatagaaacagctgatggtcgtgattatttgttgtggcaatgcagatgtgcgaagtggaacaaaccaaaagaattgccgtgtcattttctagaggaataaacttgtgtattgcagttaacagctcacttgattctgaatcttaatttccagg

SEQ ID NO: 24810 - DNA, 905 bp, Zea mays
  Clone ID: LIB3637-254-F2_FLI
cattggtgaaggctgatttttggcttatttggctatcacttttgcttgggtcgggatcagggctgacagtgattgataacctgggtcagatgagccaggctattggttataaaaatgcacatatctttgtgtcactggtgagcatatggaactttcttggtcgtgttggaggtggctacttctctgagatcattgtcagggaacgtacatacccaaggcacatagcattggcagttgctcagatcgtgatggctgctgggcatttcctctttgctatggcttggcctggaactatgtacattgcgagcttgctggttggacttggatatggagctcactgggctattgtgccagctgctgtctccgagctttttggtgtaaaacactttggtgcgatgtacaattttctcatactagcgaaccccgcaggatccctcatcttctcagagctaattgtcagcaacctctatgaacatgaagctgagaaacaagctagccaacagcagatgtcagcattgctgtctccacgattgcttcgtgataccggctttcttgcagatgatgcactcaagtgtgaagggcctgcttgcttctttttcagctctctgattatgtcggtgttctgtgctgttgccgctgggttgagcctcctcgtcgttcaaaggaccagacaagtttatcctcgcctctacagttctgtccgcacttgagattctccaattctccatggatgggaagctcaaatcctcgtattctatgtccgtttattcttgcatacatatgcacaaagataagtatgtgaataaattctcaaatcttttcctaagctggtattgtaaaaacagatattcttgaatggactgtcccttgtgacttgcctatggattctggcacttgctgtcctg

SEQ ID NO: 24811 - DNA, 870 bp, Zea mays
  Clone ID: LIB3637-255-A4_FLI
ttttgattttagccgccgccgctgctcatctcacatccctcgagaagacgcctgctcctcgccgatcgatacgatggccgtcttctccgacctccacaccgccgacggcctcaagtccctcgaggctcacctcgccggcaaaacctatgtgtctggtgactccattactaaggatgacattaaggtcttcgccgcggtgccgtcgaagcctggcgctgagtttcctaatgccgcccgctggtacgagaccgtctctgcggctgtagcctcaagattccctggtaaggctgttggtgtaaatctgcctgcgggatcagctcctgcggcagctgctcctgcggatgaggctgaggatgatgatgaccttgatctttttggtgatgaaactgaggaggacaagaaggcagctgatgagcgtgccgccgctgccaaggcctcttctaaaaagaaagaaagtggtaaatcctccgtccttatggatgtcaaaccatgggacgatgagactgatatgaagaagctggaggaggctgtccgcagtgtccagatggagggtctgacttggggagcatcaaagcttgtgcctgttggatacggcatcaagaagatgactatcatgttgacaattgtcgacgatcttgtgtccatcgacactctaattgaggaccaccttacgcaagagcccatcaatgagtacgtccagagttgcgacattgtggctttcaacaagatctagagttcagtttctgagattgggcaacggcagcggctcagctcgtcaagtttgtgctgggatgccagtttatcccttctagtctattacagaaatgttgttcggagctgagtctattataaacatcttggtctgagttt

SEQ ID NO: 24812 - DNA, 888 bp, Zea mays
  Clone ID: LIB3637-255-F11_FLI
ggagcatttacctgattttgttaccaatttctgctagtaatagttattttggacacagaatggaagggcgccgctcaaatgaagtatcatctgccgaagctgtcttggtgggagcattgtcgtctggtgtcaatgctcccacgtggtttgtgctcaagattacgtttttgctccttgcattgtgttttacggctatgcttgctctagcattttcgtcgaagaactttgtaatcgttgcacatgttcttctgctggtgactattggaaccgtgctatttgtgctgcttaacaggtttctggctgaagttgggctcgtgcctgttgaacagcagattaaggagatgggcatccacaaaacagaagccacagatgaagacaagagaaattaatcagtgacaccttttttttttttgatatggaaagcagtttaacattcaatggacagagtgacattatctctcatgatagaatcagcactcacttcagagacatgaagttcagacaccacaattttgcacagatgaccatacatctttgtacgtacttccaaatggaaacccaggtcgaaatctgtagtgaaaagggatgtagctgcaagcagagcacatcaagcctgctttccctcttccttgggcttgctcttttttttttacttggtgtagcagaagcatgagcaccagggaaactgaaacaagaactccattgccagagaaatcaccaatacttttgtttggagaagtgtgcccaagggatttgcatgcaatgcaacccttacatatacgacatggatgccgtttatcagtggacattaggatttatggtctttgtgcaatatatatggtcgtgtcagactatcgttcctttcatttattctttattaaccctcat

SEQ ID NO: 24813 - DNA, 959 bp, Zea mays
  Clone ID: LIB3637-255-G2_FLI
gcttagttcgaggtctatcgatggttgaagccggtggatctggtgccgtgggcgatgccgggcacgctgcacccggcgtgactgacgtcgggcgcgtcgggcacactggacgagccgaaggcgttcggcgaaatgcctctccccgagagcgcgctgtgtacctgatcctcttggctctgtgagaaccctgtcgtcgtcgacgaggtaacagaattatgtcctaagattgcagatttcggcatggcaaagcttcttggccgagattacagcagggtactgacaacagtgcgagggaccataggataccttgcgccggagtggatctcagggctaccgataacacacaaggccgatgtctacagctttggaatgattctcctggaaatcctatctgggcgaaggaattcggagaagattgaagaggggaggtttacttacttcccttcctatgtcgcggtcaagttgagcgaaggagacgatgtcatgtggctgctggatagtagtctggagagcaatgctgatgcagagcagctacagagagcctgcagagttgcatgctggtgcattcaggatgctgaagatcacaggccgatgatggggcaggctgtgcacatgctggaaggtgccatggatgctcaagtccctcctgttccaaggtcactgcaaaactatgtcggcgtggaggattctaccactgcagaattttacatctctgaaggctcgtgctagtccagtgtgagcctgcccttttgttctttgtactgcttcggaactgaatctaagcggaacacacagttgctgtgtactgcagttttactcactagtgaactattttaagaatataagtactgcaaccctcacatttcctgattaactgcttcaaatgttggtcagacatcataggaattttgatgtacttcaaccctcatatttcctgattaactacttcaaatgttggc

SEQ ID NO: 24814 - DNA, 553 bp, Zea mays
  Clone ID: LIB3637-256-E5_FLI
cttcagcttactcaagatccgaatttgttgcgccgctcatcgccatcgtgctcgatcggatcctgagattgattggttgcgcaggttctccagaacgacatcgaccttctcaacccgccggcagagctcgagaagctcaagcacaagaagaagcgcctcgtccagtcccccaactccttcttcatggatgtcaagtgccagggatgcttcagcataaccacggttttcagccactcccagactgttgttgtgtgcccaggctgccaaactgttctctgccagcccacgggaggaaaggcgaggctcacggagggctgctctttccgccggaagggagactagagcgagtctgttattagtactggatcggttgtcaatctccagtatgtggtcttcaagtttttgctctgtgcccagacgttaaggtcatgaactaccttagctaaggctttccgcatgttgttctattgctgctatgtatctcacgttggttattgctgaacttatagcttgtttggttcggattatgataaaccaaatggatatttgaatt

SEQ ID NO: 24815 - DNA, 733 bp, Zea mays
  Clone ID: LIB3637-257-F4_FLI
cgagcttccacctcctgtcaatctgtcatcctcctcctcttgcaggtcgcagctgagcagcaacaaggccggaaaggatgtcgtggcagacctacgtcgacgagcacctcatgtgcgagatcgagggccaccaccacctcacctccgccgccatcatcggccacgacggcaccgtctgggcccagagcaccgcattcccgccgttcaagcctgaggagatggccaacatcatgaaggacttcgacgagcccgggttcctggccccgaccggcctcttcctcggccccaccaagtacatggtcatccagggcgagcccggcgccgtcatccgcgggaagaaggtaccgccgcccgcgcgccgatctcgatcatatcatatctcccgccgatctctcttcctgatcatagcaggtcttccttctttttacggttaatttccagggatctggaggcataaccgtgaagaagaccggggaggcgctggtggtcggcatctacgacgagcccatgacccccgggcagtgcaacatggtggtcgagaggctcggcgactacctcgtagagcaaggcctgtaaacggaattgcttcagtccaatcggaattgtttataatttgttgttgtcgttccggcaaataattttgtgtggtttcacctaaaagtttggttgtcgtatgatttgtaaaccccgaacagtatctatatgtgattgaactgcgcctacctattctttt

SEQ ID NO: 24816 - DNA, 923 bp, Zea mays
  Clone ID: LIB3637-258-B5_FLI
tgacaaacaagtaaaatgttgggatcttgaacaaaacaaggttattaggtcctaccatgggcatctgagtggtgtttactgcctagctctccatccaacaattgatatcttactgactggtggccgggattcagtttgcagggtgtgggacatcagaacaaaagcacatgtttctgctttaacagggcatgacaacactgtctgttcagtgtttgctcgtcctacggatcctcaagttgttactggttcacatgatacaactattaaattctgggatcttgtagctgggaggactatgtgtacccttactcaccataaaaagtctgtccgagctatggcgcttcatccaaaggagaaagcatttgcatcagcatcagcagacaacgtaaagaagtttaaccttcccaaaggcgaatttctgcacaacatgctgtcgcagcagaaaacaataatcaattcaatggctgtaaatgaggatggtgtcttggcaactggaggggataatggaagcctgtggttttgggactggaagagtggtcataactttcaacaagatcagactatagtccagcctggatcactggagagtgaggcatgcatatatgccctctcatatgacgtgagcggatcaaggcttgtgagctgtgaggcggataagactataaagatgtggaaagaggacttgacagcgacgccagagactcatcccatcaatttcaagcccccaaaggacatccgaagatattgatgctcaaatcccacaagtagcaagctagtggatggttggagcctccacaattgtgtgacccaaactcgcttcttccctgaccccaattgaaattttgctagggtttgctctattgtgtaatctgatgcatgtactccaccagtctgatgccttggtccaacgctttgaaaccctt

SEQ ID NO: 24817 - DNA, 953 bp, Zea mays
  Clone ID: LIB3637-258-F12_FLI
ctcgtcgccacctacgagttgctccctgcgccgttggagactcgctgactggggaagatggttgtccaggagttcacagttgatctcaacaagccccttgttttccaggttggccatcttgaggaacggtaccaggaatgggttcaccaaccgatcgtcagcaaggagggtccacgctttttcggaaatgatgtcctggagttcttgactcgcacgaagtggtgggctgtgccaactatatggctgcctgttgtctgctgcctgctcgtgaaatctattctgatgggtcatactgttcaggacgtagctatgatggctctgtttgggatatttatttggacgctgatcgaatacactttgcaccgcttcctgttccacatcgagaccaagacctactggtggaacaccgcacattaccttcttcacgggtgccaccataagcaccccatggactcgctcaggcttgtgtttcctcctactgcaacagcaattttgtgtttcccgttctggaacctggtcgcgttcttcgcaactccgtctaccacacccgcactgttcggaggcggtctgttgggatatgtgatgtatgattgcactcactactacctgcaccatgggcaaccatccaaagacccagcaaaacatctcaagaggtatcacctcaaccatcacttcagaatccaggacaagggcttcggcatcacctcatcgctttgggacgctgtctttgggacattgcctccatccatgacgtctgggaagaactgacgcacgtaactcaattcttggcatgagagattctaggggacctgtaatatatattcaagctagggataatcctggatctgtcttcgtgcgatgggttgacatgttcattcagttctcaaagttcttgtagtgtactgattgtctgttgatctattctgaatgtgatgatagtacttcgctgcctc

SEQ ID NO: 24818 - DNA, 1471 bp, Zea mays
  Clone ID: LIB3689-001-B2_FLI
gctagatctatggtggcatggcgagcgggacaggaatctcgtgggatggtgcctgcgcgttcgtggggtgagatacatggccaggacctactccgccgcggccaaggagataactgtacgggaagcattgaataccgcattagatgaagaaatgtcggcagacccttctgttttcttgatgggagaagaggttggcgagtaccaaggtgcatacaagatatccaagggtttgcttgacaagtatggccccgatagggttctcgatactccgatcactgaggcgggcttcactggcattggtgttggtgccgcttaccatggtcttcgacctattgtagagttcatgacatttaacttttcgatgcaggcaattgatcacataattaattcagctgccaagtcgaactacatgtctgctgggcagatatctgttcctattgtctttaggggtccaaatggtgctgctgctggagttggtgcccaacactcacagtgctatgcagcttggtatgcacatgttcccggattgaaagttctagctccatattctgcagaagatgctcgaggtttgctgaaagcagcaatcagggatccagatcctgttgtgttccttgaaaatgaacttctttatggtgaatcatttcctgtatctgctgaggtacttgattctagcttctgccttccgattggaaaggctaagatagagcgacaagggaaagatgtcactatcactgcattctccaaaatggtgggatatgcccttcaggccgctgatatactggccaaggaaggtatcagtgccgaggtaatcaatcttcgctcaattagaccgctggatagagctactattaatgcatctgtgaggaaaaccaatagattggtaaccgtagaagaaggcttccctcaacatgggattggtgcggaaatatgcatgtctgttgtagaggacagctttgagtatcttgatgcaccagtcgagaggattgctggagctgatgtgcccatgccgtacgctgccaaccttgagaggatggctgttccacaggtcgatgacatcgtccgggcagccaagcgtgcttgctacagggcagcagtaccgatggcagcaaccgcctagtccagcagaaccctgcatgttgcatttctttgtctaattttaatgtccgtgctgcagaaagacgtgtcacataatggtgtgacgagtacccactgccgctgcaactcaactatagcatgagctgagtttttgtagagccaccgagaggtgttcagtactccagttccagttccgcttatcttcgccgccgcagccggaaggctgcgcatgactctgcgtctgttttatggttcacgaatgattgcagatttgcagcagagcctctggagatgagaattttacttgtggcgagatgttgtgagtaacttgtattcagaagggggaactctcaagagatcctcaagtcgtgattcc

SEQ ID NO: 24819 - DNA, 989 bp, Zea mays
  Clone ID: LIB3689-001-C5_FLI
gtgtgtgtgtgtgtgtgtgtgtgtgtgtgtgtgtgtgtgtgtgtgggtgcagcgctgaggaggatcggagtgaagggggtggaggtgcgcaagccggagcagctcctcggcatcgactcgctcatcatccccggtggcgagagcaccaccatggccaagctcgccaactaccacaacctggtggttccctgcacttcgagagttcgttggaggtggaaagcctgtctggggaacctgtgctgggctcatctttcttgcaaacaaagcagtagggcaaaaaacaggggggcaggaacttgttggaggattagattgtacagtccaccgaaacttttttgggagtcagcttcaaagctttgagacagagctttcggtgccaaagctttcggagaaggaaggagggaatgatacatgccgcggtgtatttatacgggcacctgctatattggaagtaggtccagatgttgaaatattggcggattgccctgttcctgttgacagacccagcattacaatatcatttggggagggtactgaggaagaagagtattcaaaagatcgggtaattgttgcagtgcggcaagggaacatcctcgcaactgctttccacccagaattgacatcagactccagatggcatcgtttcttcttggacatggataaagaatccccagcaaaggcgttttctgcgctctccctgtcgtcatcgtcaagagacactgaaggcctgccaaagaataagccgtttgatctgcccatttttgagtaacgctacacacaagacaaaccaaaagattgaaggaatgaagaaactgaccgtatttattatcaatcatcatttagccggttacaaaaacagccagctgagaatctgtcatactcagccgaaaaaagtgttgtctggtagctaacttgtacggataaaaaataatcacgctgtgtgctgtacgcaattctcatcagataaagcgaaacattgttttcctggg

SEQ ID NO: 24820 - DNA, 1414 bp, Zea mays
  Clone ID: LIB3689-001-D10_FLI
ctctcatcgccgcgtcacgcacagccgccgccgtcgtgcgcgtgtgccggaacggccgcgtggatcctccgccccgtcccagcggcgacttgtccgtgcgaagatgctggggttctcgaccggacagctgctggtcgtcctcggggcctgctccgtcatgatgaagcccagtgatatggtgaagattgcgaggacggccgggcggatgactggaagagcggttgggcggctcatagtggctcgccggcagctggacgagattctgggccagtctgcagccacccaggttcataaggagcttaaagacgctatgacacaattagactcgatccgttatgaagtccagaacttatcaagattatctcctgggcagtttatgttgaagcaacataacgctggcatggctgaagcagggaaatctgactcctctgatggtcctacaaccaaccaagaagaatttcgtcaggaaattcgcagtataattcgcgatgaatttgaaaaatactgtagaacacagcccattcaaaactctgtgagcacaactgaacacagaaaacttcatgtggctgatgaaccaacggcactgaaatccaaggacatgaagatggctaattcaggattgacaaatctgcacaaccaagcaatgacgtatgcaaggctatctgaagccccaggacttaagatggattcttccttgagtgggaactacaaagatcaatctaaggagatggatgggctgctaactgtactgccaatatcagctgaaagtgctggattacttccaagccgcccagataaaccaacaggctcagatctagtccttgaggctgtgcttgaagcggaagttgcggagaacgctaaactgtttgtgtcgcagcctcatgatcagctacctaaggaatgaagacgaagatgatgtgcttgaagacgttgcaaacaggaccaaactgttcagctgacagccgcatggtcagttgcctacggagcgatgatggtagtttttgatccttaacaggatttggcatactaggcctgtttggtagagctctagaagttgatataccgatctggcgtccagcaccagcggtgtagcttgtagtcttgtaccctcaggcctcaactagccagctaggattcggatgccatggtagaaactggcgacatagcttgtagcctcaactagccaggtaggtttggctgccatagttgaggtaaagctgtggccggtgggcacgtagcttgtggcctcaaaaggagcaagaaagaaaaatagagtaaattagttgtggttatcaatgtgcatggtgattttaaagcttttaaggatgtcatctgtattctgtgtcctcgcaacactgatattctttgcaactctgagtagagagatacacggaatgttcagcttttcagatcc

SEQ ID NO: 24821 - DNA, 309 bp, Zea mays
  Clone ID: LIB3689-001-D8_FLI
gctcgtcgccttcatgaaggacttccaagccaggaacccttgattgccttgtgcttatggtcatttggtattgctactcagtctttcttcctagcataagtgagctcgtgcaagagctgtctcgcgttgcgcactgggatctatctgtagtattagtaccataacgtaacggctactgtattttgcaatgtttttttttctctctcgcttttgttaggtgttcatggaatttcatttctatggatcaccattgcagttgtaatgtgttcttgctggaaataaggaataaggtagatggccggttgcact

SEQ ID NO: 24822 - DNA, 1407 bp, Zea mays
  Clone ID: LIB3689-001-G8_FLI
cccgtttctgtcacaaatcgccactaaaaccctagccttccggggagattcagatccacacacatccgcatccctctctcctcggtttcctctcccaccaccaacccccagatcgcagcgatctccgccgcttcctcctccgactcagattcgtcagtccaggacttgcttgcgctcgtctacttcggctccctctttgacgtcaagcagcaaagcgacttcgtctctttggtttacacgcgcgaactcgagcggagcagctgcctcacttatgactacgtcggggatgatccggaggacagtctcgcggagaccgatctgaacgcggtttctgcccttgcctccctcgccgcgttgcgccctcctgctgcagccggagtctcgcaccgtgacgcccttcaggcttgtgctcatcacgcccgcctctggctctgccgtgcggatgaacccatccatcctgactccaccatcacatatgctggggtgagggcaaagctggataggatcatggcatcgggctacttcacagcgcagctagaaatgaggacaccattggatctggctgctgcagtggcaagttttggagctggaggtgtgcaggtgcaagagagcatggttgtgtcacctcaggcaccggaagcagtggaggagagccaggctgttgaaggacacaagaatgagaaggaagattctcaggctacagaaatctacaatgatcatcctgttgttgactctgaacatgtggaggatgaagtcctggtgcatccaactgatgaagttcctccagctgagacagagcaggagcaggagacatttgatgctgatgtgaaggatcaggagcaaaaggaccaacaattcatccagcggcggtcttaccagaaccagcgtggtggtggtcgtggtggcagcaggagaggctatcctaatggtcgtggaggacgtggtggccgaggtggcgggtaccagaatggccgtggtggataccagaatggtcgtggcggtgctggcgggtactactacgaatctggatactaccagccgaggaactacaacagaggccggggtggtcgctccggcggtggcaactcttactacaacagccatggtggaggtgcacaggggcatcatcctgggagtgttgagctgggcgcaaacgcctagcttcgctgactgttctgtttgataatgaggagcgagtgagtcgtgccattttgttattatagaactaacttagcctgttattacgtcaccgttggtcccatccgtgagtctttttgctgctcgagtgactgcatatggtcggtcggtattgaggaaatactctgggaaagtagtttcaggtcatattcgttttctaagttacgtttttttttgtgttaatatgcccttatttcttaattattatat

SEQ ID NO: 24823 - DNA, 1487 bp, Zea mays
  Clone ID: LIB3689-001-H3_FLI
gcaaacacgcacgcacaccgtacccctcagctcgcgccaccggccaccgcacacagaacgcgtgctccgtccgtcctccctctgcctcgcgcgcgcagggttagcgtgagctgatcgagcaacgagagctagctagctagaggacacgacacgatggccttgcaggtcaccggcggcgtgggctgctgctgccctccgggcagtgcccggcggttgccgcaagcggcggcgctgtgtcgcccgccccgcgcggtagtgtccggcgcaaccagggtggtggaggaggacgagggcaaggtgaggctgggcggctcaggcgtcgcggtcaccaagctcggcatcggcgcgtggtcctggggcgacaccacctactggaacgactccgagtgggatgacaggagactgagggaagcacaggacgcgttcgatgcgagcatcgataacgggatgaccttcttcgatactgcagaagtttacggtacagcactgatgggagcagtcaattctgaaactttactaggaggattcatcaaggaaaggcaacagaaggaccagatcgaggtgtccgttgcaacaaagttcgctgcccttccttggagatttggaaggggtagcgttctttcggcgctgaagaaatcgctagaccgtctaggcctagcgtctgtcgagctctatcaactccactggccagggatttgggggaacgaaggatatcttgatggtctcgcggatgcttatgagcaagtcctagtcaaggctgttggagtctcaaactacaatgagaagcgccttcgggatgcacatgctcgcctgaagaagcggggggttccacttgctgcaaaccaggtgaactacagcctcatatatagaacccctgagttgaatggcgtgaaagcagcatgtgatgagctcggcatcaccttgattgcttattccccgatagcgcaaggtgttctgacaggtaagtacactccagaaaacccccctactggtcctcgagcaaacacatacacccctgagttcctcgccaagctccaaccacttatgaacaggattaaagagatcggagcaagctatggcaagagtccaacccaggtgtctctgaactggctgacctgccagggcaacgtggtgccaatccccggagccaagaatgccagccaggccaaggagttcgccggtgcactcggctggagcctgacgggggacgaggtggaagagctacggactctggcacgcgagatcaagggcatcaggatgcccatcgaggagtcgtagatactctgtatttcaccaacccatgtcgtagcaggcgctgacggagaagacgacgcaaggatctagaaataaaccaggttgtgtaagtagaatagcttccaacgaatctcaggcctaagcattgtaagtatgcaatattcatttgccgaaaccagggctgtacctctgctgcctgttctctgctgaaaaaaaagttaggatggaaagat

SEQ ID NO: 24824 - DNA, 779 bp, Zea mays
  Clone ID: LIB3689-001-H8_FLI
gcggcggcgcgggcggacaaggagcaggcggaggaggagctgtgccaagccacaatgggtatctcacgcgactcgatgcacaagcgccgtgccaccggtggaaagcagaaggcctggaggaagaagcgaaagtatgagcttggtcgccagccggccaacaccaagttgtcaagcaataagacagtgaggagggtccgtgttcgtggaggtaacgtgaagtggagggctcttcgccttgatactggtaactactcatggggaagtgaagctgttacccgcaagacccgtatcctcgacgtggtctacaatgcatcaaacaatgagcttgtgaggacacaaacccttgtgaagagtgccattgtgcaagttgatgctgccccattcaagcagtggtacctcactcactatggagttgacattggtaggaagaagaaaacccctgctgcaaagaaggataatgctgagggacaagaggttgaggcagcagctgaggaaacgaaaaagagcaaccatgtcacgaggaagcttgagaagcgcaaggagggacgtacccttgacccacacattgaggagcaatttggcagtggacggttgctggcatgcatttcttcccgccctggacagtgtggccgagctgatgggtacatccttgagggtaaagagcttgagttctacatgaagaagctacagaggaagaagggcaagagcgctgtagcttagagcattctcatggattgtcttgcaccgaaatgtgtgtcctgattagtacactgttttct

SEQ ID NO: 24825 - DNA, 3726 bp, Zea mays
  Clone ID: LIB3689-002-A10_FLI
ccagactagacagctccgtttcccctccccgtcctgcatccatctcgaccgcgcaccaaacccgaaaacgcagccacattccctcctgcagccacccccccccccccctccgctctcgcgcccctccgctgcgcgtcactccgagcggcggcggcggcggcggcgcccgcccccacagggcagtggcggcggcgaacgagggagggtttgttccccggaagagggagggaggctctggcgggagtgtgttacgggcttacggccgcctcgtgctggtgacaggcgcggcgcgagatccgggctggaagggctggcgggtcccgttggtggcgccgtggcgtcggcgtgatctgagatgagattggacccggctgcgcggtattcgctgcggaggtagacggccatgacgaccaacaccaagcgcgcctacaagctccaggagtttgtggcgcactcgtccaatgttaactgcctcaagattgggaggaagacctcgcgggttcttgtcacaggaggagaggaccataaggtcaatctttgggctattgggaagcccaattcaatactgagcttatcaggtcacacaagtgctgtggagtcggttggttttgattccacggaagtgtttgtggctgcaggagcagccagtggaacaataaagctatgggatttggaggaggcaaagattgtccgcactcttactggacatagatcaaactgcatgtcagttgattttcatccgtttggggaattctttgcctctgggtcactggacactaatctgaagatatgggatataagaaggaagaattgcatccatacatacaaaggtcacacacgaggggtgaacactattagatttacacccgatgggcggtgggttgtgtctggtggcgaagataatatagtaaagctctgggatctgacagctggaaagttattacatgaattcaagtgtcatgagggtcagatccagtgcatagatttccacccccacgagttccttctggcaacaggttcagctgataaaactgtcaaattctgggatttggagacatttgaattgattggatctacaggacctgagacaacaggtgtccgatccatgacattcaatcctgatggaagatctttgttatgtgggctgcacgaaagcttaaaggttttctcttgggagccaataagatgccatgatactgtggacgtgggatggtctagacttgccgatttgaatgtccatgagggaaaacttcttggttgttctttcaatcaaagttgtgttggaatatgggttgttgatctgacgcgtcttgagccatatacaatgggtacttcaacaaaagtaaatggtcattctgaattgaagactgtttctagcggcactttgcctttacaaaatgatagtggttcaagggctaacatagggcgatcatcagtcttgcaaaatacagagaacaaccttaaaactacttcaggaagactgtcggcttcacagaactcagattctgcacccaaagaaactaactcggcaccttcaagcgggttgatcccaagcacaccacatagggctggagttggctcccataatagatctgttggaaattcagcttttcaatctggtggtaccaccttgaagagaagttcgttgaggaataacagtgcctctaatgttcacaatttcagtaaagctgatgtagtgcctgtcattgttcccagaactagctcaggaggggagttggctactgattctagaagcgatgctgctgatgtggcacccgttcttccgaaggtaaccagaagggttgaacctgctaccgattctagaaaagaaagtaatgatgtggaacttgttgttcctagagcaagctcaagaatggaaatagccgatttagcacccatttctagttccaagtcaggcagaaggttggagtctgcccctgattcgaaagaagaaagtgctgatacagcacctgttgttgtttccaatcccagggctaatgtaagaatggaaatagtctctgattctgcgcccgctctttcaaagtcaaacagaaagctagattctggcactaactcaaagaaagaaagtgctgatgcagtcattgtacccagaacaaattctagaatggaaatgatttctgattctaggagagaaccctctgctggaagaatatcaccattcagaatccagtcaagatatgctgagccacggaagctagcccatgccagaactgattcaaacaaagttgatagcagaagtaaaattactgaaacagaagacttcaattgccaaatatttcttccccgtagaaacagtgtttttcaaacaataagttctgaagaacctcgtgaagatgtaaagtgtggtccagttgacagggtgggattttcaaattcatcagaaccaaatgcgagtgtccgcaatgagaattatgttcctagaatgcgcaaaccaggagacaactgctatatcgaagtttcaagagcaggaagagcaaggtcaagtgtctctaattgggaagggagggatcagccccctagtcatgaagaaccaacaacaagcagttctacactggctcctaccggccatccatattcatctagaggaagcaatcaagcttctgaagctccaatcatagctagtgatgaagatgttctatctcttatcatggagcgacatgatctatttttaagctcaactaagtctcggctgatgaaattgcagattattcatcaaatgtgggaaagaaatgacatcaggggtgtgctctctgcgatggacaggatgggtgatcatgctgtctgtgctgatatggctagcgttctcatggagaaaagtgaaacaatcacactagatttatgtacctctatcctgcctgtcgtcaccgatcttctggagagcaaaattgacagacacttagtcgtcgcattggaattgttggtgaagcttgtaaggacttttggtccaatgatacattcaacagtatcgtcaggtccttgtgttggtgtagaccttgaggcagagcaaaggagggagcgctgcaacttatgcttcatcgaattggagaaggccaaaaataagcttccatctctaacaagaagaaaaggggcggttgcaaatgctgcacaagaacttgctcttgtcttccaggaaatcatgagttgactgacgacacactagatatacacaattagatgggacatgcttcggcctctgatggcaacaagattggatatcagctgccatggagggtgctagctattcagtcttagcgacgtcatcaagctccaaggccacagcaccaacaaatgcattttgttgctgctgttcgtgccttttgtacacatgctaacacataatccatgtcatttgtgaagagaagctgccatggacagtgacttcatccacaatattatgtggatggcggcagctggagatgttaggccccgatcgaatggtgatcagcagatgagacttgcttgggcttttctggcactcgtagttctttgctgtctgtaacatctttctcatgtaccgttatcatgtgcatgtgcaacagtcaagtggttgcatttggtagtttatggttgtgctgtgtgttggtcgatttagtggtcgttgatgagtgaagcgagccatgtacatcatttttttttaagatttgatatcttctttttccttgatgactcctctcgttatacttgagtgaaaatgatatcttgtgt

SEQ ID NO: 24826 - DNA, 1861 bp, Zea mays
  Clone ID: LIB3689-002-A4_FLI
gcgagagctcgggcgccagatctgaaacctcttgtgttgtgcctttggtagtttggtgtagcattgagctagtagaggtgctgttctagttccaggatgagcaaggaggatgtcctcaaggtgcagacattgatgctgagagtgaacatacactgtgacgggtgcgagaagaaggtcaagaagaccctccacaagatcgacggtgtctaccagagcagcatcgacgcggaacagggcaaggtgacggtgtccggtttgctggatccggataccatcatcaggaagctcaacaaggccggcaagccggctcagctgtggggttccaagcccggcatcactcagaacgcctaccatggcggcggtcacaagggccctggcggtggcggtggcggaggcggtggcgtgggcaatcctaagatggtgatgccgcagccgacgccgcagcagctccagcagctgcagcagcagctgcagatgaaggggctgaagcttccgccgcacctcttgggcggcaatatgccggcgttccccgcggctgcgccgatgaaggaccccaagtccgtcaagtttgccctcccggaggacaacttcgacgactacggcagcgagttcgacgatgacttcgacgacggcttcgacgacgacgaggacgactacgacgacgacggcctggacgacgacgtctacggcgaccccaagatgatgatgaagcccatggctgtgccgccgccggccggcgggggcgacaagaagggcggtggcggcaagaagggtggtggtggggggaacgagatcccggtgcagatcaagggaaacaaccacggcggtgccggtgggcagccgcacaatgcaaagggaggcgccccgggaggcggggcccacctgggccaggggaagaagggcggcggcagcgccgccgccgtcggcgtcggtggcccgatgggcggaatgctgcctcaacaaggcatgatgaggcctcctaacattcttggtggtgctggtgccggcttccccagcacggcccagatgggcggcggacctatgggcatgccggttggccacccgcacatgggtattatgcagcagggcggcggtggcggtggtggtggcatgccgggcctggggttccacccgggattgggcggcggcggaatgcattctggggcggatatgcttcaggccgccgcggcatccgggaaccccgtggcgcagcagcagtacatggccttgatgcagcagcagcagcagcagatgatgatgatgcagcagcagcaacagcagcacgggaacggcggtttaggatacccggcggcaatgggctacggctatggccggccaccgatgcattacccaatgggctacccagtgctgcccccgcactcgcatgctgagccttacaacatcttcagcgacgagaacgccaacagctgctcactgatgtgatcagcaattccgcatggaatggccctgttccaagtaaaccatctcaaggagctcaatgtcaccgctgatcaccgacagacatcgccatggttgaagcgccgtgaatcaatcaacaatcagtatgcttggggatgagtcctagctagaaccctgtccctttcctgctccttccccccctttctctagcttattttcgccttgctttaaaaaaaaaggaacttccttgaatgcgaagttaggtatagtaattatgaggtttccataagggaggggaggagagaggagacgatagggacttcgtacggggtcgttcgcttgtgggttcttccctcctggcttcattaaggtggactaatggtagaacaatgttgtcaatctcagtcgtaaatcagtgtgaatatgtcgtgatttctcttct

SEQ ID NO: 24827 - DNA, 2105 bp, Zea mays
  Clone ID: LIB3689-002-D7_FLI
ctcctctgcacatgtacactcacctcaaaacccccaagcatcgtgctaaaacccggcctagccctcgaatccccccttgcccgcgcggagtagacgagcccagcccgtcccatcgaccatggcatcctcagggtccgccgctaacctctggtactgcttggcctaagcatcgcgggcgtcctcctggcagcgcggcgattgaggcaccatacgcgccctgaccacgacgctttcatggcccgcctagagctcctcccaccgccacagcctccgccgtcgcaaggaggccagcccgggcgaggtggcgcaggccatcgccatgttccccagatcctgttccacagcgtcgccttcttccaggtacacccagctctcgccttcttcaggcacagctccaagccgtcaagcgccacccagtcccgattcccttcacaccgtctctcgccctatcctatctgacggtccaagactctgagtttgccgtggtgagtgtgcttcactgcttctctaattcctcccgttgcattggttcgatggaatatggcgctgaggaggaggcggcgaccgatgaccccagtagcagcgggggcaccaggcgttgggcgactgaaggggagcccgaagctgactgtggatgcggacatgcgagatatggcgaagacggccgcgtggagcgttagttcctacagggctggcaacggtgtcacggccctgcacgacaacaaccttgacacctgccgacagtctgatggggctcaagtgtacagccgcaaatggtgaacatccagttccagaagaagttgcaggcgtgtagctgcagcctgcagctcgtcgtgatatacgtggatttcaagctcgaagaagtgctccactaaaaatgaaacgttagaattcagctgagcatcttactctacattgcagcaaactgtgacgtgctttgctgagttagattagtctggcatgcttgagtttcccatggtagggcgccgcgaagcgcgcctctttttctagtaaacaaaagcgcaaatggaagccgcttcacgtagcagcccgtgcaaagcaagcgaaagggacccgcgagcagcgaagcaaccaggccaagcgcaacacgacctacaccgtggggccggccatccaggagacacgcgtattccgtcctggacaaaggaccgcatccacttgctagctcgctagtcattacctgatttcgccgcgggcgtcgtcgtctttctccttcctcgtcctttataaaggaaggtggcaatggcctttccctctgcaccgccaagttagcttgcctagccacatcaaagcaaagctagctacggccagctttggcgatctgcttgcttctctctgagcgtttctttacaactaaaccaactgagcaatggggaggcaaccgtgctgcgacaaggtggggctgaagaagggcccgtggtcggcggaggaggacgagaagctcgtcaccttcctcctcaccaacggccagtgctgctggcgcgccgtgcccaagcttgccgggctactgcggtgcggaaagagctgcaggcttcggtggaccaactacctgcgcccggacctcaagcgcgggctgctgtcgtcggaggaggagacgacggtgatcgacctgcacgcgcagctgggcaaccggtggtccaagatcgcgtcgcacctgccgggacgcacggacaacgagatcaagaaccactggaacacgcacatcaagaagaagctgaggaagatgggcatcgaccctgccacccacaagcccctccacccacagccagcagctcctcctccgactcagcaggagcaggacacgggcgggtcgcccgaggaggagggggagaaggccgacgcggtcatgatggcagcagctacgccgattatcgggcacgagacggcgccgttctttaccgacgaggaggagatgctggcgcacctccttgacgacatcgacgacttcccacccgcggcttattctcccgacgactcttcttcgccctcctcctcctcctccgcgtcccggtcgtctcactcggcctccgtcgtcacagcgccgtcgtcgagcggagctggtggaagcagcgtcgccgacggcg

SEQ ID NO: 24828 - DNA, 1253 bp, Zea mays
  Clone ID: LIB3689-002-E10_FLI
ggtttatgaaggttttgtacctgaaaaaaaccacatatcatcaacaaaataggaaaggaccctatattgttgatgatatgtggtttatgaaggttttgtgttgcttgaagtcattctgaggtttttgtggatggggtcatacaagtcttttttcttggtgtatgctctgttacatcactaagcacttcatagatgtttgacctccgggcctgtttgacttgaatgatcttgttgaaggttttcggttttttacccaaccatggaggtctgtggtggaagggtgcccttggtggaattggtggccattgttccgatatttgtggaggactttggtgaagggcgcccttggtgtaatcttattgactgttgtagatgaagttgcaagttgatgcatttgagtacttgactcatgtcagcagcttactgtttgtggaaactatttgcgcagaatacgtgaagtggagttgaagcgtgactggaagaacaaatgctaccgctgtggtgaatcgggccatatagagagaaattgccagaacagtccaaggaatctcaggcgtgataaaagctattcacggtctccatccccacgtggtggacgtggccgcagccggagctacagcagaagccggagctatagccgatccagatccccatctggatctcccaggggtggacgccgtgaacgtgacgagaggagatctaggagtcttagctacagcaggagcgcaagccccaggcgttctgtctcacctgcaaaggaaaaggagcgcagtcgcacacccaatggcagtaggagcccaaggagccccagcccaagggctgaggtgagcccaccactgaaggataatggtgcacgcaatggctcagaccatgaaggcaaccctggtggtggagagaacagcaagaggagtcggagcccatctgatggctaccgtagccctgtggccaatgggcgcagcccgagcccgagggacgatcggagcccaagccccaagggcaacaacgaagatgacgagcgccgtggttcacctagaggaagtcagtcccccctgaactgagaaattctgatcaaatttgggccgcacgattcggttgtaactgttatattttagtttgagacaacaaactgtatttgctcatttctcatacagtcaggtttatgctttttgagctagaaaacatgtgtaagaatttgttaccttcaagctattcctggtttgtgatatggtaatacttgaactatttagcttgcc

SEQ ID NO: 24829 - DNA, 1898 bp, Zea mays
  Clone ID: LIB3689-002-F4_FLI
caaggccgcctccggtcttcccacttccacacgagaaggaaacgaccacctcctttcctgtgtcccgaatcgggagtagtagtagtagtgcatccaatcgacacacacacaaaaaaaaaggttagttagccatggcgccgccaacagaggactgcggctggctgctgtacctttccctggccgccaaatgcggcgaccctcagcgcctgctcggcttcgccgcggtcttcgtcgcggcctgcgtagtcacgtcgctcctgcactgggcgtccccgggcggccccgcctgggggtggtactggtggaccaggcgggccgggctgggcatcgtccgtgccgccatcccgggaccccggggcctgccggtggtcggcagcatgggcctgatgaccggcctggcgcaccgcaagctctcggcggcggccgagagacaggccagcaggcgccgcctcatggcgttctcgcttggcgagacccgggtggtggtcaccgccgaccccgacgtcgcgcgggagctgctcgccagcgccgccttcgccgaccgccccgtcaaggagtccgcgtacgggctcctgttccaccgcgccatcggcttcgccccgcacggcgcctactggcgcgcgctccggcgcgtcgcgtccgcgcacctcttctcgccgcgccagatcgcggcctccgcggcgcagcgcgcggccatcgcgcgccagatggtggacgccacgacgaccgccgcggcccacgcccccgtcgtcgtggcgcgccggttcctgaagcgcgcgtcgctgcacaacgtcatgtggtcggtgttcggccgcaggtacgacctgatggcggacagccgggaggccgaggagctcaaggccctggtagacgaaggctacgacctgcttgggcagctcaactggtccgaccacctcccgtggctcgcccgcttcgacctgcagaagacccgggccaggtgctgcgcgctcgtcccgcgggtgaaccgcttcgttggcaacatcatcggcgagcaccgtgcccgcctgggccgcggcggcgacaccgccgtcatggacttcacggacgtcctgctctccctccagggcgacgacaagctctccgacgccgacatgatcgccgttctgtgggagatgatcttccgaggcacggacacggtggcagtcctgatcgagtgggtgctggcccgtctggtgctgcaccaggacgtgcagagcaaggtccaggaggagctggaccgggtggtcgggctgggccaggccgtgacggagtcggacacggcctcgctgccctacctccaggcggtcatcaaggaagtgctacgcctgcacccgccaggcccactgctctcctgggcgcgcctcgccacctcagacgtgtacgtaagcgggtaccttgtgcccgcgggcaccaccgccatggtgaacatgtgggccataacccatgaccccagcctgtggcctgagccgatggagttcaggcccgagaggttcatgggccctgccgcagaggacgtcccgataatgggttcggatctccggctcgcgcctttcgggtccggcaggcggagctgccccggcaagtcactcgcggtggctaccgtcggattctgggtcgccaccctgctgtacgagttcaaatggctgccgccgtccgacgagccacgcggcggcggcgtcgacctatccgaagtgctgaggctgtcgtgtgagatggctgcaccgctggaggcgagggtggtgccacgtcacgcggtgtgctgagggggctgagacacgtggcctgcaggggtggggatcagaggaggaaagctcgaccgatcgtcttctagcttctactactacgtactccctccgtctcaggatataaggcgtaaccactttttattcttgtcccac

SEQ ID NO: 24830 - DNA, 2377 bp, Zea mays
  Clone ID: LIB3689-002-G4_FLI
cgcccactcctccggctcttcttctccaccggcaccagtccaccacctcctgccaccgcgcggccccaaccaaccactcctcgtcagcacctacctctgcaacaacctcctcgcctactacgccagcgtgggcgtgagtcgtggttgcttccgcgaggcgcggtgcctgttcgacgacataccgtacgcgcggcggaacgcgttcacgtggaactcgctgctgtcgttgtacgccaagtccggccgcctccctgacgcccacgtcgtgttcgccgaaatgcccgaccgggacgccgtgtcctggaccatcatgatcgtcgggctcaaccgctccggccgattctgggacgctgtgaagacattcctggacatggtcagtgaagggtttgcgccgtcgcagttcacactcacgaacgtgctttcatcgtgcgctgcgatggaggcctgcggggttgggagaaaggtccaccccttcgtggtcaagctggggctgagcagctgcgtgcccgtggccaactccgtgctctacatgtatggcaagtgtggggatgctgagacagcaagggctgtgtttgagaggatgcaggtgcggagtgtgtcaagctggaatgtcatggtatcgctgtacacccaccaggggaggatggagcttgctgtgtccatgttcgagaacatggtagaacgaagcattgtctcttggaacaccatcatagcagggtataaccagaatgggcttgatggcatggcattgaagttcttctcacgaatgctgagtgcttcttccatggagccagatgcattcacggtaaccagtgtcctatcagcttgcgctaaccttcgtatgctgaagatgggaaagcagatgcactcttacatcttgagaactggaatgccgtgcagcagtcagattatgaatgctctcatctcaacctatgcaaaatccggaagtgttgagactgcaaggaggatcatggaccaggcagtggtcgctgatttgaatgttatctccttcacggctctcctggaaggctatgtcaagcttggggacacaaagcaggcaagggaaatcttcgacattatgaacaatcgagatgtcattgcctggactgctatgattgttggctatcatcagaatggtcagaatgatgaagccatggagctcttcaggtcaatgatcttgattggcccagaaccaaacagtcatacgcttgctgctgttctcagtgcctgtgcaagcttggcatatcttgattacggaaaacagatccactgcaaggctatcagatccttgcaggagcaatctgtctctgtcagtaatgccattatcacagtgtatgcaaggtcaggcagtgtgccactggccagaagggtgtttgatcagatttgctggcgcaaggaaacgattacatggacatcaatgatcgtggctatggcacagcatggtttgggagaacaagccgttgtcctttttgaagaaatggttcgtgtcggcgtgaaaccagaccatataacatacgtcggcgtgctttcagcctgcgcgcatgctggttttgtagacaaagggaagaggtactacgagcagatgcagaatgagcatggcattgtgccacaaatgagccattacgcgtgcatggttgacctgcatgcccgtgccggcctgctcacagaagctcacgaattcatccaacggatgcctgttgcgccagatacagtagtctggggttcgctccttgcagcttgcagggtgcgtaagaatgcagatttagcagagctcgcagcagggaagttgctgtcaattgaccctcacaacagtggcgcctactccgccctcgccaacgtctactctgcctgtgggaggtggaacgacgcagcgaggatctggaagctgaggaaggacaaaggagtgaagaaggagaccggtttcagctggacccatgtacgaggcaaggttcacgtcttcggagcagacgacgtcctgcatccgcagagggattcgatctaccggaaggccgctgaaatgtgggaggagatcaagaaggcgggatttgtccccgacctgaactccgtcctgcacgacgttgatgacgagctgaaggaagagttgctgagccgccacagcgagaagcttgccatcgcgttcggcctcatcagcactccggaaaagacgaccctgcggatcatgaagaacctgcgggtgtgcaatgactgccacacggcgatcaagttcatctccaaattcgtggatagggagatcatagtgcgagatgcaacgaggtttcaccatttcagagatgggtactgctcgtgtaaagattattggtaggaaacctggtctgggatccttttattcttcttttgaaaagagatttattaactg

SEQ ID NO: 24831 - DNA, 1461 bp, Zea mays
  Clone ID: LIB3689-203-C3_FLI
cccaagaaacacacagaagcgaggagcactacttgttggttggattctcttcagtctagcagctagtccagttaagtttcagacacacatggggagcattggcagaggcacggccaactgcgccaccgtgccgcagccgccgccgtcgacagggaagctcatcacgatcctgagcatcgatggcggcggcatccgcggccttatcccggcgaccatcattgcgtacctcgaggccaagctccaggagctggacggcccggacgctcggatcgccgactacttcgacgtgattgccgggacgagcaccggcgccctgctcgcgtcgatgctggcggcgccggacgagaacaaccggccgctgttcgccgccaaggacctcaccacgttctacctcgagaacggcccaaagatcttcccacagaaaaaggctgggttgctgacgccgctgaggaacctgctgggcctggtgcggggccccaagtacgacggcgtgttcctgcacgacaagatcaagagcctgacgcacgacgtcagggtggcggacacggtgaccaacgtcatcgtgccggcgttcgacgtcaagtccctgcagcccatcatcttctcgacgtacgaggccaagaccgacaccctcaagaacgcgcacctctccgacatctgcatcagcacgtcggcggcgcccacctacttcccggcgcacttcttcaagaccgaggccaccgacggccggcccccccgcgagtaccacctcgtggacggcggcgtcgcggccaacaaccccaccatggtcgccatgtccatgctcaccaaggaggtgcaccgccgcaaccccaacttcaacgccggcagccccaccgagtacaccaactacctcatcatctccgtcggcaccgggtcggccaagcaggcggagaagtacaccgcggagcagtgcgcgaagtggggcctcatccagtggctctacaacggcggcttcacgccgatcatcgacatcttctcgcatgccagttccgacatggttgacatccatgcgtcgatcctctttcaggccctgcactgcgagaagaagtaccttcgcatccaggatgatactttgactgggaacgcatcgtccgtggacatcgccaccaaggagaacatggagtctctgatatcgatcggccaggagctgctcaacaagccagtggcgagagtgaacatcgacacagggctgtacgagtcctgcgagggtgagggcacaaatgcacagtcgctagctgacttcgccaagcagctctctgacgagcgcaagctacgcaagagcaatctcaactccaactaataaatacctctcggtcacagcatgtgctctttctgcagattcaccgtttcttatttttaatttcaatttcaattcagtgtatgtgtgtgtgtgactgtgtgtgtaccaataaacatttaagttcactcatttgcttgtct

SEQ ID NO: 24832 - DNA, 2903 bp, Zea mays
  Clone ID: LIB3689-203-E2_FLI
acggggagatccgatccgattccgtgctagctgctgcggagtgagtgaggtgacgcgggagcgggatggcggcgccggggcggaggacggcggacgtgtcctcgtcctcgcccgccccctcgccgtccccttccaccggtaggcgcctcctgcgcacgcagaccgtcggcaacctcggcgagtccatcttcgacagcgaggtcgtgccgtcctcgctcgtcgagatcgcacccatcctccgcgtcgccaacgaggtcgaggccaccaacccgcgcgtcgcctacctctgtcgcttctacgctttcgagaaggctcaccgcctcgacccgacatccagtggccgtggtgttcgtcagtttaagaccgcacttctgcagaggcttgagagggaaaatgatcccacgctcaagggaagggtccaccagagcgatgctcgggagatgcagcgcttctaccgcgaatactacaagaagtacatccaggcactgcagcatgctgctgataaggctgaccgagcactgctcactaaagcgtaccagacagctgctgtcttgtttgaggtcttgagggccgttaatgtctcgcagtccgttgaagtcgatcaagcgattttggatacacacaataaggttgaagaaaagaaaaagttgtacgtaccttataacattctcccgcttgatcctgaaagtactggtcaagccattatgcgatatccagagattcaagctgctgtttatgctcttcgcaatactagaggtctgccatggccaaaggaccaagacaagaagcctggcgagaagaatactgggaaagaccttctcgattggcttcaggctatgtttgggtttcagaaagacaacgtgtccaaccaaagggaacatttggtactgttgcttgcaaatgttcatataatgaaagtacccaaggttgaccaacaaccgaagttggatgacaaagctctggatgctgtaatgaagaagctgtttaagaattataagaagtggtgcaagtaccttggccgcaaaagcagcttatggttgccaaccatccagcaggaagtgcagcagcgtaagcttctttatatgggcctctacctgctgatttggggtgaggcggctaacttgagattcatgccagagtgtatttgttacatctaccatcatatggcttttgaactctacggcatgctggctggaaatgtgagcccaatgacgggtgaaaatgttaaaccagcatatggtggtgatgaagaagcctttttgattaaagttgtgactccaatatacaaagttatagagaaggaagctgaaaggagcaagaccatgaaatcaaagcactcccattggagaaactatgatgatctgaatgagtacttttggtcagttgattgtttccggctaggatggcctatgagagctgatgctgactttttcaaaactccaaaagatgcttatctgaatcttttgaatggagagaacagatctgcaggtaatacccattggatgggaaaagttaattttgtggagatacgttcattttggcacatattccgtagtttcgacagaatgtggatcttcttaatattgtccttacaggccatgataattattgcttggaatggtggaacaccaagtgatatttttgatgctggagtatttaagaaggttttgagcatatttattactgctgcaattttgaagttgggtcaagcaatcctagacctcatatttggttggaaagcaagaagaaacatgtcatttgcagtcaagctgcgatatatcttgaagttaatatgtgctgctgcatgggttgtgattttacctgtgacttacgcgtacacttgggagaatcctactggacttgcaagaacaataaaaagttggcttggtgatggtcagaatcagccatctttgtacatattggccatagtgatatatatggcaccaaacatagttgcttctatgctatttcttttcccatttatgagaagattcttagagagttcaaatgttaaggtcataacgatcataatgtggtggtctcagccccggttatttgttggcagagggatgcatgaaggtgcattctccctcttcaagtataccatgttctgggttcttcttttagcaacgaagctgactgtaagcttctatattgagatcaaacctctggtacagccaaccatagatataatgagggaacctatcaggactttccagtggcacgaatttttccctcatggaactaacaatattggtgttgttatatcactgtgggctccaataattctagtatatttcatggacacccaaatttggtatgcactgttctcgacattaattggtggtatctatggggcttatcgtcgtcttggtgagatacggacattaggaatgttgagatctcgctttgaatctttgcccgaggccttcaatgaacgcttgattccttctgatgcaaataagagtaaaggtcttcgtgctgccttttcaagtagacccaaggcttctggtgacgaaagacagaaagagaaaagagctgcaaggtttgctcaaatgtggaatgtcattattacaagtttccgtgaagaagacctcatagacaatagggagatggatctgctactggttccatactgtaaagaccatggcgctgacagccgcgtcgccgaccggatcggcttctacaaacgatactgtgacttgcttggggtcagctacggcgacaacttggactgcgccaaccagacgcccttcaacggctaattaataagctagctacctcaccatgcatgcatgcattattattagagaacacaataagacctgatcgatatgatgatgggtatgtattactttactacacgcagatccagcaatcaagaataaagcaaattaatgttt

SEQ ID NO: 24833 - DNA, 1156 bp, Zea mays
  Clone ID: LIB3689-203-F10_FLI
ggggtcggcatcagcctctctccctcgctctctctgactcgtcgcggcataaacaaacaaaccaaacaaagcaaagcaaaggcaaaaccccacctccaccacacctcgtcgtttgcttttcctcggtgcgggcggtgcggcacaagcccccagaccggttgcctccattactgagctgtgcgtgcgtggtggctgtctgccttgtggcggcgccggtcatggtgatggtggagatggacggtggcgtgggaggaggaggaggaggagggcagacgccggcgccgcggcggtggcgcctggcggacgagcggtgcgacctgcgcgccatggagacggactacgtgcggcggtttcaccggcacgagccccgcgaacaccagtgctcctccgccgtcgccaagcacatcaaggcgcccgtccacctcgtctggtctctagtgaggcggtttgatcaaccacagcttttcaagccctttgtgagccggtgtgaaatgaagggcaacattgagattggcagtgtcagggaggttaatgtaaagtctggtctgccagccacaagaagcacggagaggctggaactgttagatgacaatgagcacatactcagcgtcagatttgttggaggtgatcacaggctgcagaactactcgtccatcctcaccgtccaccccgaggtcatcgacggccgaccggggacgctcgtgatcgagtccttcgtggtggacgtccccgacggcaacaccaaggacgagacctgctacttcgtggaggccctgctcaagtgcaacctcaagtcgctcgcggaggtgtccgagcgacaggtcgtcaaggatcaaacggagccccttgaccggtgatgggggagatacatacatacatacatgtcgaacgatatgttcggatcactgcattgcattgcttacgatgtgcagagctattcttcaatggagcccctaggttcctggagaaaagagctttgagggactgctactgctactgctatgccgcgtcgttcaaagttaagtttcctccttgcgattgtgtttgctgtccttttctccggcgttgtacgtcgcacaaggagaaggacaggcagaatatgatgtgctattgtagtattgaaaaatgaaaggaaaaaaagaactgtgaggccctg

SEQ ID NO: 24834 - DNA, 1368 bp, Zea mays
  Clone ID: LIB3689-204-A2_FLI
aaggagcggaaggaggagcagcggcggaagcagcgcgacgaggagggcctccacctgctgacgctgctgctgcagtgcgccgaggccgtgaacgcggacaacctggacgacgcgcaccagacgctgctggagatcgcggagctagcgacgccgttcggcacctcgacgcagcgcgtggccgcctacttcgcggaggccatgtcggcgcggctcgtcagctcctgcctgggcctgtacgcgccgctgccgccgggctcccccgccgcggcgcgcctccacggccgcgtcgccgccgcgttccaggtgttcaacggcatcagccccttcgtcaagttctcgcacttcaccgccaaccaggccatccaggaggcgttcgagcgggaggagcgcgtgcacatcatcgacctcgacatcatgcaggggctgcagtggccggggctcttccacatccttgcctcccgccccgggggcccgcccagggtgaggctcaccggcctcggggcgtccatggaggcgctcgaggccacggggaagcgcctctccgatttcgccgacacgctcggcctgcccttcgagttctgcgccgtcgccgagaaggccggcaatgttgacccggagaagctaggggtcacgaggcgggaggccgtcgccgtccactggctgcaccactcgctctacgacgtcactggctccgactccaacacgctctggctcatccaaaggctggcccccaaggtggtgacaatggtggagcaggacctgagccactcgggctccttcctggcgcgcttcgtggaggccatccactactactcggcgctgttcgactcgctggacgcgagctacggcgaggacagccccgagcggcacgtcgtggagcagcagctgctgtcgcgggagatccgcaacgtgctggccgtgggcgggccggcccgcaccggcgacgtcaagttcggcagctggcgcgagaagctggcgcagtccgggttccgcgccgcctcgctcgccggcagcgccgcggcgcaggcgtccctgctgctcggcatgttcccctccgacgggtacacgctggtggaggagaacggcgcgctgaagctcgggtggaaggacctctgcctgctcaccgcgtcggcctggcgccccatccaggtgccgccgtgccgttgatgagacctctgcctgctcctgcttgcgttgagaggccgccactccacttgttttgcatctgtagctgctcggtttggtcatcagctgggagataagaaaagcggaaacgtactaattgctctggagtagatccatccattcacagtgatagttactgatgtactaagctttaattagttcaatgctagatcgttcttgttc

SEQ ID NO: 24835 - DNA, 1152 bp, Zea mays
  Clone ID: LIB3689-204-A3_FLI
gcgacgggggcgcgagggagttcaaggagatcgtgctcgaggtgatgcaggtgggcggggtgctcaacgtcggcgacttcgtgccggcgctccggtggctcgacccgcagggcgtggcggccaagatgaagaagctgcaccgccggttcgacgacatgatggacgagatcattgcaggttatagggaggccaggagggttgcggcagacggagaggagagcaaggatttgcttggcttgctgctgtcgatggttgacgagcggccgttcgacagcggggaagaagtcaggatcaccgaaaccgatgtcaaggcactcattttgaacctgttcgtggcagggaccgacacgacgtcgaccatagtggagtggtctctcgcagagctgatccgccacccggaaatcctgaggcaagcgcaggaggagatggacgcggtggccgggcgcgggaggctggtcacggagtcggacctccgaagcctcaccttcttcaacgcggtcatcaaggagacgttccgcctgcacccgtcgacgccgctctccctaccgcgcatggccgccgaggagtgcgaggtcgcgggctaccgcgtccccaggggctcggagctgctggtcaacgtgtggggcatcgcccgcgacccggcgctgtggcctgacccgctggagttccggccggccaggttcctgccgggcgggtcgcatgcggacgtggacgtcaaaggcgccgacttcgggctcatcccgttcggcgccggccggaggatctgcgccggcctcagctgggggctgcggatggtcacgctcaccagcgccaccctggtgcacgcgttcgactgggagttgccggcagggcagacgccggacaagctgaacatggaggaggccttcaccctcctgctgcagcgggctgttccgttagtggctcgtccagtacccaggctgctgccgtcggcgtatgagatcgcataggaaggctcgctcaagggcctcagcttggctgtatcaagcacgtacaatggcgtgaaagacgacgtgtgtatgtattgttgttcactttgttgacttttgtaaacactagtaaatgttcttgctatggctaatatctgtaacgaatttttatattttgacatgattacgcttctggcttgtaacc

SEQ ID NO: 24836 - DNA, 1927 bp, Zea mays
  Clone ID: LIB3689-204-B6_FLI
gttcttttccgacgaagcagcagctgcaacgactccttaccaatcaaaccaatcccccgtcatcttcaagctccggggatctcagccgccaaatccgggccgtgctcgcgcttgggcatctgcggcctacgatggggagcgagtcggagcccgccaagggcctgttgccctacctgcagcgcgccgatgagctgcagaagcacgaacccctcgtggcgtactactgtgggagacgcttctctctcctcgtcgggttcgttcctaatcgatcctattggttagggttttgattcgatttggatttggtcgggtttgggcaggccggctctacgcgatggagaaggggctgaggataccccagaaggagcgcaccaagaccacgaactccatcctcatctccctcatgaaccagctcgagaaggacaagaaatcgttgactttggggcccgacgacaatcttcatttggagggatttgcattaaacgtctttgttaaagcagataaacaggaccgtgctggacgagctgacataaacactgctaaaactttctatgctgcaagtatattcttcgagattcttaaccagtttggcgagcttcaacctgatattgagcaaaaacagaaatatgccatctggaaagctgctgaaataagaaaagctctcaaagaaggccggaagcctgaagctggaccgcctggtggggataaagatgaagcacctgtcagtaccaccaccatttctcaagatatggggcaaagtccttccttcagcagtgtacaccagggcagtgaagcatcacctcgacctgtcaacatggattttagtaggcgggatagcttttctgctgtgcagccaggaaataacgtccctcaccaaagtacagagttcaatgatcatccctctacccagttaccctattcaccgccaccaccctcacagtcccagcatccttctccatcacaatcttattcctctccctcgtatcaggcaacaacagattacccttcttctgattttcacaaaccatcccccaattattcaactcccggctacacaagcacagatttccctaccaatgaggtccacaaaccaccttccaattattccccacctccttacacaaggacagatcgcccttccaatgacggctacaatcctcacagcaatggtaaaccagatgtttcggcttaccctcaggcatatcaaccctcaccctacacatttgaccctcagcacaactctcaaaactactactccacggaagccccagctgttccatacaactaccctaatttccagtcatatcctagtttccaggacaacacgtcagcttctgttctgacgcatcagtcttcattctatcctgaaagtgatgatcccgcagctacatcacacactcctgcctcaaattcttctgtcccaacgcactaccacccaaccgctgactgttcacctcaagtcactcctccagctgcgccaccagctagccagtatagatatgatagcagttaccagcctgaagttgagaagattgctgaggcccacaaggcagccagatttgcggttggtgctcttgcgttcgatgacgtatctgttgctgtggatcacctgaaacgtgcactggatcttctgacgaacccatctgctgaaccccattagctctttgcaccaccgagctcttgtcagaagcatcatctgtacaaatacaagattggtataccaccatggatatattgccaggtcgcgtacatatgagaggggttaccacacaaatctaggagataataagcgagccgtgtgggcttttgaagtcacacttaaggaaaccttattgtgcaaaattcaattatcttattcagagttctgttctacgtaatccattgtattcatttgaatattcttgaggtctggtatggtattttgggt

SEQ ID NO: 24837 - DNA, 2016 bp, Zea mays
  Clone ID: LIB3689-204-C4_FLI
gtcagcgtccattctccatggccatcgtcgtcgtcgtcttccacaatccaatcggccggccggctgcacgcacgcatcctccgcctgccgcacccgccaccgcaagaagagggttcaaaatactcaagatggctccgccggcacggccgccacgtgttggggaggacttggaggagggcacaggcgagagctccccacctcctcggtcgccacgtgcgtccaaccccgactgccacgaggtgcagaggaagatctgcgagcgcctccgccagacggggcggcacgaccgtacgctcgccgaccccaccttcaacgcccgcttcgcccgccacctcgagaggttgccgcggaggtacctactcgacctcgacctggacgacaagctcgaggatgtcttgctgcactgggggattctcgacgagtgcgccgaccccaataagcgacccgtctttcgcgcgcggttcataaagtataagacagttcctagggaggatgacggcattggtcatgatcaagatcacgaggagccgtgtcaaaagttgttggaggacctcagtttggaaagaagaaagatcgcggacagaaatgattccctgtctatctcctctaggggcgatttgaaaactgtcctccttcatgagatcattttctcctccatcgacaagcccaagctcctaagtcggctaactgcgttgctctctgaggttggactgaatatccaggaagctcatgtgtactccacgaaggatggtttttgtttggatgtttttgttgttgatggctggaagacagaggagactgatgagctgatcgcggcgattaaggagacattaacacaaaaaaatgcatcaccatctaattcaacaaattcttcgacgccggagaaaatagttgacctacaacaacaggttggagattatgaaattgacttaagcatgctaactaggggggacaagatcgcatctggatcatccgcagacttatatcgaggaacttataaaggccatgatgttgctatcaagtgtctcagatctctatatctcaacaatccttcagaagttgagtttctgcaggaagtacttattctaagtggtgttaatcatgaaaatattctgcaattttatggggcatgcacaaaacatccaaactattgcattgtaacagaatacatgcctggagggaatatatatgactttcttcacaagcaaaataacttcttggacctccataaaattctaagatttgctatcgatatctcaaaaggaatggattatctgcaccagaataacattatacacagagatttgaagtctgcaaatcttctgctaggccatgaccaagttgttaagatcgcagactttggtgtggcgcgacatggaagtcagcaggggcagatgactgctgaaactggaacctaccgatggatggcaccagagataattaatcataagccgtatgaccacaaagcggatgtattcagctttgccattgttctttgggagctggcaacttcaatggtcccatatgacaacatgacacccttgcaagctgcattaggagtaagacagggattgcgcttggacattccgggcagcgtgcacccaagattgaccaagctgattcgacagtgctggaacgaagatcctgatgcgcgtctgacttttgcagagattactaaagaactccaagatagtctacaccatatcgaggcacccaagggagccagccgtcgatctagagcaaagatgcagaagaaataagagggcaaggtttcctacttttttttttgggtgtgttacactagttgtagtatgagtgtttaaggtgtatgtcgcggttataaatattttaaggccaaggaagtgttaaaaaccgaccttagctcagttggtagagcggaggactgtagtggattgcagatgaaatccttaggtcgctggttcgaatccggcaggtcggagttgtttttaaaataacatttttgctcaacaatgttaggctactcgcctactcacc

SEQ ID NO: 24838 - DNA, 3443 bp, Zea mays
  Clone ID: LIB3689-204-E7_FLI
cgacgccgaaaacggttcttctccagtctccaccggaggcgggaggcgtagggtttaggcgcggaatggcgggaggaggaggggggcgcggaatggcgggaggaggaggggggcgcggcgaatcctcgccggcgatcaagccaattagtaaggcggtagtgcaccgcatctgctctggccaggtcatcttcgacctttcctccgccgtcaaggagctcgtcgagaacagcctcgacgctggcgctacctccgtcgaggtcagcctcaaggcctacggcgaggagtggttcaaggtcgccgacaacggatgcggcatatctccctccaacttccgggctcttgctcttaagcaccacacgtccaagatatcagatttctctgaccttggatccctggttaccttcgggttccggggcgaagctctgagctcgctctgcgcgcttgggaaactgacggttgagacgaggagcaaggatgagctagttgggacgcatttggagtttgagcactctggcgtggtggttagtgaaaggaagaccgcacgacaggttggaaccacggtgacagtagaaaagttgttctccaccttgccggtccggagcaaggaatttagcaggaacattcggaaggaatacgggaaagtgatctcgctgctgaacgcttatgcgttgattgccaaaggggtcagattactctgcactaatactgttggaaaaaattctaaaatggttgtgcttagaactcaaggaagcagttcgatgaaagacactatcattactgtatttggtccaaacacttttaaatgtcttgagcccttcagtgttaccacctcggatggctgccagatagagggctttctttcaaaacctggacctggtactggtcgcagttcaggagatagacaatttttctatgtgaatggcagacctattgatatgccaaaggtcacaaaacttgtcaacgagctatacaaaagctcaaatgccaaacaatatcctgtggtaattctagattttcatattccaactacatcctatgatgtgaatattgcacctgataagagaaaagttttcttctcatctgaaagcatgattctgcaatctttgcgggaaactgttgaaaatctgtactcccctcaacaatgcagtttctcagtcaatcacatcaaagatcctgaaaaggaaggggatgctgttactgataggcataatgaagacacaaatgcaatcgtaatggtgaatgttccatcttactacaacaatgatgacaatgaagaaacagacaatgaggatcaggtttctccagagaaccagaaattgccttcagtggctagagatgcgagccccttgtcaggaggcacaaccactcaggctgatagatctgcttggcttccatccttcgcatatgaccagccaaaaagatcgcctaaagaaggaagaagtttggtattgggtagaaattgttttagaactgggcttgctgcaaagccaactcattcaagtactgttcagtcttctctcctgaactttgtatcactaaacaagcggaaacacgaagatgattgcactcttatttctgaagctgcagtgctgagaagagagacatgctctgaacatatgaggagatcaagtttagaagcaaactttgttacaccaaacaagcagaaccatgaggatgattgcattatttctgagtctccagtgctgagaagtgggacatgctcagaactatacaagaggacaagtttagaagtcaattttccatcaccaaataaggagaagcatgatgacaattgcactcttatttctgaaacccctgtgttgagaagaaggacaaattcagaacaagcgagaggaacaagtttagaagcaaattcagcacctgagttcaatttacctctggaaacaaactctttaaaacagcactcctcacaatattttggatctgtgaggacagatgtttcaccacagcattctaaacaacctaatattgtgaccattggggcaggggtaacaggtccatgtgatgttgacactacagaatctgatatggatcaacagtgtggtcgatgccattcagcttctggtgctcccaacaaatattcagaatcacgacatcagaatgcattggctgatagtcctttgcctgatgctcaggattatggtgatggtgctgcagtatgttatgcatctgtacaatatcccattattcaatttacggttgccgagcttaggagaagaagaaagaattgttttatgatatctcatataaataaatcatattgtctcgagaaaacaacaaggtgctataaagctgcaacactggacatcactgtacccttagctgacgaggcaaaatcaaactcattagctgcagccaccaatgagttggacaggcttttcagtaaacatgattttcgagaaatggaggttgttggacaatttaatcttggttttatcattggaaagcttggccaggatctgtttattgtagatcagcatgctgctgatgagaagtacaactttgagtgcctttcgcagtctacaattttaaacgtacagcctcttctcgagccactgagacttgatctatcaccagaggaagaagtaattgtttctatgaacatgagcaccatcagaaaaaatggtttcattttggcagaagatttgcatgcttctcccggtaaccattatcttctgaaagctgtacctttcagcaaaaataatacatttggtgttcaagatgtaaaggagttgatctccatgcttgccgatagtcaaggagactgttcaataatcagtagctacaagctggatacagccgactctgtttgcccttcgagggttcgtgctatgttggcttctagggcttgccgaatgtctactatgataggcgatccactaacaaaagctgagatgaagaagatacttaaaaacatggctggattgaggtccccttggaactgcccacacgggaggccaacaatgcggcacctagctgacctgcgtactatgaaggcgaaagatattgcgtttaaacgctaggccctgttggaacagatatgctcaacggaaggaaggatgtttctatgctcttccgctttatgttgaagaagacaagaagtgcatatgtgccccgcccccgcttgtaaattacggcgtacgcacgtcgcgccgcccccgcatgcaaggtccatttgtttgtttgtttttttctgtcagaaggaatacctgtggtgatatttatgtctagtctccagggatgtatggtgttctgttttggcaaatagaagcttgttaattgacgagctccagctatgtgatgtaacgcgaaccaaacaaatgcatgtcggtcggatcactaatttcgctgaaaatgggcacgccggccgtacgtgctacagctatatatggtatagaaagcacgaaagcccggttcgaagc

SEQ ID NO: 24839 - DNA, 2472 bp, Zea mays
  Clone ID: LIB3689-204-E9_FLI
gagtgggagtaatacaacagagccaaaccgagggaggagagagagggccagagaacacaaagaggcaaggcaaggaagcagggacagactccaagattgggggcgactggtaggcaagaaaggaagctcttctttttcgagtatcactgggcgattgatttccgccgccatcctttccgctcaattcttagctgccgcagataagagcgaggagcagaggcgctgttttctctctccgattccctcagcttcctgtggcgtggtggggtgtgtggcgacgaagggaggctcgccggggcgcggacggacgcccgcgatggccggcgtcgacgttgccaggcacgcgcacagcccggcgcaccacgccgtggcggcgcgggaccacgtcgcgctgcgccgcgtgctggaagcgctcccgccggcccgccggcccgaggagatccggacggaggcggactccgtcgccgaggaggcccgcgccgaggccgtctcggcggtcatcgaccgccgcgacgtgccagggcgggagacgccgctccacctcgccgtgcgcctttgtgacgccacggcgaccgagatgctcatggcggccggcgccgactggagcctgcagaacgagcagggctggagcgcactgcaggaggccatctgcgcgcgcgaggaggctctggcgcgcgtcatcgtgcgccactaccagcccctcgcctgggccaagtggtgccgccgcctgccccgcgtcgtcgccgccatgcgccggatgcgggacttctacatggagatcaccttccacttcgagagctctgtcatcccattcatttcccgcgtcgccccctccgacacctacagggtatggaagcgcggcgccaacctccgcgccgacatgaccctcgccggtttcgatggcttcaagatccaacgctccgaccagaccatactcttcctcggggaagggtcggaggatggaaaggtgccgcctggttcactgtgcatgatcaaccacaaggacaaggagattatgaacgcgctcgagggggcaggcgccccggcctcggaggcagaggtccagcaggaggtcgctgcaatgtcacagaccaacatcttccgtccggggatcgacgtcacccaagcggtgctgctcccacagctcacatggcggcggcaggaacggacagaggccgttggcccgtggaaggccaaggtgtatgacatgaatcatgtgctggtcagtgtcaagtcaaggagggtcccgggagcgatgacggatgaggaattcttctcatctagcaacgacaatgatacagagagcgaggggtttgacgatgttctgacagaggaggagaagaaacagctggaggctgcgctaaaaatggattctccggatgccggtggagaagaccagtcggactcatttgctggccctcgacatagttgctttgagccaagggagagggagatacccatcgagggcatgagtgtttctggaaatgtggagagtaagcatgacaagaaaggttggttcagtaattggggaaagagagctcaagttagcaagccagaaagggtgaagaagatggcacctccaaggagctcgctctgtgtagatgagaaggtgagtgacctcctctttgaatcaccctcaaatgcacaaacaagaccaggaaggcattcagtagatgtagtcagagcagatgacaacagaaggatcagggaaagggatagtaggaggtatgttccttctgcagagaatgggcataggcgcaaagaaggttccaaagaaagtgagtataaaaaaggcctaaggccggttctctggctctctccaaatttccctctgcggactgaggaactgctgccgttgcttgatattcttgcaaacaaggtgaaggcaattcgtcgtttgagggatctacttacaacaaaactccctccagatacatttcctgtcaaggttgccatcccagtcgtgcctacgatcagagtgcttgtgacattcacgaaattcgaggagctacagccgctagaggagttcggcacaccaccttcaagccctgacaaaagcaagagcccagcagtgcagcctccttcgagctcctggattcaatggatcaaggcgccttattaccgccagatgaacttgtctacggcgccaggcccgagcagccgcgtggaggacatccaccaccaggacccgttcgccatcccttcggattacgtgtggaccacacccgaggagaagaaaaagaagacacaggaaaacaagaacaggtccaagaaaggcaggaacgggtgatagagcattggtgggatgggatctaacaggagggacgagtggaagggaaggtttggagatttcggctgtgctggtctgagtctgacgtcgaatattgggaagcgaccgcttgtcttcttttttatttgtgttaacggatttgctgccaacattctttcgtttaacccaaatcgtttcggtcc

SEQ ID NO: 24840 - DNA, 1780 bp, Zea mays
  Clone ID: LIB3689-204-H2_FLI
gtgcaaagattctttataaccattttgacggtggtgagcccgaagccagcgaaaaccatcaatcccattcctctcctccgctagtagccgccaaatcgacgaggagccgaggccacacggcctccaccaagtatcagattccacgccctacgaatcatcgcaatggtgagtattcgcccgcggcgaccccgtcgagctatgtgtggcttactgctcgcatagcctcttccgccgtgggcttggattgacggcccggttgtttgctgaggtgaggtcctgctgtgtgtgtgttttgtgcagacgaagaaacagcggagggaggcgggggcgatgcgacggcgagaccgacaccaccatcaccggcggcagccgcgggacgagcgctgcgtttcctgcaccacgtttaacatcctggcgccgatctacaagcgcatggacaacgagaattgcagggagagccagtacagggcctactggttcagccgcaacgagaagattattgaccgccttctcgctgatcactcctccatcatctgccttcaggaggtatggttggggaacgacgagctggtcgacatgtaccagaagcgtctgggagacgccaattacatgctcttcaagcttgcacgcaccaacaatcgtggagacggtcttcttactgctgtacatagaaactacttcaacgttttgaattatagggaactgctgttcaatgacatcggtgatcgggtagctcagctgttgcatgtggaatcagcgatgccattcttacaaaatcgaagcaccagctgtgtccaccagcagagcctcattgtcaacactcatttgttgttccctcatgatcacagcctttcaatagttcgcttaagacaggtatataagatccttcagtatattgaggcttacctagaagagcataaacttggtccactgccaatcatcctttgtggggattggaatggaagtaaacgtggccaagtttacaagttccttcgctcgcaagggtttgtttcatcatatgacactgctcatcaatacagtgacagcgaagaagatgcacataagtgggtcagtcaccgaaaccatcgagggaacatctgcggagttgatttcatatggcttttaaatcctgataagtgcaggaagcccctgaagaccagctggaatgaagctgtttttggtatcattaagtacttcctccaagttgcattcctttccgaggagaatgcatttgcactcctgaaggcagacagcctttatgatcacatcacatattcaagtttctaccgggcattgtgtcagttaggaatggtccatcctgatagactaaaatcagaagaaattgaggagttgtggagtgaagctgaccgtgatggcgatggtgttattaactacaaagaatttcagtgcatctggagcccaaactgctgtagtcaagaggaggatactgaaattgacatcactgatgaaagtctggacacttttgaggcaaacaacgaagccttcggcttcaccgtgaaggaagctgttctctttcccccagaagtagagaagggcatgtggccagaaaactacagcctctcagatcatgctcccctcactgtggtattctctcctattagaatgccttgctctccacgcaatcgtgggggagctctagctatctaatgtcaatgatctcatgtatacatatacatgccccacgaaatcgttgttagatttggtggggactacagaggtttggagggggttaaatcactaacaagtcaaaatcttcctc

SEQ ID NO: 24841 - DNA, 1621 bp, Zea mays
  Clone ID: LIB3689-204-H9_FLI
gagacctgccactcgttccctttcccaggcgcaggcgcctctccttgccaggcgtgacacagacgaactggtgccgcctctgctggggcttggtcctcccagccgagcgcgcctcatccggatcttgcgacgacggtgcccaagctcccggcctccctttcgcatccctgctgcgagccgtcggtctccggaaagagttagagccgtcggtctccgtaaagaattggagccgccaggcgccttgagaagggttttgtcccgggatgtcgtcgtcggggaagatggaggggccgtctgccccggtggtgcgtcgggatccctacgaggtgctcagcgttcccagagattcctccgaccaggagatcaagtccgcctaccggaagctcgcactcaagtaccaccctgacaagaatgctagcaacccagaagcatcggaactcttcaaagaagttgcatattcttatagcatcttgtcagatcctgagaaaagaaggcagtatgatactgctggttttgaggagttagaaaatgaaggaatggatatggaaattgatttgtccaatcttggaactgtgaacacaatgtttgcagcactttttagcaagcttggtgttcctatcaagaccacaatatctcctactgtgctggaagaggccatgaatggcacagttacagtgagaccactccctgttggaacatcagctacgggaaaggttgataagcaatgcgctcatttttttggcgtaacaataagtgaagagcaagctcattctggaatggttgtcagagtgacttcacctgctcaaagtaaatttaagcttctttacttcgagcaagaagttaatggaggttatggacttgctttgcaggaagatagtcaaaagactggcaaggtaacatcagcaggcatgtatttcttgcatttccaggtgtatcgtatggactcaacagcgaatgcgttggcaatggccaaagatcctgaagctgccttctttaaaaggttggaaggtctccaaccctgcgaagtttcagctctcaaatctggaacccatatatttgctgtatatggtgacaattttttcaagccagctagctatatgattgaagcgatgtgcgcaaagagttatgaagacacaacagagaggctgaaagagatagaatctaaaattctagctaagcgaaatgatctgcgtcaatttgaaactgagtacagaaaagctttggcacgatttcaagaagtcaccaacagatatacacaagagagagaagcggttgatgatatgctgagagagagggacaatatccattgctcgttcacaactgaacgaactttggcaaaccctgttggtgtcggtagtagcagtaggtataccatcgagcagagcattcctgagagccctgagaatggtagcgtagatggcagagacaaatctggcaaaaagaagtggtttaatctaaaccttaataggtccgacaagaaagcctgatgaatcttttgtcagggaacgtcatgtgttttcactttgttgtacattttggaatccctattgtattcatgccgtatgagttctttggttcccagttctctgggagttttgtagcatatagcagttttgggtac

SEQ ID NO: 24842 - DNA, 2182 bp, Zea mays
  Clone ID: LIB3689-205-A2_FLI
gcaaagttctgtagatataaaaatataacatcgtccgcgctctggagagtctggatcctcctgaacctccaagcagcaagcgatgaatggagggacgcaagcaattagcctgatggtgcaccttgctgtgccatggctctgccttgcttcttgggcagctctgctaccagcgctactagcatctgcaaatgtgggtgcagcagctccgacactgagagcggagtacatgaatttgaacttcagcaccgcttcggcgacccccgacaagtacaagagcttcatcgcttctgttcgtgctggcttggtgagcaaagcggggggcaacagcagcgggatccccgtgctggtcgacgaagacgacccgctcgcgctcgaatcgtttctaaacatcactctggtgaacaaggcagggcgctccgtaagcttgaagatggatgtctccagagcctacttcgtggcttacgtagcagggcagcgctcgtgcctcctcaagagatcaggccgcacgttctcgtcggcgatctgttactacggtggcccgtggggaacaagttcggctcctgtcgtcacgcgaccgcggtccactcgcaggggcagtgaccgtgctgctgctgctgccggcgacggcgaggatcctggggtcgcggcatggcgagcgagagatctcgacgaggccatctcgtcactgttcctgttccccactggcaacgctaccgaagaggagctgaggcggggcgtcgccgcctgcgacatgatggtcgcgagcgcggcgacgttcccgtacgtcgagcggcggatgagcgccggcatgtgggacagcaacggcgtggtcaacgacccgagcctgcgggggctccaggcgcgctggccgtggctctccgccgccgtccagcagtccttccagggcgccttcgccgccccggtccctgtccagcggagcaacggcaattggatgcgggtggacaacgtgcgtagcgcggtccccctcgtgtccttcctggagcacggaggctgcaacaggacgcggggggcgccggccttgctcataaggtccgtcgtgcaagagccggacgaggacgaggacatgcagccgggcggtggcgctcgggccacggccacggccacggccacgacggcgacgtgcggggccgagccgacggtgcgccttgtcggcccggaagggaggtgcgtggacgtgccttacggttactactacaacggcaaccaggtgcagctgtggagctgcaagtccaccagcgccgtgaaccagctctggacgctcaagagggacggcaccatccggtccaacggcaaatgcctgaccagcagcggcgacgcggccggcgcccgcgtggtggtcgacgactgcccgcgcttccccacgggccgcgtcgtctgggaggtgcgcgtggacggtaccgtcgcgctcaagtggtcccgcggcctggtgctggccgtgacctcgtcgactctcttcgcggggctcacggtgcggcaggacgaccgcggcaccggccagtcgtggacgccgaccaacgtcaccgcgcccctggacgccgccatcgtggggttccgcgacctctgcctgcaggcggactacgcggggtcggtatccgtcgctgcctgccgcgacggcgtgcagtggtcgctctaccccgacggctccgtacgcccgcccgcgtggctcctccttcaatggcagtgcctggctgctgatgccagcgggggtgtgacggtgaaactctgcgacggggctggatcgtcttgcgagcgctgggtgttccgcaacgacggcaccatcttcaacaccggcaccgggatggtcttggacgccaggccatctgcgggggctaatgctactgctagccaagtcatcgtgtcgcccgccactgggagtcccacccagcagtgggcgctcatgctgtgatctcatctatggctcatgagtcatgactgtgggggcagggccgtactgcactgcaacagctagctggtgtcttttgtgtatatatctggcgagctaggttgttaaaacaagcattagctattttaccagtacaataatgcatgcttgctactactgctatagtaatgcagtctagctctgtgtaccattgcctgcacggcccctgttggagtactctataataaatgtacccctagtaaaatctgttttcagttt

SEQ ID NO: 24843 - DNA, 2121 bp, Zea mays
  Clone ID: LIB3689-205-D1_FLI
ctgctagcaagcagcagcaggcgacgctaggcgagagccccagtcggagcaggccaccatgtgcggcatcctcgctgtcctcggcgtcgctgaggtctccctcgccaagcgctcccgcatcattgagctctcgcgcaggttacggcaccgagggcctgattggagtggtttgcactgtcatgaggattgttaccttgcacaccagcggttggctattatcgatcctacatctggagaccagcctttgtacaatgaggataaaacagttgttgtaacggtgaacggagagatctataaccatgaagaattgaaagctaagttgaaaactcatgagttccaaactggcagtgattgtgaagttatagcccatctttacgaagaatatggcgaagaatttgtggatatgttggatggaatgttctcctttgttcttcttgatacacgtgataaaagcttcatcgcagctcgtgatgctattggcatctgccctttatacatgggatggggtcttgatggatcagtctggttttcttcagagatgaaggcattgagtgatgattgtgaacgcttcataacattccccccagggcatctctactccagcaagacaggtggtctaaggagatggtacaacccaccatggttttcagagactgtcccttcaaccccttacaatgctctcttcctccgggagatgtttgagaaggctgttattaagaggctgatgactgatgtgccatttggtgtgcttttatctggtggactcgactcttctttggttgcatctgttgcttcacggcacttaaacgaaacaaaggttgacaggcagtggggaaataaattgcatactttctgtataggcttgaagggttctcctgatcttaaagctgctagagaagttgctgattacctcagcactgtacatcatgagttccacttcacagtgcaggaggggattgatgccttggaagaagtcatctaccatattgagacatatgatgttacaacaatcagagcaagtaccccaatgtttttgatgtcacgcaaaatcaaatctttgggtgtgaagatggttatttctggcgaaggttcagatgaaatttttggtggttacctttattttcacaaggcaccaaacaagaaagaattccatgaggaaacatgtcggaagataaaagcactacatctgtatgactgcttgagagctaacaaagcaacttctgcctggggtgttgaggctcgtgttccattccttgacaaaagtttcatcagtgtagcaatggacattgatcctgaatggaagatgataaaacgtgacctcggccgaattgagaaatgggttatccgtaatgcatttgatgatgaggagaggccctatttacctaagcacattctctacaggcaaaaggaacagttcagtgatggtgttgggtatagttggatcgatggattgaaggaccatgccagccaacatgtctccgattccatgatgatgaatgctggctttgtttaccccgagaacacacccacaacaaaagaagggtactactacagaatgatattcgagaaattctttcccaagcctgcagcaaggtcaactgttcctggaggtcctagtgtggcctgcagcactgccaaagctgttgaatgggacgcatcctggtccaagaaccttgatccttctgggcgtgctgctttgggtgttcacgatgctgtgtatgaagacactgcagggaaaactcctgcctctgctgatcctgtctcagacaagggccttcgtccagctattggcgaaagcctagggacacccgttgcttcagccacagctgtctaactttatgtttatcacccagcaatgcttgaaacagcaaaggttgtccattgcttgtttcagtttccttccgatcatgtttttagttccatcaatcaagcaatggagacatgcttgtgcttcatgcttggcagcatcgtgtttgggttttcactgagcagtactgtttaatttttatggactgaaaagactcagttttgtaaatattcgtcactgtgaccattcctgtggtggtttatgtgatttgcagattgcagtggttagtgtatcttcccaattttcaatccttt

SEQ ID NO: 24844 - DNA, 981 bp, Zea mays
  Clone ID: LIB3689-205-D11_FLI
ttggcacttgctccgtccgaagcccgccctagctgctcttcttgctgatggtcgtctcttgattgcttgtcagatggacctggtgccgcagctggacagcccgcactcggacaacggcggcggcggcggcagcggaagcttggcgtccggggcgctgtcgccgggggcatcgtccgcaggcacggtgtcggcgctggcgtcgccgagccggtacgagtcgcagaagcgccgggactggaacacgttcgggcagtacctgaggaaccaccgcccgccgctgtcccttgcgcgctgcagcggcgcgcacgtgctcgagttcctgcgctacctcgaccagttcggcaagaccaaggtgcacaccgccgcctgccctttcttcggccacccggcgccgccggcgccctgcccgtgcccgctccgccaggcgtggggcagcctcgacgcgctcgtcggcaggctgcgcgccgcctacgaggagaacggcgggcggcccgagaacaaccccttcggcgcgcgcgccgtcagactgtacctccgcgaggtccgcgaccatcagtcccgcgccaggggcgtcagctacgagaagaagaagaagcgaaagaaggccccgccgcaccccgtccctgccgccgtcatctcctcctcccacgacggcaacggacaccactacgagcaccagatgccgccgccaccaccgcccggcgcagcggcttgactagccggccggccccatgtatgctactactaccactgtaccacatgcactactggtcgatctctctagctagctgaagctcctgtcaccgactactatatatggagtacccatctatctatctatagttattggcttcttgctactgtatatctatcgatcgatcgatcgatctgtagttatagtttagcgcgctgccactactagtacaaagacaaaccccctgctgctgctacaaattacttagccggttgctctttcatatg

SEQ ID NO: 24845 - DNA, 1869 bp, Zea mays
  Clone ID: LIB3689-206-A1_FLI
ttgagtccctctctccctaccacccccccccccccccccagttgccttatctcctcacgtcctagctacaaccatacctgcgtgcgccggcagcgagaaaggaccagctaccggccgtgacgttcttctcaccgtacgtcgccgagggattagataaactaagcagggcgctgcacgaggatggggtgcggggcgtcgagccagaaggacgccggggcgccgcggaggcggccggtgagcgtcggcgacgtggtcgtcttcctcccgggcctccgcgtgccgagggccgtcgacttggcccaggcgctcggcggctgcctggccaggagcgccgtggaccggctgtcggctctgcgatcgcgggtcgtcgacatggcaatgcgagagtcggcggcggcgctcaagcccaggcggagggcggcggcacggcacgggtctagtacagccaatcttctacaggccctcgaagactacttgccggctctgctaggactggtaaaagaaggtagcgtcttgaggaacaaagtgcacttcacctggagtaaccaggaggataatgctgaggagacggccatgccagacgcctggtacgaggtgctgtccatgctgcatctgatggccatggtctgcctgctgcaggccaacgccctgcttctcccgaggtcatacggcgatggctatgccccaagggtttctgaagagagtcgacgggctactgttgatgtcttcttgaaggcagctggatacctagactgtgcagttcggcatgtactcccgaagatgccactggagctaaggagacaacttccagtagacctggctgaaggaaatctcaaagctctaagcctccaagccctgggtcagggggttgacatgcagcttggtttggctattgatagtccaaaggccactttagcagtaaaacggcgcttagcctgtgagatggtcaaatattggcaacaagttcaagagagcattccagagcttcctatctctgatggatggggtaaaaagcaccggctctttataaagtggaaatatgttgaagctaaggctgcagcatactatttccacggtttgattcttgacgagggaaataccgaaaaatcccatggaatggcaatagctgcactccaagcttcagaggaatttctaaaagaaagcaaaagggtttcagaagccttccatgcaactcctccaacatcgaggagtcccaatccattcggaacagcaaaatatctgtttgacaagatcccaagagatgcttccagcaaggttcgaatcaaccaggacctgtatactcaagaaaaggtcattggagcgccacccccattaccagattttgcattggcgctaacacctgaagaatatgatcttcctccactagatccactttggaacaaagaagacacaagccattaagtgtatatgcagcagaatggttgcttctggcaaaaatattggctctggagagaaaggaaggaccaagatctgccatgtcaagagctgatgtgtaatgaatgaagtgtacaaagtattttcaaacaaaaatacatgttcacaaatttacgcaaggcctgaagacaatctgaagagctttgtacaggcgattcttcttctgacaagggaaatgctatgtcaaagggttccttgatcattgtgcatcttgatgcttgcattttgtcaaaaacagattttcagcaatttatgtagaactgtaaactagcctctgatcgaaagtggcagccttcaaatttttttttgccataaaacatttacatcggcaccttaaaacatgccgtgggacaatcagtttcatctgagcacttaggtgaacaggattttcaaataatcagtggatactgtggc

SEQ ID NO: 24846 - DNA, 2262 bp, Zea mays
  Clone ID: LIB3689-206-B11_FLI
gtctatacctcgccccgtgtccgcgaaggccgccgcaacacccccgcgcgcaacagtcgtcgcccatccctcctcaccccgcgtctgcgaccgcacacacacaacagccgccgcccatcccctctcgcatcgcgttggaaccacccgaagtccaccatcgtcaggtcatggggccgcgtaggttccagatctgggcaaacaacagcctatgcagttcttcggtggctcgtcgtcgacgtcgatcgcgcaggaggcgaccccaacctctggcagctcccccgttccaacagtggccacccacggcagctgcactgcccccgcccgggtccacgacctcggtcaccaacccaccgcctcccccgtctccggcgcgttcgatattgttgccgccgtcgaggtctgcaccatcttcacggacctgtctgcagatgtcaaggaaagggagctacacaacctgttgtgctggctcttgggattcgaggtgtcttactggatgcggacggtgccggagctgagagaggtcattcgaaggtcgatgccgcaggtggagaagacaagggtcataaatagagaagagagaaggctacctggtaattagtggaaagagatgcgatgacggcggtcatggtcgaagagcaggagaggccctagaagaaaggagacttcttcttattcttcggcagggtaagaatcttggaggtaccgaggaactggacaaagaagggtattcatgttattgtggtcactaatggtgagcacattttaggcctgggatatctaggttgtcaggagaggcacgctagcatcggagaagccgccgccggcagtggtcgtggagaaagcgggcaacgaaggtggaggagagggcgagggtctgtatgatgcgatcatgatcgcttcgaccgccgtccaacattgggagcatcgagtttgaggtgacctacctcaacgacgacacatgcgtcacccacccgctcatagctctttgtagctggctacagttacaggcgatggtctacacaccaccaaaacagcaggaatcaacgcgagctgtcagaagcgtctatcagaagctaaattcacctcctttttggtcctaggattaaggcagaaattggttatcctgattatgtgcttaaagagggtgaaggaggcacaattgtcaatatttataatttagaagcatatattactttggtagtggatgatacagtttaggcagggataaagtgacaggttgaggcatttagatcagggtttaatcaggtgtttggcatgtcatccctcctcatattttcacctcaagaacttgactatctaatatgtggccaacaagaaatttgggaggtaatgctatgcactctttatccaagttattatatgtaaaattgtggcactaaataagccttggaggacaagctactatcgtggatcgagtgcttcgagtcgttgggcctgccgatgtgaccctatcctccctctcatgccatccctcccgctgcgcccttcttgtcttccccggctcaggcgacctccagttgtagcagcggtgatggggtgaagaagctctgggacgtcctggactcttgcaagaagaagctcccgctctagaaccttcagagtatgttgtagtgttgctaaggaatgggaggcgcaaggatgaggctgcaaaggagctacatgtttttaggcgatgagactggtgcatttgtatcctggttatgggatcatttgtcctaaaatttgcacctttatgttcatcctaaagttgcctcttctaaggatgatgttaaaagcactcgcagtgctgccagaggattgcctgttcatagtgtgccaagcagcatgcaagttaatcatgaacctgaagctgaaacccagaagacaatggtgattcataaaaaagagattgggatatcaaaaaaagtgttggggaatgattgttcaaggtcaatcagaagtagttcttcttagaagcattgtagccaatgtttctcacgtggatgaaaaggattgtcacaaatgacatgtagataaaagggcttttcataaatcacattctataagacgaaccccgctcgcctgacatgcataaccacaaaaagaggagcagagaggcatatgtgtggtctgccaaggtttctaatcaccttcagttcatgcttgttatttggcatgcttgaacaacatttacagtatcttaattttttttgcatatgcatttgtcaattgtcattcataatatatggtctcatatgaaac

SEQ ID NO: 24847 - DNA, 2015 bp, Zea mays
  Clone ID: LIB3689-206-B2_FLI
cgagaagtggagttgaagctgactatgcattcattgaattcagtgacccccgtgatgctgatgatgcacagtacaacctagatggcagggacgtcgatggaagccgcattattgttgaatttgctaaaggggttcctcgtggttctggtggttcacgtgattacaacggaagaggacctccaccaggaacaggccgttgttttaactgtggagttgatggtcaccggcctcgtctatcagattggccctctcagtttcgaccttgacagctacatgggtggcctgcctaagctggtgtacagacctgagtcctggaccaaggtgagcaatatcatttttcttgattccccggttggagctggattttcatactctgtcaaagagcaaggatacaattcaagtgacacaaaagctgtcagccatattctggtctttctcaagaaggttctatccccctgctctagtttcaatcccatgtgcatctatatattgctactaaacataaactggaatatgcttgtcacaataataacttcaataagcaaagatgttgaattgtaagttgtgtttcgtgtctttctttctcaataactttgcagtggtttgacgagcacccagagttcttgtcaaatccactttacattggcggtgattcatacgctggtatgattgtgcctaccgtcacttctgaaattgctaagggtaacatcgctcctcaaccttcagtttttgtttcttttttccctgtcagtttttgttgccttttttctggtattatacatgcatatttccttttgcctcatcaacaatttgattttgtgtcatgatgcctttgccttttccaggtttgaaaattgttggtagtaaacctacaatgaatctaaaggtttgaaaattatactgtcagcagcaaaaacatatagagggatactttgagttcccaaactgctatcctatttttggaggacagaattcccctgttaattttgcatacggtgttcagggctgcctcgttggaaatccattcacagatcaatcaaactttgatgggccatcgaaaattccatttgctcataggatggctctcatatctgaccaaatgtacaagtcatacaagaagagttgccgtggaggagacaacaggcaccaaagcatccagtgcagaaatagtcttgatgccatagatgagtgtgtcaaggatatatctgagtttcacgttctggagccccgctgtgcttatgcaagccctcaccaatacaatgttctcaagctgaagacgagtttaggtgttcagaagatgcagcagctaccagacttcactgcagaagggcttcacttgtctgagatttctacagagtgcagaacaatgctatatacactgtctagaatatgggcaaacaatgccacagtgagggaggctcttgggattcacaagggaacagttcccctatggttaagatgcaacacggacataccgtatttgaaagatattaagagttcagtgaagtaccatttggatgtgaccaccaaaggatacaaaagtctagtttacagtggtgatcatgacatgggtgtaccttatattggcacacaatcctggattaggtcacttaatttctctattgtggatgactggagaccatggtatgttgatgggcaagttgcaggatatacagtgttgtactcaaataacctcacatttgcaacggtgaagggtgctgggcatactgctccagaatacatgccaaggcaatgccttgctatgctttcaaggtggcttgctggtgataccctttgattggcgcatagagatgcactgctacatagttgtatagactttatgtgtatgtaagtgagttacttgggactagttgtctggattgttgtgtctaggcttttcgtcgtttttccctttaataaaccgagcgattgtaatgttttcgggtctgttgtccctaataaaaatttggtcaattcttttgtacctacagtgaaatgcagaactctgccctttt

SEQ ID NO: 24848 - DNA, 1641 bp, Zea mays
  Clone ID: LIB3689-206-B6_FLI
tccatcgcacgggcagcgcccagtccggttcactcatggagtctctagtggctgcgctccccgcgggcggcgctgcggcggcggcggccttcggtgggctggtggccgctgccgcgctcgccggaaaggtcggccttgtcgggtccaagaaacacctcaacgcgcccccagctgtctctggtttacccctgattgggaatcttcatcagttgaaagagaagaaacctcaccagacctttacaaagtgggcagaaatttatgggccaatttacactataaggaccggttcttctactgtagttgtgctcaattcagcccaagtagccaaggaggcaatgattgcaaaattctcatcaatatctactcgaaagctatcgaaggcattgtcagcgctcacccgtgacaaaactatggttgctacaagtgactatggtgacttccacaaaatgattaagcgttatatcatgacattcatgttgggtacttctggccagaaacaatttagggacacaagaaacatgatggttgacaacatgttgaacactttccatacattgttgatggatgatccaaattctcctctgaacttccgggaagttttcaagaatgaattatttcgcttatccctggttcaggctttaggcgaggatgtgagttcaatctatgtggaagagtatggaaaggttatatcaaaggaggaaatctacaaggccactgtggttgacatgatgatgtgtgcaattgaggtcgactggagggatttcttcccgtacctcagctggattccaaataggaccttcgaaacaagagtactgactaccgaagcgaggagaactaccgtgatgcaagccttgatcaagcagcaaaaggaaagaattgcacgtggggagactaggatatcctacctggacttcctgctggcagagaatacactgactgatgaacaattactaatgctggtgtgggaagcagtcatagaagctgctgatactactttggtcacgaccgagtgggctatgtatgagattgcgaagcacccagaaaaacaggaatacctttatcaagaaatccaaaaagtctgcggcaataagacagttaccgaggatcacctgccagagttaccgtacttgaacgcggtgttccatgagaccatgaggcggcattctccagttccattagtgcctccaagattggtccatgagaataccaacttggctggctatgaggttccagccggcacagagataatcatcaatctgtacgggtgcaacatgaacaaaaacgactgggccgagcctgaggaatggaagccagagaggtttctggacgggaggtttgaagcagtggatatgcacaagaccatggcctttggcgcaggaaggagggcctgtgctggcagcatgcaggcgatgaacatctcgtgcaccgccatcggcaggtttgtgcaagagtttgcctggaggctcgaggaaggcgacgaggacaaggttgacaccatccagcttacaaccaacaggctttacccactgcatgtgtacctcgcacctagaggaaggaaatgagcctctactgtaaacgggtttcactgtactaatttaaaaaaataatttgctgttgcctgtgtatgacttttggatgatc

SEQ ID NO: 24849 - DNA, 2046 bp, Zea mays
  Clone ID: LIB3689-206-E4_FLI
cgcctccggttccgctgaacttgaagtccaaactagctagctcactgggcaccgattccccctaaaattttcgctgcttccaggaggccgcggcgaccatgggcaactgctgcgccgcgccgtcgacggagggaagcggcaagacccgccccaagaagcagaaggagaacccctacaacgtcgcgtacaaccgcggggcggcgccggtgcgcccgggcctggtggtgctgcgggacccgacggggcgggacctcggcgcggagtacgagctgggcggcgagctggggcgcggcgagttcggcgtcacgtacctgtgcacggagcccgccacgggggcgcgctacgcgtgcaagtccatatccaagcgcaagctgcgcacgcccgtggacgtggaggacgtgcgccgggaggtggacatcatgcgccacatgccgccgcaccccaacatcgtcagcctccgcgccgcctacgaggaccgagacgccgtgcacctcgtcatggagctctgcgagggaggggagctcttcgacaggatcgtcgcccgcggacactacaccgagcgcgccgccgccgccgtcatgcgaaccatcgttgaggtcgtccagaagtgccacaggcatggcgtcatgcaccgggatcttaaaccagagaactttttatatgcaagcaaggacagttcccctctaaaagcaattgattttggcctgtctgtgttcttcaggcctggtgagcgatttacggaaattgtaggcagtccatactacatggccccagaggttctgaagcgaaactatggccctgaagttgatgtctggagtgctggagtgatactttacatacttctttgtggtgtaccaccattttgggcagaaaccgaacagggagtagcgcaggcaatcatacgatctgtggtagatttcaaaagagaaccatggcccagagtatctgagcctgctaaagatcttgtcaggcgcatgcttgacccaaatccattgacacggtttactgcagcacaagtacttgagcatccatggctacatgactctaaaaacacgccagacgtttctcttggcgatactgtccgagcaagactgcagcaatttgctgcgatgaacaagttaaagaagaaagcactaagggtgattgctgagcatctgtctgcggaggaagtagctgacataaagcaaatgttcgataagatggacgtgaacaagaacggcaagctaacattcgaggaattcaaggccggcctccgtaagctgggaaaccaaatgcatgattcagaccttcagatactgatggatgctgccgacgtcgacagaaacgggaccttagattacgaggaattcgtcacggtgtctgtccacgtgaggaagataggcaacgacgaacacatccagaaggccttcgcatacttcgaccggaataagagtgggtacatagagatcgaggagcttagagaggcactggctgatgaactggatggcagtgatgaagacatcatcggtggcatcatccgggacgtggacacagataaggacgggaagataggctacgacgagttcgcggcgatgatgaaggccggcactgactggaggaaggcctcccggcagtactcgcggcagcggttcagcaacctgagcctgaagctccagaaggacgggtccctcggcgccgacacacggtaggccgccgagtgtagtggtggtgctggtgttcgtccgtctctttgcttgcttgcttgttttgctgtgcggggtttttgttggttggtcagacagtcagtcaggtcattagattccacctccacgttctgtttccattacacggtgaaccctcagctggagctgtgattcttgggcttgtgattgtagaagaaagatgcacgtacaacgtacgtattgtagaatgtagatgggtgcagcagcgtgtgctgacaaagaacgctggagtagcacaagacacgagtagtcttgctttgcttgtaacttgtaagtagaatttgttttgtgtgcttgcaatgcatgacgatggtgattgccctgc

SEQ ID NO: 24850 - DNA, 1735 bp, Zea mays
  Clone ID: LIB3689-207-B2_FLI
tgccgcttccacagggagtccggggccatgcagagctccgtaaagctcgcggtgcttgctctactgctagcggcagcagctcaccacggtctgctgccgctgccgacggcgcgatgctactggctcaacccggagatctacgacgccggcgggctgagccgccgcgcgttcccggacggcttcgtcttcgggacggccgcgtcggcgtaccaggtcgaggggatggccaagcacggcgggcggggccccagcatctgggacgccttcatagaggttcctgggaccatccctaacaatgccaccgctgacgtgacggtcgacgagtatcatcggtacaaggaagatgtgaacataatgaagaacatgggctttgatgcgtaccggttttcgatctcttggtcgaggattttcccagatggaactggcaaggtgaaccaggaaggagtggattactacaacaggctcatagattacatgctccagcaaggtatcgcgccgtatgcaaatctctaccattatgacctcccattggcactccatgaacagtacctgggctggcttagcccaaagattgtggaggcgtttgcagactacgccgagttctgcttccacgcgttcggagacagggtgaagaactggtttaccttcaacgagccgaggtgcgtcgctgctctgggctacgacaatggcttgcacgcaccgggaaggtgttccgggtgccccgccggaggcaactccaccacggagccgtaccttgtcgcacaccatctcatcctttctcatgcagctgcggtcaggcgataccgcgacaagtatcagcttcaccagaaggggaagattggaattctcctggatttcgtgtggtacgaacctttcagcgacagcaatgcggaccaggctgcagcacagcgagccagggacttccacctaggctggttccttgaccccattgtacatggacggtacccgtactcgatgcaagagattgccaaagacaggctaccgttgttcagcgatgaagaagccaggatggtgaaaggctctatagactatgttggcatcaaccactacacttctttctacatgaaggaccctgggacatggaacctgacgccagtcagctaccaggatgattggcatgttggttttgtctacgaacgaaatggagttcctattggcgctcacgcaaactcctactggctgtacattgtgccgtggggcatcaacaaggctgtcagctatgtcaaggaaacttacaaaaatcctacaatgatccttgctgaaaacggaatggaccaacctggtgatgtcagtattactcagggtgtgcatgacacagtaagaatccgttattacagagactacataactgagctcaagaaagcaatagatgatggtgccagagtcattgggtactttgcgtggtcgctgcttgacaacttcgagtggaggcttgggtacacttcgcggtttggcttggtgtacgtggactacaagactctgaagaggtaccccaaggactcagctttctggttcaagcatatgctgtccaagaaaaggagctagagaattgcagacaagaggaccactggcttcaggtgtcatacaaaagttcactctgcaaatcctcttagtatgtcagatttagcttaagaaaccgtgcagacaattgagtctcaaggctcgacatctctagcttcgttaattgttgcaaggcaataaattggtatcttcg

SEQ ID NO: 24851 - DNA, 2489 bp, Zea mays
  Clone ID: LIB3689-207-B7_FLI
gtcaagcagacgcagggtgacaccaggcagcagcccacctccacgcgaacacgccgcaccacaccatcaccggcaccgcagcacggcagccagtcaccaggagtgatctttgatccccaccaggccgccacgctactgtcggtaaggccagggaccctgctgcatctgccggctgctcctctccccgcccccggttccatgagaggtcggcggtttcgataacacacaccaactgctccctccactccttccccctgccttcagtccttcccgcacgggccgcaccactcccaactcgtaaacgctgtgcgccaacgccgtcgcccttccggatccgtcgtccttccgccggcgccgtgatggacccaagcgattccaactccgccgcaggaggaaagacacaaaatgtttcagtaccgcctgttgaaggtgtagctggaggaggaactagctatggatgggtggatggaggtttgcggggtacaaatcttggtgctggtgtgattgatcctacaaaagtacactcagatgatcttttgcacgtctggtctatgcccagcacagcaaatgttagccagcaagaagcgcctcggcctctagagaaagtcaaccttttggcagcaagaaatgaaagggaaagttttcaaattgctttacgcccaaaggtttcatgggcaacttcaggtattgcagggtctgtgcagatacaatgcaccgatctctgctcctcctcaggagacaggttagtcgttggtcagtccataactttgcgacgtgtggtgcctatcttaggtgtaccagatgctcttgttcctattgatccactcagtcctcaaataagtattcaaccaggggagacagctgcagtttgggtatcagtaaatgttccatgtgggcaaccgcctggtttatatgagggtgaaatattcattactgcagttaagacagaattagattccagaacagaatctctaccaaaatctgaaaagtgtaggctatacagagaattaaaaagttgtcttgacctcactggacccagagactactcgtcaccagaagaaatggtacaaagactaacatcagcttctactgtactaaggagggtgttggataatccagcactccaggactgtcaagagaataatggatttggagacatgatggatgaagatgttataaacaatatttcagttcgcttgaagttaagccttactgtttgggacttcactctcccagtgacaccttctttacctgctgtttttggtatatctgaaactgtcattgaagatcgattctgtttggagcatggcactgaaggatggtatagtgcactggatcatcactttaggtggctcctccaatataggattagtccatttttctgcagatggggtgatagcatgcgcattctagcatacacatgcccttggcctgccgatcatccgaaggctaatgaatattattctgacccaagattagcagcatatgctgtaccctatgcacctatcctatcgtgtacggatgctgcaaaaaattccctgaggagagaggttgaaatcttaaaatcgaagcctcattggtccaaagcttacttctatttgtgggatgagccattaaatgtggaacagtatgacatgatatgcaacatctctaatgagctacggtcatatgcacctgatgtgcgaattttgacaacttactattgtggtccaagtggctctgaactggctccctctacatttgaagcttttgcaaaagttccaaatgttctgcgtccgcacacgcaaatcttttgcacaagtgaatgggttcttggcacaagagaagacctagtgaaggatattgttgctgaattacggcctgatcttggtgaggagtggtggacatatgtttgtatgggtccttctgatcctcaaccaaactggcaccttgggatgcgtggaacccagcaccgggcagtgatgtggagagtgtggaaggaaggtgggacaggatttctttattggggttccaactgctatgagaaggctatgatcccaagtgctgagatctgtttccgacgcggccttcctcctggcgacggtgtcctgttttaccctggtgaagtgttttcttcgtcacatgaaccagttgcttccacccggctagagcgcattctcagtggcatgcaggacatcgaatacctgaagctttattcttcacggtatgggagggaggaaggcctggcccttatagagaagactggcatgtaccttggaccggatcgatatacgctggatcatggaccggtagatgtgatgaggggtgaggtgtaccgcacctgcaggtcttagtgtagcaatgcctgccagatgctgtccttccagtctagggcgtctgttgtattatatatggtggtatgtgatctatgtagcgaattaatctacccttggtgatcgatcagatcatcaaacctggactaaactagtcctggtgcatcttttgaatct

SEQ ID NO: 24852 - DNA, 1476 bp, Zea mays
  Clone ID: LIB3689-207-C4_FLI
gcggcggcagcgcaaggagtcttcctctccgacgccggcaacgtcgacaccgctggcaaacttctctccgattgtccctgctccagtaagagtaggcgaggacgagcctcccccatcttgggtgttggtgcctgacccattttctcaagatatgatgttcacaagaggttctcccaaaattttgatgttatctaaagctgctcaaaagaaggtttctcctaaagcttctacatcaaagaagtgtggaggtggtgttcagagagcagcatggaattctgaattggagaagagcctcgttgatttgttgtttgagcacaatgtacctccatatagggctcaaaatggctagagtccagatgcttggaacaaaattgttactgaattcaacaagaagcatgagtatgtcacattcaacaagattcaaattcaggagaaggagagggaattgaaaagggattacaagatgttgaaagaggctagaaagcaaagtggcgtttcctggaatgagaaacgatgcatgattgttgctgatccaccaatatgggaaaacatcataaaatcatttcctagggccaagaaatttcaaaagaagtctttccctctctttgatgctcttggggaactatatgatgggcacattgctcaagggacctagaacataacatctacacaactaccacaagaatggaacacaatttcaaatgaagaagaacaagtgaacaccacaagaatggatgaggaaggcattattcaacaacaaccacaagaagaggattcaagattggaacaagatgaagatcctatgattgaaaggactgaacagaggtctactgcaacgagaaggtctactgcatcaacaatcaatcaagataaggaagcaaagaggatgaagaaggattctttggaaggacttgttgggagatatctagatctgaaatcaaaacaagttgaggatgagattacacaaatggcgaaaggaaaagaatctgctcaaggtaatgacttctccatcatgagatgcatttctgttcttagatccatgaatgtgacagcagatgagaagataaaagcagctgaggtgttcgacataccaaacaacagagagacatttatcagttttagtgttgatgaaccagaaactgccctcctatggttaagacggaagattgataagctctaaggtaagtataatctatgatttcataccttgatgaactagaaactgccctcctatcagttttagtgttgcatggggatgaatgcaacgggggtactacatttgtattgcttgagagagactgaatcccatggttgggagtagttgtacttggttccctgtagctggtgagttctttgttgttgctgctgttaatcagcctccatttgtgctcactcaagaaaagtgtagcagcaacaacaacatgcgcttgcatattttgaggacccgatgtttattaattgatatgggttccctgc

SEQ ID NO: 24853 - DNA, 2568 bp, Zea mays
  Clone ID: LIB3689-207-C8_FLI
gggcgccgctgacaacatgtgagcgtgttcggcattactccacttcactccctccctccctcacctctggctcatcagtgcctgcctcactaacctcaccattactgaaatgcagagctcgcataaataggcaggacccgcggtgctactctcctgtccccttccggccttttccccccttctggagcttggggggaggcactctgcaccttcgtcttcgtcttggcgtcctccagcgctctgccttcctgagctggcttcttgtccgcaggatccatggcgaaggactacccagcttctccgaaagctcagcagctgcaggaatccaagaagcagcgcctgacatacatcctcgtcgtaagcgcgctctgcatcgccttctacgtccttggcgcatggcagaacaccacgcttccaaagcccataggcaactcggcgatcacccgggttggctgcgatcccactgccgccacgacacagtcctctggctctgtgccgtcgtttgggccaggctccggcgaggtgcttgacttcgacgcacaccaccggctcaccatcaacaacacggacggcgatggggaactgcagcagttcccggcgtgccctctcaacttcagtgagtacacgccgtgtgaggaccgtaggcgcgggcgccggttcgaccgaaacatgctagtgtatcgggagcgccactgtcctggcaaggacgagcaggtccgatgcctcatcccagcaccgcctgggtacaggacccccttcaagtggcctcgtagcagggactacgcctatttcaacaacatcccccacaaggagctcagcattgagaaggcggtgcagaactggatccaggttgagggcgacaagttcaagttccccggtggtggcactatgttcccgcgtggtgctgatgcctacatagatgacatcaataagctcatctcgttatcagatgggaagatcaggacggctgttgacacaggttgcggggttgctagttggggagcttacttgctgaagaggaacatcatcgccatgtcatttgcgccgagagacacgcacgaagctcaggtgcaattcgcgctggaaagaggtgtccctgccatcattggtgtgatggcgaagcagcggttgccttacccatctagggcgtttgatatggcacattgctcacgctgtctgattccttgggatgaacacgatggactgtaccttgctgaagtcgataggattctaaggccaggaggatactggatcctctcgggacctccgatcaattggaagacacaccacagggggtgggagaggacgaaggacgacctcaagcgagagcaggacaagatcgaggatgttgcgaagagcctttgctggaacaaggtggtcgagaagggggatctgtccatctggcagaagcccaagaaccaccttgagtgtgccaacattaagaagacatataagacaccccatatctgcaagagtgacaatcctgatgctgcctggtacacacagatggaagcctgtgttactccactgcctgaagtgagcaaccagggagaggtggctgggggagcggtggagaaatggccagagagggcgttcttggttccccccaggatcaaaaggggcatgattccaggactggacgccaagaagtttgacgaggacaagaagctttgggagaagagggtggcctactacaagcgcaccataccaattgcagagaacaggtacagaaatgtgatggacatgaacgctgcttctctagtgaagtaccccgtgtgggtgatgaatgtcgtccctgttaactccgaccgggacaccctcggggcaatatacgagcgagggttcatcggcacgtaccaggactggtgcgaagctttctcgacgtatccaagaacatatgacctcctgcatgctgacaatctgtttagcatctaccaagacaggtgcgatataactggcatcctcttggagatggacagaatattaaggcccgagggcacagctatcatccgcgacacagtcgacgtgctcacgaaggtccaggcaataaccaagcggatgcggtgggagagccgcatcatggaccacgaggacggccccttcaacccggagaaggtcctcatggcggtcaagacgtactggaccgccgaagccgaggaggagcactagcacacgagtgacaccgagctcacttgaaagcgtgaaccaagcctgttctacacttctactaccggtcgagagggatggcgtcagcgttttgcgtctcagtgtagtatgtatgtccctttcaccttttctctagttctttgtagctagctacaatcagatgggaaggtaagggagagttttgagggggggtggttggttggtcctctaggctctagttgagatacaggacgcggttttgtagcaggggaaggtttcgctggtcttgcttaggttcctggccctgttccacgaggggttgaactaggttttagtttgtaatgcgatggcaccgggcaggcattgttaatcgtatgttggggtgaccataatagtaacaggtatttatttagttttcatctg

SEQ ID NO: 24854 - DNA, 2321 bp, Zea mays
  Clone ID: LIB3689-207-F4_FLI
gccgtggcagccggtttgacccgcccccgagcgttataagctgtttctccgggaacgtcttgtcgcgcaagtcgctcgcgccggccgcctccacctgcttgctcggtctcagattcccgcgcgcgaaagcgtggaccggacagccggcaggcgctcttttctttcattccctgtcgtggtctctcgtgctctccgtccgttctaacttctgcggcgcgcgaaggtactgtgggaatcgctgctctttccttgattccggcggcggcggaggtgcgcgggttccgttcgtcgcgccgtgggggtgcgagggaggcgccgcgcgcggcctcggattcgatcggacacagcgtccgtcgcgcggcggcggcggtggccgacgacggatggagtcggtgaaggggtgggtggccgccgactacgcggcggagcccatggcgtcggtgcagcactcgttgcgcgtcgcctacgtggtcttctccttctgcgccgccttcttcctcggcggcatcaaagcggtggtggtcgggcccgttgccgccgccgtgatgatagtgggcaacgtcggcgtcatactcgtgctcttcccggcgcacgtctggtgggcaatctactcgctcatcaagaccgaccgcatcaacgcgggcctgaagctagccgtgctcttggcgctacccgtgctgttcggcctctggctggggctgggcatcttgggcagcgcgctggtgggtctcgggtacggcttcttcacgccgtggatctccaccttcgaggcgttccggcaggaaagcgaggccaagaagttcgtgcacggcattgtggatgggacgtggggcacgatcaagggcagctgcacggtggtcagggacttcgcggacatctgcttccactcctaccctgtctacctcaaggagctgcgcgagggctcccagaatcgtgagccccattccataaggttgctggacgtgccctcatgcatagtcgtcgctctcctcgggctagtcgtggacataccactttacacggtgattgcgctggtcaagagcccctacatgctcttcaaaggctggcagaggctgctgcacgaccttataagccgagaaggcccgttcctcgagacggtctgcgtgccgatcgccggcctggctatcctgttctggccgctggtggtggtcgggagcgtcctgctggccatcgtctccagcatctttgtggggctctacggagcggtcatcgttttccaggagaggtcgtttcagaggggcgtttcgtatgtcgtggccatggttgcggagttcgatgagtacaccaacgactggctctacctccgtgaaggaacagttctcccaaagccgtcctacagaaagaggaaaccgtcgaactccacggaattctcggtgagaacaaacgcctccggcggcaaaggagctgaccaccctcctggccccagtgaagcaccggcaatgttggttccgaatctggcgcctgcgagatcagtgagagaggctatacaggaagtcaagatggtccagatatgggagaacatgatgaagtcatgcgagcagcgggggagggacctcctgaaccagaacgtgataacggccgcggggctggcggagtggctgaggggggcgaaggagggcgggcaccacgagaccgtgagcctgggcctgccgtcctactcgctgctgtgcaccgtgctgcagtcgatcagggccgggtccgggggcctggtgctgggcagcttcgaggtgaaccagcacaaccggccgcaggaccggctgctggactggttcttccaccccgtgctggtgctcaaggagcagatacaggcgctgaggatgaccgaggaggaggtcaggttcctggagaagctgaccgtcttcgccggcaacgtcgcgggcgctggcgctggcgggtgggagaacggcgccgggatgatggtggtgccccaggaccctgtgaggctggcgcagatccaggccataagtagaaggctggttgggattgtgaggagcctgtccaagttcccgacgtacaggaggaggtacaggcacgtcgtgaagctgctcatcgcctactccgtcgagagggagagctcgggcaggtcgtcggcttcagggcgctcggcctcctactttgagataacacagctggacgtgtagtatagtttgggaagcgttctccgattgtaattaagctgttaatttctaggatcaggtagtagctgtcagtgccttcgtgtgtttgaagcctagctggtgaggtttttgtagaacactagtgcatggttacaggagaaaggcgctccattgcagatgctg

SEQ ID NO: 24855 - DNA, 1320 bp, Zea mays
  Clone ID: LIB3689-208-A3_FLI
gtcttccttcttcctcagctaggcacccgtgcccatcttcagtccacctagccatgcctacgacgatggcggcggcggcggcagcgtctgctccaagctcgctctgcgtagacggaaagcgggtgctcctttcccagcccaacctcctccgaattcacgcccccgtcaagatctgcggtgatatccatggccagtttgttgatcttctgaggttgttcgatttgggtggttatcctccagcttcaacttatgtattccttggagactatgtcgatagaggcaaacagagcttggagactatatgcctgctgctggcatacaaaatcaggtatcccgaaaaaattttcctgttgagggggaaccatgaggatgcgaagatcaacagagtctatggtttctatgacgaatgtaagaggaggttcaatgttcggctgtggaagatattctcagattgcttcaactgcctgcctattgcagcgctcattgatgacaagatactgtgcatgcatggtggtctctcaccagaatggactagtttggatcagataaaggatattgagaggcctgctgagattcctgattatggtctcttgtgtgatctgctttggtctgatcctagtcctgatggagaagggtggggggagagtgacagaggtgtttcgtgtacgtttggtgcagataagctcgtagagtttttggagaagaacgatctcgaccttatatgccgagctcatcaggtagttgaagatggttatgagttttttgcacaacgaagattagtgacaatcttttcagctccaaattactgtggagagttcgataacgccggtgctctgttgagcatagatgagagcctaatgtgttcatttcagattctgaagccaactgatatgggtccaccacatgcaagaaaacaaattccaaataagccagcaagagggtgaagccttcgaccagcatccaatactttcagcatcatgatcgtcagtcagctcaaagggggtgatctgttgtttggatagttggatccaccaggacatggcattagactcagcgtcttggttggcggcttggctgtaaaggatattctgtacagcattaggttggattcagcgcaccatctgttctattgttcttcctgccggcacagtacctcattggcagcttgacatccagtagatgttagtagtctctatttgttttttcttagctgtgtcatgcattgttttttgagcgtaacttgatgtatggtgatttttgtaatctttgtaatatgtaaatgctgcaggaaataggtctgcacaaattctgtccatcagc

SEQ ID NO: 24856 - DNA, 1879 bp, Zea mays
  Clone ID: LIB3689-208-C7_FLI
cacacacagcccggtccccgatctccgatcccctcgtcgatccaagatgcagatcttcgtcaagaccctcactggaaagactatcaccctcgaggtggagtcttctgacaccattgacaacgtcaaggccaagatccaggacaaggagggcattcccccggaccagcagcggctcatcttcgctggcaagcagctcgaggacgggcgcacacttgccgactacaacatccagaaggagagcaccctccaccttgttctccgcctcaggggaggcatgcagatcttcgtcaagaccctcactggaaagactatcaccctcgaggtggagtcttctgacaccatcgacaacgtcaaggccaagatccaggacaaggagggcatccctccggaccagcagcggctcatttttgctggcaagcagctcgaggacgggcgcacgctggccgactacaacattcagaaggagagcaccctccacttggtgttgcgtctcaggggcggcatgcagatatttgtgaagactctgactggcaagactatcacccttgaggtcgagtcttctgataccatcgacaatgtcaaggccaagatccaggacaaggagggcatccctccggaccagcagcggctcatttttgccggcaagcagctcgaggacgggcgcacgctggccgactacaacattcagaaggagagcaccctccacttggtgctgcgtctcaggggtggcatgcagatcttcgtgaagacacttactggcaagacgatcacccttgaggtggagtcctcggacaccatcgacaatgtcaaggctaagatccaggacaaggaaggcattccaccagaccagcagcggctcatctttgctggcaagcagctggaggatggccgtacccttgcggattacaacatccagaaggagagcaccctccacttggtgctgcgtctcaggggcggcatgcagatcttcgtgaagacacttactggcaagacaatcacccttgaggtggagtcctcggacaccattgacaacgtcaaggccaagatccaggacaaggagggcatcccaccggaccaacagcgcctgatcttcgccggcaagcagctggaggatggtcgcactcttgcggattacaacatccagaaggagagcaccctccacctggtgctccgcctcaggggtggcatgcagatctttgtgaagacattgactggcaagaccatcaccttggaggtggagtcgtctgacacaatcgataatgtcaaagccaagatccaggacaaggagggcattccaccggaccagcagcgcctgatctttgctggcaagcagctggaggatggccgtaccctcgccgactacaacatccagaaggagagcaccctccacctggtgctccgcttgcgaggtggtatgcagatctttgtgaagaccttgactggcaagaccataaccctggaggttgagagctccgacaccatcgacaacgtgaaggcgaagatccaggacaaagagggcatccccccagaccagcagcgtctgatcttcgctggcaagcagctggaggatggccgcaccctagcagactacaacatccagaaggagagcactctccacctggtgctccgcctccgcggtggtcagtaagccatgggtcatttaagctgctgctgtacctgggtatctgcgtcgtctggtgccctctggtgtacctctatatggatgtcgtcgtctaataaacatctgtggtttgtgtgtcatgaatcgtggttgtggcttcgttggtttaatggacctgttgtgtcctctgtgtgttgtacccaaaactcttctgcagcagtatggctcgaatccttatgaagtttgatgtttgaactt

SEQ ID NO: 24857 - DNA, 1754 bp, Zea mays
  Clone ID: LIB3689-208-E11_FLI
ggtccgcaccccgccgccgcacccgcacggcacccccttcgtcccttccgcaagaaaggaaacgagaaaatcgagtgaaaaggaagggaaacaacataacaaatcgcaaagaggcgtcttccaagcttgtagggttaccggatcggaggagcatccccgcctaggtcaccacagccatggttcgcggatcgctaggcaagcttgcgtcgcgcgccctctccgtcgccgggagatggcagcaccagcagcttcgccgcctcaacatccacgagtaccagggtgcggagttgatggggaagtacggtatcaacgtacccaggggtgcggcggcggggtccgtacaggaggtcaatgacgccttgaagaacatgttccccagtgagaaagagatagttgttaaaagtcaaatccttgctggtggccgagggctgggaactttcaaaagtgggctgcaaggaggtgtccatattgttaaggctgaggaagctgaaagcattgcacgtaaaatgttaggccagattctggtaacgaaacaaactggtccggagggaaagattgtgagcaaggtctacttgtgtgagaaactgtctctcactaatgagatgtattttgccatcacccttgataggaaaactgctggtccgctcattattgcttgcagcaagggaggaaccagtattgaagatcttgcggagaagtatcctgatatgattatcaaggttcctgttgatgtatttaaaggaataacagacgaggatgcagctaaagttgttgatggtctagctctaaagtcagcggataggcagtcttctatagaacagattaagaaactgtatgaacttttctgcaagtctgattgcacattgctggagataaatcctctggcggagacagctgacaacaagcttgttgctgctgatgcaaagttgaactttgatgataatgctgcatttagacagaaagaaatatttgcacttcgtgatacaactcaggaagaccccagggaggtcgctgctgccaaagcagatttgaactatattggtcttgatggagagattggttgcatggtgaatggagcaggattggccatggcgaccatggatattataaagttgcatggtgggacgcctgccaatttccttgatgttggtggaagtgcatcagaggggcaggttgtggaagcttttaagatactgacttcagatgatagagtgaaggcaattctagtgaatatttttgggggcattatgaaatgtgacgtgatagcaagtggaattgttaatgctgctaaacaggttgacctgaaggttcctgttgttgttcggttggaaggcaccaatgtagaccaaggaaaaaggattcttaaggaaagtggaatgactttgatcactgcagaagatcttgacgatgcggcagagaaagctgtaaaagcatccgtcaaataactatagtgtatcaatctgaagcttatttttttcactggtacaagatgagcagtgctcttttacggatttcgggctggggcagaagtcgcgaactgcaacttttttgaagtggggttattttgacctagttttcctgttaaacattgccagtgccgaaactttgtcgtctcatgttgataaacatttatcggggccattgggcagctgctagtttggcaattgcaaatcaatttaccttttggttcagagggcataggctgctaccctagtggctaaaaatttcgttgacagggtctacgttgccagttt

SEQ ID NO: 24858 - DNA, 1160 bp, Zea mays
  Clone ID: LIB3689-208-H9_FLI
gccaaaaggcatcaccgccgcgacgacgatggcagcctcgctccaagccgcggccaccctgatgcagccggccaagatcggcggccgggcgccctttgcctcgctgccgtcccgcccgtcgtcgcaactcgcctgcagggcgttcggcgtcgacgccggcgccgccaggatcacgtgctccctgcaggacgtcgccagcaggtgcgtcgacgccgcgaagctcgccggcttcgcgctcgccacctcggcgctcctcgtctcgggcgcgagcgcggagggcacgcccaagaggctgacctacgacgagatccagagcaaaacgtacatggaggtgaagggcacgggcacggcgaaccagtgcccgaccatcgacggcggcgtggagtcgttcccgttcaaggccggcaagtaccagatgaagaagctgtgcctggagccgacgtccttcaccgtcaaggcggagggcatcgccaagaacgccccgcccgagttccagaagaccaagctcatgacccgcctcacgtacacgctggacgagatcgagggcccgctcgaggtcggctccgacggcacgctcaagttcgaggagaaggacggcatcgactacgccgccgtcaccgtgcagctcccggggggcgagcgcgtgccgttcctcttcaccgtcaagcagctcgtcgccaccggcaagcccgagagcttcggcgggcccttcctcgtgcccagctaccgtggctcctccttcctcgaccccaagggccgcggcggctccaccggctacgacaacgccgtcgcgctccccgccgggggcagaggtgacgaggaggagctccagaaggagaacatcaagaacgccgcctcctccaccggcaacatcacgttgagcgtcaccaagagcaacccggagaccggcgaggtcatcggcgtcttcgagagcgtgcagccgtccgacaccgacctcggggccaaggcgcccaaggatgtcaagatccagggggtctggtacgctcagctcgagtgattcgagtgtctaactgctaggtgtccgaccgccgtcatggatcttgggaaggtgtatgtataccatggaaaactttggagagcagaggaggaatcgtgtatgtaatgtacttgttaatgcaaattcgggctgtcgctttttt

SEQ ID NO: 24859 - DNA, 1911 bp, Zea mays
  Clone ID: LIB3689-209-B8_FLI
cttgctcgccttcacccctcgccgccgccgtcgccgccgtcgcaagcgacgatgctcgacatcaacttgttccgcactgacaagggcggcaacccggaccttattcacgagtcccagtgcagtcggttcacctccgtcgagctcgtcgacgaggtcatcgccctcgacaaggcatggcgcgaaaggcagttcgagctggataagatccggcaggagctcaacgctaccagcaagaagatcgacaagctcaaagccagcaagcaagaagaggaagcaaagaagctcatggaaatttagttggtgtttgttctggctatttgctttccactgaagtaaccgttagactgtagtgtgacatcctaaatattagctccactgtcaactccaaccctgattctcacactcacaatttgattgttggaattctaattgtgctttagggttctatgtgaagatacaaaaaaatattgcattcctattctggtcctgtattgaaattgccagtggtccctctgaattttgatccaattgttataaatttcagatgaactgaataaaactactacttgtaggcaaacaataaaattgtacgggcatttggagagaagagagtagaggataatttgaagaaccacgtggacctttgcaggatgcttgatattgtcgcattggaaaaggccattgtctcagatagataaccttctgcagacatcttatgatcaaggggacaaatgagatcatgccagctctactccatgtactgctggtgtcacaggattaatatacaatgaagatgttgattcttggagttgcacgaaataaccttgtgattgtgattagttacttcaaagcgttttttggtcttaatgcatggtaagtttattcaccttttatttcatcagacattatgacattccattttgagacaaggatctacaacaattatgtagaagcaatcctttaacaacatatgttacagttaatatattatgttttttctacatgtactcatttgaaacaagtaccagttcattcctcagctgatcttcttgaacaacttatttggttacctgtccttgctaattattattaaggggtgaaatgcagatctataccatgttatgatgtacatgttctttagcccaacaaatgatttttgtgagaactagttttttgtgagatctataccatgttagtccagaagacagtgcatgtctatattccttgttggtaagttctcttctgtgaagcagactgatctatcatgcctaaccactcgccttctctaacaccagcttattctacttctacttgctttagtgtttgtgccttggatgtagtaatactacattgttaaattatttttctttacaaacaaatatataaccttatgaatactagaaattgacgttgctaataatagagcaaagagacctacacatatctaaaacatagaaccccacagttctaaagtcgtatgacctatattctctatttcatacataattacttactaattccttggttattttcaataggatgggagagtgtcggatgcttcttcatatactatttcttggtccatcaaatctgcttgactcaaatgcaagttttgctcaaatgtggcaaaaataattgtctcaccaattgtcagcgcgcctgtttccagcaaagtttcagagaaggaaaagatggaatgtaactcaaattttggtggccgcacaagtgtggagacttgaattcatatatacttagttaggctcaatattagtgcaaacagttgataaccaagtttttcaattagtatttagttttggctttagagtacacttatgtatgagttatttgacaatatttatttatgagatattgaatggtacttatctatattatattagttacaatgttatt

SEQ ID NO: 24860 - DNA, 1196 bp, Zea mays
  Clone ID: LIB3689-209-D7_FLI
cgatacgcacccaccagaggaaaagggcaaaagccaaaaggcatcaccgccgcgacgacgatggcagcctcgctccaagccgcggccaccctgatgcagccggccaagatcggcggccgggcgccctttgcctcgctgccgtcccgcccgtcgtcgcaactcgcctgcagggcgttcggcgtcgacgccggcgccgccaggatcacgtgctccctgcaggacgtcgccagcaggtgcgtcgacgccgcgaagctcgccggcttcgcgctcgccacctcggcgctcctcgtctcgggcgcgagcgcggagggcacgcccaagaggctgacctacgacgagatccagagcaaaacgtacatggaggtgaagggcacgggcacggcgaaccagtgcccgaccatcgacggcggcgtggagtcgttcccgttcaaggccggcaagtaccagatgaagaagctgtgcctggagccgacgtccttcaccgtcaaggcggagggcatcgccaagaacgccccgcccgagttccagaagaccaagctcatgacccgcctcacgtacacgctggacgagatcgagggcccgctcgaggtcggctccgacggcacgctcaagttcgaggagaaggacggcatcgactacgccgccgtcaccgtgcagctcccggggggcgagcgcgtgccgttcctcttcaccgtcaagcagctcgtcgccaccggcaagcccgagagcttcggcgggcccttcctcgtgcccagctaccgtggctcctccttcctcgaccccaagggccgcggcggctccaccggctacgacaacgccgtcgcgctccccgccgggggcagaggtgacgaggaggagctccagaaggagaacatcaagaacgccgcctcctccaccggcaacatcacgttgagcgtcaccaagagcaacccggagaccggcgaggtcatcggcgtcttcgagagcgtgcagccgtccgacaccgacctcggggccaaggcgcccaaggatgtcaagatccagggggtctggtacgctcagctcgagtgattcgagtgtctaactgctaggtgtccgaccgccgtcatggatcttgggaaggtgtatgtataccatggaaaactttggagagcagaggaggaatcgtgtatgtaatgtacttgttaatgcaaattcgggctgtcgcttttttactc

SEQ ID NO: 24861 - DNA, 2826 bp, Zea mays
  Clone ID: LIB3689-209-D9_FLI
cccccgctttccgtgcgcatggccgccgcgcgggcgcaaccaccaccgccgtggccggatgtctagaaagcccctcctccccacctgcgggtcctccacccctcccccgctcttcctcctccgccgcctcctccctcgccgccgcgcgacctcctctcccccgccgccctccacccggcggaggaccgccgccatgccaccccgcgccggcgactccgccgcggcggcggctgcggcggcatccttccgtctcgggatggtgcgggtggtctctttccttgtaggcgggctcaacctcgcggtgctgctgcttggactctacctcatcgacgccgtgctcccgtcggggtgcggcgggggggctcgctttcgcctcggcgcccgctctgtccggggtccgcgtgctctccatgatcggcgctgcgcgcgcgcagcacgccacggcggacgccatagctaagcgccacctccacgagagcgacgcatctgtcgcagctgatgccgtagctcgccacgagattagggtgaggtacaaacgctggttgtggtggaccagatttggtatggcagttggtgcattgcagttggttgcagcaatttatctcatgtttgtcattgtaagagatctctcaaatgaaagaagatccacttcctgcttctttgggaagtgttcgaccatggaatccgagaagctttgtgctgcctaggacgtgcaaaatatctaactgtattggaagaagatgaggtttattctgttgcaagactccttggtgatttggttgcatatcgtgcttctgggacaggacatttggagctcttagcagggcttgctctattgcagaagcacgggaatttatctgaattgcagactgaccttgtggaggcatcccatgagcttatgcaagaagctgctttcctccatccatttgcggaagcatgttatacgggaccacttcttgattttggacgaaatcctatcctgtttccctgtgcatgggtttatagacaaggtgtgttaactccatgggcacgcagaagacgccctgcacttgatggtgataattggtggcgaggccatgctgcagctttccttagatttgttaatataccacctaaagcacttctgaaaggacgtgtttgccagagcaagcgtgaagctgcttattttgttgtggttctccatgacaaaagaactgttgtcattggggttcgtggaacagagacaccagaggatctcataactgatggattatgcagagaatgtgcttttactatggaagatttggatggactagtaaatgaacaattacctgcaactacaagagagagagttatttcaacatttccacactatggtcatggtggaattgtagagtctgccagggagcttttcatgcaactaaatggagaaaacacatcttctggaagacttggattcctttccacactgctgggggagggcagtgagtgtcatggatataaagttcgtcttgttgggcattctttaggaggcgctgttgctacagtcctaggaatgatgctatatggcaaatacccaagcgtgcatgtatatgcatatggaccacttccttgtgtggactttgtaatagcggaagcatgttcgcattttgtcacaaccattatttgcaatgatgaattttcctctcgcctttcaatcaattcgattcttaggctacgatctgctgcaataagtgctctttcagataactctccagctgatacagcaatgatacaaaagctcgctcgaagaattttgcatgtgaacaggtatcatgataatggtcctgacgatggcataatccagggctatgctgatcatacaagaacagcagatacaacagtaccgaatgaaagacaaatttctcatcagattccattatgcaatactgaactagacctccacaatacgcaaaatggcttttttaggtataatgggtccagtgcatcaatagatgagcatctgagctatgaaggcataagcagtggccatgatatgcaaataattccacttgatggggctgattctggttttgaagggcaccagacatcttacagagaaataccagtggagcctcctgagatgtttcttgcaggcttaattgttcacatagtgcggcaaagaagaagtctctttcctctttggaaatgctggagcatccaggaaactgaaccaccatacaaagctgttttagcgaaaagggagaacttcagggatatagtggttactccttacatgtttacagatcacttaccatggaggtgccactttgctatgcagaagattgttgaagctcaaacgcctatgagacgtgcgcattccgatccacccgtacaacaacatttggtctgaccaggacaaaactgctgctgcccatgtacagaattgcgtgaaggacagaaaattatgatgatcacatttagcagcatggtctattgcaggctggaccgctggaggtatatttcagtccttcaggcagccagaatatgtccgtgacagacccaaaatcgtgacgagcttattgacagtcagaggccaccgagacatgatcactggttactgtacaccaacagtatctaatcagtctactcaccctggcaacctgcgcgtcaattaattaattcatcgattgttctcttcaattaattaaattcatcgattgaatcattgttgtgcagctgcgtcgattccccattatttttttgttggtgcctagttatggtgtacataattcagcacagcaggattagccatagactgactggctggcaatggcaagtgacggtcaagatgtgattgtattgctt

SEQ ID NO: 24862 - DNA, 1759 bp, Zea mays
  Clone ID: LIB3689-209-F2_FLI
cccaaagccaaatcgaaaacaaataccaagacagcgaggaaaacaaaaaatttaaagaaaagctccccccatccacgaacaaaagatcgcgaagcgagagggaatgatggaggcataggcactagcacctcctcgcctccacctccgtcctcttcgatcccgtccaatcccccgcgccccggcgcccctctccgccggcggctttgctgggtcccgcgctcctcctcctcctaggctgttctggttggggctgcggcggagggaactaggtaagggggaaggaaaggggaggtttgagggagagcgcagcggcagcggcagcagcgatgccatcgcacgcggatctggaccgccagatctcgcagctgcgggattgcaagttcctgcctgaggcggaggtcaaaacgctatgcgagcaggccaaggcgatcctcatggaggagtggaacgtgcagcccgtgcgttgccccgtcactgtctgcggcgacatccacggccagttctacgacctcatcgagctctttcgcatcggtggcgacgcgcccgacaccaactacctctttatgggcgactacgtcgaccgtggctactactcagtggagactgtgtccttattggtggctctaaaagtacgttatagagacagaatcacaatattgagaggaaatcatgagagtagacaaataactcaagtgcttctttctctatcttgattcttgagaattggattctcataacttcactctgcctctatccaaattttagacgagttattgttgatttgagatggaaaaattttctagactactgtagattcagatgtggataactgacaggatatagaattccgaacctgcagctgcagatcacttggtctggttttctaactgtaggacattatagtgcatgtttatcaggcttaaacccttgacaacatttcccacaaggtatggcttctatgatgaatgcttgcggaaatatggaaatgcaaatgtgtggaagtactttacagacttgtttgattatttgcctctcacagctcttatagaaaatcagatcttctgcctacatggtggtctctctccatcactggatactttggataatgtccgctcccttgatcgcatacaagaggtcccgcatgaaggacctatgtgtgatcttttgtggtctgacccggatgacagatgtggatggggaatttcaccaaggggtgctggatacacatttggccaagatattgcacaacaattcaaccatacaaatgggctaagtcttatttcaagagctcatcaacttgtaatggaagggttcaattggtgccaggataagaacgttgtgacagtgttcagcgcgcctaactattgctaccgatgcgggaacatggctgcgatcctcgaaattggcgagaacatggatcagaacttcctccaattcgacccagctccgcggcagattgagccggacatgacgcgcaagaccccagactactttttgtaatcagcatgctggctttctttcaacttgtctactgcagcgccagcacctgtagatctccttagaaaatggtgtttcctctagccgccttgtacccccatcattcttttggtgtggagattttattgccgcttctcagaacattgaggttgttgaaagtacatggcattgggtcttcctttttttttgccgtcttgtatctccattttgtatgattctgagacaaaagagaagagaagctgcaatagaattgtctcgaaat

SEQ ID NO: 24863 - DNA, 2250 bp, Zea mays
  Clone ID: LIB3689-209-F3_FLI
ggctccaccatcccctctcccctgccctgcccccaccgccccgcttccttccgccttgctccgttgcttcctcccaccacagtccactccactcgccggccctgcagctcagtatttgactgagactggtggtggagctgctagcagcgagcctgctacttcctggtcctgacggtgcgttcagacctcagaccagtgccgacgacgagctgtgaggagagggcaaggaaacaagcctgtgaggaaggcggcgatggagaggtacgaggtgatcaaggacataggatcgggcaacttcggggtggccaagctggtccgggacgtcaggaccaaggagctcttcgccgtcaagttcatcgagcgggggatgaagattgatgagaatgtccaaagggagatcatgaaccacaggtcactgaggcatccaaacatagttaaatttaaggaggactacttggtggcaacttgtttctatgggtgttggatacttggatgtctatcagcattcagcagctatgggtagcatgcactagtgccatgccccttgagtcggggaagtgcttatggcatttgggcctcggagttttttttgccaataactcatatttgttgagtggctataatgcaatgactgagtgacagttccttagcagttagcagtctgctttgtcctcttgttcttctgttatatattcttgtttgcacggaatgcatgccactgttttttgtgctacctgatttgccgtcgataaaagaggtatcaactaggtagagtgaaggagaattatcgctggatggtaatatcaaccaaaaatatcgaacttcggtccatagactgaattccttttaacttgtttttttctctcgccaggatttcatagcagcacacctttaagaaatgtttctcgcaactaagttctttggaatgtaattagctacaacaagcatgggtcaattatgattctggcagtaacttgtattcctttcaactagtttggctgcagtaccggagaaatacttagtgtactggtcattgacgacagtaaatttcgtggatttaattggagacctctttataatgctaacaacatagttatctcatgaagcttattactgcagaaaatagcaggagagggtccaaccgtgattattacatttttgtttcagaatttaaatttattaccatttccaaactacaaattaaaagagaggcttagtttttcaggttgtgctaactcccacacatttggccatagttatggaatatgctgctggtggtgagctatttgaaaggatctgtaatgctggaagatttagtgaggatgaggcgagatttttcttccaacaactgatttcaggagttagttattgccactcaatgcaaatatgccatagagatttgaaactagaaaacactctcctggatgatagtatagcacctcggctaaagatatgtgattttggttactccaagtcctctgtgctgcactctcaaccaaaatcaactgtcgggacaccagcttacattgctcctgaggtccttgctagaaaggaatatgatggaaaggtcgccgatgtttggtcatgtggagttactctgtatgtgatgcttgttggtgcctatccctttgaggaccccgacgaaccgaagaatttccgcaagacgcttactcggattatcagcgtccagtacgcggttcctgattttgtccgagtttcaatggagtgcaggcatctgctgtctcggatctttgtggcgaaacctgagcaacggataaccatcccagagatcaagaaccacccatggttcctgaagaacctgcccatcgagatgaccgacgagtaccagatgaacctacagctagtcgacatgaatgtcccctcgcaaagcctggaggagatcatgtccatcatactggaggcccggaagcccggcgacgggctgaagcatgcgggacagctccccggccttgggagcatggagctggatgacattgatgttgacgacatagacgttgaggacagtggcgactttgtatgtgccttgtgacgcggttcaggctgtccggcaccgttgctgcggtggactctcccccactctcctggtctttgtgtcttgctgttattccatgttgtttgtttcagcgagctccgagctcccattttgttgttgtaatatcacatgttttgtgtaaccaaggtagtgacgctgtggataaataatagacgttatgtgttgtattcttgctg

SEQ ID NO: 24864 - DNA, 1850 bp, Zea mays
  Clone ID: LIB3689-209-F6_FLI
cttcccggacatccgcgtctccacttcctccatggcggcgatcagatggtgcgcttgtgcagagggtcgacttgtagccatggtggtacaagtcatgatttttactggtgtatttttgatccgacagtaaccgcatatagtgtcgtctatgtctcagtatggaaaattgcatggtcatgaaggctgtgttaataccgtaagcttcaaccctgctggagacctccttgtgtctggttcagacgacacaaacatcatactatgggactggctttctaaaactaaaaagcttgtttacccttctggtcaccaagataatgtcttccatgctcgtgtgatgccgtttactgatgacagcaccatcgtaactgttgctgctgatggccaggtacgagtaggacgactaaaggagggcggtgaagtcacaactaaactagttggggagcacgattcacgggtgcataagatggctattgaaccaggaaacccttacatattttacagttgtggagaggatggcttggtacaacattttgacttaagaagcgattcagcaacaaagcttttcacctgctgttctttcttgaatgacagacgccgtgtaaaactgaatagcattgtcattgacccacagaatccttactatttttcaattggtggttccgacgagtatgcacgtttgtatgacatgaggaaattccagttggatggttcaagaaacacaaaccagcctgtagataccttctgccctaagcaccttattaagggtgcgagtgcgagggtccacatcaccagtattgcatattcctatgcaagggagatacttgtatcctacaatgatgagcttatctatttgttccaacacaatataggtcttggtccaaatcctgtgtcggcagagccagagtttttcaacatgcttgatcagccacaagcatacagagggcacaggaattttcgaactgttaagggagtcagtttctttggacaacatgatgaatatgttgtgagtggatcagattgcgggaatgtattcatatggaggaagaagggaggtgaattgatcaggatgatgaatggtgacaaaagtgtagttaactgcattgaaccccacccgcatttcccatttatggctactagtgggattgataacactgttaagctttggactcctgcagctaaaaaattgattatgccgctgcctaaaaatgcaaagcaaataatagccgctaatgaacttgagaggacagttcatatttctcaagcaacagcgacactttcatctgatgtcatgatgcatgtgttgaggttgttacgtaggagagattctgaaatgaatatcgagaatgagccggctagtgcagatttggccagtgatgacgatgaggctttctactttggatttgaggacgatgcggaaaggaacgaaagggaaaactctgatcccagagaatgcaacatgacatagctaaaacaactggggaattttttttgcagcctgggcctggccctgcctctatgttggagtaaactgaataggtcttagatttcagttctacatagtaaggtgtgctgaatgggcctgaccgcctgatacacatgggaggactatacaggtcgtgattattaatggagaaactaaacgggtagagccacatcctaccactcggttattctgctctagttttaacgcatgttcaatcttctcgattgccgtatacctagcctagtaaaataagttgtgccccccagcctgtgtgattatgaactgtaaacctgaatttttagttatcatcaggcaatatgtacataggttttccgtagtgtggaaatgttgagaagtttgttgtttc

SEQ ID NO: 24865 - DNA, 2145 bp, Zea mays
  Clone ID: LIB3689-209-G1_FLI
ctcaaaacgccaaaaatttccccacctctagacgccctttcccctccccccgagatcccatccatggccacctcccgcccccggatctggcgctgagcccgccattgccggatccctgccaggcctccaccccgccgtcgcgctcccggcccggttctattgggcgcggcgtggcattccctctcttcttgtgcgctcaccggggggtggtggttgatctgtactggcggatgcagcgcgccttgcgatctctagctgttgctgcgggaggaccggccgcctcgtcgccgttgccaagcgcgctcttttaaagcccgaagattcgccccctccgcgtgttcgtgtcgccgagaggaggtcggacttgtcggaatggtcgtctaattggggagatttgatgtgttattggtgccgccggatctcgccgacatgtggaagcaatttatcggaaagctatcgtggaagtcaatgaaatccagctctggcagcggggggtcgccgccggcgccactatcgtcgccgcgggataatggagcctcaccgcgggagaatggggccacggggaagcctaacgtctcgcctcggtctcccgcggctggcgccggagccggagccgaggtgaggtccagggaggacgcctttgtccagaaagttaacatttgctgcgcggtgtacgacttctccgaccgaggcaaggactcgccggagaaggagcggaagcggcaaatgctcatgtccctcgtcgactgcattggcgccgccgaggagccgctcacggagacgatgatagcagcgtgcgtgcgcatgttcgctgctaacctgttcagggtcttcccgcccaaagtccggtctggcacctcggcttcggagaccgaggaggacgagccgtttttcgatccgtcctggtaccacctgcaagtcgtttacgagtttctccttaggtttgtgacctcaccactcgtggatgctaaggtggctaggaagtatgtggatagccctttcgtctccaagctgctcgatctgtttgattcggatgacccgagagaaagggactgcttgaagacaatattgcataggatatatggcaagttcatgggaaaccgaccgttcatccgtaaggctgtgagcaacatcttctataggtttgtgttcgagacggatcaccacaatgggattgccgaactattggaggtctttggcagtgtgataagtgggtttgcaaagccattgaaggaggaacataagttgttcttatggaaagcattgataccacttcataagccaaaatcaatgggagtgtatctgccacagctgacatattgcatcacacaatttattgacaaggaaccaaagcttgctgggactgtgatcaggggcctgttaaagtattggccagttacaaatagtcaaaaggaaatgatgtttttgggggagttggaggaggtgctggagttgactgacatggctgaatttcagaagtgcatggtccccttattccggaagattgctagttgcctgaatagctctcattttcaggttgcagagagagccttgttcctatggaacaacgagcacctattcgacatgatctcccaaaaccgccaagtaatcctaccaatcatatacccagctctggagaggaacacccgctggcactggaaccagtcggtcctcaacgtaacgatgaacgtgcggaaaatgttccgcgacatggacgagaggctgcttcaagcctgccacgacaacttccaagaggaagaggagaagcgggccgtgactgaagagcggcggaggctcatgtgggagcagctggagcgaagtgccgctcgcgggtaccaccagccgccggcgatcgctgccgacgcgagcagcttccccgcgccctcttcatcggctcgtcttgtatccctcaccgtgacatgagaacacatgagaacacgaggttgcaaccagatgttgctctgttttcgccgcttggtagctaaagctagatgatggagttgcttgcttcgctgggggatgcacgcacgaaggcattttgttaccttctgtgtatgcataaccccccttgtcaaagtctgtaattaatagctgacggtttgaggacaaagggacgttttggatttttgcaatggcgtattcttg

SEQ ID NO: 24866 - DNA, 2477 bp, Zea mays
  Clone ID: LIB3689-209-G3_FLI
caacctattcgagcgacgaaactaccaaagcggaagggggaaaaagcacgcgacgacgcgacggtgaaggggaagtgtgaagggaagcagaagcgagacaaatccccacccggctccaaaccctagccacctcccccgtcccccccttttcgtcccctagatctcgctggcgtctgctccgcctcgcttcgatgtgaccccaccctagggtttgagacggtgttgcggtgtgtgcgtgtgtcgcggcgattcgcgacgcgagtaggattcgaggtgtcggcggcggtgcgagcgcaaatgaaggacccggcacaccgcacgaaggtggtgctccggcggctaccgccggcgatcgcgcagcaggacgtcgtggaccaggtcgatgcgcgcttcgctgggcggtacgactgggcctgcttccgtcccggcaatgccagccaaaagaatcataggtattctcgactttacctaaatttcaagcgcccagaggatgttgttgagtttgctgaggtcttcaatggacacatatttgtgaatgaaaagggtgctcaatttaaagctttcgtggaatatgcaccatcacaacaggttcccaagtcaaatgtcaagaaggatggccgtgaagggactgttacgaaagatcctgagtacttggagtttcttgagtttatttcaaagcctactgagcatctgcctagtgctgaaattcagcttgaaaggaaagaagccgaaagggcagctgctggaaaggaggcacctgttgtgacacctcttatgatgtatgtccgccagcaaagggcagctaagagtatggctcagagacctggaagtaggcttagcagaaaagttgcaggtgttgtaactagcagttccagtcctaaaaggtcttttgagaagcgtcgatcctccacgtatgttgtacgagacagtattaaggagaaaccgacctatatcatggtgccaaagagagaggagcatacacaaaggggaaaaattgtttctggaaattcagatgccacaagtgggggggcatctggatctggtcagtcttctgacaaaattgtcattttgaaaggaagaggaagggttgattcgaacacacctgatggagcagctcaacagtcatcaacccctgtgaagaatataccaccatcgagttctagactagacaagcgatctgaagctaatggaagaattattaaaactgttctttcaaacaaggaagttcgcagttcaaatccatctcaacatgagcaggaaggtcacatgtttaatactgagaaggataagcgtccaccacgggctctcaaccctcggactattgtgaaagatcaggtagttgaaaatgctgagagaagccattttgatgagaagaataattatgtccacagctctgctccaattggtgagaaggttgaaaggcatgccagaaacagagatagacctgatcgcagtgtatgggcacctcgccgctatgacaaatctccgcctgggggtgtttcacatgccttgtcgtcagatttttctcaaatgcagtcacattctggagataatgtctcacaactaacagatggtcatggagacagaaagacagacacaaggggtcatggaggtagccgtggtgttcctgttgaaaatggacataggcatgccaaccgtcgtggtaccccatgtgatccaaaggaaaccaaaatatctgctagcgtgcctgatggaaagaattcaaagaggggctctgctagctatggtgctcatgagagacaagtatgggttcagaagtcaagttcaggctcgtgagtttgtccattgatgatactcccataaaaaacaggtattgaagtcgtggagaagtcttggattctgcagcgcattcttctttgttagctgttgatcctgtgaagtatggtaacgaaatgtccaatggtcaaatgctaccatgaagtgcaatctcagatctgtcagtcgaagtctcagctgaaaagagagctcggctgatttgattcacagaaatagtgaagtaacataacccggcatgtaggtagctctccgacaactttgggcaagatttgatttgtgcccaatgttgatctttctggagcattggatggagattaggttggcatcactacctcattacctcgtgatagtggtcacatatttccaagacccctggaggttacacgcaccctcggcaattcgtcagagatggatgtaaatatctctagagaaagaagaggtctggttccgattgctgtttacaggttagaggtgcaacgtatttacaaagagagataagagttatcacttatcagactacctggtttgttaaataaaggtgaatttagttactagattatgagaccccgtgttttgacttctgcaatcgtggttcacgacagcagaaaggttacctaggagtgtaaaagtgacatctcattttggtgctatggttctgactcaatgggatgtgacttgtg

SEQ ID NO: 24867 - DNA, 1431 bp, Zea mays
  Clone ID: LIB3689-209-H11_FLI
tccccctgtcccgctaggattcccccgaaaccctcccccaaaaccccagagcggagaagagcgcaagatgttcggcttcgggcaccacggccaccacggccagaacccgccggcgcacggcggcgtgcaccagcccaccttcaagatcttctgcaaggccgacgaggggtactgcctcaccgtccgcgacggcaacgtggtgctggcccccgccaacccgcgcgacgagcaccagcactggtacaaggacatgcgcttcagcacccaggtcaaggacgaggagggcaaccctgcgttcgccctcgtcaacaaggccactgggctcgccatcaagcactccctcggccagtcccacccggtgaagctggtgccgttcaacccggagtaccaggacgagtcggtgctgtggacggagagcggcgacgtgggcaagggcttccgctgcatccgcatggtgaacaacatccgcctcaacttcgacgccttccacggcgacaagggccacggcggcgtgcacgacggcaccaccgtggtgctgtgggagtgggccaagggcgacaaccagagctggaagatcctgccctggggcgacgaggcctacgccgggggcggcagcagcgccgccaacgcgccccgcttcggcggcggcgagcccaccgtccgcatctactgcaaggccgacgaagggttcagcgccacggtccgcaacggcgccgtgtgcctcgcgcccaccaacccgcgcgacgagtaccagcactggatcaaggacatgcgccacagcaacagcgtcaaggacgaggaagggtacccggccttcgcgctcgtcaacagggtcaccggcgaggccatcaagcactcccagggcgagggccacccggtcaagctggtgccctacaaccccggctaccaggacgagtcggtgctgtggacggagagccgcgacgtcggccacggcttccgctgcgtccgcatggtcaacaacatctacctcaacttcgacgccttccacggcgacaaggaccacggcggcgtgcgcgacggcaccaacatcgtgctctggaagtggtgcgagggcgacaaccagcgctggaagatcgtcccctggtaaatgtgctgttctgtggctgcactggtcatcaccatgatctggagctttgaaggcatagccacctgtggtcagcaactgctgccgtgttgctagaataaagttggtggcgatcgatcgatcgatctttggtgatgggtgtccctccctgtgtgtttgtgtttagttccagtcgtttgtgaggaagtcagttatgtttgagtgagaggggtacttcgctcttcggttaactctgtacttgtcatgaggagagttttcatacccggagtgtagaactctgtactgtactcggatccttcctttttcatccaagtgggttttatttt

SEQ ID NO: 24868 - DNA, 2281 bp, Zea mays
  Clone ID: LIB3689-209-H6_FLI
attttatttttatggcgccgcctgccgcttgggctcctgcatctccaccacgtcgtcttcgctcgcttcgcctcctcctccaccaccactacgtccccctcgcttctctttacttccctaccacctgttcgccgaaacgctgcagccgcgaaaaaaaaacgagagagtaggggtactggaggtaaggaaaagaagaagaaaaaagggactactcgctcgctgttcccgtatctgctctgccgaggcctgtgtcgttaacctgtgcggcgcttctcgcccggcggcggcagcgacggagagagcgtgctcttgctccgctgctgtgccgtgccgctcacctgctccaggaaccacaccgtttctcctcgctgtagctaggcgtgattcctcaacaggggccttcgctacgctgcacatagaaaaagaataagctggctcgaagataatggcatctcttactccaggaatactattaaaggttctgaaaaatattaactcagatgtgaaagtatgtggagaataccggtccatacttctccaagttattagcatagtccctgcaatcactggttcggaactttggccagaccatggtttcttcatcaaagtttcagattcttcacactcaacatatgtttccttgtccaaggaggacaacgaactcatctagtcaaacaaactacaactcggacagtttatatatgttgagaaggtgcagtcaagtgttcctgtcccagttcttgtaggggtccgcccagttccaggaaggaacccttgcattggaaacccaaaggatttgatgcaaatgtcaactccctctgggattacggaagcaccggatcatcaacggaggacttccaagtcagctgatatgtctgaaagtgaaaaggaaaatttgcagaggaaggtagttatcaaagagcagaaggcagttgttgcttcccgttacatgcttggggtatcaagcaataacggaaaaattaccagtctcaactccagcattgatagtgacaaaagtaatggaggaagcaccatatctgaaccaaataaaaaatctgttgccccgaaagtcagacaagaggcaaaacctcaggaacggccaaatgatacatctactggtaatgctaagttagtttccacaaagcaagaaattagcaagggcacacgcaagaatggtggcgcttcacctagtccgaatggttgtgctgtagtcaagaagcaaatgccaaaggagagcaaaaaggaatctgctacagaaagaagatcaccaccaaagcttgataagagttcaccaacaccagcgaggacttcaccaacaaagctcggtccagcagtaaagcagaatggaaactctagtccaggtccagtcccttctatatctaccgttaaaagaagggttactgaaactatctcttgggactccctcccaacaagcctaatcaaatcaggaaaggctgttgtacggaggaagaacattgctctcactgtagcagctgaggctcaaagggaggctgctgcagctgcatatctggtaaaaggccttgggattttttctgagataaggggatcttatgaagcggatccacaagctgcaatgaccaagtttttccagctgcaccggctcatcgtcgagcaaagcgctgtgtggaacgcctactcgcctgagcctagcaaagaacctcggccggagaaggagaagccgtcgtcgaggaaggctactaccgcgtcccacaaccaccagaacaacagagccggtacacgcaacgcaggcgctaaggatccccacgaagacggttccaggggcagcgagaaggccgagtgggcccgggaggacgggttcaaggagatgtgcaggtcatgggtcgcgctgagaagggagtcgcggtcgtggttcctgagcttcctggaggacgcactcgagtcagcaggattcgtgatggagggtggaagcaggaagaacgcgagggaacgcgtgcggggccggggacaggccaacggtggggacggcggcgggaggatcgcggcccggctgtcgcagctcaaggagacgagcgactggctcgaccagcagctgcagctgcagggcgaggcggacggctcggccgagaccgtcgagcggctgaagcggaaggtttaccagtgcttgcttggaacggtcgaaaccgccgcgtcggcactcgaaggaaggtagtacaagacacgactgagggaaagatgtagataagcggggtgctgattctaagttatataaattaattaattaacctgttgttttcgtggc

SEQ ID NO: 24869 - DNA, 2804 bp, Zea mays
  Clone ID: LIB3689-210-B11_FLI
cgagacggagtgacccactagcagtctcgtacaacgaactatcctgttagccagccctaaacccttctgtcccgatggcgtcgtcgtcgtcgccgccgccgccgaagctgccgattcccggccgccgcaacatactcatcactagcgcacttccgtacgtcaataatgtcccgcacctagggaacatcatcggctgtgtgctcagcgcagacgtgttcgcgcggtactgccggctccggggttacaacgctatctacatatgcgggacggacgagtatggcaccgccaccgagacgaaggccatggaggagaagtgcacgcccaaggagatctgcgataagtaccatgctatccacaatgaagtttacaagtggtttaacataaaatttgacaagtttggacggacctcttctcctgagcagacagaagtctgccatgcaattttccataaattgatggaaaacaattggctcacagaaaatactatgcagcagctttactgcgatacatgccaaaaatttttagctgataggcttgttgaaggaacatgcccgaacaaagtctgcaacgcatcagcaagaggagatcagtgtgaaacatgcagcaccttgttgaatccaactgaacttattgacccaaagtgcaaggtttgtaagaacactccacgtattcgtgacacggatcacttatttttggagcttcctctattgagagacaagctggtaaactacatcaatgaaacttcagttactggtttgtggagtcaaaatgctattcaagcaacaaatgcatggctgaaggaagggctaaagccacgctgcatcaccagagatcttaaatggggtgttcctgtcccccatgagaagtataaagacaaggtgttctatgtttggtttgatgcacctatcggctacgtgtctattacggcatcctatacacctgagtgggagaagtggtggaagaatcctgataatgtagaattgtttcagtttatgggcaaagataatgtgccgtttcacacgatcatgttcccttcaacgctactcggaactggggaaaagtggacaatgatgaaaacgataagtgttactgaatatttgaattatgaagcaggcaaattttccaagagtaaaggtattggagtctttggtaatgatgcaaaggatacaaatattcctcctgaagtatggcgatactatttgcttatgaatcgccctgaggcatcagatacactctttacttgggctgatttgcaagccaaattgaacagcgagttgctgaacaacttgggaaacttcattaatcgtgtgctaagttttgttgcaaaaccagctggagctggatatggttctgttgtacccgatgcacctaatgcgggcgcacacacattgacaaaaacacttgcagaaaaaaccagtaaatgggttgaacaatatctcgacgcaatggaaaaggttaaactgaaacaaggactcaagagtgcaatgggcatttctagtgatggaaatgcatatttgcaagagagccagttttggaaactttacaaggaagatcctgcagcatgtgcaatcgtgatgaaaacttcagttggccttgtttacctgcttgcctgtctgctggagcctttcatgccctctttttctgatgaagtgttacgtcaactaaatttatctccagaagaaaatctgtcattaagtgaagaaaagggagaaattgcgaaggcaaaaactccttggaattttgtaccagcaggtcacagaatagggaaacctgcacctctgttcaaggaattgaaagatgaagacgtagctctccatagagaaaaatatgcagggagtcaagctgagagaagctcaaaagcagcagctgatgctgaagccaacaaagttgctaaccagctcaagggcacaaaattatctgatggaggaacaaaaaaggaaccgaagaaacaatctggtggctcaaaatcgaagacagctgaggctgacattacagttgcaaagttggatattagagtggggcttatcagaaaagcagagaagcatccagatgctgattccctttacgtggaggagattgatgttggagaggacgcgccgagaacagtagtcagtggccttgttaaattcatacctcttgaagaaatgcagagccggaaagtctgcgtgctctgcaatctgaaaccggtggcaatgcgtggcataaaatcacatgcaatggttctggctgcatcgaatgaggaccacacgaaggttgagttggtggaacctccagagtctgctgctgtgggggagcgtgttacctttgctgggtacgcgggtgagcccgaggcttccctcagtggcaagagcaagacgtgggagaagctggccgccgagttgcacagcaacggtgagctggtggcgtgctacagagatgtgcccttcactacctcggctggagtctgcagggtgaagacaatagcgaacggagagattcgctagtaccaccacatcaccgaactgcagccagcggagccagtctgtgtctggtttcgctgaaagcgattgttcctgattttcatcttcgaaaattttggtatttccatttgttcaaataccgcaaagcaaccatgatttagaaaaatacagagagtgccctttccgcatcctcttttttatcagttagtacttggctcctgttgtctcactcggaggctccatgcttcttgctctatctgtatttccttagaagtgattctttacctgctcttatttatagttccatatgaaaggaacgaagtgtatcagaacatcactttatat

SEQ ID NO: 24870 - DNA, 1669 bp, Zea mays
  Clone ID: LIB3689-210-B5_FLI
ctctccttttgctcggaacgcacacaccgcccgtccccgatctccgatcccctcgtcgatccaaagatgcagatcttcgtcaagaccctcactggaaagactatcaccctcgaggtggagtcttctgacaccattgacaacgtcaaggccaagatccaggacaaggagggcatccccccggaccagcagcggctcatctttgctggcaagcagctcgaggacgggcgcacacttgccgactacaacatccagaaggagagcaccctccaccttgttctccgcctcaggggaggcatgcagatcttcgtcaagaccctcactggaaagactatcaccctcgaggtggagtcttctgacaccatcgacaacgtcaaggccaagatccaggacaaggagggcatccctccagaccagcagcggctcatttttgccggcaagcagctcgaggacgggcgcacgctggccgactacaacattcagaaggagagcaccctccacttggtgctgcgtctcaggggcggcatgcagatcttcgtgaagactctgaccggcaagactatcacccttgaggtcgagtcttctgataccattgataatgtcaaggccaagatccaggacaaggagggcatccctccggaccagcagcggctcatttttgccggcaagcagctcgaggacgggcgcacgctggccgactacaacattcagaaggagagcaccctccacttggtgctgcgtctcagaggtggcatgcagatcttcgtgaagacacttactggcaagacgatcacccttgaggtggagtcctcagacaccattgacaacgtcaaggccaagatccaggacaaggagggcattccaccggaccagcagcggctgatcttcgccggcaagcagctggaggatggtcgcaccttggctgactacaacatccagaaggagagcaccctccacctggtgctccgcctcaggggtggtatgcagatttttgtgaagacattgactggcaagaccatcaccttggaggtggagtcgtctgacacaatcgataatgtcaaagccaagatccaggacaaggagggcattccaccggaccagcagcgcctgatctttgctggcaagcagctggaggatggccgtaccctcgccgactacaacatccagaaggagagcaccctccacctggtgctccgcttgcgaggtggtatgcagatctttgtgaagaccttgactggcaagaccataaccctggaggttgagagctccgacaccatcgacaacgtgaaggcaaagatccaggacaaagagggcatccccccagaccagcagcgtctgatcttcgctggcaagcagctggaggatggccgcaccctagcagactacaacatccagaaggagagcactctccacctggtgctccgcctccgtggtggtcagtaagccatggttcatttaagctgctgctgtacctgggtatctgcgtcgtctggtgccctctggtgtacctctatatggatgtcgtcgtctaataaacatctgtggtttgtgtgtcatgaatcgtggttgtggcttcgttggtttaatggacctgttgtgtcctctgtgttgtacccaaaactcttctgcagcagtatggcttgaatccttatgaagtttgatgtttgaactt

SEQ ID NO: 24871 - DNA, 1649 bp, Zea mays
  Clone ID: LIB3689-210-C7_FLI
gaggattcgattattctgttcgctctcgcccaagtcatcgtctggtcgtcgcccgcagaggcgcagacgcccaaagccggaaggggcgccatggccgcgtcggatctggagagcaaggccaaggaggccttcgtcgacgacgacttcgagctggccaccgagctctacagccaggccatcgacgccgggcccgccaccgccgacctctatgccgaccgcgcccaggcgcacatcaagctcggcaactacactgaggctgtggcggatgctaacaaagcaattgagcttgatcctatgatgcataaagcttactaccggaaaggtgctgcatgcattaagcttgaagaataccaaactgcaaaggctgctcttgagttgggttcttcttatgcatcaggcgattcaaggtttgctcgtctattgaaggaatgtgatgagcgcatcgctggtgagaaaaattaacttcagcagtgtgtgtgtatctggtggtggtgttggggtcttgggtatgcaatgtggtgcatgctattttctgacgatatgagtccacttagctgcctttcctgagaaatgtttgtagcagccttgtagactgggggatgattatgtttcagcttaatcatctcatactacctgtcatgttattttgtttatgtttccagaggaatctagccaggcaccagtaaagaatgttgaggctactgtggctgctactattgaggacaaggaggatttcacaaatatggagaatacaccaccagtgatagaacccccaagcaaaccaaaatacaggcatgactactacaacagtgccacagaagtggtactgacaatatttgctaagggtgttcctgctgatagtgtagtcattgattttggtgaacagatgttgagtgtatccattgaagttcctggtgaagaaccataccattttcagccccgtctgttttctaagattatccctgagaaatgcaaatatcaagtcttatccaccaaggttgaaatacgccttgcaaaagctgagcaggtgacatggacaaccctggattatagtggaagaccaaagactgttccccagaagataagcacgccagctgaaacagccccaagaccttcatacccatcttcaaaggcgaaaaaagactgggataaactggaagctgaagtcaaaaaggaggagaaggaagaaaaacttgatggtgatgctgcattgaacaaattcttccgtgacatctacaaggatgctgatgaagatatgcggagggccatgatgaagtcattcgtggaatcaaatggcactgttctctcaaccaattggaaagatgttggagcaaagaaggtagaagggagcccccctgatggtatggagctcaagaagtgggaatactaaagtttggactgcccgtcttttgtaaatccaggtcttggaaactatgacctaattctgcccacccatagtgccatgagcttgcttggttaagtctctgcttttgtaagctttctgtatgacagtctagcgtgtgtctgagtgctacttgccgtagcttttgatggacataggtatgctattatgtggtatcgaccccgaaccatctgtggtatcaaagacagcaaactataatgtatggaatgcctattctttttggtct

SEQ ID NO: 24872 - DNA, 1716 bp, Zea mays
  Clone ID: LIB3689-210-E4_FLI
gaaaaatcggaatctctgaaaaatcctccgtaccatgaagctccggttgcgatctatgaaggcgcgcggcggctccgccgccgtggagacccaccgcgtggacctgccgcccacggccactctggccgacgtgaagaccctcctcgcgtcgaagctctctgcggcgcaacccgtccccgccgagtccgtccgcctctccctcaaccgtagcgaggagctcgtctcgccggaccctgccgctacgctcccgtccctcggcctcgcgtccggtgatctcgtattcttcaccctatcccccctcacggccctagcgccgccggctcaggccctgccacggaaccctagcccgagctctggcgctgcagcgtcgatcgctgaggctgccgaccgcgggaagggttcgaagcaatctggtactggagatttctcttcctcgtcactggcgcaggctgtggttgtgagccctagctttccggtcgcttccggtacgcgggatgtggtgatggaggaggaggccgtcgatgccacaaagggctggtcgagttttgtgcttagggatctcaagagggagatggacaacgtcggggccgcggagggaaccgccgcaggtcgcctggttgcggccttgcatgcagctctgcttgatgccggttttctcaccgctaaactgacgggctctcacctctcgctgcctcagggttggccgtcaggtgctttgaagccattgaccatcaagtatactataccagagctttcatcaatggtatctgtgactgaggaagggaaggtggtggtgctgaactactccttgatggccaatttcgtgatggtttatgggtatgttcctggggcacagtctgaggtttgccgtttgtgcttggagttgccggggctggagcctttactttatctggatggcgatcagctgaatggagtgcatgagaagggagttcatgatctgtggagagtgctgaaggatgagatttgcctgccactgatgatatcattgtgccaactgaacggtctgcgcttgccgccttgcttgatggctttgcctgctgatctcaagactaaggtattggggtttttacctggggttgatcttgcaaaggttgagtgcacatgcaaggaaatgatgaatcttgcatcagatgatagtatctggaagaagcttgtatccaagtttgaaaattatggcgagggctctaggctggcaggcaagaatgcaaaggccatatttgtagaagcttggcaggccaataagagacggcagaagaggcccaatccaaccttttggaactatggctggggaaacagtccttatagccgcccacttaggctgccattgattggtggggactcagacagacttccttttattgggaatcatggttctgttgggcgccactttggaaatcaacgaaggaatatctcaccgaactgcattcttgatggtcaccgtcataacttcctttgaagccatgtcaatgagttttacttgtatgttaagagtgttttataaggacttcaatggtgcatatacggttagaccgccttgttcatatcgtcaagtcgcacacttatgcttgtgcacagcactcttatgatcttatcctaatatattcccttagtatcttagatcgtatctttactatctttttttggtatcaaatgtaatccagtgtcctagtaataaagtacccttgttctattctc

SEQ ID NO: 24873 - DNA, 3127 bp, Zea mays
  Clone ID: LIB3689-211-A2_FLI
ccgggattagaaatccacgcacatcgccgtgcacgcacgcgacgccggagatgtccgtggccgtggggaagcgggtgctcgatacgggctggctcgccgcgcgctccaccgaggtcgcgctcaccggcgtccagctcaccaccacgcacccgccggcagctgaccccgccccagccgcgccctggatgagcgccgccgtccccggcaccgtgctggggacgctgctcaagaacaagctgatccccgaccccttctacgggctgaacaaccaggccatcatcgacatcgccgacgccgggagggagtactacaccttttggttcttcaccacgttccagtgtgccctgtcaggaaatcagcatgcgactttaaacttccggggaataaactactcagctgaaatgtatttaaatgggcacaaggaggtactaccaaaaggaatgttccgaaggcacaacattgatattactgatatcctccatcctgatggtaacaatctgcttgctgtccttgttcatcctcctgatcaccctggcaaaattcctcctcaggggggccagggtggtgatcatgagattggaaaagatgttgctacacaatacgttgaaggatgggattggatgtgcccaataagggatcgaaatactggtatctgggatgaggtgtcaatttccatatctgggcctgtgaatataacagacccccatctggtttcaacttttcatgatgattttaagaggtcatacctacattgtacacttcagttggagaacaaaagttcttggattgcagattgtaccttgaaaatacaggtttcaactgaacttgaagggaacatttgtttggtggaacaccttcaaagttatgcaataacagttcctcctcaatcagatatagagtacaccattccttctttattcttctataagcccaacctgtggtggccaaatggcatgggaaagcaatccttatacaacgttgagattagtgtggatgtaaaagggtttggagaatctgattcctggagccattattttggattccgcaagattgagagtacaattgatgattctacgggtgggaggatcttcaaggtaaatggtgaacctatttttatccgaggagggaactggatattgtcagatggccttcttagattaacaaagaagcgatatatgaccgacatcaagttccatgctgacatgaacttcaatatgcttagatgttggggtggtgggctagcagagaggcctgacttttatcatttttgcgatgtctatggtctgatggtatggcaagaattttggataactggagatgttgatggccgaggaattcctgtatctaaccctaatggccctttggatcatgatctctttcttttgtgtgctagagataccgtgaaattactcaggaatcatgctagtctagctttatgggttggtggtaatgagcaagttccaccggttgacattaacaaagcactgaagaacgatttgaagctacatccaatgtttgtaagttaccagacatcaaaaagtgaagtaatatatttatctgaagaatcaactgaccctagtaaataccttgatggtactcgggtgtatgtgcaaggatcaatgtgggatggttttgcgaatggtaaaggggacttcactgatggtccatatgagattcagtatccagagagttttttcaaggacagcttctacaaatatgggttcaaccctgaagttgggtctgtaggggttccagttgccgcaacaattagggccacaatgcctccagtaggatggagcattccgattttaaagaaaagaattgatgggtacatcgaagaagtaccaaatccaatatgggactaccacaagtatattccatactcaaaaccagggaaggtccatgatcagattgaactatatggagctccaaaagacctggatgatttttgtgaaaaggcacagctggtgaactatgttcagtacagagcacttttggaaggatggacttccttcatgtggacaaagtttacaggtgtcctaatttggaaaacgcagaatccttggactggactaaggggccaattctatgatcacctccaagaccaaacggctgggttttatggttgccgttgtgctgctcaacctattcatgtccaactgaatttggccacctattttgtggaggtggtaaacactacagctgatgaactcaaagacatggctgtcgagatttcagtgtgggatctagatggtgcatgcccctattacaaagttaccgagaaaatagttataccgccaaagaaagtgaagcaaattatcgagatgaaatacccaaagatgaaagatgccaagcctgtgtattttctgcttctcaagctcttcaggctgtcagacaatggaacaatctccagaaacttctactggttacaccttcctgggcaggactacaaatcgttggagcagtatcggcagaaaaagattccattaaaaattgattctgatgtttcagtctcaggcacgagtcacaaagtaagaatgacagtagagaacatctcaaagaagtccgtggcagacagcacacgttcattatcagcaatggatctaggtgatgcaagtggttcccacagcactcgcaaagaaactactcggaagggaaacgggagcgatggactgtggaggaaaatacgcagtggcctcggggtcgcaaggccaagcgacaaccgaagaacactggaggtcaacgggaccgattcaggggttgccttcttcctccatttctcagtgcacacctccgaatcatccacggacggggaggaatacaatgacacaagaatcctcccggtccactactcggacaactacttttcgctgacgccgggggagaacatggccgtcgacatctcgttcgaggctccccaggggtccagtcccagagttgtcctcagaggctggaaccatcatctggaccacgccgtgatgatctgagatccgtgtaataaaataagcacgtaccgaataaagtgcagacatcagatcgtgttcgtgcctgctgttggattataattaggcttgtcctaattttattttattttattaaataaatcgtacgacctaaattgaattct

SEQ ID NO: 24874 - DNA, 1304 bp, Zea mays
  Clone ID: LIB3689-211-D7_FLI
caccgcatcagtgtctggctcacctcacctgcagcaggcctcgtctcggtcatccagcgcattgctctcaatcgctgcagcgcatccagtccaaacacacaccggtcgaatcgagcaatggccgcggggctgcaggtgttcggacagccggcttccaccgacgtcgccagggtgctgacctgcctcttcgagaagaacctcgagttcgagctcgtccgcaccgacaccttcaagaagtcgcacaagctccccgagttcatcaagctgagggatcctaccgggcaggtgactttcaagcacggtgacaagacaatcgttgattccaggactatctgccggtacctgtgcacgcagttcccggacgacgggtacaagaagctgtacggcacggggtcgctggagcgggcgtccatagagcagtggctgcaggcggaggcgcagagcttcgacgcgccgagctcggagctggcgttccagctggcgttcgcgccgcacctcaaggacgtgcggcccgacgaggcccgcgtcgcggagaacgagaagaagctgcacagcatgctgggcgtctacgacgacatcctctccaagaacgagtacctcgccggcggtgacgtcagcgttttccagggtttctcgatcggctgctatggcgaccagggtagcgtcgagattcctgcagcgcaggctcctgtcttccggcggcaaggtcctcagcgaggaggagaaggccgcggagaaagtgtacatcaagaaaatggaacaagagaagctggagaagctcgcacgcaagggccccagctcaggagagcaaccttcgtcgactacagtctctgcagcaagtgatgtgaagactggggctgggccaacagagtcagcgtctgcaaacgtgtctaccgacaagaacaggaactacgctgtcctggcaggcacaattgctgctctgagtggcctgggttggtatctattgtcaaagcctaagaagtcggaggaggttgtggactgaagagggggttacgaatgcgagctgtggatggttggccttatatttcaccatggtttactttctgcgcacaccttctggaaataattgttgaaacatacgctgcagtctgcattacttgttctgaggcctgttgcaacaccgaacattgaagtctgtactcgagacgttccgtagttctctccctcgcttgacaggttgcaaatgttgagtgatgcttgtcctacgtcgttgctggagaagtggagaggtttttttggtactgatgttttgaatgtaaactcgttgccactggccaacacac

SEQ ID NO: 24875 - DNA, 1977 bp, Zea mays
  Clone ID: LIB3689-211-E11_FLI
ccccaggccccagcccggcaagcagacatgggcaaccgtgcgtcgcgccaccaccgccaagccgccgagcagcaaccggcgacgccgaccctgccgaagccccagccccagatccagccgccgcctccgcctccgccgacgcagacgcagcagtaccagcaggcgccgccgcagtcgcagcagaagccgaagccggcggcggacgtgggggcggtggggcgcgtgctggggcggcccatggaggacgtgcgcgcgacctacactttcggccgcgagctcgggcggggccagttcggggtcacctacctcgtcacgcactcggagaccgggcagcgcttcgcctgcaagtccatcgccacgcggaagctcgtccaccgcgacgacattgaggacgtgcgccgggaggtgcagatcatgcaccacctcacgggccaccgcaacatcgtcgagctccggggagcatacgaggacaggcactcggtcaaccttgttatggagctctgcgagggcggggagctcttcgaccgcatcatagccaagggccactacaccgagcgagccgccgcctcgctctgccgcgagatcgtcgccgtcgtccacagctgccactccatgggggtcttccatcgggatctcaagcccgagaacttcctgttcctcaataacaaggaggactccccgctcaaggccacggacttcggtctctccgtcttcttcaagcacggggagacgtttaaggatcttgtgggaagtgcatattatgttgctcctgaggtactgaaacggaaatatggggcagaggctgacatatggagtgctggggtcattctttacatccttctgtctggtgttcctcctttttgggcagagaatgaggatggcatatttgatgctgtcttgcgcggtcacatcgatttctcttctgacccttggccttcaatatccaatggtgcaaaggatttggttaagaagatgctgcgacaagacccaaaagaacgcctgactgctgctgaaattttgaaccacccatggattagagaggatggagaggccccagataagccacttgacattactgtcattggtagaatgaaacagttcagggcaatgaacaagctcaagaaagttgcattgaaggttgtggctgagaacttatcagatgaagagattatgggcctaaaagaaatgttcagatccctggatacagataacagtgggacaattactcttgaagagctaagatctggtttaccaaaacttggtacaaaaatttctgaatcagaaattaaacaattgatggaggcggctgatgttgatggaaatggtaccattgattatgcggagtttatatcagccacaatgcatttgaatagattggagaaggaagaccacatactcaaagcttttgaatatttcgataaggatcacagcggatacataaccgtagatgagttggaagaagctttgaagaagtatgatatgggagatgacaaaactataaaagaaatcattgctgaagtagatacagatcatgatggaagaattaattaccaggagtttgttgccatgatgaggaacaacagccctgagattgttccaaatcggaggcgcatgttctaactgtcatggacaatcacattgaatactttcaagaacaatctgcccttagacataatctttgtcccattttctttttggaacagccgttaagaagactccttaatttgagatccatgtctctgctgcccggacctgtttgtcccaaaatagggtggtgttatagtgattcgtacttgatgctttgagcttcatggactcttgcgtggcaatgtttatccccattgtacgtctggttgttctgctgcttcgatctgaggctttctttaggtgtaaacggatatctgaattattaggataaatttaatattttaaaatagatatgtataaaatttgatgttaatatcttcttatgttacg

SEQ ID NO: 24876 - DNA, 922 bp, Zea mays
  Clone ID: LIB3689-211-E2_FLI
accgtcgccttccccgtttcgtcttccggtcctcgttttatcccctcgcccttgcactcctccgccgcacccctttcctccttccgccctccgccgcgcctggctttctcccttcccgagaggccacgctccatccccgcccgcgctgcctcccctggcgatcggcggcgaccgcggcccaacgaaagcgtcgtggtcggccgctgtcacgcttcttgcagacgctgggcggactgggaacaaaccccagcagccgcatcgatggcgcccaaggcggagaagaagccggctgcgaagaagccagcggaggaggagcccgctgccgcgaaggccccggcggggaagaagcccaaggccgagaagcgcctcccggcggccaagtcgtccggcaaagaaggcggcgacaagaagggtaagaagaaggcgaagaagtcggtggagacctacaagatctacatcttcaaggtgctgaagcaggtccaccccgacatcggcatctcttccaaggccatgtccatcatgaactccttcatcaacgacatcttcgagaagctcgccggcgaggctgccaagcttgcgcgctacaacaagaagcccaccatcacctctcgggagattcaaacctctgtccgccttgtccttcccggcgagctcgccaagcacgcggtctccgagggcaccaaggccgtcactaagttcacatcatcttagatttgaggtagtagctattgggtggcgttggtagttgtgtctcaatttgtctgctactaatagtggtaggagtatccatgtgtagttgggttgtggtaagaattgtgttaaactggtaatacgtttgaaattgctttttatggatgtggaatagttgtgtgttgcttgttctacgtttgatttctatctggatgcgattctcttatcttgg

SEQ ID NO: 24877 - DNA, 2442 bp, Zea mays
  Clone ID: LIB3689-211-F3_FLI
gcgctccgcctccgtcgtccggagcgcccgcgtaaagccaaacaccaaaacctcccttttcccccgttccgttccgttccgtcccgtcccgtcccccactcctcctccaaccccggtctcgcgcgatccgccgatccggtttccccgcgcccggccgcccgtcccgatcccgccgctgtttcggcggcccggttccgccctccgtccgtcgccttgcggcggcctggcgttgatgtggcgtggcacggggcccgtgcttcggttttgagagctacccgtgtcggtgcggagaggcccggggcggtcttcaatgaggcggcggccggtcctgccggcccaccacgacgacgtggacaagggcggcggcaagccggcgtcgtcgcgcctctgcttcctcgccacgctctgcgccatgttctgggtcctcatcttctacttccacttcgccgtcgtctccaacgaccccgccgcctcggcggcgcagggcgccgaggctcgcattgccggcgcccacacccgcattcccgaacgcgacggcgcgtctcgcgtcgacgttcccctcgccttcgcctcggagccgcctccgccgccgcctcctcctcctcctcctcctgccgcgcggcccaaggaggcggaggacgaggttgccgccggagtccgccgggaggaggcgccgcccgaggtcgcggcgccgtacccgttcgagcgggcgctcaggacggcggagaaccagagcgacccctgcggcggccggtacatctacgtgcacgacctgccgccgcggttcaacgaggacatgctccgggactgcgagaagctcagcgtctggaccaacatgtgcaggttcatgagcaacgacgggctcggcccgccgctgggcaacgaggagggcgtgttctccgacaccggctggtatggcaccaaccagttctccgtggatgtcatcttcggcaacaggatgaagcagtacgagtgcctgaccaaggactcgtccgttgccgcggcggtgttcgtgccgttctacgctgggttcgatgtggcaaggtatctctggggctataatatcacgacgagggatgcggcgtcgcttgatttggtggagtggctgatgaacaagcccgagtggagcgtgatgggtgggcgggaccatttcctggttgccgggaggatcacctgggatttcaggaggttgacggaggaggaagcagattggggcagcaagctgcttttcttgccggctgcaaagaacatgtcgatgctcgtggtggagtcgagcccgtggaattcaaatgattttggaataccatatcctacgtacttccacccggccaaggacgctgaggttttcctttggcaggataggatgaggagcttggaacgcccatggctgttctcgtttgcaggcgctccacgtcctggtgatccaatgtccatcagagggcagctcatcgatcaatgcaggagctcaagcctttgtaaattgttggagtgtgaccttggggagagcaagtgccactccccgagcacaatcatgaagatgttccagagttctatgttctgtttgcagccccagggtgactcctacacaagaagatctgcctttgactcgatgttggctggctgcgtgcctgttttcttccatcccggttcagcgtacgtccagtatacatggcatctcccaaagaactatacaacgtactctgtattcatccctgaagatgacatccgttctggaaatgccagcattgaggagaggctaaagagtattcacccagatgtggtcaagcaaatgagagaggaggtcatcaatctgataccaaaggtgatatatgccgatccaagatcgaaactggagacattgaaagatgcatttgatgtttccatagaggcgatcattaacaaagtgacaaagttgagaagagatatcatcgcaggccaagaagacaaagattttatcgaagagaatagctggaagtatagtctgttagacgatggacagcaggcaattggacctcacaaatgggatccattcttctcgaagcctaaagataaaggtggagattctagtggttcatctgcagaagctgccaagaattcttggaaaagtgaacagagaggacaggattgaaccatgagttggtcgtctttgggatgagatcaagggagtagagttagctatactctctgaagatgctctgatgcatataggttgcacatagatcaagatccagtagttatggtgatcatgaacatcattgatgatctatgtcaccctgcagttgtatgaagccattccaccaaaaatgctttgggggaaatttggaagacagcctttgcgtaccccctatgaatactatttttcacactaattttgctgtttctgctcaataatcctttgtaaacccttacagaatttagaggtatatcaaattttgtttatgt

SEQ ID NO: 24878 - DNA, 2590 bp, Zea mays
  Clone ID: LIB3689-211-H10_FLI
cggtgtctcctctgtcctctctcctaagttacttgcagccctatcctgtttatcctcatcttcctcctctccctgccatcttttgcaagatctctccttcgtcttctctttccccttttaaatccaccggaatccctcttttgtcacgagccaagccgccgagcgcagcataaagcgagcgaagcaccagcaaaagagagcgacgccgcctgcgccaaagcttcggattcccgtctattttaccccccaccctcgccgactcaccggcgcgagatccatccgcaggtgtcggcggcctgcagccccccttgaaagatggcgcctttctgaggctccccgggggtttctcgtcgtttcttgcttggcccctaaagcgggagagcggcttccagggagctcctgccgttcccggccaattcagctgaagtggcggcaagtgggtttagggctcgatccggttttgtgcccgggcgtgtctgactctgacccgggctggggagcggtggttcttggctagttcttgagctggttgcggcgcttatccctcttcttggagctcttggattggtttgggggaaagcaggttcttgcaagcagctgcttcggttcccgaggatgttaattttttgaattcagtcggggggaatggggctctcgcggtctctggattgagcatttctttattggaattcgacatttcgtgcggcctccagtccatggaggatttggggctgtggaagcaggcgtggatgtgggtgttgtcccagaagcacatcctagcgtgggcgcacacggcggcgtgcggcagcagggagcgcctcgccttcctggtcgatcggcactggcccgccgtgtcccgggcctgcgccacctcctcgcgactcgcgctcgccgcgctgcggcaatggcgcgggtgtacggcgcgcggggtgctcgcggtggcgagcctcggccctgccgccgtcttcgtcatcctctggagcttcttcgtgtgcatgacctcgccggcgtgcgccctctacgcgcttcttagcctgggggctgctgcagcagttgttcactatatgggctatacacctggccttttcattgttgggctgtttggaatattaattatgtggatgtatggctacttttggattacaggaatgcttctagttgctggaggttgtatgtgctctttgaaacatgctcgatatgtgatacctgttttgacttcatatggtgtttattctgtggctgttcgtgttgggtggcttggagtcttcttgacactaaacctttctttcttgacaaatgatcttcttaataagttagtgcaaggatacgaaggaagcactgaagaaagccagtttgaagacatgaaggattctgatccagttatggatgagttctatcgtagttgtgaattcccatcagttcctgacagtgaacctgagaccgtgtcttgcgcgaagccatactgctcagcacccatccaagatgtattacatgtacaaaaagaggaacctcctagtaaagtagtgaaatcggattctacttcattggatgagattaagaggataatggatggttcaaaccattatgaagttttgggtgtacctcgtaatagaagcattgatcagaagacactgaaaaaagaatatcacagaatggtcctgcttgtacatcctgataaaaatatgggaaatcaattggcttgtgaatcattcaagaagcttcaaacagcttatgaggtcctctctgatttcacaaagaaaaacagctatgacgagcaactgaggaaagaagaatcacagaaaatgaccccaagatcatgtgttgtctctcaacagagtggtggtgtggagtttctctcagaagagtccaggcgaatacagtgcactaagtgtggtaatttccatatatggatatgcaccaagagaagcaaaacaagggcacgattctgtcagggctgtgatcagtttcatcaagccaaggatggagatggatgggttgaaaccagattttcgacctccatcaagatggaaataccacgggcttttgtctgtgctgagagcaaaatatttgatgtgtctgagtgggctacttgccagggaatggagtgcaagcctaacactcatggtccaacgtttatggtaaacatggttggcgcagataggatgcctcagagatcctacagttcccggtatcccttcagcttggacgcagagatgatcccggaagacgagttcgagctgtggcttcagcaggcgctggcgtcaggcgtcttcgccgacagccccaagcgcaggaaaagttggagcccattcaaactgcctcaaaagggaattaaaagttggcgaagatcgtcatgagggtgcaacaggcattacacagcgaggggtgtaggcgactacggcattggaaagaaggcaatggtgcagggcttcatgaatgtaaataaactgaccaacaatttgcccggatggacaagtgatttttgttcgaaaggagaaagagggtggagaagaaacactcgatgaataggtataacacataccactgctgaactcggttccctctgcagcaatcccacgagtttagccgt

SEQ ID NO: 24879 - DNA, 1132 bp, Zea mays
  Clone ID: LIB3689-212-C7_FLI
cacaagtactagtcgtctcctagtcctctcctctgtactagtcgtcgagtctgcttccattctgttcaagttagcgccgctaatccgctccctattcaccatccaatccaatcggcttcccccaggcacccatggcgacggcggtggaggttcccgtggaggcgccggtgaggacagtgaaggtcaccaatgtctctcttagtgcaactgtgcaagacattaaggagttcttttccttttcaggagatattgatcatgtggagatgcagagtggtgatgagtggtcccaagttgcatatgtcactttcaaagatgcacaaggcgcagaaacagcacttcttctttcgggtgccacaatagttgatctttctgtcatcattgcacctgctccagagtatcagccacctcctactgcctctgctccaccaatgagtggaaccagagttccagttggtggtggagacaacaacgttgttcacaaagccgaggacgttgtgagcactatgcttgccaagggtttcgtgctaggcaaagacgcggttggcaaggccaaagcattcgatgagaagcatggcttcacatccacagccggtgctacagtggcctcaattgacaagaagattgggctgactgataagatcacgacaggcacttccttggttagcgggaaggtgaaggagatggaccagaagttccaggtctccgacaagaccaagtccgcactcgctgccgccgagcagaaggtgagcagtgccgggtctgccatcatgaagaacaggtatgtcttcaccggcgcgtcatgggtcaccagcgcgttcaacaaggtcgccaagaccgccacggacgtcgggacgatgaccaaggagaagatggccgccgaggagcatcacaagggctccggcccgtcttctggcggccactcgtacacgcccatccgatgattcatgcattggcttgctgttacgtgcctcactcaaacggtgttgtactgcatattggtggatgtaaaacatggtcttttagtcccaactcttattatgttgtggttagctagagttgaaacctaatagaaaccacaagttaaggttcaagcacatgaatacctattttccatacacatatatttaaagtt

SEQ ID NO: 24880 - DNA, 2441 bp, Zea mays
  Clone ID: LIB3689-212-E2_FLI
ccaccaccttccgcgctaacgacgtcgccatcacctcgcgtcgagccagacgctcaggtcttcatcgtgctcttcaccggcgacgagaacccaccaacaggccatccgagtcggtctcgatgatggcccataagctgagtcctgacacttccaacctcaggaggccaatggcccagtatacggtgttagtgtagccagtggctgcctgcttctccctcctcaaggcggagcgcagcaccgcggctgcgctgctggcggccagagatgatgacgcgttgcggtgtacaactcctggtggcacgggggatctcctcatcaccatgcctttctcggaggatcaaccaaacggaaagtgaaattgttcggatgtttcatcctccaattcgtcagagtgaggaagcaatagcaaccattgtgccaaggtacacatattctatgcgtgtcttggatgagaggttcattaggatcctgaagatattcaagtggggccctgatgctgagaaggcgctggaggttctcatgcttagagttgatcactggttggtacgagaggttatgaaaactgacgttggggtcaatgtgaagatgcagttcttcagatgggctgcaaagcggaggaattatgagcatgacacatccacttacatggcattgatacattgtttggaagtagtggagcagtatggtgagatgtggaagatgatccaagaaatggtacggaatcccatttgtgttgttaccccaacagaactttcagatgtagttcggaagctggggaatgctaagatggtcagcaaggcaattgcaatcttctaccagatcaaaacgcggaagtgtcagccaactgcacaggcatataacagcatgataataatgttgatgcatgagggccaatatgagaaagtccatcaactatacaatgagatgagcactgagggtcattgcttcccagacactatgacatatagtgcattgatttctgccttttgcaaattaggtcgacgtgattcagcaattcagttgttgaatgagatgaaggagatcggtatgcagccaactactaagatatatacaatgttaatagctttgttcttcaaattcaatgatgctcatggagcattgagtttgtttgaagaaatgaggcatcagtattgccgaccggatgtgtttacttacactgagctaatcagaggccttggtaaagctggcagaatagatgaagcatatcacttcttctgtgaaatgcagcgagaaggctgcaggccagacacagtttttatgaataatatgataaatttcttaggcaaggctggccgtttgaatgatgctacgaagttgtttcaggagatggaaacgttgcggtgcattcctagtgtggtgacatacaatactatcataaaagcactttttgaatcaaaatctcgtgcttctgaggttccatcttggtttgaaagaatgaaggcaagtggaatctcccccagttcgttcacctattctatccttattgatggattctgcaaaaccaacaggatggagaaggccatgatgctactggaagagatggatgaaaagggtttccctccatgtccagcggcatattgtagcctgattgatgctcttggaaaagccaagcgttatgatcttgcttgtgagctttttcaggaactaaaggaaaattgtggctcgtccagtgctcgggtatatgcagttatgattaaacacttaggaaaggctggacggcttgatgatgctataaatatgtttgacgaaatgaacaaacttggttgcgctcctgatgtttatgcgtacaatgctctcatgtctggattagcaagaacaggcatgattgatgaagctcttagtacgatgagaagaatgcaagagcatgggggtattcctgatatcaattcatacaatattatccttaatgggctggcaaaaacgggaggacctcaccgtgcaatggaaatgctttccaacatgaaacaatctacagtaagacctgatgttgtctcctataatactgtccttggtgccttgagtcatgctggcatgtttgaggaggcatcaaagctgatgaaagagatgaatacattggggtttgagtacgatcttattacatattcatctatacttgaggctattggaaaggttgatcatgaatgtgacccttaaggttggaggtgtatcatatgcagtcactcatttggtgcaagcagagcattcaaactagatctagcaatttcatatggaagagattaaacataaaatagtactaggtttcagtaaatgtaaatagccgtcaccattggattttgattagacgcactagatcgtttaattgcacacttacatcaatatgattgattgcactgtatatcttcccctcaaggtcagtccatcttggtttgtaaattaattgtattacagaagctggagtc

SEQ ID NO: 24881 - DNA, 2159 bp, Zea mays
  Clone ID: LIB3689-212-F11_FLI
cgaggcggcgcttttggggtcggaagcgacacgggcgccgggcgggtccgcgggtggtggtgctactgctagcaagcagcagcaggcgacgctaggcgagagccccagtcggagcaggccaccatgtgcggcatcctcgctgtcctcggcgtcgctgaggtctccctcgccaagcgctcccgcatcattgagctctcgcgcaggttacggcaccgagggcctgattggagtggtttgcactgtcatgaggattgttaccttgcacaccagcggttggctattatcgatcctacatctggagaccagcctttgtacaatgaggataaaacagttgttgtaacggtgaacggagagatctataaccatgaagaattgaaagctaagttgaaaactcatgagttccaaactggcagtgattgtgaagttatagcccatctttacgaagaatatggcgaagaatttgtggatatgttggatggaatgttctcctttgttcttcttgatacacgtgataaaagcttcatcgcagctcgtgatgctattggcatctgccctttatacatgggatggggtcttgatggatcagtctggttttcttcagagatgaaggcattgagtgatgattgtgaacgcttcataacatttcccccagggcatctctactccagcaagacaggtggtctaaggagatggtacaacccaccatggttttcagagacggtcccttcaaccccttacaatgctctcttcctccgggagatgtttgagaaggctgttattaagaggctgatgactgatgtgccatttggtgtgcttttatctggtggactcgactcttctttggttgcatctgttgcttcgcggcacttaaacgaaacaaaggttgacaggcagtggggaaataaattgcatactttctgtataggcttgaagggttctcctgatcttaaagctgctagagaagttgctgattacctcagcactgtacatcatgagttccacttcacagtgcaggagggcattgatgccttggaagaagtcatctaccatattgagacatatgatgttacaacaatcagagcaagtaccccaatgtttttgatgtcacgcaaaatcaaatctttgggtgtgaagatggttatttctggcgaaggttcagatgaaatttttggtggttacctttattttcacaaggcaccaaacaagaaagaattccatgaggaaacatgtcggaagataaaagcactacatctgtatgactgcttgagagctaacaaagcaacttctgcctggggtgttgaggctcgtgttccattccttgacaaaagtttcatcagtgtagcaatggacattgatcctgaatggaagatgataaaacgtgacctcggtcgaattgagaaatgggttatccgtaatgcatttgatgatgatgagaggccctatttacctaagcacattctctacaggcaaaaggaacagttcagtgatggtgttgggtatagttggatcgatggattgaaggaccatgccagccaacatgtctccgattccatgatgatgaatgctggctttgtttacccagagaacacacccacaacaaaagaagggtactactacagaatgatattcgagaaattctttcccaagcctgcagcaaggtcaactgttcctggaggtcctagtgtggcctgcagcactgccaaagctgttgaatgggacgcatcctggtccaagaaccttgatccttctggccgtgctgctttgggtgttcacgatgctgcgtatgaagacactgcagggaaaactcctgcctctgctgatcctgtctcagacaagggccttcgtccagctattggcgaaagcctagggacacccgttgcttcagccacagctgtctaaccttatgtttatcacccagcaatgcttgaaacagcaaaggttgtccattgcttgtttcagtttccttccgatcatgtttttagttccatcaatcaagcaatggagacatgcttgtgcttcatacttggcagcatcgtgtttgggttttcactgggcagtactgtttaatttttatggactgaaaagactcagttttgtaaatattcgtcactgtgaccaattcctgtggtggtttatgtgatttgcagattgcagtggtt

SEQ ID NO: 24882 - DNA, 1644 bp, Zea mays
  Clone ID: LIB3689-212-F6_FLI
cagagataggcgtcttcgtactcgcctacctccgcggctcaaacctttcccccttctcccaattccctccgtcggccgccgctccatcccgtacgacgacaccatgagggagtgcatttcgatccacatcggccaggccggtatccaggtcggaaacgcgtgctgggagctgtactgccttgagcatggcattcaggctgacggtcagatgcccggtgacaagaccattgggggaggtgatgatgctttcaacaccttcttcagtgagactggtgctgggaagcacgtgccccgtgctgtttttgttgaccttgaacccactgtcatcgatgaggtgaggactggcacctaccgccagctcttccaccctgagcagctcatcagtgggaaggaggatgcagccaacaactttgcccgtggtcactacaccattggcaaggagattgttgacctatgccttgatcgcatcaggaagcttgccgacaactgcactggtctccagggcttcctcgtcttcaacgctgttggtggaggaacgggctctggccttggttccctcctcctagagcgcctgtctgttgactacggcaagaagtccaagcttgggttcactgtgtacccttccccccaagtttctacttcggtagttgagccatacaacagtgtactgtccacccactccctcctcgagcacactgatgtggctatactgctggacaatgaggccatctacgacatttgccgccgatcccttgacattgagcgcccaacctacaccaacctcaacaggcttgtgtcccaggttatctcatcccttactgcctccctgaggttcgatggtgctctgaacgtggatgttaacgagttccagaccaacctggtaccctacccgaggatccacttcatgctttcttcgtacgctccagtcatctctgctgagaaggcctaccacgagcagctctctgtggctgagatcaccaacagcgccttcgagccatcttccatgatggccaagtgcgacccacgacatggcaagtacatggcctgctgcctcatgtaccgtggtgatgtggtccccaaggatgtgaatgctgctgtggccaccatcaagaccaaacgcaccatccagttcgtggattggtgcccgactggcttcaagtgcggcatcaactaccagcctcctagcgttgtgcctggtggcgacctggccaaggtgcagcgtgctgtgtgcatgatctccaactccaccagtgttgtggaggtgttctcccgcatcgaccacaagttcgacctcatgtacgccaagcgtgccttcgtgcactggtacgtcggtgagggtatggaggaaggtgagttctctgaggcccgtgaggacctggcggcgctcgagaaggactacgaggaggtcggcgctgagttcgatgagggcgaggatggcgacgagggtgacgagtactagagaagtttgctgatgacgcagcatcaggccagtgtgctgcccttatcccgtgatctgccgtgagttgctcctgctatcgtgttatgtgtgtctgttctgaagtattgtgtggtttacaacacctgatgttgtaagagttgttaattcccctgcattgctaccgggttattgagaataattatggc

SEQ ID NO: 24883 - DNA, 1030 bp, Zea mays
  Clone ID: LIB3689-212-F7_FLI
ttttggatgccattcaagcgttctacggctccaatttctctgacttctccctgagcctttgcggccggctggagctggacggtccccgggcagcgcaggcagccggactgcgggagtcacctccatggcctcggctgctactgcaaccctccccaaggttcggttgaggccaagatgcaacagctacttccaggtccgccccgtccttgcactccctctcccctcccgaaagttcagctcatcagttgccctgttgattcgttccaacatgccctcaaccctaaggtgaccggtcaagtccatgcccacaccaaaacatgcggtgcctgcaagtgtccgacccatatccacggctggaggaaggaggacattcctgccggtgtctgcagttggatcaggtcagggctcatcggtcactgaggccgacaggaagagcgatttgtcgctggagaacgtcaagacgtccgttgtatcccgcgacggtgaaaagattaatgtacgagtgcagttgcctggaaaggcgacgcaaaaggtgtttgatgaggctctgacgttcttggcccgtgatgcgccaccggttcctggttttagaaagtccaaaggagggaaaacatcaaatatacccagcagcatcctgctgcagatgcttggcaagagccgggtcaccaaattcgttcttcaggaaatactgagcatcaccattgaagaatttgtcaagaaggaaaacctgaaggtgaaacctgagatccagacaacccagtccgaaggcgagatggagtccgcgttcgcgccgggatcagcatttgggttcaatgttgtccttcagctcgagacacctgactctgatgatccagaggagaaacctggctctgatgacgatttacaggaggaatctggttcctcggagtagaaagaaatgcatatcgcctgcatgcatttatcaaccttcttcatgtgccattccttatgaatgaatgtactgaatggaaagccgttgcaaccgttttgagttgagagttgcaactgaaac

SEQ ID NO: 24884 - DNA, 1342 bp, Zea mays
  Clone ID: LIB3689-212-F9_FLI
gtgtgtgtctagtcgtccccttctcccatcggcgggagggcggcgtcgtcagcccgcaaaaaagcaaagcgtcacgagaagctcgttccttgacaggcagccatgattccaaggacgtcctcggtctcttcgtcggcggcggcggcgcccaccgcgggcgcgccgccggcgtggccgagcggcagcgacgcggcggcgttccaggcctcgggcagctcgggacatcagcaggtggtcatcagcaacggggtgctcctcgccgcggtcatcttcctcttcatggtcgttgtgttcgtcttcctcctctacctctacgccaagcgctacctgggcgccgggaacccgctcgcggcgccgccgtcctcgcggttcctcttcgtggccgcgtccccgctcccgcagcgcggcctgcccgcctccgccctgcgctccctccccgtcgcggtctacggcggcggcggcggcggcccgggcaccaagagcagcaaggaggcgctggagtgcgcggtgtgcctgtccgaggtggccgacggcgagaaggtgcggacgctgcccaagtgcgggcacgcgttccacgtggagtgcatcgacatgtggttccactcccacgacacctgcccgctctgccgcgcccccgtcggcggcgacctcgacgcgctgccgcgggaggagcccttcggcgcgtcgctcgagttccccaccaacgtcctgttctggggcacccacgacgaggtcgccaacgccggcctcgccacgcccccgcccccgccgccgcccgtcgccagcgccgtctccgcgagctcctcggcctccgggcgtaggaaggagaacctggtcatcgacatcccgacgcggcccgtggccctgaccaccacgccgcccttcaactccccgctgccgacgagccgggtggctgggagcgccgacgagacgcggtccccggtctccgccaggctgcggtcgctgcgccggctgctgagcagaggcaagcaggccgtggtcggcacctcctacagcccgcgcggcgccggtgacgtcgagcaggggctcgcaggagccgaggccgcccgcccgcccaagacgcctccggcgtcggactgattcagatccccccgagctccgggtcgcatttggctcgactcgccgatcaccggagcgcgcgtagcgtatgcgttcatttttgttccccctttttcttttttttatttacatcttgattcgaaaaaggaactatcggtcaaaaggttcctgtgtaaacagaggaaaagaccgatgctggttggttgttgttgggggaaaaaatggtggatttgttcatatgtttaccaagaaacttttcttg

SEQ ID NO: 24885 - DNA, 1797 bp, Zea mays
  Clone ID: LIB3689-213-B11_FLI
agaatctcgcaccacagcaggaggggaccgagagagaagcgaactcgagaaagggattcaaggaggctgttgccgatggccatggcggcgcggctgctgcgagcaaccgaggtggcatctcgatttctatctgcttcccatggtttcgtccagcgagctgcatacacagctggtgggatagtcgatgttggccaaccaacaccccagtctcatccagagttattagctgatggagagatcacaccaggcatcacaaacgaggaatacatctctagaagaaaaaaacttttagagacagaatggtgattacctgtatattacaggttgtacacaacccggtggagtagcagttttgagtgaagaaacagggttctgcatgttcatgccagatacaaataaggaggatttagtttggcaaggtgaaactgctggagttgaggctgctgtggatttctttaaagcagataaagcatttccacttagtcagatgcaaaagatccttcctgaactgattgagcaatcaaaaggggtgtatcacaatgtgaatacaacatcttcttataagaacttggatgcctttcgtagggcatcactcaacaataaagtaaaagatcttacaaattacactgatgaattacggtgggtcaagtcgaaatcagaaattaagttgatgagggaatcagcatctattgtttctcagtctcttttacaaacaatgttgatgtcgaggacccacagagaggaaagccagttggcagctaagattgaatacgagtgcaaaatgagaggtgcccaaagaatggcgttccatcccgtagttggtggaggagcaaatggcagcattatacattattcaagaaacgatagaaaaatcaggacaggtgatcttctgctcatggatgttggctgcgagtatcatggctaccttagcgatctgactcgaacatggccaccctgtggcaggttttcacctgctcaggaagagctgtacagcctaatactggagacaaataaggagtgcataaagctctgtaaacccggcacaagcattaacgagatacacaatcattcgacatatctcccaaaaaaatctatcaaatgcaggtaaagctgttgataaagggattccaagaactgaggatcctggagaaggggaaatccatccaatacaactacttgaacccaaccgcaataggccactcgttaggcatggatattcatgactccatgacactccccaaggacaagcccttggagcctggcgtcgtaataacgattgagcccggggtgtacatcccggcggccccggtcctgaacgagcgcgcgccgagcaggtaccgcggtatggggatccggatcgaggacgaggtcctcatcaccgacgacggccacgaggtgctgacggcgtcggtgcccaaggaggtctcgcacctgaccaccctgatgaacatgggcagcggcggctcggctgcggacgcccatggccatgagctgcgagccgcctgcagctagctgaggcggctgcgtgcgtgaggaggtcatgcccgtggcggcggccggacctagtagacctggcacgacgtcgtggagcagaatctacgtgctctgcgaataactagggatgtaatatggttcggaaaatatccgtccgaatccggattcgaagatggtgaacgctggttcggatggaattttcggatattcggactttttttcggataattgatacgaatacggatattctgttcagatatcgaatttgattacaatatgtctgatatccgtcagatatcgaat

SEQ ID NO: 24886 - DNA, 1374 bp, Zea mays
  Clone ID: LIB3689-213-B12_FLI
ctccctccgagtccagggggcaggggcaccattaccgagtagtttaattagtgctagttgtattaccattagggtgctcggtctgcagctatcttaggttaaccagtcgtgtgtggtctatcgatttcgatatagtactactgctctgttataatcagcgggaaggaggaagatgacggtgacgccacggatcacggtgagcgacgggcggctgacggtgcgcggccgtacggtgctcaccggcgtgccggacaacgtgtcggcggcgcacgcggccggggcggggctcgtcgacggggccttcgtcggcgcccacgccggcgaggccaagagccaccacgtcttcaccttcggcacgctccgggactgccggttcctgtgcctgttccggttcaagctgtggtggatgacgcagcggatgggcgtctccggccgcgacgtccctctggagacccagttcatgctcgtcgaggtccctgccagtgacggcgacggcgacgacgcccccgcgtacgtggtgatgcttccgctgctggaggggcagtttcgggcagcgctgcaggggaacgaccgcgacgagctgcagatctgcatcgagagcggggacaaggcggtgcagacggaccaggccgcgcacatggtgtacctccacgccggcgacaaccccttcgacaccgtcaccgccgccgtcaaggcggtggagaagcacctgcagacgttccaccaccgcgacaagaagaagctgccgtcgttcctcgactggttcggctggtgcacctgggacgccttctacaccgacgtcaccgccgacggcgtcaaacacggccttcagagcctgtccaagggcggcgcgccgccgcggttcctcatcatcgacgacggctggcagcagatcgcctccgagaacaagcccgaccccaacgtcgccgtccaggagggcgcgcaattcgccagccggctgaccgggatcaaggagaacaccaagttccagaccaagcccgacggcgacggcgacggcgagcaggcgccgggcgggctgaagcgactggtggccgagaccaaggacgcgcacggcgtgaagcaggtgtacgtgtggcacgccatggccgggtactggggcggcgtgacgccgacggcggggacggcgatggagcgctacgagccggcgctggcgtaccccgtgcagtccccgggcgtgacgggcaaccagccggacatcgtcatggactcgctgtccgtcctggggctgggcctggtgcacccgcgccgggtgcgggacttctacggcgagctccacgcgtacctcgcctcctgcggcgtcgacggcgtcaaggtggacgtgcagaacatcatcgagacgctgggcgccggcca

SEQ ID NO: 24887 - DNA, 537 bp, Zea mays
  Clone ID: LIB3689-213-E6_FLI
gtgtacgcggcgctgctcgagggcaggcgcctggccctcgcgcgggccaacatgcccgccatgaacatcgcgtggcaggcacccatgttcgccgtgcacggcgcggcggcggtcttcgccaccgtcggcgtgctcgagttcttctacgaccagtcgccggacgggatgaagagcctcggcaacgcgctcgcgctgctctccatggcggccgggagctatttcaactcgcttgcgctcagcactgtcggggcgatcacggcgagcagcggggaacgcgggtggctcccggacgacctgaacaagggtcatatggactatttcttctggatgatggccgctctaggaacgctcaacctgctgcacttcttgcactactgcaacagacgatacagaggcaacaacaccaccacttcttgacgtgtgctgttatgctgtgtgcaccatgtttctcaaaataatagtttgacaatactatactttgtaattatcataataatattatagttttagccagctccaagaatactaggttctaag

SEQ ID NO: 24888 - DNA, 918 bp, Zea mays
  Clone ID: LIB3689-213-H10_FLI
ttttgattttagccgccgccgctgctcatctcacatccctcgagaagacgcctgctcctcgccgatcgatacgatggccgtcttctccgacctccacaccgccgacggcctcaagtccctcgaggctcacctcgccggcaaaacctatgtgtctggtgactccattactaaggatgacattaaggtcttcgccgcggtgccgtcgaagcctggcgctgagtttcctaatgccgcccgctggtacgagaccgtctctgcggctgtagcctcaagattccctggtaaggctgttggtgtaaatctgcctgcgggatcagctcctgcggcagctgctcctgcggatgaggctgaggatgatgatgaccttgatctttttggtgatgaaactgaggaggacaagaaggcagctgatgagcgtgctgccgctgccaaggcctcttctaaaaagaaagaaagtggtaaatcctccgtccttatggatgtaaaaccatgggacgatgagactgatatgaagaagctggaggaggctgtccgcagtgtccagatggagggtctgacttggggagcatcaaagcttgtgcctgttggatacggcatcaagaagatgactatcatgttgacaattgtcgacgatcttgtgtccatcgacactctaattgaggaccaccttacgcaagagcccatcaatgagtacgtccagagttgcgacattgtggctttcaacaagatctagagttcagtttctgagtttgggcaacggcagcggctcagctcgtcaagtttgtgctgggatgccagtttatcccttctagtctattacagaaacgttgttcggagctgagtctattataaacatcttggtctgagtttattgttgagtggtgccagtttttttcaatatacatttatcttaaaaac

SEQ ID NO: 24889 - DNA, 2170 bp, Zea mays
  Clone ID: LIB3689-213-H5_FLI
cgagctgcagcctgtacctgatgcacatgtccctgttatgaaattcaagttccatggaatatctattgaccttctttatgccagtgtctccctcttagtagtaccagctgacttggatatctcccaaggatcagtgctttatgatgttgatgaagctactgtccgtagtcttaatgggtgcagagtagcagaccaaatcattagacttgttccaaattttgagaattttcgcacggcattaagatgtttgaagtactgggcaaaaaggagaggtgtttactctaatgttactggctttcttggtggtgtcaactgggctttactggttgcgcgtgtctgccagctctatcccaatgctgtgccaagtatgctggtctcacggttttttagagtttttacacaatggcagtggccaaacccggttatgctttgttctatagaagaggaagaacttggtttccctgtttgggatccacgcaaaaatcctcgagatagatgtcatcatatgcctattataacccctgcgtacccatgcatgaattcaagctataatgtttccacaagcacactgagggttatgttggaacaattccagtttggtaatagaatttgccaggaaattgaaatgaataagaccagctggcctgctctgtttgagccttttcaattttttgaagcatacaagaattatctacaggttgacatcattgctgaggatgatgaagaccttaggctttggaaaggatgggttgaatctcgattgcggcaactaactttgaagattgaacgtgatacatatggaatgctacagtgtcatccttacccacatgaatatgcagacccttctaggcagtgtgctcattgtgctttcttcatgggcttgtcaaggaaagaaggtgtgaaaatacaggaaggacaacagttcgatattcgaggaacggtggatgagttcaggcatgaaatcaacatgtatatgttctggaagcctgggatggagttagctgtttctcatgttcgtaggaagcaggtcccagcttatgtgtttccagagggttataaaagacctcgcccttcaagacatgtgaaccatcagtctgataaaaatgacactgaagatggcacagcgaccaggtctccagacagtcaactgaagagaaagcatgattctgttggaactgatgatatcaggtatgcaaagaggtcatcgaccagcccagttcatccgaaaaattcacctcaatctggaagcactggcgatgagactagatgtaacaaccaaataaaaagggctcctagcgatgcaagtggtggcagtccggcttcacctcaggcatcagagagaagcccagatactattctgtctgcccctaggtgcacgacaacaggagcagtgtgttctggtgatgcaattagtaagcatagtagtgttcctcttgttgagaactgcaccactccgactgtagcagtgtgcacaactttgaagcgcgtagctgagaaagttgtttcagagctagttggaagtgaaaggctggggagcaacaacagtgcggaattgttggagagtatggaaaaggaggatgtccttgctgaaaatgttcgttttggcgggaatggagttgcgcaaggtggccttccagaagagttagaggtatgaacaagtgtacattgtggaagtcgtcactgagggttagtggcatcaaccacacaagattggggaaaaaatggtgtagagatggataagttctacccccttgctggagggaatggtaagtagctcaactcacaagtttccttctggacacagattcgcaattacgggggtttctatgatgatggatgatgggagattatcggatatcatgtcttgcacaacggcatggcaaaaaaaaaacgacgaagaagattttgtggaaggccatggtcgaatgtcatgtcttgctggtacactctagatgagcatgaaccttaagttttcgtttttttttaacttgttgagcagctgactcttgtgtatgaactgagctgcagcgggcttccctgagttgacttgtttgggtctgagatgcttctgccatgttctaggtctagaatagaactagatgcggtggtgtgttctctaccctaagtccccttttgtgccctttccttctgtaatataagatctttgact

SEQ ID NO: 24890 - DNA, 666 bp, Zea mays
  Clone ID: LIB3689-213-H9_FLI
gtgaaatgccgtggagatgggcggcggcggcggcgacggcggcgacgagaaagctcaccgggatctctcagtcgcgagtttcagtagcctttaccggccgtcttctctaccgctcgttcggaagcgactccagtgaaagccgcaagaggtcactgccacggggggtcgtatcgatcggggccatcagccttgctggaggtctcgtgctcagcgccgtcaacgacctcgccatcttcaatggatgcacaacgaaggcaattgagcatgctgctgacaaccctgctgttgtggaagcaattggagtgcctatagtcagaggaccgtggtatgatgcttctcttgaggtgggccatcgacggcggtctgtgtcatgcacattccctgtatctgggccacatgggtcaggatttctccagattaaggcaacccgagatggagaggatggtctgctttcgtttctgcggcatcacgactggaagatcctattgctggaggctcatcttgaagcaccatcagatgatgaggaccagagaaagctggttaaggtgaatcttgcaagcagtggccgtggggaagatggggatccagagagtggttaatcttttgtactgaattccatggtgagtggaagatcgtgtcatctgaatggactccaaatattaaatg

SEQ ID NO: 24891 - DNA, 1091 bp, Zea mays
  Clone ID: LIB3689-214-G10_FLI
gacctcgccagcgaccgacaccctctctagctccaagtccaaggctccccttcgccgctgctagcttagctccccgaggctgctaactaagagcgtcatggggctgagggagagcctgctggggtgcttcggggccggcggcggcgaccagcaggagcaggggcacgagcccgcggcggcgcggccggcggccagcagacgacccggcggcaagccgacgctgcggcggctgagcacggcgaacctgcggtcgctgtcgctgcaggacctgtcgcggaagctggagaccacgaagctgcacgccttcacgctggacgagctgagggccgccaccaggaacttctccgccgccaacttcctcggcgagggcggcttcggccccgtctacaagggcttcgtcgacgggcgcctccgcccgggcctccagccgcagcacgtcgccgtcaagtacctcgacagcgacggcgtccagggccaccgcgagtggctggccgaggtggtgtacctcgggatgctcagccacccgcacctggtcgagctggtgggcttctgcaaccaggacgaccaccggatgctggtgtacgagtacatgcccaggcaaagcctcgagaaccaccttttcaagaatctccttgcgtccctgccatggtcgacgcggctcaagatcgccgtcggcgccgccaagggcctggcgttcctgcacgaggccgagacgcccgtcatctaccgcgacttcaaggcctccaatattcttctcgactcggactacactgcgaagctgtccgacttcgggctggcgaaggaggggccgcagggggacgcgacgcacgtgacgacgcgggtgatgggcacgcacgggtacgcggcgccggagtacatcctgacgggccacctgacggcgcggagcgacgtgtacagcttcggcgtggtgctgctggagctgctcacgggccgccgctccgtggacaagagccggcgcgggcgcgagcagagcctcgtggactgggcgcgcccctacctccgccgcgccgaccggctgcaccgcttcatggaccccggcctggaggcgcagtactcgccgcgcgccgcgg

SEQ ID NO: 24892 - DNA, 1994 bp, Zea mays
  Clone ID: LIB3689-214-H2_FLI
ggccagcagctagctaggcaggtagctcttgccaacgccccggccggccggcacctcacattttgtagcgtgatcgcgcgccgccgccacgcctccccatgcaagctactccgatcctagctactggctagctagttgcaactactcgagctaccagctagctaactggccagcagcaggtagtctgctcagggtcggagggtcggccggcgcggcggcggggcgcgcgcgcgcgggaaggcgggaaggcgggaacgcatgggcaacgccctggggtgcgcggggctcggcgagcggctggcggccagcgcgaggaacggcgacgcggcggaggtgcgccgcctgctggaggaaaacccggggctcgcgcgctgcgccgccgtcggcagcagcctcaactcgccgctccacctcgccgccgccaaaggccaccacgaggtgagcaacgacgacgacgattggtaatcgtttatttgagtcacgcgtcatgcgttttcgtccttgcaaagctggtctgccgcctcgtctacagtggcacgcgcaattaatcacctggacagtgacacaaaatctactactaccggcttccggcacacgtattattttccgggggattttcagaggatcgccgcgttgctgctggagaacggagcagaggtgaatgctaggaacctttccggcgagacggcgttgatgcaggcgtgccggttcggccactgggaggtggttcagacgctgctggttttcggatgcaacgtgtccaaggtggacagcctgagcggccagacggcgctgcacctggcggcagcgggaggccacgccacgtgcgtgcgcctgctgctggccggcgccggcgccggcaggaacaagctcgtgaacagggcggccagcggcggcgtgacggcgctgcacctggcggcgctgcacgggcacgcggactgcgtgcacctgctggtggacgagcgcgccgacgtcgccgcgccgacgctgccctgcacggcggcccccatggcggccatcggcgccgggagcgcgccgctgcactacgccgccgcgggcggcgaggtcaggtgctgccagatcctcgtggcgcgcggggccgacagggccgccgccaactgcaacgggtaagggatgatatgggatcctcttttgttttctggtccgtcgaccgctccatgtcgttacgtgtcctcttctgctaggcaggtggatcccggtggacgtggccaggacgtggggctgccagtggctggagcacgtcctgtcccccgagtctcacctgcgcatccccaggttcccgccctccgcctacctctcgtcgccgctcgccagcgcgctcgccctcgcaagggactgccgcctgcttctcaacacggcgcagctggacagcggcggcgccgacgcctgcgcggtctgcctggaaagaccctgtgacgtcgcagccgaagtgtgcgggcacgagctgtgcgccaagtgcgcgctggacctgtgctcggtggtcaagtcctacgacgtgcccgggatcgccggcaccatcccctgcccgctgtgccggagcgccatcgcctcgttcaggatgcgggccgcggcggacgagtccgagcctgacgtgaacgacgccggcggtggccgccgcggtgccggcgatcgccaggcggcggcgtccagcccggagaagaaacggagcacggactcggaacaggatgtcgtcctccccttctactgcgcgcctctcgccgtcccgtcttgaccggccggcgatgcaggcagcctgcatttgctggacgcagaggagctactgcctactgcatcatcagtggaaacgtaaaatgtgcatacacagcagaggcagacagattgtttgctgatgcttgccgacggcattgctggattttattttttttttattatggttctgcacatggcactagctggtgtaatgtaacatgttggtttattgtggaaagaaaggaggaacattcttttgctgt

SEQ ID NO: 24893 - DNA, 1632 bp, Zea mays
  Clone ID: LIB3689-214-H9_FLI
tgggagctcagctgattgagcagtccaagaaccaaaggataaggtgggtggggggaccgccggagccgggagggacgagaagcgagcgaggtgccgtcgtcagctagcactagcagccatggaaggcggcgcgcacgagttcgacggctccaccttcaaggagtgcttctccctctcgtggaggaacccctacgtcctccgcctcgccttctccgccggcatcggcggcctgctcttcggctacgacaccggtgcgttgcgactgcgtgcgcgtccttcttcctgcctgtgctgtgtgtcactgtagtgtagttccatttcttcacccgccatatccagctcaaagaaagatgggccctataggagttcggatgatgatcgtgtccagctagatgatatggctagctagctattggtgaccgaactgtgtttaatttcctgttagcgtctgctagctggaaaagtgttcgacgatatcgtacgtgttattagtgagcaagtgaccagtgacgtgagctccgcttccgtgtctgtgcgtgcgtgtgatgagtgctgcaggtgtcatttcgggagctctgctctacatccgcgacgacttcgtttcagtggacaggaacacatggcttcaggaaatgatcgtgagcatggcggtggccggcgcgatcatcggcgcggccatcggcgggtggaccacggaccggttcgggcggcgggcgtcgatcctggtggccgactccctcttcttcgcgggcgcggcggtgatggcgtcggccacgcgccccgcgcagctcgtggtgggccgcgtcttcgtcggcctcggcgtcggcatggcctccatgacctccccgctctacatctccgaggcgtcgcccgccaggatccgcggcgcgctcgtcagcaccaacggcttcctcatcaccggcggccagttcctggcctacctcatcaacctcgccttcaccaaggcgccggggacgtggaggtggatgctcggcgtcgccgcgctccccgccgtcgtccagttcggcctcatgctcgcactgcctgaatccccgcgctggctctacagacaggggagggcggaagaagcagaggcgatcctgcggcggatctactcggcggaggaggtggagcgggagatcgaggagctgaaggagtcggtggcggcggagcgtgggtcgtcggagaagctgagcctggtggcgctggtgcggacggcgacggtgcgccgggggctggtggccggcgtggggctgcaggtgttccagcagctggtgggcatcaacacggtgatgtactacagcccgacgatcgtgcagctggctgggttcgcgtccaaccagacggcgctggcgctgtcgctcgtcacctcgggcctcaacgcgctcggctccgtcgtcagcatctacttcatcgaccgcacggggcggaggaagctgctggtcatcagcctcgtgggcgtcatcctctcgctcggcgtgctcacggccgtgttccacgagaccgcgtcccactccccggccgtgagcgccaccgagaccgctcgcttcgacgcctcgctgacgtgtccgtcctaccgcccgtcgtcgccggccagcggcggggcgtcctgggactgcacccggtgcctca

SEQ ID NO: 24894 - DNA, 1466 bp, Zea mays
  Clone ID: LIB3689-238-F7_FLI
ttctcttcttggtcatgcccttccctcccatcaattcttcaatgctgcgtaatccctactgaaagaggcaccaatcagccattctgcaacttgccttcccgtgcttgcctcactgacatgaactcatcgtctttcttcctctgatccataagatctggccaacaagatcggtggcgcacaggtatcgggtcatcacttggtctctgaattctcaggattggagttgaagaagagcatcatgcttggtgggcagagcgagaccgtcaagtacagggtctttgctggaacatggaacgtgggcggcttggcgccgccggatgacctggacttggaggattggctggacacgaagaacgactcctacgacatctatgttcttgggttccaggagattgtgccgctgaacgcgaggaacgtgcttggccccaagcagaggcgggcggccatgaagtggcagctgctcatcggcgacgcattgaacagcacgaggcatggagctgcaggaatgcatggtcaaggacaggggggcgcgttcaggtgcctcatgagcaagcagatggtcggaatcttcgtgtcggtctggacgaggagcagcctctgccggcacgtccgccaccccggcgtgtgcagcgtcggcgccggcgtcctcggccggctcggcaacaagggcgcggtgtccgtccggttcttgctccacggcacgagcttctgcttcgtctgctgccacctggcctcaggcggcgagaagggcgacgcgctgcgccggaacgccgacgccgcgggcatcctctccaggaccagcttcctcggcttcggcggcgtggcggcagcacccggtgaggtgcccaagaagattcttggccatgaccgcgtggtgttgctcggcgacctcaactaccggatcgccatggacgatgacgaagcacggcagctggtgagggccaggaaatggggcatgctgctggagggcgacgagctgctgctggagctctccagtggccgtcagttccacggctggcacgagggccacgtcaccttcgccccgacctacaagtatcgccgcaactccgaccacctccactggtgcgctgacggcgtcgccgccggccgcgagaagcagcaccgcgcgccggcatggtgcgaccgcatcctctggcgcgggaaggggatgaagcaggtccggtacgagcgctgcggttgctaccggctctccgatcaccgcccggtcagggctttgttccacgccgtgtgcgaactggcggatggctaagctgtaggctagcttgcgtgctttgaatgaaaagcgtttaattaacaaacgagactcttaattttacaaagtgttcaaaaatttcggccagaaatttcacacggaactggttactggttcctgcatcgatgcgctttcaagctggtttgcgcctgattcctatctgctggagaaaattggagcacattttctgttc

SEQ ID NO: 24895 - DNA, 1181 bp, Zea mays
  Clone ID: LIB3689-238-G12_FLI
cagtccaccaccgcttcccgtgcagcgccctccctatacgttcccccatttcctgtgttggcggcgatggcgcggcacttcgtgctcaacaccggcgccaagatcccctccgtggggctcggcacctggcagtctgaccccggcgtcgttggcaacgctgtctacgccgccgtcaaggcgggttaccgacatatcgattgtgccagagtttacggcaacgaaaaggagattggtttggcgctgaagaagctatttgaagagggtgtagtgaagcgagaagatatgtttatcacctctaagctatggaatgatcatcatgctcctgaagatgtgcctgaggcactaaatgacagcctgaatgatttgcagcttgagtacctggatctttatcttatccattggccatttagagtcaagaagggaacaaataccagccctgaaaattttgttacacctgacttccctgctacttggggggcaatggaaaagttatatgatgctggcaaagctcgcgctattggtcaaactaagctccatagcttttgtcagtcaactggtgttcatctaactgcttactcaccactaggttcacctggtacaacttggatgaatggtaatgtccttaaagaaccaataatcatctcaatagctgagaaactcgggaaaacttctgcacaagtggctctgcgctggaacattcagatgggtcacagtgttcttccaaagagcacgaatgaagaaaggataaagcaaaaccttgatgtttatgattggtcaattccagatgacttgcttgcaaagttctctgagattaagcaggctaggctacttagaggcaacttcattgttaatccagagagcgtttacaagacccatgaggagctctgggatggtgaactttaagaaggacgccgttgtccctcctgactcctgagcagggagcaagcagcgttccattagggctcgttagatcatttcacctccaaagttgctcttttgaaatgaaggttcagtgctcggaagctctggtgccatcctgtatcacgaactattgagaaatttgtcggtgattttactttgtgctacgggatgtgctgctgcagtctatcctagtgtcagttgattttttctggtaaaactgtgaccaaataagttaattcgccaggcatcattactattgg

SEQ ID NO: 24896 - DNA, 1723 bp, Zea mays
  Clone ID: LIB3689-241-C5_FLI
caaaacaagaagcagccgtaagcagcagagagcatggcgagatcagggcgggaagcggatcccggagaggaggaacggaagctggtgctgggcaagtacgagctgggccgcctgctggggcagggcaccttcgccaaggtttactacgcgagggacctgagcgccggcgccggcacgggccacagctgcagcgtagccatcaaggtgatcgacaaggcgcggctgcggcgtacggaggggatggtggagcagctgcgccgggagatctccatcatgcggatggtgcggcaccccaacgtggtgggcatccgggaggtgctcgccagccgctcccgcgtcttcgtcgtcatggagtacgcgcgcggcggggagctcttcgccaaggtggcccggggccgcctcgacgaggaccacgcgcgccgctacttccagcagctggtcgccgccgtcggcttctgccaccgccgcggcgtcgcgcaccgggacctcaagcccgagaacctgctgctggacgaggcggggcggctcaaggtcaccgacttcgggctggccgcgctgcccgagcagctgcgccacgacggcctgctccacacgcagtgcggcacccccgcgtacgtcgcgcccgaggtgctcaggaagcgcggctacgacggcgcccgcgccgacctctggtcctgcggcgtcgtgctctacgtcctcctctgcggcttcctcccgttccagcacgacaactacgtcaagttgtaccagaagatcttcaaggccgactaccaggtgccgccctgggtctccggcgacgcgcgccgcctcatcgcgcgcctgctcgtcgtcgaccccgccaagcgcgcctccatcgccgagatcatgtgcacgccgtggttcaggaagggcttcgtgccgcccgtcctttcgcccccggtgacgcccaagaaacagcagctggacgaaggcgctgccctcttcgacaacgacgacgacgacaacagcaacagcaaccactctggcgccacctcccctcggtcgtgcaacgcgttccagctcatctcgtccatgtcctccgggttcgacctgtcggggctgttcgagagcgagcagaagaccgcgaccgtgttcacggcccgcgcgccggcggccaccgtggtggagaagctggagtccgtggcgcgcgccctaggattcgaggtcaccagggggaaaggctggaaggtgaggatggaggccaaggccgagggcacgaacggacggctcgcggccaccgccgaggtgctcgaggtggccgtggacgtgaccgtggtcgagttcgtgcacgacgccggggacgcgctggactttaacaagttctgcgccgtcgacgtccgcccggggctcacggagatcgtctgggcgtggcagggcgacagccccgccgccgccgtcggcaccgcgtgaacaagcgtccccgtctgtcacgtggaagttgtagcaactttgcgtaggagttaaacacggctgcactggcaccagctttttatagcatgtaaagtttcaagttctcgtcgttgcttcgagactgccatggtggctagttcgttgtgtgccatatgctgtacaggaaggaaagagtcgaatcgagccggggagttttcgatcgacttgccaagttttgtacgatcataacctgtattttctggagatgtgtgcatacaaaattttgcccgtgatcaaatttagttttggtccccat

SEQ ID NO: 24897 - DNA, 1674 bp, Zea mays
  Clone ID: LIB3689-247-H9_FLI
tctgtgttcttgggcgtacgcggacacagccccgatccgaatcgtcctcctcgcgagcctcgtcgatcccccactcccctcccctcgcttcaagatgcagatctttgtgaagaccctcaccggcaagactatcaccctcgaggtggagtcttctgacaccattgacaatgtcaaggctaagatccaggacaaggagggcatccctcctgaccagcagcggcttatcttcgccggcaagcagcttgaggacggccgcacacttgctgactacaacatccagaaggagtcaacccttcatttggtgctgcgccttaggggaggcatgcagatctttgtcaagaccttgactggcaagacaatcacccttgaggtggagtcttcagacaccattgataatgtcaaggctaagatccaggacaaggagggcatccctcctgaccagcagcggcttatcttcgccggcaagcagcttgaggacggacgcacacttgctgactacaacatccagaaggagtcaaccctccacttggtgctgcgccttaggggaggcatgcagatctttgtcaagaccttgactggcaagacaatcacccttgaggtggagtcctcagacaccattgacaatgtcaaggcaaagatccaggacaaggagggcatcccacctgaccagcaacgtctcatctttgccggcaagcagttggaggatgggaggacccttgctgactacaacatccagaaggagagcaccctccacttggtgctgcgtcttaggggtggtatgcagatctttgtgaaaacccttactggcaagaccatcactcttgaggtggagtcttcagataccattgacaatgtcaaggccaagatccaggacaaggagggcatcccgccggaccagcagcgtcttatctttgccggcaagcagctggaggatggacgcacccttgcggattacaacattcagaaggagagcaccctccacctggtgctgcgcctcaggggaggaatgcagatcttcgtgaagacattgaccggcaagaccatcaccttggaggttgagagctccgacaccattgataatgtgaaggccaagatccaggacaaggagggtatccccccggaccagcagcggctgatcttcgccggcaagcagctggaggatggtcgcaccttggctgactacaacatccagaaggagagcaccctccatctggtgctccgcctgaggggcggtatgcagatctttgtgaagaccttgactggcaagaccataaccctggaggttgagagctctgacaccatcgacaacgtgaaggctaagatccaggacaaggaggggattcccccagaccagcagcgtctgatcttcgccggcaagcagctggaggatggtcgcacccttgcagactacaatatccagaaggagagcaccctccacctggtgctccgtcttcgcggtggttattaagccatcagtcgttgaagctgctgctgtatctgggttatctagtgtctctgccattgcccatggatggtgctgtctttcaaagtatttgtatggtttgtgtcgtgagtcgtgactgagctggtttcatggaccagttgtgttctcgttacccaaaactatcgtgcgaccgcatatggcttaatcatgaataaatgttgtttgaattt

SEQ ID NO: 24898 - DNA, 1815 bp, Zea mays
  Clone ID: LIB3689-257-H11_FLI
gatctgggaatctgcacggcccggagcctccagcgaccggctccaccaccatctgcgcgcgcgcgcgcgcgcgagggaccggccggcgaacggaggcgccactgagctctgagcgggtgcggccggcatggcgacggcgctggcgcggcggggcgccgcggccctggcgcggtggcgcgggatgtgctcgagctcggcttcggcgccgcggcgcgccgcggcgctgtcctcagaggagctcatgcggatggaacaagactgcagcgcgcataattaccatccaatccccatggtgttttccaaaggagaaggttcacacatagtggaccccgaaggcaacaaatacattgattttctctctgcttattctgcagtcaatcagggtcattgccatccaaaagtcctgagagctttgatagaacaggcagaaaggcttactctcagttctagagctttctacaatgataagttcccaatctttgcggaatatctgacaagcatgtttggatatgacatgatgttgccgatgaatactggtgctgaaggagttgaaactgctatcaagctggctaggaaatggggttatgagaagaaacatataccaaagaatgaggctttgcttgtctcttgctgtgggtgtttccatggccgaactcttggtgtcatttccatgagctgtgacaacgatgcaactcgtggttttggtcctttggttcctggccatcttaaagttgattttggagatattgatgggttaaagaaaatcttcgaagagcttggagatcggatttgtggttttttatttgaacctatccaaggtgaagctggggtagtaatcccaccagatggctatttgaaaggtgtcagagacttgtgttccaaacacaacgttttgatgattgctgatgagatccaaactggcatagctagaactggtaaaatgctggcatgtgactgggaaaacatacggcctgacatggtgattctaggcaaagcactcggtgctggagttgttccagtcagtgcagttcttgcagacagggatgtcatgctgtgtatcagaccaggggaacatggaagtacattcggtgggaatccgttagctagcgctgtggcagttgcatcactgaaagtggtcagagacgaaggtcttgttgaaagggctgcaaagttaggacaggagtttagggaccagttacagaaggtccagcagaaattccctcaaatcctaagagaagtgcgcgggaggggtttgctgaacgcagtggatctaaacaacgacgcgctatctcctgcttctgcatatgacatctgcatcaagttgaaggagagaggcattttagcgaaacccacacatgacactataatccgacttgctcctcccctcacaatcagtcctgaggagcttgcagaagcatccaaggcgcttagtgacgtgctggaacatgacttgccacagctgcagctgcagaagcagataaaaaagccagaatctgaggcagagaagccagtctgtgacagatgcggccgggacttgtacggatgaatgaagcctccgaacagagataacttcattttcgtacgcacccatctcgccccagaagaaataataacagagcagaggatgccagctgcctagctacttgggttacggtaatgttatgcgacttgttgcatcgtataccaagtatatgagctattgcaaccttggtgaatatgtcaaataaatgggcagcattcacatgctcaaatatgggcagcattcacatgcactgtgacttctttgcaacgttttatcaagtatccgaaagttcc

SEQ ID NO: 24899 - DNA, 1478 bp, Zea mays
  Clone ID: LIB3732-012-C11_FLI
atctgtgaccgcctacgacagtgtagtatatatatacactacacagtgtagctagtatacctcgcccactctaaagcgaagcagcaagcgctctgtgaccgactgtgatcacacaccacgcgtccatggtcgtcatgggcaagcacgatgacgatgagaagcagcagcaccagcagatggagatggaggacgtacatgaagtaggagccgtcgaggtgctgccgctggagaatgaggcggaggcggcgctggtgcgcaagatctccggcctggccgccgccatcgcgaagctgccgtcgctgagcccgtcgccggaggtgaacgcgctgttcacggacctggtcacggcctgcatcccgcgcagcaccgtggacgtggagcgcctgggcccggagctgcagcgcatgcgcgcggggctcatccgccgctgcgccgacgccgaggcccagctggaggcgcactactcggacctgctggcggccttggaggacaacccgctggaccacctgccgctcttcccctacttgggcaactacctgctgctgggcgagctggagcacggcctgctggcgcgccacgtcccgggcccgccgcccgcccgcgtcgccttcgtggggtccggcccgctcccgctcagctccctcgtgctcgccgcgcgccacctccccgccgccgccttcgacaactacgacatctgcgcggaggccaacggccgggcgcgccgcctcgtgcgcgccgacgccgcgctcgccgcgcgcatggcgttccgcacctccgacgtggcccacgtcacgcgggacctggccgcctacgacgtcgtcttcctggcggcgctcgtgggcatggcggccgaggagaaggcgcgcgtggtggaccacctcgggaggcacatggcgcctggcgccgccctggtggtgcgcagcgcgcacggcgcgcgcgccttcctgtaccccgtcgtcgaccccgacgagatccgccgcgccggcttcgacgtgctcgccgtgcaccacccggagggggaggtgatcaactccgtcatcgtcgcgcgtaagcccgtgcccgtccccgtcgccggagtggggcacgcgcacgcgcacgcccacgggcacggcgccgtgctcagccggccctgctgcctctgctgcgagatggaggcccggacgcaccagaagatggaggaggtggccatggagcagctgccgtcctaggcaggcaggcacacggcacacaccacaagcatggatgccagttttacatctatctgatcgatctagtaaatagtaatcccctactacgtctatgtgcccactccgcatggatatggtaataatccgcacagggtgcgcctaatttatatccgctagctaagggcatgtacagtagagagacaccaaaacggttctccaagcacaggagacaactaagagactttattgtacaatgaagtgtctataaacgtagtctattaataaatacag

SEQ ID NO: 24900 - DNA, 1391 bp, Zea mays
  Clone ID: LIB3732-012-D10_FLI
gtcttcaccgatcccgatggatatgggcagcggctcgtcacctgtcatcaccgatccgatatcgataagcccaccgctgctgggaggcttgacgtcgaacctgatgccgttctcggtcatgtccggaggctgctcctccagtcctagcatgagcgccagcagcaggcgtaaaatcgaggaggtccttgtcaatggcctgctagacgcgatgaaatcgtcgtcgcctcgcaagaagcacaacctcgccttcggacaggataattcgcccgacgaagatcctgcttacactgcatggctgtcaaaatgcccttctgcgctggcctccttcaagcagatagtagccaacgcacagggcaggaggatcgctgtgttcttggattacgacggcaccctgtcgccgatcgtcgacgatcccgacaaagcgttcatgtcccctgtgatgagagctgctgttagaaatgtcgcgaagtacttccctaccgcgattgtcagcggaaggtcccgtaagaaggtgtttgaatttgtaaaactgacggaactgtactacgctggtagtcacgggatggacatagtgacatctgcagcagcacatgctactgaaaagtgcaaagaagccaatctcttccaacctgcttgcgagtttctccctatgattgatgaggtttccaagtgcctcgtggaggtcgcgagttcaattgaaggtgcaagggtggagaacaacaagttctgtgtatctgtacattaccgcaacgtagcagagaaggactggaaagtggtcgcagggctcgtgaaacaagtcttggaggccttccctcgtctcaaagtaaccaacgggcgaatggttttagaggttcgcccggtgatcgactgggacaagggaaaggctgtcgagttcctgcttcggtcgctcggcctaagcgactccgaagatgtggttccaatctacatcggagacgatcgaacagacgaagacgccttcaaggtactgcgagagcgaagctgtggatacggaatcctagtctcgcaggtgcccaaggacactgaagccttctactcgctgagagacccgtctgaagtgatggggttcctcaattccttggtgagatggaagaagcacccgctgtgacggaactgaaaacacgacgactgattcagaagccgtagagcgactgtacttcgtgcggcggcaattttgtagagtttttggctcaccgggtggctcattctttcatgcgtttttattttttatttttttaactgtcccagtccttcgtcactgagaaataacaagtggttgtcccacaccctcttgcaactgtaatctgtaagcaagaggccctccctgttaggtctatatatattgaataaaaccgggacgcttttgccttgcc

SEQ ID NO: 24901 - DNA, 1917 bp, Zea mays
  Clone ID: LIB3732-029-F9_FLI
cgactgcgccggccgtcggccgtcgctgccgccctattttgaccccatcgccggcgacgataatcgccagtttgtggataagggtcttttaagtcttcatatgaaactatccttttgatatacagctgaaggacaataactatcatggatgctactgcaaattcagatgtgcaaagggctgaggaatttaaacttaaggcgaatgatgccttcaaggcaaacaagttctcgcaggctatagagctttacagtcaagccattgagctgaatagttcaaatgcagtttactgggcaaaccgtgcatttgcacacacaaaattagaggaatacggaagtgctgtgcaggatgctacaaaagccatcgaaattgattctagatattcaaaaggttattatagacgaggcgcagcttatcttgccatgggaaagttcaaggaagccctgaaggattttcagcaggttaaaaaaatctgcccaaatgatccagatgctacaagaaagttgaaagagtgcgagaaagctgtccaaaagatccgttttgaagaagcaatatctgctggggatgatgagaggcggtccgtggcagactctattgactaccatatcatagaagtagagccacattatgcgggaccgagaattgatggggaagaaataacgatagagtttgtcaaagcaatgttggatgaatttaagaagcagaaatgcatacataaaagatatgcttaccagattgtgctaaaaaccttggatttgctgcgatcgatgccttcccttgttgatgtggatgttccaaacggtggacattttacagtttgcggtgatgtgcatggccagtactttgatttgctcaacatatttgacctcaatggccttccatcagaagaaaatccttacctcttcaatggcgattttgtggaccgaggatctttctccgttgaagtcatactcaccctttttgctttcaagtgcctctacccaaaagctatgtaccttgcaagaggaaatcatgaaagcaagagcatgaacaaaatatatggctttgagggggaagtgaggtcaaagctgggtgagaagtttgttgaactttttgctgaagtcttttgttggttacctcttgcccatgtcatcaacaacaaggtctttgtggttcatggagggctatttagtgttgatggggttaagctttcagacattaggtccattgatcgtttttgtgaaccacctgaagaaggtctaatgtgtgaattactatggagtgaccctcagcctcagcttggaagaggtccaagtaaacgtggtgttgctctttcctttggcgcagatgtgactaagaagtttttacaggaaaataacctggatcttattgtccggtctcatgaagtaaaggatgaaggccatgaaattgaacatgatggaaagcttataacagtcttctctgcgcctaattactgtgaccagatgggcaacaagggtgcatttattcgcttcacagctccagaaatgaaaccagatattgttactttctcagctgtgccacatcctgatgtgaagccgatggcatatgcaaataacttcctcaggatgtttcaatgacagaatataacaacattgtttagcaattttaatcagatgagtctgttgtttgtcagctcccaattcacatttcttgctaggtttaagtatatgctcccttgtacaacaaatcaaatgatgcaagggattcaactgtcgatttacttggatggtacatccatttttgtgcacgagttgtgattcttgtaactatccgtaaagtcttagatcattagattttagtttacttgtaaaattgctaaatcgtcatttcctgtcttgcttatcagtgagttacacacgtttagtgcttttatcaaattacatgtgtttcagcggtac

SEQ ID NO: 24902 - DNA, 995 bp, Zea mays
  Clone ID: LIB3732-031-B5_FLI
gaacgttgtgtttatcgtaagtggacgaggacgtgattccctcgacgagtggttttctccatgcgagaagctccgtctagccgcagaacatggctattttatcaggtggagcaaggaagctgcatgggagtcgagctattcgagtccgcggcaagaatggaagcacatcgctgaacctgtcatgcaggtatacaccgagacaacagacggatcttcagtcgagtcgaaggagagcgctctagtgtggcactatttggatgcagaccatgatttcggttccttccaagcgaaggagctaaaggatcatcttgagagggtgctatcaaatgagcccgttgttgtgaagtgtggccattatatcgtagaagtaaagccgcagggagttagcaagggtcgtgctgtcgacaagctgattcaagcactggccaacaacaacgggaaggcacaggatttcctgatgtgcgtcggcaacgacagatctgacgaggacatgttcgaatgcatcaacggtatggcctccaacgatgcctcgtcgcctgcagtaccggaggtgtttgcctgttcggttggccagaagcccagcaaagcaaaatactatgtggacgacaccagcgaagtaatcagattgctcagggatgcaacccgcttctcatcgtcgcagcggagggaggacgtcaacaccagccgcgggcgtgtgaccttcagagacgcactcgattacgtggactaggcaccagcagcaattcttagttactcgaaatgattagctgcggagcttgtaaattccgctgtcttctgtctcccaatggttttcgttctagagaattgtagtgtagccgacatcgacatggatcgtcgtcaccagtacacgaacagcggaaatgtgagttgaagttcgccgtttcgaggctcaggtgatatgtgtaggcaattttttggtagggaatagtaattggtacatttatagaattgtcaattgtttttcttctaccgct

SEQ ID NO: 24903 - DNA, 1126 bp, Zea mays
  Clone ID: LIB3732-032-B8_FLI
cacagtgctccctccccaaagacaaacaggcgagcagcaaacacacacgctcgaaccgagacaagccaatctaataatggggagggctccgtgctgcgagaagatggggctgaagaaggggccatggacgcccgaggaggacaaggtcctggtcgcccacatccagagcttcggccacagcaactggcgcgcgctgcccaagcaagccgggctgctgcggtgcggcaagagctgccggctccggtggatcaactacctgcgcccggacatcaagcgcggcaacttcagcaaggaggaggaggacgccatcatcagcctccacgagcagctcggcaacaggtggtccgccatcgccgccaggctgcccgggcggacggacaacgagatcaagaacgtctggcacacgcacctcaagaagcgcctggatcccaccaagcaggagcagcagcagcagcacgggacgacgccggcggctggcgccggcaagaagcacaggcccgcagcggcggcgaagcgcgggggcggcggagccaggaaggcgacggccaacgccgacgccgtcgtcgtcccggccccggccccggccaccgctgcgccggcgtctcccgaacggtcggcggcctcgtcgtcggtgaccgagtcgtccatgacggagcaggagcaggagcacggcaacacggggagctcgcccgcgttccccaaggaggagagcctcaccacctcctcctcggacgccgaggagttccagttcgacgacagcttctggtccgagacgctgtcgatgccgctggacagcctcgacgacgtcgtccccatggagccctccgacgacgacgcgttcggcgacgtcgacgtggctgccgcctcctcctcgtccgtcggcgccgacggcgacctggactactggctcagagtgttcatggagtccggcgacgcgcacccagaactgccgcagatttagaccgctcgcgcgagaattttcggctcctaattgattcatcgttcttttgtctctatctctctctgcacgtcttgcatcggaggggacggacaaggacagcagcagctgattaacagagaaggaaatcaggcagaaacaacgcgacacgccgttgcaacttggatc

SEQ ID NO: 24904 - DNA, 1987 bp, Zea mays
  Clone ID: LIB3689-215-A11_FLI
ggccgcgcacctactcgtcgccctctcgttttcccgtctccgctttctttatcctgcgggcggagcgggtagggtggggcggtcgttgctctcggatcaagagaaagggaggaaaaaaaaaacagcgctttctttctgtggccggcggttcgcccgtctctcactggctgtgtggccactggccaagcgggacacggaactcgagctccgtttggggattccggatcacttcgaggctaaagggattctgatcatcacttaagctcaagatcatgagttggttaaacaaaatttttaagggttcagtaaacagagtttcaaggggtcactatgatggagactggcatgaaggtcattcatctgatcacaccagagatacttacgatgacagtgataatgaagatatagatcgtgccattgcattatcgctagctgaggaagatcagaataaggggaagtcggtggctattgatactgactataatctggaggaagatgaacaacttgcacgggctctgcaggagagcctgaatgcagagtctcctcctcgacagaatgttcctattgaggatgtgccagtgcctcaatggaatattcctgttgagcgggtgcctcctcgacagtatgttccagcaaatgaaccaaccccacatgtttacccacggggtggatccaggatttgtgctggatgccaaaacccaattggccatggacgtttccttagttgtatggattcagtttggcatcctcaatgcttcagatgttttgcttgcaacaaacccatatcagagtatgagtttgctatgcatgatgatcagccataccacaaatcctgctacaaagagttttttcatccgaaatgcgatgtttgcaacaactttattccaaccaatagagatggcctcattgaataccgagcacatcctttctggatgcagaagtactgtccttcccatgaagatgatggcactcctcggtgctgcagttgtgaacgaatggagccaagggagatcaagtacataacattagatgatgggaggaaactctgcttggaatgtctcaattctgcagtaatggattctccagaatgtcaacatctttacatggatattcaggaattttttgaaggtttgaacatgaaagtagaacagcaaattccattacttttggttgagaggcaggctctgaatgaagccttggaagccgagaaaaatgggcaccacctaccggaaaccagaggtctatgcctttctgaggagcaagttgttagaacgatcttaaaaagaccacagattggaccaggaaacagaatcttagatatgattataggaccatacaagctgtctcggcggtgtgaagtgactgcaatccttatattatatggtctgccaagattacaaactggttccattcttgcccatgagatgatgcatgcatatcttcgtctcaaaggattccgaaaccttagtattgaggttgaagaaggcatctgccaagttttatcccacctgtggttagagtcggaaatcatcgctggttctagtagcaacgttgcatccagttcagaagcatcatcatcttcatcatcctcagctcctacctcttcaaagaagggtgcgaagaccgaattcgagaagaagcttggggcattcatcaagcaccagatcgaaacggattcttccgaggcatacggaggtggttttagagctggctatccggctgttgagcgctatggcttgaaaagaacccttgatcatatgaagttgacagggtctttcccatattaaagcaacagaagtaaaggagggggctttcttccagttgtgaggatacactccacattggaggttttggtttgggttatacatatactgatatgcataccaaacgaggggaattgtctgtaaatcaggagaaccctctgctgcgcggaaacttattgcaaactgtctttttataggaaaacgatacatgcaagttttcagac

SEQ ID NO: 24905 - DNA, 1968 bp, Zea mays
  Clone ID: LIB3689-215-B7_FLI
cccgaaccccagaccaaactgcccccttccgcctcgccgccggcgatcgcctgagatgtcgtggctcgcccgctctctcgccacatccctcaacatccccgacaactccggcgctgacgatgacccggatgcctcccacaccccttctccctccgcgcgcatcccgccgccgccgccgctccccactcaccctccgcattcgggcgcggcggagggcgtcaaggaggaccttaccgagctctccaaaaccctaacgcgccagttctggggcgtcgccaacttcctcgcgccaccgcccggggagacgttgccgtcaccctcgcactctccccaatcagcggggggtcaatccgccgatgcgaggacaccacccgagatcgccgggatccggaacgacttcgctgagatcggtgggaggttcagaagcgggatctcccggatctcaggtcacaaggccgtctctgggttctctaagatggcctctagtttcttcgctcctgatgacggcgaggaggacgagtgggaagaggagcggagacgacagattaggcatgagatgggagaggaggcggtatggcacgaggaggcggagggcgacgaggagtggcatcagtgggaggagagggtaagacttagggtggaggatggcgatacaaggcatgagttggagatggagagagcgagggatgaagaagatgacgaattggaagagcagagagcgaggcatggggatggtggcgaatcaggggagcagacaacaaggcctggtgaggatggcgaactggaggagctgaggataaggcatgaggaggaagtggaggaggaatgggatgtgattggaatcactgaggaggttcttgcattcgccacaaacattgccaggcacccggagacctggctcgatttcccgttgctgcctgatgatgatgagtctgatggaccattctcatattttgatatgtccgatgctcaacaagaacactccttggctattgagcatcttgctcccagattagcggctttgcggattgaactatgcccaatacatatgagtcaagaatgtttttggaaaatttactttgttcttctacatcctagactgaacaaacatgatgctgagcttctatctaccccacagatcgtggaagctagagcaatgcttatgcaacgtttgcaataccagtccaaacttgaaactgagcatctaggtcatcataaggatgaccttggagttcaattacgaggagacaccttgaaagatgctacagaagcattcccattcacgcgatgggaagcagcttctgttatgcccataacagaaattgagattgagaagcatcctatccaagtaactgaagttgcagttgtggacaaatcggtcatcgaagaggagctgcccaagggtcatgctgagacctcaaatgttttgcaagaggcctttgatgatgacatagacgattggttcgaggaggctgatcttgctggccacccaactatccacataggtgacgaggaagacgtgtcttttagtgacttggaagaggatgacgtgaaatgatttatagttgcaattgcaatttgcaaagggagaaatcgacctgtgtattggaaactggacacctctgctgtaaaagaaaatggaggtgaaagttgttcgtagacacctctgctgtgcaagaaaatggagaggtgaaagtttttcgtgaatgggattgggtgtacattgaaaactgagcggtgttgttcgcgaaaagggtgtacattgaaaactgagcggctttgttttgcactcaagctgctagggtgaacgcaatgtgatccactcaagatatgatggggtgctacattttactagctttacagtttgtaatttgattcatactcttgtgtacataagcattcgtgatgttctaaggtcagacaataaagttccatgtgttacaataaaattttttctgttatttggtc

SEQ ID NO: 24906 - DNA, 1409 bp, Zea mays
  Clone ID: LIB3689-215-D8_FLI
cgcggcgcagagaaaaatggcggcttcggctctccacctccaccgccggcgggtgtgaccgtgtgaagcttcagcagaggcagctgcgctcgtggcaacaacatctgtggagagagctttctcagctatgaatatcattaaaactgagttacagaataagacaggagacgaatggcttaaccatcgtatggtgtgttatattgagagggaaatatttacaagcattgatgatgcaagatattgattattttcaaggcatgagaacccgcagggtgaatctacctcgtactagtggttctggagcaagaagcactgatgttgatgttgacatgatacatttggaaggagctacatcataacttgatgctctggaaccttacatgagcaagaggacagttgaacttcactggggtaagcaccatcaagattacgtggatgacttgaataagcagctggctaccagccctctgtatggatacacgctggaggatctgataaaagaagcctacaacaatggcaatccattaccagaatataacaatgcagcacaggtctggaacaatcacttcttctgggaatcaatgcaactagaaggtggtggcttacctgagggaggtgtgctgcagcagattgaaaaggattttggctcgtttactaattttagggaagagtttatccgctcagccttacaactattggggtctggttgggtttggcttgtcttgaagagaaatgagacaaagctttcagtggttcatacacaaaatgctatcttcccacttgcttttggtgatatcatatgtttactagtctccttttttcccttcatgtgttttctacaatgtttagaatacaaactttgcaatgacatcccatattttctaattgcagtcaatcatcaatctagacttatgagagcatgcttactacttagactacaaggcatcctttggatacgtcgggtcaaatcctgctggaggaaccagagacatgcttatcactcgaatgccatacacgcaaagataagctgcatgcttggttttcaccactgcccttggatattgctacagggaaaccactagtcagcatccaatctgaagatgtgcagcaatgcagctttagaagctctgggagctggtaggtagcgatccaacttgggcttcgaagccatggcgctttcgctagatggctatgcccgtggtgttgctggaataatcttggttctgtgtttccatgacttccatcatgctagtgttatgtgtatctactggttaaggaatcctagtagttttgggttgtaggcaaataatttgcttttattgtcaaacactgcaagtagaggggggggggggggttagaaaggaaaaagaaaacttgagtaattgaatgcaaggctataggcacctgat

SEQ ID NO: 24907 - DNA, 1017 bp, Zea mays
  Clone ID: LIB3689-215-H6_FLI
gcgcaatatagcatcctgcatccaatccacagttggtgcggctactagctagctagtctgctccacgctgcagggcttttagcttcatggccgggctaagcgttctcctggagaaccacagcaagagctacaccgggaaggcggcggcggcgcagatcatcagcaaggccaccctcgtgacgacgacccacggccccaaccaccagcaccagcagaaggtccctgtctctgcggcggctgcgggctccttcctgcagcgctgctgcctgtgccacaaagagcttgccgagggcatggacatctacatgtacaaaggcgaccgggcgttctgcagcgaggagtgccggtgccggcagatcttcatggacgaggacgccagcagcagctgctgcggcaacggcaacggcgcgggcgccgccgccgccaccgtgcgcggcaggcggcgagtcaagacaagacaaggatgggaacgtgaatgggagacgtagcttagctggtgcaccagatgaccagatcttcttcatggaaacatggatgggagacggagacaagacaaggatgaagatgatgagcacagtgtggaagtgtctgccagctcatcccccgtggggcccgtcgccgtcgcatgcgcagcacactagtagtacgtgcgtggcatcttgctggacccactggataagatggccgcacgacttggagccgctctttgggccccacctcatgaattggatcaggatctgaccgagtagttagcgggccgcatctttgcttcttttccttttttttgtcacgtcaaatccactccccttgaaatgcagattacctcacgcacgcaaaccttaaccgcattcgtcaacgcaacggtggatcactgagcagtcagcggagttgatcccgtatgggcgcgcggcggtatctgctggaaatgattttgtttttttcttccacttattgtatccggttctgtattatttctatattgtgcgacaatgatacagttgctgtactccagtcctc

SEQ ID NO: 24908 - DNA, 3563 bp, Zea mays
  Clone ID: LIB3689-215-H9_FLI
gcagtgatgatcaagctcaacataagatggaaaagcttagcaagatactgaaggatactagcgttgcaagtgatctccaagctgctggtttgaaggttataagttgcattgttcaaagagatgaagctcgcatgccaatgcgccacacattcctctggttggatgacaagagttgttatgaagaagagcagattctccggcatgtggagcctcccctctctacacttcttgaattggataagttgaaggtgaaaggatacaatgaaatgaagtatactccttcgcgtgaccgccaatggcatatctacacactaagaaatactgaaaaccccaaaatgttgcatagggtgtttttccgaactattgtcaggcaacccaatgcaggcaacaagtttacatcggctcagatcagcgacgctgaagtaggatgtcccgaagaatctctttcatttacatcaaatagcatcttaagatcattgatgactgctattgaagaattagagcttcatgcaattaggacaggtcattctcacatgtatttgtgcatactgaaagagcaaaagcttcttgacctcattccattttcagggagtacaattgttgatgttggccaagatgaagctaccgcttgttcacttttaaaatcaatggctttgaagatacatgagcttgttggtgcaaggatgcatcatctgtctgtatgccagtgggaggtgaaactcaagttggactgtgatggccctgcaagtggtacctggagagttgtaactacaaatgttactggtcacacctgcaccattgatatataccgagaagtggaggaaatagaatcgcagaagttagtgtaccattcagccacttcgtcagctggaccattgcatggtgttgcactgaataatccatatcaacctttgagtgtgattgatctaaagcgctgctctgctaggaacaacagaacaacatattgctatgattttccgctggcctttgaaactgcactgcagaagtcatggcagtccaatggctctactgtttctgaaggcaatgaaaatagtaaatcctacgtgaaggcaactgagctagtgtttgctgaaaaacatgggtcctggggcactcctataattccgatggaacgccctgctgggctcaacgacattggtatggtcgcttggatcatggagatgtcaacacctgaatttcccaatggcaggcagattattgttgtagcaaatgatatcactttcagagctggatcatttggcccaagggaagatgcattttttgaaactgtcactaacctggcttgcgaaaggaaacttcctcttatatacttggcagcaaactctggtgctaggattggcatagctgatgaagtaaaatcttgcttccgtgttggatggtctgacgaaggcagtcctgaacgagggtttcagtacatctatctgactgaagaagactatgctcgcattagctcttctgttatagcacataagctggagctagatagtggtgaaattaggtggattattgactctgttgtgggcaaggaggatgggcttggtgtcgagaacatacatggaagtgctgctattgccagtgcttattctagggcatatgaggagacatttacacttacatttgtgactgggcggactgtaggaataggagcttatcttgctcgacttggtatacggtgcatacagcgtcttgaccagcctattattttaacagggttttctgccctgaacaagctccttgggcgggaagtgtacagctcccacatgcagcttggtggtcctaagatcatggcgaccaatggtgttgtccacctcactgttccagatgaccttgaaggtgtttccaatatattgaggtggctcagctatgttcctgcaaacattggtggacctcttcctattaccaaacctctggaccctccagacagacctgttgcttacatccctgagaacacatgcgatccacgtgcagctatctgtggtgtagatgacagccaagggaaatggttgggtggtatgtttgacaaagacagctttgtggagacatttgaaggatgggcaaaaacagtggttactggcagagcaaagcttggaggaattcctgtgggcgtcatagctgtggagacacagaccatgatgcagatcatccctgctgatccaggtcagcttgattcccatgagcgatctgtccctcgtgctggacaagtgtggttcccagattctgcaaccaagaccgctcaggcattattagacttcaaccgtgaaggattgcctctgttcatcctggctaattggagaggcttctctggtggacaaagagatctctttgaaggaattcttcaggctgggtcaacaattgtcgagaaccttaggacatataatcagcctgcttttgtgtacattcctatggctggagagcttcgtggaggagcttgggttgtggtcgatagcaaaataaatccagaccgcattgagtgttatgctgaaaggactgccaaaggtaatgttctcgaacctcaagggttaattgaaatcaagttcaggtcagaggaactccaagactgtatgggtaggcttgacccagagttgataaatctgaaagcaaaactccaagatgtaaatcatggaaatggaagtctaccagacatagaagggattcggaagagtatagaagcacgtacgaaacagttgctgcctttatatacccagattgcaatacggtttgctgaattgcatgatacttccctaagaatggcagctaaaggtgtgattaagaaagttgtagactgggaagaatcacgctcgttcttctataaaaggctacggaggaggatcgcagaagatgttcttgcaaaagaaataaggcagatagtcggtgataaatttacgcaccaattagcaatggagctcatcaaggaatggtaccttgcttctcaggccacaacaggaagcactggatgggatgacgatgatgcttttgttgcctggaaggacagtcctgaaaactacaaggggcatatccaaaagcttagggctcaaaaagtgtctcattcgctctctgatcttgctgactccagttcagatctgcaagcattctcgcagggtctttctacgctattagataagatggatccctctcagagagcgaagtttgttcaggaagtcaagaaggtccttgattgatgataccaacacatccaacacaatgtgtgcatgtcacatctttttgttctagtacatacatagaaggatattgcttggtcttgattgatcatgtctgatttaagtcgactattatttcttggaattttcttttggacctggtgctatggttgatggatgtatattggatatgtgcgttctgccaggtgtaagcacaaaggtttagacagaccgagagcaagagcgagtgaacctgttctggttttgcagtggttcagtaaggcagaaagttgttaaaccgtagttctgagatgtattaccagtggcgccatgctgtacttttagggtgtataatgcggatacaaataaacaatttagcggttc

SEQ ID NO: 24909 - DNA, 1905 bp, Zea mays
  Clone ID: LIB3689-216-C7_FLI
ggaaaatggctccgcttctcgctgctgccatgaaccacgctgcagcccatcctggccttaggagccacctagtaggacccaacaatgagagtttctcacggcaccacctgccgtcttcttctccacagagcagcaagcgaaggtgtaaccttagctttactacacgatctgcaagagtaggcagccaaaatggagtccaaatgttgagcccctcggaaatcccacaaagggactggttcccctctgacttcaccttcggtgccgccacttcagcgtaccaaattgaaggtgcttggaatgaagatggaaagggggaaagcaactgggatcacttctgccacaatcatccggaaaggatactggacgggagcaattcagacattggagcgaattcgtaccatatgtacaaaacggacgtcagattgctcaaggaaatgggcatggacgcatataggttctctatctcttggcccagaatactgccgaagggaaccaaagaaggaggtattaacccggatggcatcaagtactacagaaacctcatcaacttgttgctagaaaacggcatagagccatatgtaacaattttccactgggatgtacctcaagcactagaagagaagtacggcggcttcctagataagagtcataagagcattgtagaagattacacatactttgctaaggtgtgctttgataacttcggcgacaaggtgaagaattggttgacctttaatgagccccagacatttacttccttttcctacggaactggggtctttgccccaggtcggtgctcacctggactagactgtgcctacccaactgggaattcactcgtcgagccttacactgctggccataacattctcctagcccacgctgaggctgttgatctttacaacaagcattacaagcgcgacgacacccgcatagggcttgcgtttgacgtaatgggtcgtgtgccatacggaacatcgtttctggataaacaggccgaagaaaggtcctgggacatcaacctaggatggttcttagagccagtggttcgtggtgactaccccttctccatgagatcattggctagggaacgactacccttcttcaaggacgagcagaaggagaagctcgccggttcctataacatgttggggttaaactactacacctcacggttctccaaaaacatcgatatctcaccaaactactcacctgtgctcaacactgacgacgcctacgccagtcaagaagttaacgggcctgacgggaagcccattggtcctcctatgggaaatccatggatctacatgtaccctgagggcttgaaggatctccttatgatcatgaagaacaaatacggaaacccacctatctacatcacggagaacggaatcggggatgttgataccaaggagacacctctacccatggaggatgccttaaatgactacaaaaggctagattacatccagcgccacatcgctactcttaaggaatcaatagacttgggatcaaatgtgcaaggctacttcgcttggtctctgctggacaactttgaatggttcgccggcttcaccgaacgttatggcattgtctacgtcgaccgcaacaataactgcacgcgctacatgaaggagtctgccaagtggttgaaacagttcaacgccgcgaagaagcccagcaagaagattcttacgccagcttagaaatcgggggcctcatgatgtgggtgcagcccataaaaaactggtgtgtggtttcgaaccgaaaattttctgtttttttccgccacgagaggttctggaggcatactctccagcaccgtggctaataacgcattgttccaattcagtctggccttgtcatgcatgcaataaataaagtgatgggtttccctgtttcaat

SEQ ID NO: 24910 - DNA, 1740 bp, Zea mays
  Clone ID: LIB3689-216-D2_FLI
ccaccacagagagcagcagcagactcgcaagggggtagggtagggttgtgtactactctgcgccgtgcggacggcggacggccaaggagatggatcgcctgcccgagtcgacccggagcatgaggaagtacgcgtcggaggccggcggcctgcgcgcggcgcggcagggcccccacggccggtcgctgacggcgcgcacggcgcacagcatgtccacgacggcgctgcgcaccaagtccaagtcggccgcgtcgctgcttcgcagggtgcccttcgcgccgctccgccccgtcctcgccaacctgcaggaggtgttcctcggcaccaagctcgccgtgctattccccgccgtgccgctcgccatcgccgcccagtgcgcgcacttcggccaggtgtgggtgttttcgctcagcctactcggcctcatccccctcgccgagcgtgtcagcttcctcaccgagcagatcgcgatatacaccggccccaccgtgggcggcctcctcaacgcgacgtgcggcaacgccacggagctcatcatcgcgctcttcgcgctcatggggggccagatcgaggtcgtcaagtgctccctcctcggctccgtcctctccaacctgctgctcgtgctcggcacgtccctcttctgcggcggcgtcgtcaacctcggctccgaccagccgtacgacaggacccaagcggacgtcagcacgggcctcctcatcctcggcgtgctgtgccagtcgctgccgctcatgctgcgctacgcggtgggcgccggcgagcactccgtcgccgcggccaccacggtgctcgacctctcccgcgcctgcagcgtcgtcatgctgctcgcctacgtcgcctacctcttcttccagctcaagacgcacgcgcagctgttcgagccgcaggaggtggacgacggctgcgaggcggaagaggacgagcaggccgtcatcggcttcgccagcggcttcttctggcttgccttcaacaccgtgctcatcgccatcctgtccgagtacgtggtcggcaccatcgagcctacctccaaatcctggggtttgtccgtcagcttcatcagcatcatacttctacccatcgtggggaacgccgcggagcacgccggagcaatcatttttgctctcaagaacaagctggacattaccctcggagtagcgttggggtcggcgacccagatctccatgtttgtggtgccgctgagtgtcattgtagcttggatcgcgggtattcaaatggatcttgacttcaagctcatagagaccggctctctcttcgtctcagtaatagtgacagcattcaccctccaggatggttcgtcacactacctcaaggggatccttctgctgctgtgctacattgtgatcggtgcatgcttctttgttacgaggcaacctgcaagtaacaacaatggcgctgggctgtcgctgccaactggcactttgagtgcgcaagctgcatgatggttcaagggtcctgcctgagcctgaacaaatgagcatccaaggcagcaacgcagttgtgagtcagaaacaatgccgtgcaaaggttgatgctttcagaagcggtgaaatctcagccggtggctcagtgctatgggagaaatgaaggctagctgctgttgcaataagggtagcgaatatgcatccggtctatgtatatgatgctgtgttgtttcatttattatacagcttaataagatatatgcagagggtggatttgtat

SEQ ID NO: 24911 - DNA, 1973 bp, Zea mays
  Clone ID: LIB3689-216-G5_FLI
gccgccttctctctctctctctctctaacccactgccagccacctctgcgaccgtcgcgaccactcgccaagtaaattttcttccgcccacctgactacgcctcgacctcggcctcggcgccgcctccgtccgccggacgcggcagccatggcgccagcggtggggctcaagcgctccgccacgcagaccatcactctgccgccgcccgacacgcggctggctgtgcgcgatgtcatgcgctccacgatcccgtcgcagcccgccgtggcgccggcgtccacggagaggcaggcgcccgccgcggcgttgcaggggttcctgtgcctggaggaggtggacgggaggcggtggagctacgtggtggacggcggggccgcgaaggggaggagcagcggcggggccgtctccgctggggccgccgtcagggccgtgccgctgcagtcgccgcttccgcctgccgaggaaataatggcattcataagatcatatgttgtgcctgaagggtttccagacagtgttactccttcatatgtaccttacatgacctggagggctctgaagcatttctttggtggagcgatgggggtgtttacgacaagaaccttgctgagttctgttggagtctctcaaagcaaggtaacaccaggtgccattgctatcaactggatcctcaaggatggtgctgggcgtgtcgggaaaatgctttttgcacgtcaaggaaagaagtttgactatgacctaaagcagttgcggttttctagtgatctcttgttggaaataggagctgggatagaattaactactgctgcattccctcagtttttcttgcctatggcttgcgtagccaatgttgtaaagaacgtcgctgctgttacgtcaacttcaactcgcactccaatctataaggcctacgctagaggagaaaatattggagatgtcactgctaaaggcgaatctgttgggaacattgcagatctgctcggtactggtttgagtatctttatctcaaaaaggaatccctcactggtgacttcgtttgccttcctttcctgtggatatctcctgagttcatatcaagaggtgaggtctgttgtgctgaataccctaaacagggcaaggtttaccgtcgcagtggattccttcattaaaactggtcacattccctccttgaaggaaggaaactcacaggagacgatatttaatccaccttggcggcatgagccagtcgcaataggttcaaggtttggagaagcatttcaagagccagcttcatttcttgccatacgacctctgcttgaggatgagagatacatggtaacatataacccaacaaaggataaagtatatgctttgcttaaggaccaggcaaaatcagacgacattatcaaagctgctttccatgctcatgtgctattgcattttattaatgcatcacatgctcggaggctgaagcagaagcagaagcaggcaaaccctgaccgatcagagtatctgtactctagaaacatggatttcctggcacacatcgctgaatcttgcaaaatcgtttcctcatcatatggaacattcaagaagaaagcaagggaacagggttggataatgtcagaatctttgctcaaccctggcaaggctcgattatgtgcagcaaaaccacaatgaatgtactgtttcagtttagtatcgatgagatgataccaatctcatgtttgtaagaccaacttttctaacgagacgggatgctaagttcttaggagctgaactaacatgttggtgcctagcactaggcgtgaaccttcgatctgaagcttgccaaattccaggaagaggaagagttttacgatttgtaagttccatctcttttgtgtctaggcgttgtagggtgcacttctagtttctgatcgtttttgtgtttgaaattatcggcatataaacaggaagaatgcctgaacatgtaataaaacatgcagtggat

SEQ ID NO: 24912 - DNA, 1196 bp, Zea mays; identical to SEQ ID NO: 24860
  Clone ID: LIB3689-216-G9_FLI

SEQ ID NO: 24913 - DNA, 1341 bp, Zea mays
  Clone ID: LIB3689-217-C11_FLI
gaatttctttggtttttttgtttgtttgttttggttcacgtcgtgttcagtgttcaatgtgaccgatcaggacgggagtaagcttcataacagggaggtcattgaccatattcagaaatgcctggaatcagacggctaccttgttcctccggcgaacggttatgcgctgccggaagaccagttcacctccattgagctgacgggcgcggaccgcccgggcctcctctcagaggtgtgcgccgtgctcgccaccctgagctgcaacatcgtgaaggccgaggtgtggacgcacgacgggcgcaccgccgccgtgatccaggtcaccgacgaggccaccgggcgcgccgtccacgacgcgggccggctgtccagggtgcaggagcttctccgcgacgtgatgcggggcgacggcacgtgcaaccacggcggcacgggaatctccgcggagaggcgactgcatacgctgatgctggacagcgtcggcggcggcggtgccgaggaggctggtggcggcggtgacgagagcggtggatgtggcgtggcgaggcccaaggtcgtggtgatggactgcgcggagaggcggtacacggtggtgatcctgcggtgcagggaccggccgaagctgctgttcgacacgctgtgcgcgctcgccgacctgcagtacgtcgtgttccacggcacggtcgacgccgagggagccagcaaggacaaggaggcctaccaagagtactacatccggcacgtcgacggccacccggtgcgctccgacgccgagcgggcccgcctcgtccggtgcctagaggccgccgtcgagaggcgcgcgtccaacgggctggagctagaggtgtggacggaggacagggtggggctgctgtcggagatcacgcgcgtgttccgggagaacagcctctccatcatccgggcggcgatcacgaccagggacggcaaggccgaggacacgttctacgtgtcggacgcgtacggcaaccccgtcgacggcaggaccatggacgcggtgggggagcagctcgggcacgccgtgctgagggtgaagcgcggcggccacgacgcgcccgtcaagcacgaggccgagggcggcgcggtgtccgtccttggcagcctgctcaagagctcgttccagggcctgagactcatcagatcctactcgtaagccgtaatcgaagaacataataactccgattagttataaagccctgggccttgtacatatataaaatctcacgtaggttaggaaatagtgaagcagcacggcattgtaaatatcagaccagtcgcatggtaaatatcataccgttacaagtgcataaatctcattacatt

SEQ ID NO: 24914 - DNA, 2515 bp, Zea mays
  Clone ID: LIB3689-217-E10_FLI
ccggtcctcatcacagtccgttcctcccccgctccctctcctccacctccggccctccgccattcccattcacaaagcacgctccgctttccttttgtttatttactcttcctccctccgcatcctcctcgcgtcgcattcccccgtttccgcccatgcgtgtccgcctcctcgcatccgccgtcgtctcgcacctcccccgcgccccaatctggtccgggcggagttagggatgaggacacaaggggaggggcatgtggaggaggccacggggttcgaggtgggcatcgtggtgcccaggctctcccgcgccgccgcggcgggggccaccgacaactgcgtggcgcgtctggtgcgggagctcgagggcgccgggctgctcgtcgagcgcgtccgcggcgtctccgctgagttcatcaagctagccgcaccaatggggaccctggggagagctgctgctgagatgcatatgaagaagctaacctacatcgggatggagcttcagtttcaatcggaccaggttgcagcattcgttaggcagacagacggttccctgttcagctggagagaacgctattcctgcttccgctacttgatatatggcattgtgaacaagacaaactctgaagtagtccttaaatttgatgataaggagttccattggaagcaaagtgagtccttattaacaaggctggaagctgaaggagttgtaaagctagtattccctttgcatgatgaaattaaaaggaagcaactcctgagaaattgggcgcttaattggcttgacttcacatggcagcctatcgatgagatttactcctattttggaacaaagattgcaacatactttgcgttcctaggaatgtatgcgcgatggcttttcttcccagctgtttttggactggcaactcaactcatagattttggatcattgcagtggttggttcttcctggtttctttatctttgttatttcttgggctgtcctctttctgcaattttggaaacggaagaattcagcacttcttgcaagatggggtattcattgttcactatctgaatacaaaaacctggacaacgtcagcttcttgagtgattctcttactgttgaggaaaaggagtttggtgttgtgtctgtggttgtggagaaaagaaagtttcaaaggaacgaatggttcggtgtcctccttagaataaggaacaatgctatcattgtgctggctatcatttgtcttcagctgccatttgagttggcctatgctcatctatatgaaattgcagaaactgaggttatgaggtatttgttaactgcagtatatcttgttgcaattcaatattacaccagaattggtggcaaggtgtctgttaatttgataaagtatgaaaacaaccaaggagaagagtctagttccgctagtttagtttataaggcctttggcctttactttatgcagtcatatattgggttattttaccatgcttctttgcatcgtgatatactggccctccggcgagtcctcatccagcgtctcattgtgtaccaggtattagaaaatctaattgagaattccattccttacctcaagtacagttacaaaaagtacatagctgttcacaagaaaaagcgtgggaaagaatcgacagtgggtaggtcagtccggttatcaacaagagtggagaaagagtatttaaaaccctcttatactgcaagcattggagcagaactcgaagatggtttatttgatgactttctggagctgactcttcagtttggaatgatcatgatgtttgcctgtgcatttccattgattttctgctttgcagctctgaacaatgttactgaactcagagcagacgcattgaagttgttagtcatgttgaaaagacctgttccccgtgctgcagctacaattggagcatggttgaacatattccagttcttggttgtgatggcaatatgcaccaactgcttgcttctcgtttgcctgtatgacgtggaggggaaatggaggattgagccaggactagcagcaatcctcataatggagcatgctcttcttttaatcaagtttggtttctcccactttgtgcctgaggagcctgcgtgggtgagagcaaatcgtgtgcgatacgtagctcaagcacaaaacgtctgctccaaacaactcttgaggagcatttcaaaatttcaaggaaaactggattgagaaccaggatgtacaatttagaagtcatcgctggttttgtagtttaggtagagcggttttgtatagtacaaagttgtacagatcatctaaccgatgtagatattagcttatcgccacctatcgtaccagtaaattggtacaggagaatgctctcaagtgttagactgagtttttttcctcttccattttaatgatctgtttaattgaacggaaactcagacatggtacaccatgtaatgtgctgtggttgatttcgaagtcaccctagccgacaggtattactggagaatatgcactgctcttcattac

SEQ ID NO: 24915 - DNA, 1483 bp, Zea mays
  Clone ID: LIB3689-218-B4_FLI
gattcaagtcagcggtttttagggttcgagatctcggcatcgtgtcgcggaagccatggcggtgagcattctttgctttcctattgattgctcatctcctcgagcttgtgtgccgtgccattaccgatccggggcacctgctcgccgtttttactaattcgttctcggagccggagagcttgagagctggttttcgacttgcggattatgctccagtgatagccgcatctccccagcctgtcatggtagcaaagaaacatggggtaactgttggtaggaagcgaaaggggaaactggggcgtctgtggaactgggaaactgacgcgcgggatgctctttgacaagcatgcttagtaccgtgaaggtgagcaatgtatcactgaaagcagcacaacgtgatataaaggaattcttttccttttctggtgacattgtgcatgttgaaatgcagagtttcgatgagctttctcaagttgcctacattacttttaaagacaaacaaggagcagagacggcaatgcttctcacgggggccaccatagttgatatggctgtaatcgtcacaccagcaaatgattatgagctaccatcttctgttttagctgctcttgagcccaaagacacaaaaccttctgcccttcaaaaggccgaggacattgttgggaccatgctggcaaagggatttatcctcggtagggatgcactggacaaagcgaaagctttggatgagaagcatcagctgacgtcgactgccacagctagagtatcttccttcgacaagagaatcggtctaagtgagaagatcagtgttggcacttcagttgtaaacgataaagtgaaggaaatggatcagaaataccaagtctctgagaagacaaagtcagcactggcagctgctgaacatagtgtctcgactgctggatctgctatcatgaagaacaggtatgtgctaaccggagctgcatgggtaactggtgctttcagcaaggtcaccagtgcagccaacgaggccggtgcaaaggctaaggaaaaaatagcagtcgagcaggagcacaagaatgctgagggtggacctgcacaagcgaacatctcagagacccatgaagcgcacaggggtttggacggcggattctcaaggctacatgactctgaaacccctgaagatatccccatctctactgcgagtgtcccagctgttacggatgaggagcccagcaaggcttctccaccagctggtgttcctgaaaagccagaagctgcgcacgaattggtactataattgatgcggttttgcttcatacatgcatgtaaatagacatgaaatgggatagccctggaactcattctgtggtcttgtggttggcatcttcagattgaaaacctctttgaaggttgaaagttattgggatctaaaggagtttgcaatttgtacctggtctttttgatcaattagtaatcagtattacccggcagtggggaaatg

SEQ ID NO: 24916 - DNA, 876 bp, Zea mays
  Clone ID: LIB3689-218-B7_FLI
gcttttgcgtttgcacaggccactccaccggttctcctattcttcctagcacaaaggggaggaagtaaagccttcccctcgccggagatgctgccgtcggcgaccggatagcctagaaggtgagcgggcgtggaaggagaaatccgggaagcgatgagctttagcgccgcaagagtctcggagcatggcggcgagttcgaggaggcaagggggatgccggcagaggtgagctgggagatgctcgacaagtcgcggttttttgtactcggcgccgcgctcttctctggcgtctccgcggcgctatatccggccgtcgtcctcaagacgcacctccaggttgctgcccccgcacaggccgcggcctcggcggcagcggcggcgattctccggcgcgacggtccccgagggttctaccgtggcttcggtgcgtccctcgcgggcacggtgcccgcgcgcgctctctatatggcggcgctcgaggccaccaagagcgtcgtgggctccgccgccctccgcctcggcgtcgcggaaccggccgcctcggctgccgcctcggccgcgggcggcgtctccgctgccgtagccgcgcaggtcgtctggaccccggtggacgtcgtcagccagcgtctcatgcttcagacggcgcccctcgctgccgcccgctaccgcggcggtaccgacgcgttccggaagatcctactcgcggacggcgtgcgcggcctgtaccgcggcttcggcatctcggtgctgacctacgcgccctccagtgccgcgtggtgggcctcctacgtgaccgcgcagcggctcctctggcgcgccgtcggccccgcggcgcacgacagccgcggcgccgcgatagccctgcagggtgcgagc

SEQ ID NO: 24917 - DNA, 1540 bp, Zea mays
  Clone ID: LIB3689-218-C5_FLI
catcgcctcgccaggggattactggtgggcagcgctcgtgcttgttgtgcagccggtgtgcgtctgctcgcggcctgcggcgatggggcaggacctcgtcgagatccacccgcgcgagctccagttcacatttgaggtgaagaaacaaagttcatgtgttgtctgcctaaccaacaagtccaacgaatatgttgcttttaaggttaaaacgacatcccctaaaagatactgtgttcgaccaaataccggggttatccttccgaggaaaacatgtgaattcacagttaccatgcaagcgctccggactgctccaccagacatgcaattaaaggacaagtttttagtacagaccacagttgttccttatggcacatctgatgaagaactcgttcctgccgttttctccaaagaaactggcagatacatcgaggaaagcaaattgagagttgttcttgttagttcataccaatccctcgaagagcaacccactaatggaattcatgacactgagccagctgttgaagttcctttactgaaagagatgccaaatttagggagcgaagtaccagatgttgcaaaagaaattcctgcccctctggtacaaggtccagcaattgtgaccggaataccttcacctgtcaaagaggttccaggcctgagagaaattcctgtgccactgaacgaagcaccaactttattggcagaatttccttcccctcaaaaagatccctctgctattacagttgaacatgcctctaatgttacaattgagcatgcccctgctatttccattgaatccccacctttgaaacaaagtgttccagtttttaaggaatctcctctgaaacaaagcgttgcagtttttaaggaatctcctcctttgaaacaaagcatttcagtttttaaggaatctcctccactggaggaaactactcctaaagaagctgttatgctaagtgaccgagggcttttcaatgtgcagaatcatcaattatcccatgtaacagaagatgttcagaatatgaaatcaaagctcaacaatcttgaatcaaaattggaagaggctgaaaagatgataataaggctaagagaagagagcagaaataccacccaggagcgggatgagctacagcaagaaatggtattcctaagaaagaagggaaccgcaaggagtcaaatgggtttccccctgctctttgtggtgtacgtggcgcttcttggtacctgtatcggttacctgctccgcatatgagttccaaacttcaaaaaagttcagcagatgggatatgcttcgtatgtgggcaagacaattgaacggcagttgcactccaaaatgttgaggggtgaatttattagcattattagttcggaacttcatatggttttgcacataacagcagtgccaaactaccatctgcctgtatgtttagaacagttactttttttcgcgttttatagaacccacccaaaagatgtctgctgcctcgtagactaacctgggattcttcttccatctacctaagatttttttttacacttt

SEQ ID NO: 24918 - DNA, 1535 bp, Zea mays
  Clone ID: LIB3689-218-D2_FLI
cccagtccccactactgctactgcgagacagcgcagcacaggctgccgcccgctggccgctgcgagcagagagaatccaagaacgcgcaagagccccccctcgtcaccgccgtccatgggcggcgctgcgggcgaggcgatgtgggccgctgttgtggcggcgacggtggtcttcttggccgtcgaggtttcgggtgccgcgtcggcgttgccacggttcgcggaggcgcctgagtaccggaacggggaagggtgtccggctgcggcggcgggggtgtgcgacccgggcttggtgcacatcgccatgacgctcgacgcgcactacctgcggggctccatggcggcggtgtactcgctgctcaagcacgcgtcctgcccggagtccatcttcttccacttcttggccgcggaggccggggcagtggacggggcggacccggagccggagctgctgcggcgcgcggtggcggcgtcgttcccgtcgctgcggttcgagatctacccgttccgcgccgaggccgtggccgggctcatctcggcgtccgtgcgcgccgcgctcgaggcgccgctcaactacgcgcggaaccacctagcggacctgctcccgcgctgcgtgccgcgggcgatatacctcgactccgacgtgctcgccgccgacgacgtgaggcggctctgggagacgcgcctccccgccgccgccgtggtggcggcgcccgagtactgccacgccaacttctcccgctacttcacgccagcgttctggtcagacccggtgctcggggcccgcgtcttcgccgggcgccgccggccgccgtgctacttcaacaccggcgtcatggtcatcgacctccgccgctggcgcgccggcaattaccgccaacgcatcgagcgctggatggaaatccagaagcagaagcgcatctacgagctgggctccctgcccccgttcttgctcgtcttcgccggtgaggtcgaggccgtcgaccaccgatggaaccagcacggcctcggcggcaacaacgtccacggtagctgccgcccgctccacgctgggcccgtcagcctcatgcactggtcgggcaagggcaagccctgggaccgcctcgacgccggcaggccgtgcccgctcgaccacacctggaagtcgtacgacctctacatccccggcgactctggaggcgccgcctcgccggcgtccgggccggcattgtccgcatccgtgttctcttggtagagagatagcttctagttccattgtcttgctgtggctgttgccgccgctgctatgatctagctgccgctcgtggtgggctgtacagggcggcgttgggagcggcggtggcgacatgacaggggaaatcaggaatgagttgatagagaagggggagcctttgccctcgggggtagaattcagataagttattggggagagattttgattctttttggtcgggctggtgattcttgggttcccaattctctcgattggatgttgtaaagacttggaattttgttcaattattgatcattctttc

SEQ ID NO: 24919 - DNA, 950 bp, Zea mays
  Clone ID: LIB3689-218-D4_FLI
cgacgcattgcactagctagaccttgggctcgcaaacctcacacacccttccgcttaacctgcagcccttcggtcatcatcagcactcagcagtagcataggcaccaaggtagcgacccccgacacaatgcagtacggcgcggcggcggcggagcaggcgtggtcgtacatgccggtggtggcaccgtcgtcggccgtggagacggcggcggagcgcgtggagcggctggcgtcggagagcgcggtggtggtgttcagcgtgagcacctgctgcatgtgccacgccgtgaagcgcctcttctgcggcatgggcgtgcacccgacggtgcacgagctggaccacgacccgcggggccgcgagctggagcgcgccctcgcctgcctcctcggcgcctccggagcctcggcggcgggcgcgccggtcgtgcccgtcgtgttcatcggcggcaggctggtcggcgccatggaccgcgtcatggccgcgcacatcaacggcaccctcgtgccgctgctcaaggacgccggcgcgctctggctgtgatctcatcgccggccgctagctactagccattgccgccgttgcagctgttcgatcggggggctagctgatagtaaggcaggttacttattaattaatacacccaaagtagtgagttattaatcatagagtgcgtgcgcttgtgtgtttgtgtgtgtgttagtgggtgtgagagagagaggtcggtgattctttttactgatgctgcctccgtcttgtgtgtgggagctagctagttagatcgtgcttgcatgcccacgcgcgtatgtacgagtgtgtgtgcactgctactgctactgctagctaggtttggtcggtgctagaagagatcgatcggtttagtgttcttctcttccatgcatcttattaatcagtttggcttggggttccggcccctcgtctttgtgttttc

SEQ ID NO: 24920 - DNA, 1748 bp, Zea mays
  Clone ID: LIB3689-218-E4_FLI
ggagcaccaccaccaccactcttcccctctcctctccctcctcgctcgtcctgttggaagcagcacacacacgagagagaaagagagacacaaggagatggcgctgctgttgctcctgctggccgtgctcggcgtggtgctggcgagcagcctgctgctgcggtggaacgagctgcggtacagccgccgccggggcctgccgccgggcacaatggggtggccgctcttcggcgagaccaccgagttcctcaagcaggggcctagcttcatgaagcagaggaggctcaggtacgggagcctgttccggacgcacatcctgggctgccccacggtggtgtgcatggagccggagctgaaccggcgggcgctggccagcgagggcgccggcttcgtcccgggctacccgcagtccatgctcgacatcctggggcccaacaacatcgccgccgtgcacggcccgctccaccgcgccatgcggggcgccatgctcgcgctcacgcggccacacatgatccgcgccgcgctcctccccaagatcgacgccttcatgcgcgcccacctccacggctgggccggacgccgcgtcgacatccaggagatgaccaaggagatggctttgctctcggctctcaggcagatcgctggcatctctgcgggcccacactccgacgccctaaaggcagagctgtacacccttgtacttggcaccttctccctgccaatcaacgtcccaggaaccaactacagcaaagggctccaggcaaggaagaagctcgtggcaatgctgcggcagatgatcgctgaccggaggtcctctggctgcgcccgagacgacatgctggacgcgctgctcagcggcaacgagggtaccagggcgaagctcagcgacgaccagatcatcgaccttctcatcaccctcatatactctgggtacgagactgtgtcgaccacctcgatgatggcggtgaagtacctgtcggacaaccccaaagctctcggacagatcaggaaagagcaccttgacatcaggaaggctaagtcaccggaggatccccttgactggaacgactacaagtccatgaccttcaccaaagctgtcatttatgagactctaaggctagctacagtagtcaacgggctgctgaggaaaactacccatgacgtagaaatgaatgggtatgttattccaaaaggctggagaatttatgtatacacaagggagataaactacgacccgttcctgtacccggaacccatggttttcaacccatggagatggatggagacgaacctggaatcacatccgcacttcatgctgttcggaggaggtgcccgcatgtgcccagggaaggaagtaggaacagttgaaatcgcaacgttccttcactatttcgtgacgcgttacagatgggaggaggagggaaacaacacaatatcgaagttccccagagtggcggctcccaatgggctacatatccgagttcaagattactgaacttcgtgaggcgttttgtgaagtttaggtagggattcagacagatagaaataacccatgcgatgctgatgctgctggcctcttcgaaaggactagaacagccattagtgcctgtaaaatgtgtccatgccgatagtaatgttattatagggaggatataggtatcataggtttattagaaatttgatgtagaaagccaacagatgctcctgtattcttttgctccatcaaaacagaggtatcatttggcttc

SEQ ID NO: 24921 - DNA, 1562 bp, Zea mays
  Clone ID: LIB3689-218-F3_FLI
cgtgaaagagctcctccgacgactactagctctcgcttgctccgacgacccctgccggccgcctctggtacaacgtacgagaggaagagagacgatcgatggccggcgccaccgtgaccgtggacgaggtgaggaagggccagcgcgcgaccggccccgccaccgtgctggccatcgggacggcgacgcccgccaactgcgtgtaccaggccgactacccggactactacttccggatcaccaagagcgaccacctcaccgacctcaaggagaagttcaagaggatgtgcgacaagtcgatgatccggaagcggtacatgcacctgacggaggagttcctgtcggagaacccgagcatgtgcgcgtacatggcgccgtcgctggacgcgcggcaggacgtggtggtgacggaggtgccgaagctggggaaggcggcggcgcagaaggcgatcaaggagtgggggcagcccaagtcgcggatcacgcacctggttttctgcaccacgtcgggggtggacatgccgggcgccgactaccagctgaccaaggcgctggggctgcgcccgtccgtgaaccgcctgatgatgtaccagcaggggtgcttcgcgggcggcacggtgctgcgcgtggccaaggacctggcggagaacaaccgcggggcgagggtcctggtggtgtgctcggagatcacggccgtgacgttccggggcccctccgagtcgcacctggactcgctcgtggggcaggcgctgttcggcgacggcgcggcggccgtcgtggtgggcgccgacccggacgaccgcgtcgagcgcccgctgttccagctcgtgtcggcggcgcagaccatcctgcccgactcggagggcgccatcgacggccacctccgcgaggtggggctgacgttccacctgctcaaggacgtgcccgggctcatctccaagaacatcgagcgcgcgctggaggacgcgttcgagccgctcggcatctccgactggaactccatcttctgggtggcgcaccccggcgggcccgccatcctggaccaggtggaggccagggtcgggctggacaaggccaggatgcgcgccacccgccacgtcctctccgagtacggcaacatgtccagcgcctgcgtgctcttcatcctcgacgagatgcgcaagcgctccgccgaggacggccaggccaccaccggcgaggggctcgactggggcgtcctcttcggcttcggcccgggcctcaccgtcgagaccgtcgtgctccacagcgtccccatcaccaccggagcgcccaccgccgcctgagtcgtccatcctcgatcgctccagtccagacatgaacgacccggcctacgaataatgtatctgcgtaattaatttctatctgtcttgtgtcctagtagctgttaagtaccgttttaaaacccttaattaattttattatgggcgagctagctcaagagtggagtcataaaaccgcatggatggtgaggtattgtatagtacatgtgtaagacaagcttggctggttttttattttaatctgtttgctcaagacaaaac

SEQ ID NO: 24922 - DNA, 3595 bp, Zea mays
  Clone ID: LIB3689-218-G8_FLI
cttcaccctgcttttcgtcttcctttcaccccgcttgcgctctctctctctctccccccacctctctcctgcgccaactgggcgaccgccgccgccggccgccgggccgccgcacgcctccaggtgcccaggtcttcgtaggtcccttagctcggccttcgtcggggttcggggtccttcgctggcgacgatcacccaccaggtctcctttgaaagaagaattaggcagcacatctttacgaattgaggatgtcagtttctatgaaggacctggacccagctttccgtggctctggacaaaaggacggcttggaaatatggcgtattgagaatttcaagccgatccctgcccctgcatcttcgtatggaaagttcttcatgggtgattcttacattatcttgaagacaacagccttgaaaaatggttctcttcgccatgatatccattactggattggtaaagatactagtcaggacgaagctggaactgctgcgattttaacagtagagcttgatgctgctcttggcgggcgtgctgttcagtaccgagaaatacaaggcaatgaaacagaaaaattcctgtcctattttagaccatgcatcatgccacagccaggaggagtggcatctggattcaaccatgttgaggtcaatgagcaggattacaagacccacttatatgtctgccatgggaagcatgttgttcatgttaacgaggttccctttgctcgatcatcccttaatcatgatgacatatttattttggatacgaagtccaaaattttccagttcagtggctcaaactcatccattcaagagcgagcaaaagctcttgaagttgtgcagtacatcaaagatacatttcatgagggcaagtgtgaaattgcatctgttgaggatggtagaatgatggctgatgcggaagctggtgaattctgggggttttttggcggctttgcccctcttcctaggagggcacctgcagaaggcaatgagaaacatgatgaaactgctttcaaattgctatgttttgaccaaggaaagctggagcctgtcgactgccaatctttagcacatgaattacttgagacaaacaagtgttacttcttagactgtggtgctgaattgtatgtttggatgggtagaattacatccctgacggagagaaagggtgctagtgaagctgctgagaaattgctctctgattcaaaccgaacaagaacacatataatcaaagtgatcgaagggtttgagactgttacgttcaagtcaaaatttaaggagtggccacagacacctgagttgaagttgtcatcggaggatggaagaggcaaagttgcagctcttctcaaacgccagggcttaaatgttaagggtttgatgaaagctgctcctacacaagaagaacctcaatcctatattgattccactggcaatctgcaggtttggcgtgtaaatgataaagacaaggttcaactctcaccctctgaccaatccaaattttacactggcgattgctacatatttcagtatacttatcctggagatgataaggaggaatgtcttattggaacctggtttgggaaaaagagtattgaggaggatagggtaatagcagtttcacttgcaagcaagatggttgaatctgctaagtttcaggctgtccaggcgcgcttttatgatgggaaagaaccgattcagttctttgtgatatttcaaagcttccaagtgtttaagggtggtcttagttctggatacaagagatttatcgctgaaaatggcatcgatgatgaaagttattctgaagatgggcttgcactctttcgtattcaaggttcaggaccagaaaacatgcaggcgattcaagttaaacctgtggcctcatcattgaattcatcatattgttacattctacataatggaaacactgtgttcacttgggctggaaatctgaccactgcattggaccaagagttaatggaaaggcagcttgatgttattaagccaaacacacagtctaggtcacaaaaggaagggtcagaaacggaccagttttggagtttactgggaggcaaatctgagtactcaggccaaaaaatggtgcgggaactcgaaagtgacccccatcttttctcatgcatcctgtcgaaaggcaatttgaaggtcaaagaaatacaccactttactcaagatgatctaatgacagaagatgttttcattctggactgtcacacgagcatatttgtttgggttggtcagcaggtggatgttaaaggcaggttacaagctctggatgctggggagaaatttattgtgcttgattttcttatggaaaaccttgcccgtgaaacaccagttttcaccgttatggaggggaatgagcctccctttttcactagattcttcacctgggactccgcaaaatcactgatgcatggcaattcataccagaggaagctcgccattgtaaaaggtggaggtgctccagcattggataaaccgaaacgacgaacaaccgtctattcaggaaggagtactacacaagataaatcccaacgctccagaagcatgtccttcagccctgaacgtgtgcgtgttaggggaagatctccagcattcactgcattggctgctaattttgaaagttcaagcaacagaaatctttccactcctccacctgtagttaagaaactttacccgaaatctgttacacctgatccgtcgaatactgcttctaagtcacctgcaattgctgctctggctggttctttggatcacccttctcaaactcctgctctagaattcatgaaaggtggctccgagtcagagaagccaaaacaggagggagatggtaaaggtgttgatactgtggccactagagttgaatctctgactataaatgaagatgtaaaagaaaacgagccagaagatgacgagggccttccgatttacctgtatgaacgtctgaagaccacagctgctgatcctgttactgaaattgatatcacgaggcgagagacctacttatcttcaactgagttcaaagagaagtttgggatgacaaaggaagcatttagcaagcttccgaagtggaagcagaacaggctaaaaattgctcttcaacttttttagcctgatcatcaacacttccaatgtctcatagttcatgggtcaaatggccatttgctgaaagtagttctactctacatctgattagcccatgacaacgacagctattttgcagaacgcaatcaccatatgcaatgccacatcaattttcacattgtcctggatcggtctcctttttcctagtttggatttgttttgctagctaagtagctctcttattcttccagttcataggtgtgctattccctttttcctttttttgtcaagtgctcttcattgattcaaggtcacacaggtttgattatgaggcttgattttttttgtgtatcaactctgcctgctgtgttcttttttgtttttgagatgagttgcggtttgagggagcgataagtatgtacagcagagtgccggcactgtaacatcacaataccgttatctttgatcaatataattattttttgtgtgt

SEQ ID NO: 24923 - DNA, 1447 bp, Zea mays
  Clone ID: LIB3689-219-C2_FLI
cacacagaagcgaggagcactacttgttggttggattctcttcagtctagcagctagtccagttaagtttcagacacacatggggagcattggcagaggcacggccaactgcgccaccgtgccgcagccgccgccgtcgacagggaagctcatcacgatcctgagcatcgatggcggcggcatccgcggccttatcccggcgaccatcattgcgtacctcgaggccaagctccaggagctggacggcccggacgctcggatcgccgactacttcgatgtgattgccgggacgagcaccggcgccctgctcgcgtcgatgctggcggcgccggacgagaacaatcggccgctgttcgccgccaaggacctcaccacgttctacctcgagaacggcccaaagatcttcccacagaaaaaggctgggttgctgacgccgctgaggaacctgctgggcctggtgcggggccccaagtacgacggcgtgttcctgcacgacaagatcaagagcctgacgcacgacgtcagggtggcggacacggtgaccaacgtcatcgtgccggcgttcgacgtcaagtacctgcagcccatcatcttctcgacgtacgaggccaagaccgacgccctcaagaacgcgcacctctccgacatctgcatcagcacgtcggcggcgcccacctacttcccggcgcacttcttcaagaccgaggccaccgacggccggcccccccgcgagtaccacctcgtggacggcggcgtcgcggccaacaaccccaccatggtcgccatgtccatgctcaccaaggaggtgcaccgccgcaaccccaacttcaacgccggcagccccaccgagtacaccaactacctcatcatctccgtcggcaccgggtcggccaagcaggcggagaagtacaccgcggagcagtgcgcgaagtggggcctcatccagtggctctacaacggcggcttcacgcctatcatcgacatcttctcgcatgccagttccgacatggttgacatccatgcgtcgatcctctttcaggccctgcactgcgagaagaagtaccttcgcatccaggatgatactttgactgggaacgcatcgtccgtggacatcgccaccaaggagaacatggagtctctgatatcgatcggccaggagctgctcaagaagccagtggcgagagtgaacatcgacacagggctgtacgagtcctgcgacggtgagggcacaaatgcacagtcgctagctgacttcgccaagcaactctctgacgagcgcaagctacgcaagagcaatctcaactccaactaataaatacctctctcagtcacagcatgtgctctttccgcagattcaccgtttcttatttttaatttaatttcaattctgtgtgtgtgtgattgtgtgtgtgactgtgtgtgtaccaataaacatttaagttcaatc

SEQ ID NO: 24924 - DNA, 2885 bp, Zea mays
  Clone ID: LIB3689-219-E8_FLI
gtcctctccattctgccgtctcctctcctactcctcccccctgccgccgcaagatccaccagggctctcgaccgcaatggagccgcagctgacgcccggcgcggtggcggcggtctccgcccacgccgacggcaacggcacgctgcagccggtgctgcaggtggtggacgtgcggatggtcaacaacgccaagaacccctccgccgagcgcttccggatggtgctctccgacggcgaacacaccatgcagtccatgctcgccaccgccgagaacgcgcgcgtccgggacggctccatccagaagggctccatcgtccacctcctggagtgcacctgcagcaccatccagtctcgcaggatcattatcgttatcaaacttgatgttctgcaaagtgagtgtgccataattggaaaccccaggccctatgaaatgagaaaccaacctaatgagcagggcaccaacataccggccaatgctgctcaagctaatactggaacgtattccagtggccctggtttgctgggatcacctgctgcttcaaggccagcacaagttgctaataatgtaccatacagtggatcctatggtggttatcatggtacggtggtccctccgattgcccctgcagtagaatctgttcccaatgtggcatcgggtgtcacttatggtacaacttcagcgcataatacaatgaatgcgggcatgacacagtcaaacttgcagcagcgttcactgaactctcaccagaaccaaaggtttgcagttccttccatggctggtggcagtggtgctcctgggaatacatatggacaacctgcacagtcgttttatcagcaaccgcctccagggcatatgaatagaactcctgtgtctaagaacgatgcatatcgtcttgtcccattggctcaattgaacccttatctagataaatggacaatcaaggtcagggtaactgcaaagactgatctcaggttctacaacaatgctagaggtgctggaaaagtcttttcctttgatctccttgatgaacagcgtggagaaatccgtgcaacatgcttcaatacgcaggctgatcagttttttaacctcattgaggttgataaggtgtacctgatatctaaagggtcgttgaaaccagcacagaagaagtttaactccttgaatcacgagtatgagataagtctggattccagaacatctattgaagtttgtgctgatgatgatagcaacatccctaggcagcagtataatttccggaagataagtgaaattgagaacattgagaaagatgctattttggacttgattggaattgtcacatcagttggcccttctgtcacgtttatccgaaaggatggcgtggaaacccagagaagaacacttgaactgaaagacatgtctggtcgaagtgtacaactcaccttatgggggaagttgtgtgttgctgaaggcaaccagctgcagtcgctgtgcgattctggtttgaatcctgttctagctttgaaaggtgcccgcgttactgactacagtggtagatctgtgtcctcagccggctcaactcagttaaaaatagacccagaaattcctgaggctgagagtctgcggcgctggtacgcaactggaggaaagacagctgcttgtgtttctctgtcagtggtaagtatgggtggtacttgtgtccggaaatcaatcgctcagatcaaggatgaaaatctggggcagttagagaagccagactttatcactgttaaagctgcaatttcacatctgatagcagacaatttttgttatcctgcttgcaccattgatgtgaatggtaggatgtgcaacaaaaaggtaacagataatggtgatgggacatggcgttgtgacaaatgcgaccagagcttaccaaattgtgagtacaggtacgtgctgaatggccagatccaggaccacagtggggtcaccaattttactgcattcgaagatgctgctaaggtgatgattggccacagtggccacgagctcaacaacattagtgtagaagactcggaacgatttgcagagatcttgcaggcggctcgttggcagcagtttctgttcacgctgaaagtcaaggaggagatctataatgatgcgccgcaagtcaagtgcaacattactaaagcagagaagctggatccggcaatagagagttcttaccttctaggggtaatcaatggcctgttgcaggatgacactggctcatcttctggggcgcaaggtgccatggcctacaatgctggtatcagcaacactggcgctggacgaagtgtgccaacctccaacagtgcctacaccaccaatttgagtggtccaaggtatggcgagtctgcaaaccagctcgcgcagcaggaaagcacgtacaccggggcgaccactccagtgtcggcggcacggaatgtgcagcagacctgcgtgtcctgcgggtcaagtgggcacaacgtgcagaactgccctgcaggaacgtacaggcagcaggcggctgcaagcgcagcaagctcctacggttcttcgcagcctcgcaatggactgtgcttcaaatgcaatcagcctggacactttgccaactcttgtccactactggctcctgctccccagcagcagcagcagcagtatcggagcggcggcgctccctcaggcggttatggtaggcagcagccctatgttggggctaccaactactgaaagtcattatctctgtcgagtcaggcgtgatgttggttttgcttagatgcctgtcctgaatggcatcgctgcgtccatgtgaagtagatgcaaaccattcctttttatgtttgtgtgtgaactatgtatcagtacttctttatgttttcgtcttataaatcctcgttgctgtgtc

SEQ ID NO: 24925 - DNA, 1601 bp, Zea mays
  Clone ID: LIB3689-219-G9_FLI
cgacgctggcagtgcgactcgcgccaatccaagccacaagtgtcgtctccccgagcgctacccgccactcctgacggccgcaaacggataacaacagccagtgaagcagagcagcagagaacacctgcaacgttcatcctgctcaatttgctcataagcacaggctctgaactgagttgatcagagacgagccatcgagagagagagagaaaaaaatgcacgcgttcctctctacgtcgatcccggccacttcgtactcgagatcatacttcttgccgtggccacctcaggctcccgtgaagctcgtcgtcccgtcgtcagcgccgagggtcgccgccggtagaagaacagcttcggaagctggtcggtcgggacggtgcgtcgtcgcggtgtccgcgtcctcgtccccggccacggccgcgatggcgacggaggtgcccggggtgatgaaagcctgggtgtacgacgcgtacggggacgccggcgtgctcaagctcgacgaggccgcggctgtgccggccgtgggcgaggaccaggtgctcgtcaaggtcgtcgccgcggcgctcaaccccgtcgatgccaagcggcgggccggcaagttccaggccaccgactcccctctcccgaccgtgccggggtacgacttgtccggcgtcgtcgtcaaggtgggcagccaggtgaagaagttgaaggaaggcgacgaggtgtacggcatggtcagcgagaatccgctgcaggggcccaagcagtccggctcgctggcggaatacaccgccgtcgaggagaagctgctggcgctcaagcccaagggcctcgacttcgcgcaggccgccagcctgccgctagccgtcgagaccgccaacgagggcctggagagggcaggaatatccgccggcaagtccgtcctcatcctcggtggcgccggcggtgtcggctcccttgcgatccaggtactgtttgcatgttggtgtgggtacgtacgtaccgaagactgaactcaaccttgcaatgctgctgcctctgctcttgatgtggaatgaagctagcgaagcatgtctacggcgcgtccaaggtagctgcgacggccagcaccaagaagatcgagctgctcaagagcctaggtgccgatgtcgccatcgactacactaaggagaacttggaagagctaccggacaaatacgacattgtcttcgacggagtcggtcagggtgacaaagctgtcaaggtagtgaaggaaggcggcagcgtggtggttctcaccggcgccgtcagccctccagggttccggttcgtcgtcacctccaacggctccgtcttggagaagctcaacccgtacctcgagtcagggaagctgaagccactcatcgacccggaggggcccttctccttctcgcaggttgtggaggcgttctcctaccttgagaccgggagggcaaccggcaaagtagtcatctctcccatcccatgagagctgtagattgcagagcctgttcactggccatttgcgagccggcctccgattatatcaagagtgtcagtctaaaatggagttcatttcaggtatacagtccatggaattacaaagaggtgtacattgtgcc

SEQ ID NO: 24926 - DNA, 1018 bp, Zea mays
  Clone ID: LIB3689-220-D9_FLI
ggttaatgagtcgagctctttcccttctcgcttcaaaccaaaccaaaatcggagcggcggagcaaaacgatccgtagcctcgcttaccttcgattcagctcgaccagggcactaaccgggaagccaatgccgcgcgagtcgcgagatctgtagcgccaatcggcttcaccggcggcggggtgggcatggaagcgcagaacggctcctgcggaggggcgcccgtggtgctcaacgtgtacgacctgacgcccatgaacaactacctctactggttcggcctcggtattttccactctggaatcgaagttcatggtatggagtacggatttggagcacaccagtttccggcaagtggagtattcgaggtggaaccgaaaagctgtcctggtttcatctacagaagatctgtgtggatgggcacaactgacttgtctagagcagagttccgctcgttcattgaaaatcttgcaggaaagtacaacggcaacacgtatcatttgatttcgaagaactgcaaccattttacagatgatgtctgtaagagcttgaccaagaaatcaatccctgggtgggtgaataggctagcaagagtgggttcattttttaattgtcttctaccagaaagcatccaagtttccacagtaagacacgttcctactcaatctgcattttctgatgatgatatggattcggtatcttcatcggttcttggagacagtgatctgggagagttagaccaacaccttctgccatcgtcaactgctgacgtccattctatagacgtgccaccaaatctagccaaggatcttctctgaattatccaaccctttggattccacgtagcaggatagcttaaattgctgcagttgatgtccacttagtgcctctccaggtggcataggaatgcaggagtgtagatgaatgctgctgattgtgttgattctttgccactgaatttgttacatacgcacacacagctctcgacagaaatgacgtgctttctaattattttcctgtt

SEQ ID NO: 24927 - DNA, 1650 bp, Zea mays
  Clone ID: LIB3689-220-G11_FLI
gcagcgcactcccactcccaccgtttccgccctggtctaccgtctacgttctgtcgttctgtggctgagctccaaagtccagagattagtgaatccaaaaggcgaccaaacagatcccccgcaccccgctcctgtgctccgctcatggcagagaaccccctgggaaaacgcagcggagaaactctggagatcgaaaccccggcacgcagctaggcgaactgcacgcagctgcaggtcgacagtctaatcaatttcttgtcgcttcagcttctggtgctggtcttcttccagttgcatcctggttacctgtgtcaaggggcggttggtgtctggtgtagttggagggcagagcttcggcggcggcgaagaagaagagcagcagagagactctgctgacactgaccgagggagatatgatgaggaagctgagagagttgctgcagaagagcgacaaccgcgtatgtgccgactgcggcgcacctgatcccaaatgggcatcggctaacattggagtattcatttgcctaaagtgttctggtgttcacagaagcctcgggacacatgtttcaaaggtgctgtcagtcacactagatcaatggacggatgatgagatcaactccatgatagaagttggtggaaactcttatgccaatgctatatatgaagcatttctgccagagggctatcagaagccgcatccagattctagccaagaagagagagctgatttcatcaggtcgaagtatgagttgcaagaattcctgaagccaagcctaaggttagtttccagcaataagggctctttagaggctaccagtaccagctctcgaaaacataaggacaatactgtgtctctttctgctagtttcagcagtgaggctggaatggttgagttcattggaatactaaaagttaaagtgataagagggactaaactagctgtaagagacctgatgagtagtgacccctatattgtactgaccctaggacagcagaaagcaaaaacttctgtgagtaaacgtaatctgaatcctgtttggaatgaagagcttaagctgtcagttccccagcagtacgggcctctgaagcttgacccaacccagcaagtgttcgaccacgacatgctatcgaaggatgacgagatgggtgacgcagagattgacctgcagccgatgatcagtgcagctacagcgtttggcgaccctgatctgctcgcggacatgcagatcggcaagtggctcaggtccccagataatgcgctggcaagggacagcgccgtcaatgtcgttggtggcaaggtcaagcaggaggtctctctgaggctgcagaacgtggaatcgggggaggtggaactggagctggagtggataccactcaatcagtagagttcaaatccacctgtaggctatatgtgatgcatgtttcatgtgtgccacacaagtcctgatgctcttgatcatcttcagtttgtcagggtgcctgcagtgttgtagactatctttgcggttgtagaatcagtgtcggagcccggccaccgtgactggttcagcaactcggtacaatgatagtttgaggactcaatgacttgttagtacaagtatgagactgttgtttgtatgcgtttgctggtaatgaaatcttaggtggggg

SEQ ID NO: 24928 - DNA, 1329 bp, Zea mays
  Clone ID: LIB3689-220-H4_FLI
ggtcgtctaaaaaagcagcagctgctcttctcttctgctagcagctttatttgcctgcctccctaccggcgagggaggtacgtgcgccgatcgagaagcagcagcagcaattaataactaaacatggatcaggcggcggaggagtcttgtgttcccccaggcttcaggttccaccctacggaggaagaactggtgggctactaccttgccaggaaggtggcctcccagaggatcgacctcgacatcatccaggaggtggatctctacaggatagagccatgggatctgcaagagcggtgcaagccgcagcacgccggcggtgggcacgacgagcagacacaggagtggtacttcttcagctacaaggaccgcaagtaccccagcgggacgaggacgaaccgcgccacggcggccggcttctggaaggccaccggcagggacaaaccggtgctgtcgtcgtccaccaggaccaccaggtgtagcagggtcatcggcatgaggaagacgctggtgttctacaagggcagggcacccaacggcaggaagagcgactggatcatgcacgagtaccgactccaatccaacgagcacgcaccggcgcaggaggaaggctgggtggtgtgccgcgctttccagaagcctatccccaaccagcggcccttcttccccaccagctacgccggctactacgaccacaacctctcaacgacggcacggctgcacgtagacggcgaccgccatttcctggcgggctcatcagcagcagcagcagcactgctacagcagccaccagggcttgcaggcagcagcttcccgcagctgtactccgacgacgacttggagtccaagaagcagctgttgagtatcccgccgctggagagccccactgccatggcctgctgttccgacgccggcggctacgcgcagagaagcagctacgatgaacatgagatgatgatgatgatgatccagcagggaggaggaggaggagagcaagctgcagccgccatcgactggaactttctggacagcctgctgtccgcgacgtcgcaactccatgggccctcgggatccttgttgcagtgacctccggccatcgtcgatcgatccatctttctttgatccagcggagaacattattcattcatcggcattatacaatatatttattagttgcatacacacacagagtatacgtatatgctaataattcagatgtgttcatacacacttccattgtcatgtgtagttcgttgcgacttacattacagactgccttagatgattcaggtatactgtatacaacatgatgcacagtatagtaggagt

SEQ ID NO: 24929 - DNA, 1162 bp, Zea mays
  Clone ID: LIB3689-221-B2_FLI
acacgcacgggctggggctcggccaccaccactcccagccgcacccgcacgggcgcgcaccgctcgcaggtggcgcgtggtcctctgctcacgccaccttctacggcggcggcgacgcgtccggcaccatgggcggtgcgtgcgggtacggcaacctctacagccaggggtacggcaccaacacggcggcgctgagcacggcactcttcaacaacgggctcagctgcggcgcctgcttcgaggtgcgctgcgacgcggcggggggcgggagccactcgtgcctgccgggctccgtcgtggtgacggccaccaacttctgcccgcccaacaacgcgctcccctccgacgacggcggctggtgcaacccgccgcgcgcccacttcgacatgtcgcagcccgtgttccagcgcatcgcgctatacagggccggcattgttcccgtctcctaccgcagggttgcgtgcaacaagaagggcggcatacgtttcaccatcaacggccactcctacttcaaccttgtgctggtgaccaacgtgggaggcgccggcgacgtgcacgctgttgccgtgaaggccgagcgctcccccgggtggcaggccctgtcgcgcaactggggccagaactggcagagcaacacgctccttgacgggcaggccctgtctttccgcgtcaccaccagcgacggccgctccgtgctctccaacaacgccgccccccgcggctggtctttcggccagactttcagcggtgcccagttcaactgaacacacccccaccgttcatgcagcgtcgacgcagtggcactagtactagttgttccgtccaccccgattggagcctgccgagaggcgccatggttttatgaatggtctgcacctcgcatttgctcctgggaattaccagtagtttaggcctagtaatagcgcgggttttatcgtgcttgcgttagcatggtgttttagtgttccttggttgtatccggcttggaaattggaggtggtggtaaggctggtctgcagataaacggaggcaggctgccttgtatcacccgccaattatgcgtttagggcctcatggtgatggctccttcgagatgagatgttttctgagttattcaagtgtgttagttgtaatgaatcttatcaagttactatttcctaat

SEQ ID NO: 24930 - DNA, 3589 bp, Zea mays
  Clone ID: LIB3689-221-C10_FLI
tctccatcgcgcgcaccaaatcgcactccgtccgccccgtcgatcgaacagccaccgctcacctctctcacccgccgccaaaacctcctcccctggcctcctctcatactcatatagctgagcagcccctgccacaaggcagagcatcgctcacaccagcgtcgccctgccttgccatcgcgatcgatcgatcggaggccaagagctagctagcacgccggcctccgctcgccggtgccgcgcgcgatggaggccagcgccgggcttgtggccggctcgcacaaccggaacgagctggtgctcatccggggccacgaggaccccaagccgctgcgggcgctgagcgggcaggtgtgcgagatatgcggcgacgaggtcgggctcacggtggacggcgacctcttcgtggcctgcaacgagtgcggtttccccgtctgccggccctgctacgagtacgagcgccgggagggcacgcagaactgcccccagtgcaagacgcgctacaagcgcctcaaggggagcccgagggtcgccggggacgatgacgaggaggacatcgacgacctggagcacgagttcaacatcgacgacgagaagcagaggcagctggagggcaacatgcagaacagccagatcaccgaggccatgctgcacggcaagatgagctacgggaggggggccgacgacggcgagggcaacaacaccccgcagatgccgcccatcatcaccggcgcccgctccgtgccggtgagcggtgagtttccaatcacaaacgggtatggccacggcgagctctcgtcttccctgcacaagcgcatccatccctaccctgtgtctgagccagggagcgccaagtgggacgagaagaaagaagtgagctggaaggagaggatggacgactggaagtccaagcagggcatcctcggcggcggcggcggcggcgaccccgaagacatggacgccgacgtgccgctgaacgacgaggcgaggcagccgctgtcgcgcaaggtgtcgatcgcgtcgagcaaggtgaacccgtaccggatggtcatcgtggtgcgtctcgtcgtcctcgccttcttcctccgctaccgcatcctgcaccctgtcccggacgccatcgggctgtggctcgtctccatcatctgcgagatctggttcgccgtgtcctggatcctggaccagttccccaagtggttccccatcgaccgcgagacgtacctggaccgcctcaccctcaggtacgaaagggaaggggagccgtcgctgctgtcggcggtggacctgttcgtcagcacggtggacccgctcaaggagccgccgctggtcaccgccaacaccgtgctctccatcctcgccgtggactaccccgtggacaaggtctcctgctacgtctccgacgacggcgcgtcgatgctcacgttcgaggcgctgtcggagacggccgagttcgcgcggaagtgggtgccgttctgcaagaagttctgcatcgagccccgcgccccggagttctacttctcgctcaaggtcgattacctcaaggacaaggtgcagcccaccttcgtgcaggagcgccgcgccatgaagagagagtacgaggagttcaaggtccgcatcaacgcgctggtggccaaggccatgaaggtgccggcagaggggtggatcatgaaggacggcacgccgtggcccgggaacaacacccgcgaccaccctggcatgatccaggtgttcctgggccacagcggcggccacgacaccgagggcaacgagctgccccgcctcgtgtacgtctcccgtgagaagcgcccgggcttccagcaccacaagaaggccggcgccatgaacgctctgatccgcgtctccgccgtgctgaccaacgcgcccttcatgctcaacttggactgtgatcactacatcaacaacagcaaggccatccgggaggccatgtgcttcctcatggaccctcaggtcggccggaaggtctgctacgtgcagttccctcagaggttcgacggcatcgacgtgcacgaccgatacgcgaacaggaacaccgtcttcttcgacatcaacatgaaggggctggacggcatccagggcccggtctacgtcgggacagggtgcgtgttccggcgccaggcgctctacggctacaaccctcccaagggccccaagaggccaaagatggtgacctgcgactgctgcccgtgcttcggccgcaagaagcggaaggacgccaaggatgggctgccggagggcaccgcggatatcgtggacagcgacaaggagatgctcatgtcccagatgaacttcgagaagcggttcgggcagtccgcggcgttcgtcacgtccacgctcatggaggaaggcggcgtccctccgtcgtcgagcccagctgcgctcctcaaggaggccatccacgtcatcagctgcggctacgaggacaagaccgactggggcctggagctggggtggatctacgggtccatcacggaggacatcctgacggggttcaagatgcactgccgcgggtggcgctcggtgtactgcatgccgaagcgggcggcgttcaaggggtcggcgccgatcaacctgtccgaccgtctcaaccaggtgctccggtgggcgctggggtccgtcgagatcttcttcagccggcacagccccctgctgtacggctacaagaacggcaacctcaagtggctggagcgcttcgcctacatcaacaccaccatctaccccttcacctcgctcccgctgctcgcctactgtaccctgccagccgtctgcctcctcaccggcaagttcatcatgccgtcgatcagcacgttcgccagcctcttcttcatcgccctcttcatgtccatcttcgcgacgggcatcctggagatgcggtggagcggggtgagcatcgaggagtggtggaggaacgagcagttctgggtcatcggcggcgtgtccgcgcacctcttcgccgtcgtgcagggcctgctcaaggtcctggccgggatcgacaccaacttcaccgtcacctccaaggccaccggcgacgtggacgacgagttcgccgagctctacgcgttcaagtggaccacgctcctcatcccgcccaccacgctgctcatcatcaacatcatcggcgtcgtggccggcatctccgacgccatcaacaacgggtaccagtcgtggggcccgctcttcggcaagctcttcttcgccttctgggtcatcgtccacctctacccgttcctcaaggggctcatggggcgccagaaccggacgcccaccattgtcgtcatctggtccgtgctgctggcctccatcttctccctgctctgggtcaggatcgatcccttcatcgtcaggaccaaggggcccgacgtcaggcagtgtggcatcaactgctgagctgcctatcacggttcaaaaaagttctagagcttgtgcatagggagaaacaacagtttagaaattttgtgttgtcatgttttggagctcatatgctacgttttgtgtaatgttcttggacccagaattgtcggccggacgaggaattgaacaaaggacaaggtttgaatcaatgttaaatagc

SEQ ID NO: 24931 - DNA, 1645 bp, Zea mays
  Clone ID: LIB3689-221-D1_FLI
gcggtgctcagcggaacagctagctatagcctgtagctagcagctagcttcagtcacaggccggacggtcggctcacacacagctagccgccgccgccgctagcttagccaccagtagtccgatctgatctacaggcaaggggcaactagctagctagccgcgcgccggcgccatgatgaacctgaacctgaagcagcctctggtgctgcccgcgcaccacagcaatgtcgtcggctcgcgcctgtcgtcgtcgtcgccctcggcagccgccgccagcaggaggaccggcggcggcgtgtcctcccggtccggctcccggcggcacgtgcggctgccgaggatcagctgcagcgccaccgaggaggtcagcggcgccgtgtcgtccgtcaccgtggagaggatgctcacggtgacggcgtcggtggaggcgtcgccggccatcgggcagatgtacttccagcgcgccgtcgacgacatcggcgacctcctcggcaagacgctgctgctcgagctcgtcagctccgagctcgacgcaaagtcgggcgtggagaagacgcgggtgacggcgtacgcgcacaagacgctgcgggagggccactacgaggcggagttcaaggtgccggcgtcgttcgggccggtgggcgcggtgctggtggagaacgagcaccacaaggaggtcttcatcaaggagatcaagctcgtcaccggcggcgacagcagcaccgccgtcaccttcgactgcaactcctgggtgcactccaagttcgacaacccggagaagcgcatcttcttcaccctcaagtcatacctgccgtccgacacgcccaaggggctggaggacctgaggaagaaggacctgcaggcgctgcgcggcgacgggcacggcgagcgcaaggtgttcgagcgcgtctacgactacgacgtgtacaacgacctgggcgacccggacaagaacccggcccaccagcggcccgtgctgggcggcaacaagcagtacccatacccgcgccgctgccgcaccggccgccccaggaccaagaaggaccccgagacggagatgcgcgagggccacaactacgtgccccgcgacgagcagttctcggaggtgaagcagctcacgttcggggccaccacgctgcgctccggcctgcacgcgctgctgccggcgctccgcccgctgctcatcaacaagaaggatctgcgcttcccgcacttccccgccatcgacgacctcttcagcgacggcatcccgctgccggcgcagaccgggttcgacgccatccgcaccgtcgtcccgcgcatggtcaagctggtggaggacaccaccgaccacgtcctccgcttcgaggtgccggagatgatagagagggaccggttctcgtggttcaaggacgaggagttcgcgaggcagacgatcgcggggctcaacccgctgtgcatccagctgctgactgagttccccatcaagagcaagctggacccggaggtgtacgggccagcggagtccgccatcaccaaggagatcctggagaagcagatgaacggcgcgctgaccgtggagcaggcgctggcggcgaagcggctgttcatcctggactaccacgacgtgttcctgccctacgtgcacaaggtgcgggagctgca

SEQ ID NO: 24932 - DNA, 1390 bp, Zea mays
  Clone ID: LIB3689-221-G1_FLI
taagggataggaagaggggaagaaaagatcctgctgacatcattaatggatttgccaatgttggtggtggcactggaaaaggtggaaagaagttctggaactcttattggtagtagtatagctacaatccagaagagcgctgctcctgagatgcttcttgcactgatggacgaggcatatactggttctgccgtagaagaacctagtggtaattcaggttctgatgatagtggtcccctagaccttactgacccaatgttcttagaccttctaaaagatgagaatgatggcattgccgcaaaacattggatatcccctacgatatcttcaacgttacaagcagcatttaacagcccacagtcggacagattgaaacagtcactggaaatggcacctcgctttcttactttatattttgcaacagcattgcgagacgttaatgactcactgctgtgtgctcttattccagtagttatgtcaagatatgctgcaatgttcccagacaaagttttctctttcaaggtgagggaaaggctttcagacttcattttggctgcattccagcggtctcccaacatcattgcagtactgaagaaacctattactgacagacttggtgaggctcatgataatcttgccaagacagagttagcattgcacttgtgctgggccattggtgagcatggagctggaggggtgggtcacaaggatgtagctcgtgaactatttgaaaatttggagttattattgtatgaaaacctggcaactagccgtttgggattaagccaagagccaggatctgattccatgggtgcatcatctagaaagtcatcccaagccaggcttctctgctttgtggtgactgctattgcaaaattagcaacatgccacagtgagttgcttccgagggcacgcgtgtcattgggtaaggtcgctcgttcccgaacctcagacaggagggtctggcaacgggcctgtgactatttagggctcatgaatgaaccagccatctgtttatctgtactgggaccgtccaccgcccaaggaaatggtcctggtattgtgaattggagtgaaggaggaacaaagatggtagctcatgttcctttttaccttttagcccagcaaaaaggtccaccgtctcataatttttcatttgccgacctcctcccaacagaatgaagaaaatatctgcatgagtgcattggtgcaggcatgatttctctagcagaaggccatataacgattttgttttgaagatccaagttcctttttaaaaaaggggctggtctgaacattcaggcttatttctctagcataatactcataaagagtcctgtacttttaggtcttgttcggttattcctataatacatggattgatggaatt

SEQ ID NO: 24933 - DNA, 1516 bp, Zea mays
  Clone ID: LIB3689-221-H3_FLI
gggaggagctccccggcgtccccgccttctactcctctcggctcgttgagattacattcagattcggatttttgccacaccctcggcaagatagagaatctggagcactcttgaatgctaatcagacaccctgcccatttctttctctgtcttagacacaaggccttctcatggccagagacttgcctcatctgcccgtaactagacggaaaatcctgcaattcaagttcctcctcctcgtcatgctcaagacgccgaaggcatgctcatcaacggcaacttcgagacggcgccgcggaggctgaacaagaccctcatcgtggggcgccactcgctgccggggtggacggtgcagggccacgtggagtacgtctcgggcggtccccagcccgggggcatgttcttcgcggtgccgcacggcgtgcacgcgctgcgcctcggcagccgcgcgtcggcgtcgcagaacgtgacggtgcggccgggggcgctgtacgcgctcacgttcgcggcgacgcggacgtgcgcgcaggacgaggccctgcgcgtggcggtggcgccgtcgctctcggcgcccgccgacgtcgccgtgcgcacgctctacagcggcgcgtccgccgacacctgggcctggggcttccgcgcctcctcccccgtcgcgcaggtcacgttcgccaaccccggcgtgcaggaggaccccgcgtgcggcccgctgctggacgctgtcgccatcaaggagctgcccgcgccgtacccgaccaaagacaacctgatcaagaacgacggcttcgagatcggtccccaggtgctcaggaactcgacggtcggcgttctgctgccccccaagcagaaggacgcgacgtcgccgctgcccggctggatcatcgagtcgctcaaggcggtgcggtttattgacgcggcccacttctctgtccccgcggggcagtacgcggtggagctggtggccgggcgggagagcgccatcgcgcaggtcatccgcaccgtgcccaaccgcgcctacaacctgtcgttcgccgtcggcgacgcccggaacggctgccacggctctatgctggtggaggcgttcgcgggcaacgtcacgcagaaggtgccgttcgattccacggggaaaggcgggttcaagacggcggcgttcaggttcgtggccggcggcgtccgcacccgcctcaccttctacagctcctactaccacaccaaggtcaccgacggcgtctcgctctgcggccccgtgctggaccaggtcaaggttgtgcctgtcaaggcgtagtgaaatgaatcgtgagagcgccgagtgacggtctgctctgctcgtcgtctgtagctgtgctcgtcgtgatttggcgtggtgggttgtgaaagtgtggtcgaattctggacccttcggaatctgatcgtggtgtgctgtgcggtgcgatgtgctgtagcgaaatttggttgctatctcttgttcactccacgtttggaatttgcgttttcaatccggtattgaagttataat

SEQ ID NO: 24934 - DNA, 3818 bp, Zea mays
  Clone ID: LIB3689-221-H4_FLI
gcacttcgcagcgcattcaccaccagcttcactcccaactaccgctgatctcactcacgctcaccccagccggccagccccgtccccatccggctagaggttcacatcacctgcgtgacgataaacatcctcttccaaatcgtagtctagcccgtgcccaaaaccctagcgaccgccggagagctcgtccgaatcgaggccaccgaggggaaattagatcgcggcggacgatggagagccctgcgaaagaggaggccgggggagagctggcaatggagatcgagtcgtcggtcacggcggaggactggcgccgcgcgctttctcgcgtcgtgccgtccgtcgtcgtcctccgcaccactgcgccgcgcgcctttgacaccgaggtcgcgggcgccagctacgccacgggtttcgtcgttgacaagtcccgcggcataatcctcactaaccgccatgtcgtcaagccaggacctgtggtcgcggaggccatgttcgtgaacagggaagagatccctgtgtacccactgtacagagatcctgtacatgattttggtttttttcgctatgatccaggtgccattaagtttcttaagtatgatgagattccgctggcacctgaagcagcatcagtcgggctagaaatccgggttgtcggaaatgacagcggggaaaaggtttcaattttggcaggaacacttgctcgacttgatagagaagcaccatactacaagaaggatggatataatgatttcaatacgttctatatgcaggctgcatctggtactaaaggtggctcaagtggttctcctgttgttgattgtcaaggaagggctgttgccctgaatgctggaagcaaatcttccagtgcctctgccttcttccttccattagaacgtgttgtcagagcattggatttgatacgtgacagttgggatgcatttggtaccaagacagaatctgtttatattccacgtggtacacttcaggcaacctttcaacacaaaggatttgaagaaactcgacgtcttggcctccggaatgaaacggagcagatggtgcgtgtagtttctccagaaggcgagactggaatgctggttgtcgattcagtggtacctgaaggccctgcacataaacatttagaacctggtgatgttctagtacgcatcaatgaggaggttgtaactcagtttcttagattggagactttacttgatgatagtgttggcaaggaaattgatttgcagatagagaggggtggagttcctttaactgtaaacctgcaggttgaggatttgcactctataactccaaatcattttttggaagttagtggtgctgtcatccatccactgtcatatcagcaggctagaaacttccgattcaaatgtggtctcgtatatgttgctgaagcagggtacatgctctctcgggcatctgttccacgccatgccattattaaaaagcttgcaggagaggatattgcacatttagatgaccttattgcagttctttcaaaattgtctaggggaacacgagtgcctctagaatatgtcaaatacactgaccgtcacaggaacaaatctgtactggtgacaatagatcaacatgaatggtatgcgtcacctcagttatatactcgaaatgatgcaactggcttgtggactggaaaaccagctataccaccggaatctccgtttttagctctagctcatcatgctagtcatgtggacacaaactcaaacgctgtttcatctttatccgaatctagtcctatggatctcaagtgccagtatgattctgagaacctggcagacggatgcatcaaaatgcaaactgatgatgagattgttgtggatggatctcattctaacgaagattctgttattgagaaaaaaaggcgacgtgtggtcgaggagatagctgccgacggaactttaccatcttatggagatctagaggatgtaaaaggtggttctttgaggcatccttctaatgcagatggatctgaacttgctcgaacaatatcaagcaatgcatcattggcagaacaagtaattgaaccagcccttgtgatgtttgaggtgcatgtgccgcccgtttgcatgcttgatggagttcactctcaacatttttttggaacaggggttataatatatcattctgaacacctgggtctggttgcagttgataggaatacagtggctgtatctatctctgatataatgctttcttttgctgcatatcccattgaaatacctggggaggttgttttcctccatcctgttcacaactttgtcctggtcgcttatgatccttctgcactaggagctggagcatctgttgtccgggctgctaagcttctatcagaacctgctttgcgacgaggagattctgtctatctagttgggcttagtcgaagcttacaagcaacatcaaggaaatcaatcataactaatccttgcacagctgtcaatattgggtcagctgattgtccacgataccgtgccataaatatggaggtcattgagctcgatactgattttggtagcacattttcgggcatattaactgatgagcaaggaagagttcaagcattatgggctagcttttctacccagctgaaatatggttgcagcagctcagaggaccatcagtttgttagaggcataccaatatatgcaataagccaagtacttgagaagattatcactggaactgaaggaccttttcggcttatcaacggaataaagagggcaatgccatttgtcagacttttggaggtggaactttatccaactttgctatccaaggcaagaagttacggattgagtgataactgggtgcaggcccttgcgaagaaggatcctgtgcgtagacaagtcctacgggtgaaaggttgtttggctggatcgaaagcagaaaatcttctggagcagggagatatgattcttgctatcaacaaggagccaattacatgcttccttgacattgagaagacttgccaagagttggaccaatccattgggtcagatggagtgcttaacatgacaatattccgtcagggaaaagaaattgaccttgttgtcggaactgatgtaagagatggcaatggtacaacccgtatggttaattggtgtggttgcattatccaggatcctcactcagcagtgcgtgcacttggctttttgccagaagaaggtcatggtgtttatgttgctagatggtgtcatggaagtccggtacatagatatggcctctatgctctccagtggatcatcgaaattaatgggcaaccaacaactgatctggaaacttttataaaggtggtgaagggtctcgaagatggtgaatttgttagggtgaggacggtccatttaaatggaaagcctcgggtacttactctgaaacaggaccttcactactggccgacctgggagctcagctttgaaccagaaactgctacatggcggaggaaaataataaaagcattgcaatcagccagggcgtgatattttcatgttttgctgcgaccttttcatgctttcagaggagcatagaggtatggaagttagaggttcgtgcctttgtttggtaagctaaatcgtgcattatatatgcaggattaagcaaccctgcactttgtagggttagttgtgtgcattagcataggggtgcttgaaagatatataaaaggtacattaaaggtatatggattcattgtctgtggtctctggacaatttgaccacaggatttgccatttgtatatcgtctatttctatattttggtagaaaaagaaataaaccgttagccttttct

SEQ ID NO: 24935 - DNA, 1169 bp, Zea mays
  Clone ID: LIB3689-222-A8_FLI
ccctcttcgccgttgacggagcttaccgaggaaagaagggcagggccatggcgggagccttcgctttccgcctcgtgcctcgcctcgccgcagagccggcggcgagggggaagggtggcggaggaggagccaaccgcgacgccggcagcagggcgctggtgtcaaagaaaccaaacaagcagcagcatttgtggatcaggaaggagacagctgggtcagggaagaaggctctccgtcttattgatgctgtaagatatacacttgccattgatactgtttcgaagttaccaaatgaaagagaagctatttatggtgcattggacaagtggagtgctttcgaacctgaatttcctattatagcagcagcaaaagctttggggatgttgaaaaggcgacgacaatggttaagaataatccaggtaaccaagtggttgatgagcaaaggacaggtgctgacatggacaacatatgatacacttctgctcgcacttcttatggataaacgggtagacgaagctgagtcagtttggaacactgtaatacagactcatacccgctcagtgcccaagaggttgttctctcggatgatcttgatctacgacattcaccagcgcccagataaagttttggagatattcgcggatatggaggagttaggtgtgcgtccggacgaggatacagcgagacggatcggaaaggcattcgtggcttctggccaagaagaaaaggagaagcatgtcctcgagaaatacttgaagaagtggaagtacatccatttcaacggcgagcgcgttcgcgtgcggagggacggaccattggcgtagtgcccgttttctgaaaaatgctcgaacctatcagagtatcgtgccggtaggcggtagggcaggggagatgctgttactgccgctgtgacagtcaggcacatggatatcggcactagtccctatcctatgtatgtggaatggaacggaaactggagattggttccatggctctagcctgtggaggagacgagcggatggggggtggctggctactaccggcgagatagtgatttaataggcactacataggcgtccagtgattgcgatggctttaacttgcgtatgtgtctgcggaatggtcccgtgctatttcggtgacttgtgcttgtggaattgtgaacaccc

SEQ ID NO: 24936 - DNA, 736 bp, Zea mays
  Clone ID: LIB3689-222-B4_FLI
tagtcgcagctgacggacgactgaaccaccgacagacaacatggccgcctccgcctccaccgtctccggcctcgccggcgcctccctggccagccgcccggcgttctccaccagcttcacgcggggcagccgggtgtcggcgaggaaccccctgatgagcaggaacctggagaggaatggcaggatcacctgcatgacgtgagttgactgagctttttattacgagctttctgtgaaatatacttgtatatatattatactagtcgctgctgatcctccgtacgcgctcgatcgccaggtttccccgggactggctgcggagggacctgagcgtcatcggcttcgggctcatcggctggatggggccgtccagcgtcccggccatcaacggcaacagcctcacggggctcttcttctccagcatcggccaggagctggcccacttccccacgcccccgcccgtcacctcccagttctggctgtggctagtgacgtggcacctgggcctgttcatcgtgctcaccttcggccagatcggattcaagggcaggaccgaggactacttcgagaagtgaagcggttaagatcctatccatcatccctggtgctgcgctgcgttgcgttgcgtgcgtgctcgccgctatcgaacctttgctgtatagggttccgatttcgtcgaatgtaatgtatgatgctacttttgagcttcaatgtaaaatctatgccgtccggcccc

SEQ ID NO: 24937 - DNA, 3696 bp, Zea mays
  Clone ID: LIB3689-222-D11_FLI
ctccgcttctctctcgcctccgcttcgcttcgcgagagacgggccgacgacggaaccctaggattcgcgcccgcctgagcggccaagccaccaggaccgcgccctccggacccgggggcgccagacaagctccggggcgcgcggatcgaccactggccggcttaccgccgccgctgccatgtcgtcgctcagccgcgagctcgtcttcctcatcctgcagttcctcgacgaggagaagttcaaggagaccgtgcacaagcttgagcaagagtcagggttcttcttcaatatgaagtacttcgaggagaaggtccatgctggggagtgggatgaggtggagagatacttgtcaggattcaccaaggtagatgacaataggtattcgatgaagatcttctttgagatcaggaagcagaagtatttggaagcgcttgataggcatgatagagcaaaggctgtagatattcttgtcaaggatcttaaagtcttctcgacattcaatgaggagttgtataaggagataacacaacttctcactcttgagaattttagggaaaatgaacagttgtctaagtatggggatactaaatcagctcgaagtattatgctggttgagctaaaaaaacttattgaagcaaacccccttttccgggaaaaacttgtcttccctactcttaaggcatcacgcctccgaactctaatcaatcaaagcttgaattggcagcatcagctttgtaagaaccctcgtccaaatccagatatcaaaactttattcaccgaccatacatgttctccacccaatggagctcgtgcatcgccggtatctgtaccactggcagctgttccaaaggctggtgctgcatatccaccactcacagctcatactccgttccaacctccacctggtccatctttagctggttggatggcaaatgcagccgcctcttcatctgttcagtctgctgttgtagcagcagcatcaatacctgttccacccaatcaagctgtctccatgttgaaacgcccagctctaacagactatcaaagtgcagagtctgagcaactaatgaagcgcttgaggcctggtggacatggcattgatgaggccacatatcctgctcccacccctcaacctgcatggtcagtggatgatcttccaaggacagttgcttgttcattgtcacatggatctaatgtaactagcatggattttcatccaactcggcatacactgcttctagtgggatctgctaatggtgaatttacactttatgagatcggtctgcgtgaaacattactttcaaagcccttcaaaattcgggatataaatgcatgttcaccacaatttcagaatgctgttgtcaaagattcctccatatccattaatcaagttacctggagccctgatggagaaatgattggcgttgcattcacgaaacatttgatccatctgcatggataccaaccaccaaatgagacacgacaccttctagagattgaggctcattctggaggtgtaaatgatatagcattctcccgaccaaataagcaactttgtgtggtcacttgtggagatgataaactaataaaggtatgggatatgcatggacataaattattcacatttgaagggcatgaggcacctgtgtattctatatgtccgcatcacaaagagagtattcagttcatcttctcaacttcccttgatggaaaaattaaggcctggctttatgacaatatgggatctagggtggactacgatgctcctggcaagtggtgtactactatgctatatagtgctgatggaactaggttgttctcatgtggaactagcaaagagggagactcctatttggttgagtggaatgaaagtgaaggatctatcaagaggacatattctggattccgtaaaaggtcagctggtgttgctggtgtagtgcagtttgatacagctcagaatcacattctggctgctggtgaagataaccatattaaattttgggatgttgacaataataacatgctgatctgcaccgatgctgaaggaggcctcccagctcttcctcgcttgaggtttaataaagaaggcaatcttcttgctgttactacagcagacaatggttttaagatacttgcaaatgctgatggacttagaactctacgcgcattagggagccggcctccttttgaagcatttaggccgcaatacgaagcttcttctatgaaggtctcaggtgctcctgttgttgctagcatctctcctaacataggccgaatggatcacttggataggaattctcctgcaaagccatctcctatactgaatggtggggatacagcatcaaggagcatagatataaagccaagaatctcagaagaaaagcctgataaagcaaaaccttgggaactaatggaagttctaaatccccagcaatgccatgtagcaacaatgccagaaactccagaccaagccagaaaggttgtccgacttctgtacacaaattctggtgttgggttgctagcactagggtctaacgccattcaaaggctatggaaatggagtcgaaacgaacaaaatccgagtggaaaagccacagctagtgttgtgccacaccattggcagccaaatagtggtcttgtcatgacaaatgatacagcagataccaatccagaggaggcagttccatgcattgcactctcaaagaatgattcctatgtgatgtctgcttgtggtgggaaggtttctttgtttaacatgatgacattcaaggtgatgacaacattcatgccacctccaccagcatcaacatttttagcatttcaccctcaagacaataacatcatagcaataggaatggaagattcaaccatccacatatacaatgtcagggtagatgaggtaaaaactagactcaaaggacatcaaaggaggataactgggttggcattctccaccaaccttggcatacttgtttcttcaggcgctgatgcacagctctgtgtgtggaccaatgacacctgggaaaaaaagagaacagtctcgatacaaatgccagctggaaaaactccttcaggagatacacgggtccagtttagttctgatcaaagtcacttgctagtagtacatgagactcaactagccatatatgacgcatcaaaaatggagaggatctatcagtggataccccaggacacattgtcagcttccatatcgcatgcatcatactcatgtaacagccagctagtttttgctgccttcactgatggtaacttaggtgtttttgatgcggagaacttgagattaagatgtcgaattgcaccatcggtgataaacagcaatccacctgttcaccctcttgtcgtcgccgcacatccccacgagccaaaccaatttgcggtcgggctgtcagatgggtccgtcaaagtgctggagccattggagtccgaagggaaatggggagcgcccgctccggcagacaatggcatcattcccaatggcaagacgccagcttcgtcggctactagcaaccctgctgcggatcaaatccaaagatagattgtattccctaagcttttctttttctgcaaactttctaattacactgacttatttgtatgtggatgccgttaggatattatcgtcatttgttgtaaaaaggacagaataggttttatgttcaggtgtggttaactttc

SEQ ID NO: 24938 - DNA, 1156 bp, Zea mays
  Clone ID: LIB3689-222-D5_FLI
gtctgtctcgcgcgtgcagtgtgctcaagcaccgaggcccgcgggattggaaaaaagattcctcgcccaaccctaccccaggcgatctcgcatcgcatggccaccggaccgcggtctctccacgccctcctcggcggcggtgcagttgccgacttgctgctgtggcgacggaggaatgcctcggcggcagccgtggtgggcgccaccacggtctggttcgtcttcgagcgcgcggggtacagcttcccctccgtcctctccaacgccctgctcctcctcgtcgccatcctcttcttctgggccaagtctgcgtcgctgctcaacaggcctcttccacctcttcctaatcttgaggtctcagatgcgattgttgaaaaagctgcaaatcatgctcttgtatggatcaataggctgctggctgttggtcatgacatcgccatcaagagagataggaaagtttttataaaggtgatactgattttgtgggtggtttcattcattggaatgctcttcaattttcttacgcttatttacattggtgtaatgctttctctgttggttccaccactctatgagaagtaccaggaccaggttgatgagaaggttggtgtagcgtacagtgtactatcaaggcacatagataccatcattaccagggctgggcaatcagccaagcagaagaagactgagtaaaagaaacgttttgctgtattgtggaacatctctggttgtcaagtgaagttgacagtgggcctttcatctttgaccctctattccactaatatgaaccctcgatatgctgatctgaggttctgatgtgcattatgggaaatgaggcggcttgtgtatttcctttttgaacatggggtttactatgggtgcatatcgcactcggaatgatatcgagaaattgcgactcgtacatgcaattatgcaggctgcttgctctgttagtcatatgatctttccgtcagtgattttaaattttaggctgctccgaggaactttgcaggctgctccgagcaattatgcaggctgcttgctcattcgatgcccatctactggtagctcgttttctgaaatactagtacctaataaggtgtattctacgtagacagttgcatatcatgtgaataaataggtattttctggcggc

SEQ ID NO: 24939 - DNA, 2982 bp, Zea mays
  Clone ID: LIB3689-222-E3_FLI
gaccaacagcctccacctcctctcccaccgcgccatggccgccgcctctccccccacctcctcatctccccctcctcccagagcagccgacggtgacggggacggggttgggtgcggtgccgcccgctgctcctcgcccacgcccgcgcaacgcaggaggacctcccccaaccacagcggcgggagctcccgtaagagttcaggatcaagagattttgcaggaggttcacttttgaaatatgtgaataaatcaacattgcacttcaagaaatctaagaatcgaagaagtggttcccctgtcaactggacccctcggaagaagactgaatcatacatgaagagaaaaataaagcatcttcaggaaactgatggaatgaccgcatccctccatgagactctaggaaatgcaaatcctcactatactaggatggcaagggagaagatagcagcgagagaggcagctagaaaggcaacagatgctcgcaaagctgctatggttgaagcttcatggtgccgaattcttcgagcagccaggatccaaaataagaatgccgaagaagttatggagaaggcagtgctacaagcaactgaagcattcgaggaagctcgggcattgggtgtgatgatgtatgacagacctgactgtccacataagcagtatgaggtggaatcatcgttgcatacaggagcacaatcaacccataaagttatcgcatcgtttcagacagcttttcaggttgatatggaggtttctgctgcagtaaaaaaagcatttgttcaactcgcaaactctccggattcagcaaagagagaagagtttaaggaactattatggaaaatcagccaaaatcctgatttgacagaacatgaagataaacaacaactggttgactgtagcaatgaagatgcaattgtgttgaaactcaataaagaacacctcagcggcagctgtgttgcttctgatttcaataccacaaaagttcaagaatccatagatgttgttagcattatgcttgaacggctaaaagctctccatgaagaagaacttgcctccttagcagtcattgtagctacatctggccttaatgctgaactacaaaatgaaagaagcaaatatcatgaaacaggcgctgtgaataacactagtgctgggtcactcagatcacaagcaaggaggtattcgactgcagcgagttttattggtgtccaaggaccaaagaaagaagtcacttctgagttaccgagtctggataagttcttggtgaagcatctttcaaaacttgaaagagaagttcaggaagcaagagaagcaagcagaaaatccacattagtaaagtctgtcacacaaggtgcccacatccaatttacaggcagcaatgcaaagacaccagaatcaacttcagaactcagcagcattctggtgaagcatgtgtctaagcttgagaaggaaatcctggaagcaaagaagatcaaccaaagaattcaccaggtggaaggaaattgtgaggatgtcaaatcaaatgtgcagtcaagaaacaaagaactggaatttaacaagattcagccagaagttgaaagtaactgtgattcaaagggaagctgtgagtccaaggaatcctgtatagacaacaatgacataaaagataatgatgattgtgtgcaagaagacaaagagaacaaaaactgctattcacatcagttaccaccatctggtgcaaagggcaaacatggtggcaagaggttaactcgacttgaagctgctaggctggaagcacttaaatccttttgtactatagatggcaatgcattggatgctggcctggataagatcttcgtcaagccaatccatagattggagaaggaaaagagggaagcacgtgaaggacaaatcaatgtgcagaaacatccccagaagcttggtcaaagcgcaactgtgacagagggcttagatgatatcttagtgaagcatgtatcaaggctggaaagagaaaagattgattaccaaaagaggaatgaactgggagtgggagaaagatggagcaatgtgccacatgatcagcggagtaatggtaacaatgtaaaatcatctgatagtttagatcaagttttagtgaagcgtattagtcgactggaaagggagaagttggaatatgaaaagaggaatgcactagaaggaggttccgatgtggaaccaaagagggaaccacactgtaacaatgctgcagcttctgatagtttagatcaaaacttaattaaacatgtctccagacttgacaaggagaagatagagcatgagaagaacggtggtatgataattgtaaagaagggtcagacgcaatgtacaaatggagccgaaggaggcctggctgacgtctttgtgaagcgtccaacgaagctcgagcaggcgaaactggcttctgctgccgaggagaaaccagctagtggctttaaccctgtcgaagagcgtagaagagcaagacagaaggagcttctcgatgcgtggggaggaatgggtttggggaactcgatgaagccccatgtatcaaggattgagagggataaggtcgcttggaggatagccgaggatgaacagaagcagatggctgctgcaagggaggcgtgacttcactgaaacctggacaaattatctgatgcgttgcgctccagcttggaggaaaatgcatcctctgaagtctgatcctccttccttttgacaaccgacagttgttttgggggaggatcagatgtccagggcgtcatgccatgtaccagtgccgcaaacaaagcgtgaaactgtcgacaggttacttggttcgaatcctccttttgtatttgttgttgcctctggtacattctcctttggttgttccttccatgtaattacgtatcgttgtccaattgtctagcatataattgcgagcaagttcaagtgaaattaactcctttggagatgacgaatgaaaaggcccagtgcagtttcct

SEQ ID NO: 24940 - DNA, 628 bp, Zea mays
  Clone ID: LIB3689-222-E5_FLI
ctgcagcagtacagccttgtagatcatccaagcttgctgctagtgctagtgctagtggtatcgatgaggagacgccagatatcctgcacgaacctgactctctcagtaactgtgtcaagactactacttcaccgaacggaaaacgggtctcgccgccacataacgcgctcggcagctccccgaaccgaaaaggtggcaggaagttgatactcaagtcaattcccttgttcccgtcactcacgggagacacaaacagcggctctgcaatgaacagcactgatagcgcattctgcgcgtcacctctcactttaggaccatcttaaagctgtgaagttggtggccatgggaccggagtacgacttgtagtccgaacacgtgtgcctcgtatcctacggcaaggctcgaggtactgtagactgtagtaagttaggctttttaaagttgtagtaatctgtatttgtaaaatatgtagactcaataatctgtatgtaagatgctgcgatgggtgaagctgtttatctttatcaaattgtagcaacattacagatcacctcttgagtaggtttcacagttccaccccctgtctttctttttttttttttggaaaggaatccggtccatgttttcc

SEQ ID NO: 24941 - DNA, 914 bp, Zea mays
  Clone ID: LIB3689-222-H2_FLI
ccgccatggaccccgtcgccacatgggggctaaccccgctcgcgggcgccgacccggagatctacgacctcctggagcgcgagaagcggcgccagcgtcgcggcatcgagctcatcgcctccgagaacttcacctccttcgccgtcatggaggcgctcggctccgcgctcactaacaagtactccgagggcatgcccggcgcccgctactacggcggcaacgacgtcatcgacgagatcgagatgatctatctggaactgatgttgcccgaaaggtcattatccttgcaagggaatcaggtttgaggcttgaactttctgatattcctgtgaagagccttgtgccagaaacacttgcagcatgctcgtcagcagatgaattcatgcagaagctaccatcctttgacgaggactgggccaggcaacgcagtgatgctgatgctgcagacgaagtcctgcgttacgttggagtggtggatacggtgaacaagaggggacaggtggagctacgtaggtacaagagggaccacccgttcgcgcagctctccggctccgacaacatcatcgcattcaccacctcgaggtacaaggagcagccgctaatcgtgcggggcccaggcgcgggcgcggaggtgactgcgggtggcgtcttctgcgacatcctgcggctggcgtcttaccttggcgctccttcttagagcttccacttacagttgtcaatttgaagaggcagatggacagtgccctgcatgatgcctccgtgtttaggcttattatggacttgctcaaagttgttctgaataagtgccaggaaataaggcctctatctatttaggcctctatcttcggggtagctgactaagtgttgttattgctacggaatccagaattctgtgaattgaaatgaattgtacc

SEQ ID NO: 24942 - DNA, 1197 bp, Zea mays
  Clone ID: LIB3689-223-B10_FLI
gtcactagtagagggcaagaggcgacggaatgacggagcggcaggtggcggagctgggtcccgggacggcgtgctgcggctggaaccactgtggccgccgcctcgccgctggcgccgtcgatggctccgtctccgtctatgactcccagccgccaccctcgttcaagtggcaggcccatgagcaagccattgtgaatgtcgtctggcttcctccagagtatggggatgctatagcttgtgtttgtgctgatgggacactgtctttgtgggaggaggttgctgctgatgatcaacttccaacctggagaaattgtaaaatcttcgaggatggcaactctcatatactaaatgtacattttggattacatctgggaattctgaaaatggttactgcatactcagatggccaagtcaaggtctacgagctcttggattcattggaattagacaagtggcagcttcaggcagagttccaaaacattactgatccaatctctagatttggaaaacctgcatgcacttctgcatccatagcatggaatccaagaagaggtggaagccaacaagctagttttgcaattggctttaattcagattcgcctcatttcaactcttgtaagatttgggagtttgaagaagctcatcagcgctggcttccacttgttgagctaggttcacctgaggatacaggagataaagtgtgtgctgtagcatgggctcctaacattggcagaccatatgagattatcgcagttgcaacctgcaaaggaattgcaatctggcatataggtttgaacgctgatgctgatggtggaccttcgacgcagaacgttgctttacttaatggccatgatggcgaggtgtggcaactggaatgggacatgggcggtatgacactcgcatcaaccggaggagatggcatggttaagctatggcaggctaatttggatggagtttggcatgagcaggctgttcttgactgcagtggatcacatgtctagggtctacgtgtttcagaaaacattttttttgttcccagcacactagaagttgctgctcttgctgcagaattatcaagtacttgtttcgcttatccgcccaactattgctgtctcctgtgtggctggttgggcgctatcaaaactggaccattaacggccgtgggaccgcattgaaaagtccagaaaatgaaggtac

SEQ ID NO: 24943 - DNA, 1494 bp, Zea mays
  Clone ID: LIB3689-223-C8_FLI
ccgatctccgatcccctcgtcgatccaaagatgcagatcttcgtcaagaccctcactggaaagactatcaccctcgaggtggagtcttctgacaccttgttctccgcctcaggggaggcatgcagatcttcgtcaagaccctcactggaaagactatcaccctcgaggtggagtcttctgacaccatcgacaacgtcaaggccaagatccaggacaaggagggcatccctccagaccagcagcggctcatttttgccggcaagcagctcgaggacgggcgcacgctggccgactacaacattcagaaggagagcaccctccacttggtgctgcgtctcaggggcggcatgcagatcttcgtgaagactctgaccggcaagactatcacccttgaggtcgagtcttctgataccattgataatgtcaaggccaagatccaggacaaggagggcatccctccggaccagcagcggctcatttttgccggcaagcagctcgaggacgggcgcacgctggccgactacaacattcagaaggagagcaccctccacttggtgctgcgtctcagaggtggcatgcagatcttcgtgaagacacttactggcaagacgatcacccttgaggtggagtcctcagacaccattgacaacgtcaaggccaagatccaggacaaggagggcattccaccggaccagcagcggctgatcttcgccggcaagcagctggaggatggtcgcaccttggctgactacaacatccagaaggagagcaccctccacctggtgctccgcctcaggggtggtatgcagatttttgtgaagacattgactggcaagaccatcaccttggaggtggagtcgtctgacacaatcgataatgtcaaagccaagatccaggacaaggagggcattccaccggaccagcagcgcctgatctttgctggcaagcagctggaggatggccgtaccctcgccgactacaacatccagaaggagagcaccctccacctggtgctccgcttgcgaggtggtatgcagatctttgtgaagaccttgactggcaagaccataaccctggaggttgagagctccgacaccatcgacaacgtgaaggcaaagatccaggacaaagagggcatccccccagaccagcagcgtctgatcttcgctggcaagcagctggaggatggccgcaccctagcagactacaacatccagaaggagagcactctccacctggtgctccgcctccgtggtggtcagtaagccatggttcatttaagctgctgctgtacctgggtatctgcgtcgtctggtgccctctggtgtacctctatatggatgtcgtcgtctaataaacatctgtggtttgtgtgtcatgaatcgtggttgtggcttcgttggtttaatggacctgttgtgtcctctgtgttgtacccaaaactcttctgcagcagtatggcttgaatccttatgaagtttgatgtttgaactt

SEQ ID NO: 24944 - DNA, 2325 bp, Zea mays
  Clone ID: LIB3689-223-D10_FLI
ctggcttctcctccccctcttatcaagtcctcctcgggttagggttccttagggttttgtggaggggcgatggcggcggctgatgtggagtaccgttgcttcgtcggcggacttgcctgggccaccagcaacgagtcgctggagaatgccttcgcctcctacggcgagatcctcgactccaaggtcatcaccgaccgggagacggggaggtcccgcggcttcggcttcgttaccttctcctccgagaactccatgctcgacgctatcgagaacatgaacggcaaggagctcgacggccgtaacatcaccgttaaccaggcccagtcccgtcgccccgcgggccttcttctcctcgtcacccccgcacgccccgtcgcttccggcgtcgggctacatcccgcgccgcgagtacggcctggtgcccatggtgatcgagcacacctcccgcggggagcgcgcctacgacatcttctcgcgccttctcaaggagcgcatcgtctgcatccatggccccatcaccgacgacacggcctccctcgtcgtcgcccagctgctcttcctcgagtccgagaaccccgccaagcccgttcacctctacattaactccccggggggcgtcgtcacggcgggcctcgccatctacgacacaatgcagtacatccgctcccccgtcaccacgctctgcatcggccaggccgcctccatggcgtcgctactcctcgccgcgggggcgagcggagagaggcgggcgctgccgaacgcgcgggtcatgatccaccagccctccggtggcgcgtcggggcaggcctcggacatcgccatccacgccaaggagatcctcaaggtgcgcgaccggctcaataagatctatgccaagcacacgggccaggccatcgaccgcatcgagcagtgtatggagagggacatgttcatggacccggaggaggcacatgaatgggggctcatcgacgaggtcatcgagcaccgccctgtctctcttgtgtctgatgctgttggcagtgatccgccaaacctcggtggaggcggaactgaggtgaataaagggacggacgagccatctccagcgtgatggcattgggcagtcacaaggtgcaatccttttttgtgttcctgtagctgtcttattggagttataaggtttaattcgtacatgagggtgaataacttaattttatgtctgctgggctaatccactagcaacactgttgttttgctactttattaattgatctgttgctgataatgagtgctctctggtatgagccctcatcagtggtgatatatgcattgttatagatttgttcgtctgaaatcaaacagtgctgtttaaaggataaaggccacagccttgaaaaattatgttgtattttgtctaaggctaattcagagtgtcatttctgtattcaacaaagattcgaattttctaattatcactgcatgttgtctggtatttttagaattttagcggtgttgtgaatttagcggtatatgatgttaatattttaagttagttgaacagttcatcggtattgtgaaatatctgaataagaggctttctcctacttgttttttttcatagcacttgatagctttctataatgagaagctgatttcatagagttttctaccgagacgggagaactgagtgcagcttgcattttatctctgctatatgggattgagtgttggcggactaagagacgacatatccaacaactaagtgtcgcagagatgcgtatgttgtgttggatatatgggcacacaagattggaccgagtcagaaacgatgacatacacgatcggctagtagtaacgccaattgaaaaaaacttattcaacaccggttgagatggtttgggcatgtccaccagagaccccagaggcaccgctgtatagagacatcataagacgggacaataatgtgaagagaggtagaggtcgaccaaatttgacatgagaggaggcaatcaaaagggacttgaaggaatggattatcccaatggagctgtgtttggatagaggtgcttggaaagaagctatccacgtgcctgaaccgtgattaggtctttttccttttagtgctctcaaaagctttttcccttctctttctttctctttttggtgacatgttgggtttcaactttagcctactctaacttgtttgggactaaaatgctatgttgatgttggaggaactggatactgaattttctgtgtcagaaactaagaagggaccttggcattattatttttaagatagattataaaccatatgtaacattacccaataacaataatcttttt

SEQ ID NO: 24945 - DNA, 1332 bp, Zea mays
  Clone ID: LIB3689-223-D5_FLI
cttcacatcgtcaatccctcttccacagtttctgaaatcagaagggaaacacaggaacgacaggcaattcgaggctggcaatctaatcgtctgccatcccgtctcatcgttctcccaaatctgagagcgttcccaggacctagggttcttgagatccagccccaggatggatccgaaccctagagctcccctcctcctcgccatcgtcgttctcgcgcttggcgtatccgtggtggccagcgccgaggacgacgcgtcgggggtctctctgggccgccgcgccggggggttcttgcacggcctgaagaaggatgcactggcggagggcgatcatggggtggcactagacgaggttggaccggggctgttcgacgcactctttgccagcctctccatgatactagtcagtgagattggagatgagacattcatcattgctgcgctgatggcgatgcggcaccccaagtcaattgtgttgtctggtgcactatctgcgctttatgtgatgacagtattgtcaactggacttggcagaatagtgcccaacttgatatcaaggaagcacactaatagtgctgctacagttttgtacttattctttggactacggctgctgtatattgcatggaaatctgacccaaagggatcccagaagaaggaaatggaagaagtagaagagaagcttgagtcgggtcaagggaaatcaaccatccgtaggttctttgcaagattctgtacaccaatctttttggaggctttcatcttaaccttcttagctgaatggggcgaccggagccaaatagcgacaatcgcgctggcaacacacaagaacgcaatcggagtcgcagtgggagcgtcactggggcacacggtgtgcacatctctcgccgtggtaggagggagcatgctggcgtccaagatctcgcagcgaactgtagcgacgatcggaggcgttctcttcctagggttttctgtttcgtcctacttctaccctccgttgtgatgaaaaggtactcgcaaccgctcccacttggatggtatggtagtcttgagttgtctcatgtcctgccgtaagaaacgttgtgacttccccgcaggctgctgatcgaaacatagatggcgtaacaacccagatcgtaacagcacgcctcgagtcgcgggcttcgtgtaatgtacagacacattcgaacattcctgacaacaatgttctctgccatgctgccttcaagtccgtatgtagaagatgtctcattgagagcatggccgactttttattgcttgtatccgaagtattaacttatactatacgctgctccaatctcgttcaccagg

SEQ ID NO: 24946 - DNA, 798 bp, Zea mays
  Clone ID: LIB3689-223-E3_FLI
cctatggatacatggcccctgagtacgccatgcgtgggcactactctgtcaagtccgacgtgttcagcttcggcgttttaatcctagaaatcgtcaccggaaggcgaaatggtggctcctatagctctgaggaatcggccgatctccttagtctggtgtgggagcactggacgacggggacattggtggagatcatggatccatccttgagcagccttgctccacgagacctgatgttgaagtgcatccacatcggcctcctctgcgttcaagatgaccatgaggacaggccgatgatgtcgacagtgaatgtcatgcttagtagcagcacggtgaccctccaagctccatcgaggccggcgtttttgcttcccgaagagtggcttcaactcagagatcaactcagaagtgtacccgccaggagcttatcagtccgcgagcaggtcgcccatgtcgctcaacgacgtctcaatcactgagctcgagcccagatgatccatgcatggcggcgatgaattgatgattctcttcttcgaaggagtttctgttgagtgtttgtgttttaccgcctgggccgagcacgtaagtgtgacccgtagtatacaatgcaaaaccagtagactaccaatatggcgaaatataacgcctattagtcgtccaattacttatgtatctgtatggcattgcctttcaaatgtagaggagagtagaaatgagaacgtggataagagaatgtatcggtggttcctgattcctgaaaatgtcatcccagtattggttgaagttaggtgttgtttg

SEQ ID NO: 24947 - DNA, 774 bp, Zea mays
  Clone ID: LIB3689-223-E9_FLI
ccgaccgtgagcgccgagtacagcgaggctgtggagaaggccaggcgcaagctccgagccctcatcgccgagaagagctgcgccccgctcatgctccgcctcgcgtggcactccgcggggacgttcgacgtgtcgtcgaggaccggcggtccattcggcacgatgaagcatcagtcggaattggctcacggcgctaacgcggggctggacatcgcggtgcggctgctcgagcccatcaaggaggagttcccaatcctctcttacgccgatttctacaaaccctttggtctttgacaactcttacttcaaggaacttctgagtggtgataaggagggccttcttcagctcccaagtgacaaagccctgctgagcgaccctgttttccgccctcttgtcgagaaatatgctgcggatgagaaggctttctttgatgactacaaagaggcccacctcaagctctccgaactggggtttgctgatgcttaaatagaccctatcttggagtgatacattctgctgcctgtatggaatcatgtggtcttttgcatctggagtcaatgtgaacaagcagattgtcgtattgtctttctcgtaataaatttgtcgatgttgagcccttaggctgttgttggtacattggtacttcgtcgatgcttgaattgggaccctttgtccgttttcctagactctgatgctgtatgcaactgaaacaagtaaatctatgatcttaaggctgcagtatgttcttgttactctgcttttatctagtttcc

SEQ ID NO: 24948 - DNA, 2332 bp, Zea mays
  Clone ID: LIB3689-223-H2_FLI
gtgaaatgtaagcaagcggaggggagggacacgccgagctgaagccgcagagaagctgtcgtcaactgaactccgtctcccaacgagagagagagagagagagagaggtagcacagcagcagcagggcgagcggcgccgtgtttcctgcgagcccgtccggccgccatgaagttcatgaagctcgggtccaagccggacgccttccagaccgacggcggcggcggcgacgccagatacgtgctgtcagaccttccgtcagacatcgtcgtccatgtcgacgacgcaaggttctacctgcacaagttcccccttctctccaagagcggtctgttacagaggctgatagtagaggcgagccagaacggcagcgacgaagttgccatacaagacgtccctggcggagcgaagaccttcgagatctgcgcgaagttctgctacggcatggtggtgaccctgaacgcgtacaacgtcgtcgccgcgaggtgcgcggcggagtaccttgggatgaccgaggacgtcgagaagagcaacctggtgttcaagatcgaggtgttcctgagctccggcatcttcaggagctggaaggactcgatcatcgcgctgcagaccaccgacgcgttgctgccgtggtcggaggagctcaagctggtcggcagatgcgtggactctgtcgctgccaaggctaccgtcagcgcgtcgaacgttgtgtggtcgtacacctacaacaggaagtctgcgtcctcggacgagatcgtcgaggctcgcaggagctcccaggcggttcccaaggactggtgggttgaggatctgtgtgagctcgatgtggacctctacaggcgtgtcatggttgcggtcaagtcgagggggaggatcccctccgatgccatcggagaggcgctcaaggcatacgccgctagatggctgcctgagtgctgtgacgcgctggtagacgacgcctactctggagcgtacaagcacctgctcgagaccatcgtctggcttttgccctcggacaaggggtcttcggggatctcctgtcgtttcttcctgaagctgctgaaattcactgtcctcgtcggcgctggggagctcctgaaggaagagctcatggacaggactgtgttgcagctccacaaggcctcggtcagtgatctcctgatcccctccaggcctccggcgcagaccgtctatgatgtccagctggttcagacactcatcggcaggtacatgagccatgccggggtatctcaaggtgggatttttctcaacgaccttgaccaggagatgtttgagacgaacgtggacggtgaatctttgctagcgttgtgcaagctggtcgataggtacttggctgaagttgcctctgatccaaatctctctgtttcgagctttgtggatttggcgacttccatgcctgaaacagccagaccgacacatgatggattgtacactgccattgacgtatatctgaagttgcatcccggcctacccaagatggagaagaggaagatttcgaacctgatggacgtgaggaagctgtccaagggggcgtgcatccacgcggcgcagaacgaccgactcccgctgcgcgtggtggtccaggtcctcttcttcgagcagctgcgcgccgcgggagccgccgccgccgctgggacgcccagcgccagcgtggcgcggtgcatagcgcgcctggcggagcaggaggaagaggaggagcgctggaacgacggccgcgcgctgccggagcccccgacccccggcgcgctgaagaggcagctggggagcctgaagctgcagggcgaccaccaccagggcgcgggcgacgacgggcggcgcctggtggcgcgcagcaacagcgtggccaaccagagcagccggatgtcgctgtcgtcgcggtcgcggaggatctttgacaggctgtgggtcggcggagcgaagctgcccggggaggccgccgccgcgggcaaggggtcgtcggacacgtccgggagctcgcagagcccgcggtcgtcggcgaagccgccggagtccaagtcgtccagctcgtcgtcaaggaaccggcggtactcggtctcgtaggccggggccgggggccggccggtcggcggcggaggctgtacagagaggaaggagagcctggtccaagcctaaacgtagctgctgctaactttcagagttcatgttgatctcgtgctgcctgcagtatgtggcatgcagctagaagaaatctttgttctgtcagtccagttgttctatctaatcttgagataatccctggtttctgtaacagacttggaaactatgattcagtcgaattctccatgaactggc

SEQ ID NO: 24949 - DNA, 1825 bp, Zea mays
  Clone ID: LIB3689-223-H4_FLI
gtttttttttccaaaaaggggttcgccgcaggccgcacacggcacaccccctacacgtcccaagtcccccatggagctaccagcaccgtcctccgcatccttcttcctcgtcgccgttgtggctggtgccactctctttctcgtaaccgttctccggctccgcgcgcgatcgacgcgcaagtacaggctcccaccaggcccacggccatggccggtgatcggcaacctgaacctgatcggcccgctgcctcaccactccgtccacgagctctccaagaggtacggcccgctcatgtccctgcggttcggctcctttcccgtcgtcgtcgcgtcgtcggtcgacacggcgaggctcatcctcaagacccacgacctggccttcatcgaccgtcctcagacggcggccggcaggtacaccacctataactgcgctggcctcttctaccagccctacggcgcgtactggcgtcaggcgcgcaggctttgccaggccgagctctttagcgcgaggcggctcatgtcgctcgagcacgtccgcagcgacgaggtgcgcgccatgctgagcgacctgcgtgcggcgtcgtcggcgccggccggcggccacgacgcggtgacgctcagggagcacctctacatggtgaacctcagcgtcgtctcgcgcatgctgctgggcaagaagtacgtcgtcgaggggtctagctcgccggcgacgcccgaggagttcaggtggctgatcgacgagcacttctttctcaacggcgtgctcaacgtcgcggacatgatcccgtggctcagccccctggacccgcaagggtacgtcaagaggatgaagaggtcggccaagatgctggaccggttcctggagcacgtggtggacgagcacaacgagcggcggcgccgagaaggagaggatttcgtcgccatggacatgatggacgtgctcttggagctcgctgacgaccccagccagctcgaggtccccatcacgcgggataatgtgaaggggttcactctagacctgatgggcggcggcaccgacacctcggcggtgactgtggagtgggccatgtcagagctcctgaggaacccagaggtcctcgccaaggccaccgaggagctggaccgtgtcgtcggccgcgaccgtcttgtggcagagggggacatcccaagcctcccgtacctggacgccgtcgtgaaggagaccttgcgcctgcacccagtcgcgccgctcctgactccgcggctgtgtcgggaggacgtgtccgtgggcggctacgacatcccggcgggcgcgcgcgtcttcgtcaacgcctgggccatcggccgtgacccggcggtgtgggaagctcccctggagttccggccggagcggttcgccgggagcagcgtggacgtaaaagggcagcacttcgagctgctgccgttcggctccggccgccgtatgtgccccggcatgggcctcgccctcaggatggtgcctacgatcctgggcaacctgctgcacgccttcgcttggcggctccccgacggcgtggcggccgaggagctgggcatggaagaaacgttcgggctcaccgtgccgcgcttggttccgctccaggccgtcgctgagcccaagcttcctgctcgcctgtatgctgccctgtgatgcatggaagcctatcttgttctgcttaatatttttctcttagtaattaagtggtttattagtcgtttagaacatcgtatcctgggactatcatctgaataaagcattgcacgtgatagctagcagagatatcacaagactatcaccaagatccgaaggcttggaatttttgtttgg

SEQ ID NO: 24950 - DNA, 299 bp, Zea mays
  Clone ID: LIB3689-223-H8_FLI
tgccagctggcactttgagtgcgcaagctgcatgatggttcaagggtcctgcctgagcctgaacaaatgagcatccaaggcagcaacgcagttgtgagtcagaaacaatgccgtgcaaaggttgatgctttcagaagcggtgaaatctcagccggtggctcagtgctatgggagaaatgaaggctagctgctgttgcaataagggtagcgaatatgcatccggtctatgtatatgatgctgtgttgtttcatttattatacagcttaataagatatatgcagagggtggatttgtatat

SEQ ID NO: 24951 - DNA, 2470 bp, Zea mays
  Clone ID: LIB3689-224-C3_FLI
aacctcccttgcccgcgcgcacgagcacgcgcatcgacaccttcagctcgtgtgtccgtgcgagcgggcggtttcctcgccaagaactgtcgcgcgggtcgggggattgaggaagagagtgtcggcggcggcggcggcgacgacgacggatttttctggcccgagattcctggtcaaggcaatatgaagtacgtccttgtcaccggcggggtggtgagcggcctgggcaagggcgtcacggccagcagcatcggcgtcgtcctcaaggcgtgcggcttccgcattacgtccattaagatcgatccttaccttaacaccgatgctgggactatgtctccattcgaacatggtgaagtgtttgtgctggatgatggtggcgaggtggacttggatcttggtaattacgagaggtttctggacattaaacttactcgggacaataacataaccaccggaaagatctatcagtctgtaattgacaaggagaggaaaggggaatacttgggaaagactgtccaggttgtgccacacatcacaaatgccatacaggagtggattgagcgtgttgctatgataccagttgatggcatggagggacctgctgatgtctgtgtgatagaattggggggcactataggtgatattgaatccatgccatttatagaagctttgggtcagttctcttatcgtgttggtcctggcaacttctgcctggtgcatgtcagtctagttccagttttgaatgttgttggtgaacagaaaacaaagccaacccagcatagtgtacgtggtttgaggggactcgggctcactccaaatattttagcttgccgcagtactaaggaattagaggatagtgtgaaggagaaactctcccagttttgccatgtgccggcagcaaatattatcactttgtatgatgtttccaatatctggcgcattcctttgttgctttgtgaccaaaaggctcatgaggctatccttaaagttctgaatctggaaagggtggatagcattgcccgagagccgaagttagacgaatgggttgcaagagctgctatatttgatacccttcatgacactgtgaggattgctatggttgggaagtacactggcttatcagattcatacctctctgtgttgaaagccctcttgcatgcatctgttgattgccgtaggaaacttgttgttgattgggttgcttcgacggatcttgaggattccacagcaattgaggcacccgatgcatataaaacatcatggaatttattgaagggggcagatggaattttggtacctggtggctttggtgacagaggtgttcaagggaaaattttggctgctaagtatgcccgggaaaagaatgtcccatatcttggtatatgtcttgggatgcagattgctgtcgtggagtatgcccgtcatgttatgaatttcactgatgccaacagcactgaatttgatccaaataccaagaccccttgtgttatttttatgcctgagggttccaaaacacatatgggtgcaacaatgcgcttaggatcaaggaggacatttttcaagattgctgattgcaagtcttctaaattgtatggcaatgtcacttatgttgatgaaaggcaccggcacagatatgaggtgaaccctgatatggttccagagttcgaaaaagctgggcttcagtttgttggcaaagatgatactggaaggaggatggagatgattgaaatacacaaccaccgatattttgttggcgcacaattccatcctgagttcaagtcaagaccttcaaaaccttctcccctatttgtgggactaattgcagctgcatctgggcagttggatagggtgctgcaagaccgctgcaatggtcatgttggttcagctaaacatgttctgagcaatggctcatatacatccgcagtacaccaaaatgggaacccaaagaagctcaccaatggtctctcaaacggaacatactatgccaatggcaatggtgtgcatgcttagaccatcagatggatggatcaaggattttgcaactttttacttcaattatgcggttcctaatgcatcagttttgtccgttcgaggaagaaaaagttcttgcgctcgatgcagactgtctgctgggaatagtgctcgttcggtggtttttagttaaagaactaagctggatctctttggaaggcacgagactggtttctgtgttcgtctctaccctattgtgtaagctaaaggagcagatttgggacggaagagtttacaagttgtatatctcaaagaaaagctgaatatttttattaacttaaattaggtcttcagtgaggtcgagagctgatgcttaaaagtgggcagcagtgcaagtgcaagaaagagtatttcgaaatcaggcaactctgtattttgattttggacattttttttgtttcttgtgcgcaaataagttgatgcactgttgcatgatcat

SEQ ID NO: 24952 - DNA, 2241 bp, Zea mays
  Clone ID: LIB3689-224-C8_FLI
cccatatccgctcccctacctctccagcatctcccgtctccgtcgtctcgtctctgctcctcacctcgccgccagccatgggcaagatcaagatcggaatcaacggtttcggaaggatcggcaggctcgtggccagggtcgccctgcagagcgaggatgtcgagctcgtcgccgtcaacgaccccttcatcaccacggattacatgacctacatgttcaagtacgacaccgtgcacggccaatggaagcacagcgacatcaccctcaaggactccaagacgcttctcttcggcgagaagccggtcaccgtctttggcatcaggtgctccccctctcccgctccttccagagacacggattgcgtttacgtgttctagctgtgagctagtgtttgaaccgctgcgagtctacaggaaccccgaggagatcccgtggggtgaggctggtgctgagtatgtcgtggagtccaccggtgtcttcactgacaaggacaaggctgctgcacatctgaagggtggtgccaagaaggttgttatctctgccccaagcaaagatgcacccatgtttgttgttggtgtcaatgaggacaagtacacctccgatgttaacattgtttccaatgctagctgcaccacaaactgccttgctccccttgctaaggtcattcatgacaactttggcattattgagggcttgatgacaactgttcatgccatcactgccacccagaagactgttgatggaccctcagccaaggactggagaggtggcagggctgccagctttaacatcattcccagcagcaccggtgctgccaaggtatatgataaaatacacaatgttgcatgcaatcaactctgtaatggttgtttgcacaaactagttaaatcaaccattgattctctgttttgtgttcacttagctttgtgaataacagtataacacattgcagttccatctaagggcttgttcggttagctctcaatccatgtggattgagtgggattggatgggtttgaatcccaaacaagtcaaacttcttaagaaaatttttcaatcccatccaatccatatgtattgggtataaccgaacaaggcctaagggcttgttcggttagctctcaatccatgtggattgagtgggattggatgggttttaatcccaaataagtcaaacttcttctcaattttttccaatcctatccaatccatgtttattgggaataactgaacaagccctaaatgagcatgcacacatctcttgggatgaagcattaggagatcctttttttattgatacacaagtttttactgatacagcatctatatcttctgattggtggttgaatattatttttttatcccctgatgttttgatgtcctgaggtgcaggctctttagctgaaatatcatgcttgaatgtttcaaaaggccatcataaaatcatgcatgtggtacacctaaagttgtgtagcggcaatcattcagtttaaaatcatctttgacccctggggatgctaaatctacaacgttacacctcattgtgctgctgcttactgtagttgtaacaaattggtacctcgtccattctgatgacgaatatagttaagagtgcttacttccaatattgatgtattgcaggctgtcggtaaggttcttcctgaattgaatggcaagctcactggcatgtccttccgggttcccaccgtggatgtgtcagttgttgacctcactgtcagaatcgagaagggggcctcttacgaggaaatcaagaaagctattaaggctgcttctgagggcccactcaagggtattatgggctacgtggaggaggatctggtttccaccgacttcaccggtgacagcaggtcgagcatcttcgacgccaaggccgggattgccctgaacgaccacttcatcaagctcgtctcttggtacgacaacgagtggggctacagcaaccgcgtcgtcgacctgatccgccacatgttcaagacccagtagagagagatatttctgcctccctatcgagggtcgtccccgatggcctttggtcgcagaccatctttgctgcttgtctatgctgagaataaatgtgaacggtgcccctggacgctggatccatgctggttttggacacggttgtctttttgtgtttaacttatctgctgccgtcctgtaacgaattcgctaagttttagttcttttgtgctttgttaagaatataaacaatgaggtttc

SEQ ID NO: 24953 - DNA, 1105 bp, Zea mays
  Clone ID: LIB3689-224-E1_FLI
cacaccccccgagctcagcttagctccactccagctccaatcacagtcgtgaccagagcgcgagagctagctagagggccgtgaaaatgccgatcaataggatcgccctggggagccaccaggaggtgtaccacccgggcgccctcaaggcggcgttcgctgagttcatctccaccctcatcttcgtcttcgccggccagggctccggcatggccttcagcaagctgaccggcggcggcccgacgaccccggcgggcctgatcgcggcggcggtggcgcacgcgttcgcgctgttcgtggcggtgtctgtgggcgcgaacatctccggcgggcacgtgaaccctgccgtgaccttcggcgccttcgtgggcggcaacatcaccctgttccgggggctcctgtactgggtggcgcagctgctggggtccaccgtggcgtgcttcctgctccgcttctcgacgggcgggcaggccacgggcaccttcgggctgacgggcgtgtcggtgtgggaggcgctggtgctggagatcgtgatgaccttcgggctggtgtacacggtgtacgccacggcggtggacccgaagaagggcagcctgggcaccatcgcccccattgccatcggcttcatcgtgggggccaacatcctggtgggcggcgccttcgacggcgcgtccatgaaccccgccgtgtccttcggccccgccctcgtcagctgggagtggggctaccagtgggtgtactgggtcgggcccctcatcggcggcggcctcgccggcgtcatctacgagctgctcttcatctcccacacccacgagcagctcccctccaccgactactaaaagccgaagccgaccgacctaggggtgcgcagcgcagctagcgcatccagctctctctccccgctcgccgccgtttagtttctctcgtgcacgtgcatgcatcgtcgactgtctcaggccgccgctgcgccggcgccgctcgcatcgtttgcttccttggaccagcagtcgtcgccgtcaggctgaactgcttgtaaccgtgaattccggacccgtttgcttctgtaagatttgtgcatttgcctgagtacacctcgatctgcagc

SEQ ID NO: 24954 - DNA, 663 bp, Zea mays
  Clone ID: LIB3689-224-E6_FLI
gtgagcgagcggcagcggtgtgtgccgaacaatggcagcgcaggaggccgcagcaggcggcgggagcccgcaggtggtgatgcggtggcggtacggggacgtgggcgacagcaacttcgcggtgcacgggcgcgcggtgccgctgctggtggggctgctgtgcgccgtcgtcttcttcgtcgcgctgtgcctgtacctccgctggaggtgccaccgccacgcgcccgacgacccggaggcggacgccagctccccgtcgtcggccgcagcggcgtcgctccccggcctcgacgccgacgccatccgcgggctgcccgtgacgctgtaccgcccgcccgcgtcgccgcgcctccgaggggaggccggcgacgacgacccggcggcggcgctgtgctccatctgcatcagcgcgctggtggccggcgagaaggtgaaggtgctcccgccgtgcggccactgcttccacccggactgcgtcgacgcctggctccggtcccagcccagctgcccgctctgccggtgcctcctcgccgccgctgccaaggacgccgtgtgagtgccaacgccaacggcaggcgcttcgatcgtcgcatgacaagcgggcccagctaccagcgtccctcgagacccgcggccttttaaatcagcgcactagttaatgat

SEQ ID NO: 24955 - DNA, 1991 bp, Zea mays
  Clone ID: LIB3689-224-F1_FLI
gttttgaattcatatactagtgaccagcatctctgcctatggtgcgcagctgtctccccattccaatgccaagtgttgatctctcagcaaggagggagaaagcagaaggaccggttttgatcttctgagcggttcatggttatggatcgcgcgggttggctctggaggcgcaagtcatcggacaagagccccgggggcagtgacagctctctgtccgtgtcgtcacattccgagcagtgctctgatgatcagggtcaatatcaatcccctgaagccttttcaagaagtaagtatgattacagccaagaaactggagtagcaagatccttgaatggcaagctagcagcaggggtcaatttgaacaattttaatccagagcatggtcaatcatttgaacaacatatatcttccaatgttggagatgaagagatcaaggaaaccttggagagtttgaactacaaactttctgctgcactttcgaccatcagagcaaaagaagacttggtgaagcagcatgctaaagtcacagaagaggctgttgcaggttgggaacaagctgaagctgaagttactactctgaaggggctacttgaagcttcttgtcggaagaatgcttctctccaggatcaagtcagccacatggatgaggccctcaaggaatgcgtcaggcaactgcggctggcaagggaagaacaagaggacaaagtccgtgaaatcgtttcgaattctctggtcccgcagtctgaaaaccctgagctccaaaaccatatcgcggagctaaaaaagcggctggaagtgaccagattagaagcgtcatcttccatgatattacagcatgatctacatgaaaggcttcgggcgattgagagagagaacttggaccttaaggccaagcatcaggcaattgagaaagagaatatagatctcaaggccaaactgcttgtacagtccaaggacctgaagatactgatgttggaaagagatctgagcaaccaagtagcagagacagcaagtaaacaacacttggaaagtgttaaaaagattgccagggttgaggcagaatgccgcaggctacagcatctaacgcggaaaacaacactgatcaataattctagatccacacaaaacaattgctgcatggaatcactgactgacagccagtccgaccatggggagcatatggtgggtgttgataatgatctgcaaaattccgattcatgggcattagctttgattgctgagcttgatcagttcaagaatggcaaggatggttcaagaaatattgtgaacaatcctgttgagattgacataatggatgatttccttgagatggaaaggttagctgcattgcccgaatcagatggcacaagctctaactttgaaatggaaacagattctgacaaggctgtcacaagaaacagctccttgaaggtcaaaaatgaagaactgcaaaacaaggtcgcagatttgcaggaaaagtttgaagcaattgcatgcgagaaaagggagcttgagctggtgcttgtggaagttagagatcagcttgagatttcctgcgatgcgctagtggtggcaaagaacaggctggttgaaatgcagatgcagttggactcagcaaatgattccaaactttctgctttggatgatgtggagcgtttagactctgagaggaaggctttggaattgcagttggagtccaaatctgtagaagtcgaggagctactcatggctgtagcttcattagagggaaatgcagagcagaaagagttggagtcgcaattagaactgatgtcagcacaagctacagaacttcgcctgactgtggcatcactggaagagagagttcaggctgagagagatctttttgtgcagcagaaacaaaacgcagaagccatgttgaatgctaaagaagaactggaagcacagctgtgttcagcaaacactaaaatggggaaactgcgtgacattatcaaagcactagagaatgaagt

SEQ ID NO: 24956 - DNA, 1512 bp, Zea mays
  Clone ID: LIB3689-224-H11_FLI
ctacataagaaaaaagatccgtggccccagcacccgcggccgagtcagagccccagtcccagagggagggggaaatggcgagcggggacggggacggcggggacgggaagaagcagagcagacggcagctgtgggcggcgtgcctcccgcggccggggtgcttcacggtgtccgccgccgacgagggcccgtcggctcacggcgccggccagggggagagcaagcccaagcccacgcatctggtcgtcacggtcaatgggatcgtcggaagtgcagaaaattggcgttttgcggcaaagcacttcatcaggaaacaccctgaagacgtggttgttcactgcagtgggtgcaactcagcagctcgaacctttgatggagttgatgtgatggggagaagattggcagacgaggtggcttctattgttgacagtagaccagagctttgcaagatttcctttgttgcgcattcattgggtggactaattgcaagatatgctattgcattattatatgagagcgagacacaaaaagattctcatgaaaagtttgagaaccatgctgttgactattctagtaaccagcacagcatagggaaaattgctggtttggagcctattaacttcatcacttttgcaacaccacacctcggtacaagatcacacaaacagataccacttcttcgtggttccaacaaattagaaaagatggcgtatcgtttgtcttggattgctgggagaagtggaaaacatctcttcctgaaagatacggaagatgagaaaccaccacttcttctacagatggttactgattatggtggtctccatttcatgtcagctctccgctctttcaagcggcgtgttgcttactccaatgtttgtaatgactttatcgttggctggaggacatcatcaattcgtcgtcaacacgagcttcctgagccccgaagttttataaacaacaatagatatccacacattgtatatgtggaagggccaaaaattgaggatgttgattttttggatgcgatgatttacgaggcaaaaacgactagtgaaatggaagaggtgatgctcaaaggtctgaatagagtttcatgggaaagggtagatgttagcttcaagaaaagtagacaaaggattttcgctcatagcactattcaggtcaagacctatttcttgaactccgatggagctgacgtgatcaaccacatgatcgaccattttgtttattaagatgggtgtactaagttggtaccaagttctctttgtcgatcgattctcggccaaagaggaacatgtgggaaatgttcttgttctgaagacaggattagagttatactgaaggagtagaacccactgtaaagtgtaaaggggtatcttgtctctacccttcttgctaattttgggccgtttagtttcttttcttcccttttcataattcagaatctcagttgttttgtacccatatactggaccagaatttgttctccaaatacaaagatatttgctgcgt

SEQ ID NO: 24957 - DNA, 2509 bp, Zea mays
  Clone ID: LIB3689-225-C11_FLI
gcagcgccgccgcccgcccgccccgccccttcagtccttcaccccctaccccttcaccccctaccccttcttgcgccgtcatcccgatcccctacgctcgctgaggcattatgggtaaatcaagcaagaagtccagtgttaaggctgcacctgctgctgtctcagttccagaggggaaatctgcaaagaaggggaagagaaatgcagaagatgagattgagaaggccgtgagtgcaaagaagcaaaagaccgtacctgaaaaagctgtgccggttaagaagcagccccctccaaagaaagttgagagcagcagctctgaggaggattcttcagattccgaagtggaggttaaggtccagccgaagaaggttattcaaccgaagaaaagtacacaacctgctaaacaggagtccagtgatgacagcagctctgagagctcctcagacgatgaaccttccaaaaaaccagttgccggttcaaaaaagcctcctgccagtagtagcagcagtgatgatagcagtgacagtgatgatagcagctctgatgaggaaccagcaaagaagcccacggtcctttcaaagaagcccactgtcctttcaaagaagcccactgtcctttcaaaaaaacctgtcacagcagtcagtaatggttcaaaacaggttaaacctgatagcagcagctctgacagtagctcagatgaggatgaaaaacctgctgctagcctaaagaagcctgttgttgcctctgtgcaaaagaagacccaagaatctgatagctctgacagtgattctgatgaggatgaatcagaagatgatattcctgctaaagctcaagtagtagccaagaaaaaggaagagtccagtagcagttctgattctgatagtgattctgagtccgaggatgagaaacctgctgctaacctaaagaagcctccggttccctctgtgcaaaagaagacccaagaatctgacagctctgacagtgattctgatgaggatgaatcagatgatattcctgctaaagctcaagtagtagccaagaaaaaggaagaatctggtagcagttctgattctgatagtgaatttgagtctgacgatgaggatagcaatgcgaaaacagtacaacctgccaaggctgctgctattaaaaagaaggaagattctagtgagagctcagaaactgactcacagtcagattcagaagattcagaacctgaaaaacctactgtccctgcgaaaaggcctctagcaacaaataaaaagaatgaacaatccagcgagaaatctgatgacagctctgatgagagttctgatgaaagtgatgaggaacctccacaaaagaaaactaagaattctgcaccttctggtgctgcaaaggctgccactaatgtttcaaagaaaaaaagcagcagtgatgaagatgatgaaagttcagaagaaagctctgatgatgaggatacagaacaagttgaaactaaggaaacttctgtagtcactacccagaagccggcacataatgaacctaaaactcctgccaaaagccaaagtcaggctactggttcaaagactatttttgttgggaatttagcctacagtatagagcgtgaacaagttaaggaattttttgaggaggctggtgaagttgttgatgttcgtttggctacttttgatgatgggagtttcaagggttttggacatgttgaattcgctactgttgaagctgctcagaaggctcttgaatttgttggtcatgacctgatgggacggcctctaaggattgacatggctaccgagaggggtgcatacactcctagcagcgggaaggacaacggttctttcaagaagttcgctccaaggtcaggcaacaccgtgtttattaagggctttgacacctctggtggagaggaccagatccgcaccgctcttgaagagcattttggatcatgtggagatatcacccggatttcaattccaaaggattatgacactggtgtaagcaaaggaatggcgtacatggatttcaaggacccagattccttgaataaagcatacgagttgaatggaaccgaccttggtggctacagcttgtatgtcgatgaagccaagccgagacctgataacagcggtggcttcagtggtgacaggggtggtggcagagggaggagtggcggcttcagtggtggcagaggagggaggagtgacagggggcgtggtggtagccgtgggcgtggatttggaggccgtggtggaaggggtgacagaggccgtggtggaaggggtacgcctttcagacagaccgctggtacagctagtacaggaaagaagaccacctttggtgatgacgattgaagatccatggctggctattatagtgaaaaacgcaaactatattgtaccgttcagacctattgttatctgaggctgtactgcttttttgcttgataattcgacaattgtttttaccatttttaacatttggtgctatcaaagacatgactttttaagttttt

SEQ ID NO: 24958 - DNA, 1293 bp, Zea mays
  Clone ID: LIB3689-225-E11_FLI
cctctgcacgctactctctcctttctcactaccccgcccgtcaaagcgagagcgccgtatcaccggtctatccatcccttcaccgctgcctcgacccgcgccgaaagatacctttcccccccttcctctcgcgccgccgttttggtgcgaccatggcggcggagggggaggccaagaacccgtccggcggtggcgaagggggtaacccccagcaccagcaggcagtgcaggctgcgccggcggagccgccaacggcacagggggaagcggtgcaggaggctggagcgcaggcgacgggacaagagccggagggggagaaggcgaatcgagatggggagggaagcgcgggggagaaggacgacggcgcgtgcagagatctggttctggttgaggatccggaggtgctcgccgtcgaggacccggaggaagctgcagcaaccgcagcactccaggaagaaatgaaagcgctcgtggcatccgtccctgacggtgctggggcagcattcacagccatgcagcttcaggagctagagcagcagtcccgggtttatcagtacatggctgcccgagtacctgtgcctactcacctcgtcttccccgtatggaagagtgtaaccggtgcatcctctgaaggcgcccagaagtaccctactttgttgggcttagcaacactctgcttggacttcgggaagaaccctgaaccagaaccagggaggtgccggcgaacggatggcaaaaaatggcgatgttggagaaacactattccaaacgagaagtactgcgaacgccacatgcatcgcggtcgcaagcgtcctgtacaggtcgtcgaggaagccgagcctgactctgcttcaggctcaaaatctgctcccggcaaggccaccgaaggcgccaagaaggttgacgacaagagcccaggtagcaagaagcttgccgtggcggcggcagctgcagctgctgtgcagtctacgtaattgatgcagcattttagtagtcgcaggaagagcatggcggcgctggcaactagcgccttcttttcattgcatgtgatctttagctataacctcatttagcacactcccagtggtgtccgtgggaggaggaagccgcaagcacttcccccgtagggtgtcgactgaaaaaattcacttgtagctgtatagtttgatctctcgctttgtcgtgcctccggccttcaggtaggcgatgcggcatgatgttataaatcctctcccagaactgacaatatcgcattgtaacccaagaagccggtgcaagaacctgtgaaactgc

SEQ ID NO: 24959 - DNA, 1462 bp, Zea mays
  Clone ID: LIB3689-225-F7_FLI
cggcaggggcagggggcaatgtcagcacaggtccttacgtgcatcagaaagaagccttagttgttgcaaaagagtgcttgcttgcagcagtgaaggctgatcctagagctgcatcagtttgggttaatcttgcaaatgcatattacatggatggtgagcataagaactcaaagaggtgcttggagcaggcagcaaaattggaacccaatcatatgcctgctcggtatgctattgcagttcaccgtatcagagatgctgtaaggtcacaatgttctgatgatcaacttctttgggctgcaaatgaaatggcaacagttctaaaagaaggagacccttccgcagttgacgccccaattgcatgggctggattggcaatggctcacagggcacaacatgaaattgcagccatctatgatactgaaaacatcaatcttaatgatgcagaagagcgagctcaatatacactaaaacaggcaatccaagaggacccagatgatgctgttcaatggcatcaacttggcctgtacaatatttgcatgacccggttcagcaggtctgtaaattttcttaaagcagccttagcccgttccccagattgcagttatgcttggtcaaatcttggtattgcgttgcaactatcagacgatccatcctctgaaactgtatataagcgggcactggtactatcatcaactcagcagctgcacgcaatcttctctaatcttggaattctttatcggcaacataggaactatgaatttgcaaggaagatgttattaaggtcgttggaactgtgtcctggatttgcaccagctagcaacaacctgggtcttgtatttgtcgctgagggccgttgggaggatgctaaaagctggtttgagaaagctctgcaatctgatcccctgcttgatgcggccaaatcgaacttgttaaaagtcctcacattgtctacgaaacagtagaacaagagaagacctaactcctaaggaaattgccactgaagcctcagagttcagacacggaagcgcggtcaccaaatctctgttctgaagtgtctcaactgccagctcaaaattgatgcttggtgcctctagtctactgctcattgctcacagagtcacaggtgtaggaagtttcagaagtgcggcttcgaagactgcatttgattttgactgagttgctgcctatatgacaatcaaagctgcacaggctccgaagtggctgtgatgtgttcttaaagagtcgcatcagcgcaggaagagcccagattttgaagttcatgtgtagctaaatttcgatataagcttgaacggcttcccttagctgatgtatataaataaatatactccaacttgaggtgtactccaagttgagcatgtgcaagttataggttcagtgttccagagcaacttatggttctgtgcggtgaaactaacagcatctaaacctcaaatttggcagc

SEQ ID NO: 24960 - DNA, 2249 bp, Zea mays
  Clone ID: LIB3689-225-H12_FLI
gctccagctcgcctatccccctcaccagcgccgcaggaagatcgcgctgcgcccgccgtctcacgaggaggcatcgatcggcgcggtggcatttaggaggaggaaggggaggctgtaccttgttgacagggtcttagttaggcggggagcggcgagatgagcatgtacgggagggacccctggggcgggccgctggagatatgccacgactcggccacggacgacgaccgcagccggaacctggacatcgaccggggcgcgctgtcgcggacgctcgacgagacgcagcagagctggctgctggcggggcccggggaccagggccgcaagaagaagaagtacgtcgacatcggctgcctcgtcgtcagccacaagctcttcgtctggacgctcggggtgctcctcgccgccgccgtattcgcgggggtcgtggccgggatcgccaaggccatccccaggcgccaccgcccgccgccgccgcccgacgactacaccgtcgcgctgcacaaggcgctcatgttcttcaatgcccagagatccgggaagcttccgaagcacaacaatataccatggcgtggtaactcttgcatgaaggacggactttctgatcctgcaattcggcgaagcctggtcggcgggtactatgatgctggcgacgctgtcaaattcaatttcccagctgccttctccatgaccctcctcagctggagcgtcattgagtacagtgctaagtacgatgctgctggggaacttggccatgtccgtgacattatcaaatggggttcagattacttcttgaagacctttaattccacagccgatagcattgatcgtgtcattgcgcaggtgggaagtactgcaacatcgcccggttcaacgcagcccaatgatcgttattgttggatgaggccagaggacattgactacccacgtccagtggttgagtgccacacttgttcagatcttgctgcagaaatggctgcagcattagctgcagcgtcgattgtattcaaggacaataaggcttactcacagaagcttgtacatggtgcaaccactcttttccagtttgcaagggaacgacgtgggaggtatagtgcaggtggctcagatgctgcaaaattctacaattcaaccagttactgggatgagtttgtgtggggtagttcatggatgtaccttgcaactggcaattcgtcatacttgactctagccacacaccctaaacttgcaaagcatgctggcgctttctggggtggaccagattatggtgtgttcagctgggataataagctcactggggcacaggttcttctaagccggttgaggcttttcttgagtcctggatatccatatgaagagaccttgagtacattccacaaccaaactagcattatcatgtgttcctaccttccaatatttaaatctttcaacagaacaacaggtggtttgattcagttaaaccatgggaagccacagccccttcagtatgtggtcaacgctgcattccttgcttctgtgttcagtgactatcttgaggctgcggatactcctgggtggtattgtggcccacatttctactctatcgaggttctccgcagttttgcaaggactcagattgagtacatcttagggaaaaatccgttgaagatgagctatgtggttgggttcggaaaccattaccccaagcatgttcaccaccggggcgcctcgatccctaagaacggtgttcactatggttgcaaaggagggtggaagtggagggacaccaagaagccaaaccccaatatcatagtaggggccatggttgctggccccgatcgccatgacgggttcaaagatgtccgcaagaattataactacactgaagcaacgctggcgggcaatgctggtctagtcgcagcattggtagcgttgtcgggtgaaggccatggggtggacaagaacaccatgttctctgcagtgccacccatgttcccttcgcctccgccgccaccagccccatggaaaccgtaatgcctgtgggtgtctgattcttctgtatactgcgtatttagattagtgctcctctcgctataactagttaactactaccatcactatcttgcatatttaacaagatgtagcatcgatcttttcttgtttctttcattgttgtatatttgccgtgcaatgtaaggattgattatgtttgtgtatgcatctctgttctttttagataatggagaaaagattccggctttcctctc

SEQ ID NO: 24961 - DNA, 2151 bp, Zea mays
  Clone ID: LIB3689-226-A12_FLI
cctctctctttctctttctcccctgcttccccttccattcccgacggacgacgcaacaacccgcctgccctgccctgccctgcctcacgctcgcacccgcggcggcgcggagggccggaacctaaaccctaaccctagcggcccgcccgcgatggggcagtgctacgggaaggcaggcggcgcgtcgtcgcggcgggcggaccacgacgacgcggtcgcgccgccgtccccgctgccggccaacggcgcgccgacgccgccgcagcagcccgccacgcccgggcgccgcaagtccggatcggccacgccggtgcaccaccaggcggcgacgaccgcctggcccagcccgtaccccgccggcggggccagcccgctccccgccggcgtgtcgccgtcgcccgccaggtccacgccccgcaggttcttcaagcggcccttcccgccgccctcgcccgccaagcacatcaaggccacgctcgccaagcgcctcggcgggggcaagcccaaggagggcaccataccggaggagggcggcgccggcgtggccgccgactccgccgaggccgagcgcccgttggacaagacgttcggcttcgccaacaacttcggggccaagtacgacctcgggaaggaggtcgggaggggacactttggccacacctgctccgccctggtcaagaagggcgagtacaagggccatgccgtagccgtcaagatcatctccaaagctaagatgacgacagccatttccattgaagatgttcgtagggaagtcaagattttgaaagctctatcagggcacaataatctcgtcaaattctatgatgcatgtgaggacgccctcaatgtctacattgtcatggaattatgtgaaggtggagagttgctagatagaattttggctagaggcgggagatatacagaagaagatgccaaagctatcgttgtacagattttgagtgtagtgtccttctgtcatcttcagggagtagttcatcgtgatttgaagccagagaattttcttttcgcaacaagagatgaaagtgctcctatgaagttaattgactttggtctgtctgattttattagaccagatgaaaggctcaatgatattgttgggagcgcatattatgtcgctccagaggttctacacagatcgtacagtatggaagcagacatttggagtataggtgtcataacatacattctgctctgtggcagtcggccattttgggcaaggacagaatctgggatctttcggtccgtattaagggctgatcccaactttgacgattcaccatggccttcagtatcggctgaagctaaggattttgtgaagagatttctgaacaaggattaccgtaaaagaatgactgctgtccaagcactgactcacccttggttacgagatgaacaaaggcaaattccattggacatactcgttttcagattagttaagcaatatcttcgtgctactcctcttaaacgtttggcattaaaggcactatctaaggctttaagggaggatgaactgttgtatcttagattgcagtttaagctgctcgagcccagagacgggctcgtatcgctcgacaactttcggacggctctgacgagatacgtaactgatgctatgagagaatcaagggttcttgagtttttgcacgcgttggacccgcttgcgtacagaaagatggacttggaagaattctgtgcggcagcaatcagcccgtaccagctggaggctttggaaagctgggaagaaatcgctggaacggcttttcagcacttcgaacaggagggcaaccgagttatatctgtggaggagttggcgcaggaactaagcctcgccccgactcactactccatcgtgcaagactggatcagaaagtccgacggcaagcttaactttcttgggttcaccaaatttttgcacggtgtcacgatacggggctcaaacacgagacgacactaaaatggacgcgaactgtgtattcgcttctaatttaaagcctctctctcgtcgattatatatagatggccctgattggtgttttgtgatgccgccccggctagctgttgttgtcatagcttttttgtagagtacgtgtgaagatcatcgtgatggcgaaatcgtatgctttgctcaag

SEQ ID NO: 24962 - DNA, 1157 bp, Zea mays
  Clone ID: LIB3689-226-D10_FLI
caccaaggagagtacgtggaggagcagccatggcttcatcggtggccgccgcggcgagcacattcctgggcacccgcctggcggacccggcgccacagaacgggcgcatcgtggcccggttcgggttcgggttgggcggcaaggcgaagcctgctccgaagaaggtggcgaagacatcgacctcctctgaccggccgctgtggttccccggcgccgtggcgcccgactacctggacggctcgctggtcggcgactacgggttcgacccgttcggtctcgggaagcccgtggagtacctgcagttcgagttggactcgctggaccagaacctggccaagaatgaggccggcggcatcatcggcacccggttcgagtcctccgaagtcaagtccaccccgttgcagccctacagcgaggtgttcggcctccagcggttccgcgagtgcgagctcatccacggccgctgggccatgctcgccaccctcggcgccctctccgtcgagtggctcaccggcgtcacctggcaggacgccggcaaggtggagctggtggacgggtcctcctacctgggccagccgctgccgttctccatctcgacgctcatctggatcgaggtgctcgtgatcggctacatcgagttccagcgcaacgccgagctcgacccggagaagaggctgtaccccggcggctcctacttcgacccgctcggcctggcggccgaccctgagaagaaggagcggctgcagctggcggagatcaagcacgcgcggctcgccatggtcgccttcctcggcttcgccgtgcaggccgccgccaccggcaaggggccgctcaacaactgggccacccacctgagcgacccgctccacaccaccatcttcgacacgttcggagggtcctcttaagcccgccattgctccgccccgtccatcgaccggccggaacgtgttcttggattaattaactacgatctctatgagcctggggatggatcaacccgtcgtgcgtggtctcgttttgtgatgagtgggagagagaggatggcaagatcgatcctttgttaatggagatctcgttaattaggagagctaccgctgggacttggtggtttgtaatatatgatccaaccagtgatgaatcaatgcattcacttgtgt

SEQ ID NO: 24963 - DNA, 915 bp, Zea mays
  Clone ID: LIB3689-226-G9_FLI
tgaaagcagaatgaaaacggcatcggttacgccatccacgtcgtctgaaattcaggtggccgtcggatttttcgtggacgctccctagcggctcggcgtctccatgtgccgtgaaggttccagaacccacggggggtcgtcttcctccacaagattctgccaaaagatcctctcggatgcccccgcccacccatttcgccagtcgccatcgagctctcgcttccgccgcccgctgccgttgtatcaccccagtgctgagccctaggatgtgactggcggacgtctctatggccgagccgtaggtggaggcggcacctcggcaccgtgggagatggaggacgatgacaccgagggtgtaggcgagagcacctgtccccccgccgccgaccgaggaggctcctcctcggccggcggcggcggcggcgactcacacggttacactgacatcgagaaggaggtattcgaccgtctcatggagaagagaatcccggaggtcgtcgcggacccggtggccttccgcgaagagctccaccgccacttcgagcgcctgccgctgagctacgccatcgatgtgaacgtcgacaaggcggaggacgtgctgctgcaccggagcattctcaacgagtgcactgaccctgaaaatcgccccatcttccatgtgggcttcctgaacgtgagttccactgctcgatcgcgtctccactgtgctttggcttctcactgaaaggccaaaaacgcgccagcacagactgggatcgtatctttttttagaagagactgagatttttgttctgcctctgtatgaccagtgcatcccgccctcgttggatccacagtataacactcaatccatctctataacactcaatccatctctacgagcgaaaacggtaattgtgggggttctcaggattc

SEQ ID NO: 24964 - DNA, 1269 bp, Zea mays
  Clone ID: LIB3689-227-A7_FLI
agtagcaacttttctgtccaaaactgtctcttccacgtccttccgggtcctatcgctcctctccgtcgccggtggagctcatggcatcctccatggccgccgccgccaccgccaccgccctcccgctgccgtccgggacgacgcagaggccgtctgcccagggccgcctcctcttcaccgccgcgcccgcccgctccctccgcctccgccccgccggccgccggtcggcccgctcctcgcctcgggccaccaaggctgtggtggcagcgttggctgatcctctcaaggtcatgatatcaggagctccggcgtccggcaagggcacacagtgcgagctcatcaagaccaaatatcaactggcgcacatctccgccggagatttgttgcgggcggagatcgctgctggctctgagaatgggaagcgggccaaggaattcatggagaagggccagctcgtgcctgatgagattgtcgttaatatggtgaaggaacgccttcggcaaccagacgctcaagaaaatggttggcttttggacgggtacccaagaagctattcacaggccatggccttggaaactcttgaaatccggcctgatactttcattctgttagatgttccagatgaactccttgttgaaagggtggttggaaggcggcttgatcctgtaacagggaaaatatatcatttgaagtattctccgccagagaatgaagaaatcgcttcaaggcttacacaaagatttgacgatacagaagaaaaggttaagttgaggctggagacttattaccaaaatatcgagtccttgctatcaacatatgagaacattattgttaaagtgcaaggagatgccacagtggatgctgtctttgctaagatcgacgagctgctgggttctatcctggagaagaaaaatgaaatggtgtccagcacatgagcaaggaacttctccaggggaatatatctgaagcacaggacgacacgtacaagtaatgtaagccagtctcacgtaatggaaatttctccatgtggatgtggtcaaagcataggattttttttctccaattgttaactgtacgcgaatggaagcgacagatcatttgtaggttgtgagggcttcaaagatcatctgctgctgtacatgttttgttgctgtcttgtgaacatacatgttttgttgtttctcaactggaggaatgctgttaacctgctgtatcatttccttgaatggcttatgtgagagggaggaggacctgagcagcagctcttgc

SEQ ID NO: 24965 - DNA, 796 bp, Zea mays
  Clone ID: LIB3689-227-B4_FLI
gcaggagcacaaagtgcagaagcagagccagtcctaactgcttagccaggaaagaagcagagcgtgcttagccatgtactcatccagctgccatgtgatgtccgagaagccaaacggttccaaggcggtgacgctgctgctcaggctgtccacgctggttctgtcgctcatctcggcggtcgtcatggccaccgccaccagcgactgcaccatctacggccacggcggcgccgccaaggtcactatcatgttcaagaactaccggcccttcgttttcctggtagttttgaacatcgcggcggcggtgctggaggcagcagccatctacctacaggtcgtgaagggcgacgacggcgacgaggcgcccaagcttccccggatcatcctggttgtcctcgacgtcgtggtgctcgcgctggtcaacgcggcgacgggcgcggtggtcgcggcggtcatcgcctacggccccgagatcgacgcgtgcaccgtcgcaggtggtggccgattccgcgagcaggtgcgcaggtccgagctcctgtcgatcgccgcgagcatctccgctgtgtccgccgccgtcgctaaggacgtgccgctgcccttctccgtgtggcccctctcgtcggaatcaggcgactactactgatcttggttattatttgtcaggtgatgttgagtactgtgagtgtgaaggctttctgccagcgaaattccaatttatgtcaactgaatgccactacgataagctatccttcgaaaaaatttcagcacaaatcatatatttgatttccatctggct

SEQ ID NO: 24966 - DNA, 3424 bp, Zea mays
  Clone ID: LIB3689-227-C6_FLI
gccgtgaatttgttggcttgtgttgtttgatcacaactgtattaaaaaaaaggatcgatctttgcggctacaagagagtgacaacaaggaggcttggtcagctcgttcctttcacctgtttggcgagtgcttgaggaagaagacgacctgctcagctcctcctttggttgctcatcgaatcaaagaagactagggaaatgggggtaatgtcccggcgggttctgcccgcctgcagcagcctttgctacttctgcccatctctgcgggcgcgctctcggcagcctgtcaagcggtacaagaagatcatagcagatatctaccagctgcaaccggatggagagccaaatgatagaaggattgggaaactctgtgattatgtctcgagaaatccaacacgcataccaaagatcacagagtatcttgaacagagattctataaagatctaaggcatgagaattttacgttggccaaagttgtgccatgcatctataggaaaattctttgttcatgcaaggagctcaggccattgctagccacaagctcattaagcaccattcacactcttcttgatatgaaagcgcatgatgatctacaagttctgggttgtcttatgcttgttgacttcctgaatggccaggttgatagcacacatatgtttaatttggaaggcctcataccaaaactttgcaaaattggtcacgaattaagagaagatgatgaagggctccgtcttcgatctgcagctcttcaggctcttgcttctatggtccaatacatgggcgaccactcacacatttcaatggaacttgatgaagttgtctcagtgatcataagctgttacgaggctaatcaaacactctcaataaaagaggtagtcagatttcaagatgatgatgatttggtcattaatgggaacttggctgtgttaccagtgtctggacaaaatagtgccaaagtggcatctgatacaatgtctgcatctgaaaatccagcatactgggcaagggtttgcttgcgaaatatggctaatattgcaaaggaggccacaactgtgcggcgtattcttgaccctcttttccgcctttttgacagccacgactattggtctcctgaaagtgggattgccctttccgttctgcaagaaatgcagaaactgatggacaaatcagggcaacatggtcatttgttgttatctttcactataaagcacatagaccataaaagtattgccaagaattctgtcaagcaaatcaatattgtaaaagttgcttcacatcttgcaaggcatgcaaagttgaaggcatcagtgacgatagcaagtgctatcagtgacttaataaagcacttgcgcaaatgtatgcattttgctattgaagcatctaatgcaaatgctgattgtgacaagtggtacagtgcactttatgtggccttggaggagtgcctagtgcagttgacagaaaaggttggggatgttggtcctattcttgatatggttggggtaatgcttgagaatctctctcatactgctaccatcgcaagaacaacaatttcatctgtttatcgcacatcacaaatagcagcatctgtctacaagtcatcataccatcagaaggcatttcctgaagctttatttcaccagcttctcttagcaatgttgcactcagacaataagacaaggattggttcacatcgtgttctatctaccattgtagcaccttcaatggcgtgtccatggtcggacatcagctttcctatcccaatgaagggtgatgattcacataacttgcatttgttggttctctcagctttctcttctgaggccataatcaatgaaacacggaccaaaaacaagatccaagaatccttgcaagaaaacaacaaatcagaagctatagtggatcctgagaatggatacacacagacagaaccagataaaaggaagtattcaggggggccatgtctaaatgagcattatcgtacagcttttaatgatgaaaacttaaagttcatgaagttgaacgaccaccagattgttctccttctttcatctatttggagtcaagcatctctggatgacaacttacctgcaaattttgaagcaatgggccttgtctacagcattgctttattatgttcaaaaccaaaaagctccagtcatgtgacacgtattcattgtttccagttggcgttctctctcaggagaaactctcttagccctgaaagtgatttgaagccatctcgtagaaggtgtctgtatacgatggcatcagcgatgctcatcttttcagcaaaaattgctgatctccaccagataattcctcttgtgaaagccgcagcaccagagaaaatggttgatcctcatcttcgcttgatggatgactgccagcttgttaatacctctgcagagtcatctaacagcgagatggtttatggttccgaggaagatgaaagtgatgcactggtttttctttcagccatcaacaagcctgacacagagttaatagaaaccgtgatgtgccacttcagggagaagttcgaaaatttaccagagaaggttaacgggatagaagagcaacttcttcaagagttttccctggatgattcgtttcctcttggtgctccactattcatggagatgccacactcttgttcaatgtatgcagaaaaggatgaagaatgttttgacgaggacactgttccttctgagctagacgatgacgacatcatctttgagcatagtgggtctcaatctgacaggaaaacgtcaggttccatggcttcgtcagatgttctaactgtcaaccaactaatagaatctgttcatgagaccgcaaggcaagttgccaacgttccagttcccgccaaccctgtaccgtacgaccagatgaagagtcagtgcgaagccctggtcatggagaagcaacagaagatgtctgtcctcttgagcttgaagcattcgaggactgactcgcatggttcagccggtgtggatgggcttgaaacgaatgagtcttctctgctgtctgagcctgagttacagtcaacaaggaaggggcgcatgcgccgctgcgattcagcgtccagcgaatcagactgttcgttcaggctgccacctgctagcccatatgacaagttcctgaaggcggctggacggtagcctgatgcggttgcggcagcttggcgcttcagttttcaactctctcaagtctgcatgagagttcagtacaagtgattcatcggcaccctctcgttctcggagtccattctttcaagtgtatattatatttacatccctcgacaaggtgtataaagttctgttactgtttccttcagaataaaccgaagtgtataggcactagcggatgatcatgttcaagacggtatttgttcatttgttggtcgtgaaaagaaaacattttacac

SEQ ID NO: 24967 - DNA, 892 bp, Zea mays
  Clone ID: LIB3689-227-F12_FLI
tcgccaataatggagtttccgcaccaccaccaccaccacggccatcgccgcgacgacgacgaagacgaccgcagaggcccgcctcccccggtctacggcggcggcggtcttggtggcgcctacggaggcggtggctccgagtacggccacgagggccgaccgcaccacggcggcggcggatcccagtacggccacgagacacgcccgcaccacggcggcgggggcggcgccccgcctgtgaggcagcagacgtacaggatctactgcaaggctggggaggaccagtacagcctcgcctcccgcgacggcaaggtctgcctcgtgcgcacggaccgtgatgacgacgcgcagcactggatcaaggacatgaagtacagcaccagggtgaaggatgaggaaggctaccctgccatcgtcctcgtcaacaaagccactggagaggctctcaagcattcccttggccagtcacaccctgttcttctgacccgccataatccagactccctggacgagtctgtcctgtggacagagagcagggacgttggggatgggttccgctgcattaggatggtcaacaacatctacctgaactttgatgctttacatggagacaaggaccatggtggtgtgcgcgacgggacggcccttgtgctgtgggagtggtgcgagggagacaaccagcgctggaagattgttccctggtgaacaaggaaatgtgtgaccgagcccgcaccaaggaggagctcctgccgtaataagtgaagtgattggtactgaagtttctggaaataagaggctcttctgagatgcctgtttgtgtgagtatttgcgtttccattccgttttcatgataataaaacgcattgattattaatatatgtaatgtgatgct

SEQ ID NO: 24968 - DNA, 2049 bp, Zea mays
  Clone ID: LIB3689-227-G11_FLI
ccgtccgtggtcccttcaatctctctgcgcaatcaaactgcggtggccaaccccggaagcggcggcgggcaaagcgcgcgacgcagagaagcgtaacttcaggccgccggtcgctctacgcatcctgctccccgttctcgtcggagatccaccggggcagcctttctttccccttcctcaatcaagtcgatccaatttcgcgcgcgggtcgggctcgccttctcctccagtctccacctccaccagcgctcgaggtcgacggacgctactcgcagcagttcttctttgcggtgcggccgagaagaagctaaggctcaggcatgagcttccgggaccaggagagtggcggggaggatgggggcaggacgtcctccgcctccgacctgcggaagccgctcatcaacaccgggagctggtaccgcatgccgccggcgggtggcgtgatgggctcgcggcaatccagcctcatggagcgcttgggctcctctgcgttctctctccgcgacgtcgctatctcggccacgctctgcacgcttattgtcgcgctaggtcccatccagttcggtttcacatgcggctactcctcgcccacgcaggacgccatcattgctgatctcggcctctccctctctgagttctccctcttcggttcattatctaatgtaggggcgatggtaggcgccatctccagtgggcaacttgcagagtatatcggccgcaaggggtctctcatgatcgctgcgattccaaacataattgggtggctcgcgatatcattcgcaaaagattcctctttcttgtttatgggtcggctgctagaaggatttggagtcggtgtaatatcgtatacagtaccggtttatattgcagaaatcgctcctcaggatcagaggggagctcttggttctgtcaatcagctctccgtcacgattggtatattgcttgcctacttgtttggcatgtttgttccctggagaattcttgctgttctaggcattttaccttgttcaatcctgattcctggactgttctttgtgcctgaatccccaaggtggttggcaaaaatggggaagatggaggattttgaatattcattgcaagttctgagaggatttcagacagatatcacagcagaagtaaatgaaataaagagatcattagcatcatcgaggaggaggacaaccataaggttcgctgatatcaaacagaagagatacagtgttccccttgtgataggaatcggtctccttgtcctgcagcagctaagtggtgtcaatggcattctattttatgctgcgagcatcttcaaagctgctggtattacaaacagtaatctagcaacatttggtttaggggctgttcaggtgattgctactggagtgacaacctggttgactgacaaagctggtcgaaggcttcttctcattatttccaccacaggaatggtcattactcttgttattgtttctgtgtcattttttgtgaaggacaacatagctgctggttcgcacttatactctgtaatgagtatgctttcactggctggacttgtggcatttgtgattgcattttctcttggcttgggagcgattccgtggatcattatgtctgagatccttcctgttaacatcaagagccttgctggaagtgttgcgaccctggcgaactggctgacagcatgggccattacaatgacggcaagcctgatgttgaactggagcagtggaggaacatttgctatctacgccgtcgtgtctaccatggccctcattttcgtgtgcttgtgggtgcctgagaccaagggaagaacgctagaggaaatcgccttctcattccgctgacacgtcgtcatgatctaggtatgggaagccacaccacaccatgtgtccttgagtctgccgcggtgcgttcagttcatgaatcccgcagggatcttgcagccattctcttgcttggatgtaccaccatcttcagtgttcataccaatgtacattgtacaatatgacgacgacgccatagcagaaaggcaagtgggtttatgtttgtacg

SEQ ID NO: 24969 - DNA, 1866 bp, Zea mays
  Clone ID: LIB3689-227-H8_FLI
ccaagccgtgaggtggacgaggcgcgccacctgctaagccgaatcgagcagcagtagccaccttgccatggcgatgcaggctgctttcctcgcggggttctcgcagctcgccgcgcagccgagccgcgactgcgccgtggcagtggcgccgacgcgggtggccgttgctgcggtgggtagcgccaaggtgggcgcgcgggtaggcttgaaggcggggatcgccgcgcccgcgcccgcggcgggccgcggggtgcggtgccgcgcaagcctgatcgagcccgacggcgggcagctggtggacctagtggcgcccgaggagggcgggcggcgcgcggcgctccggcgggaggcggcggaactgccgcaccggctgcgcctcggccgcgtcgacaaggaatgggtccacgtcctcagcgaagggtgggcgagtccgctgcaagggttcatgcgcgagcatgagttcctccaaacacttcattttaatgccatccgcggccaggatggcaggatggtcaacatgtccgtccccatcgtgctctccgtaggggacgcacagcgaagggccatccaggccgacggcgccacgcgcgtcgcgctcgtcgacgaacgcgaccgccccatcgccgtcctcagcgacattgagatctataagcataataaggaagaaagaatagcacggacatgggggacaactgcacctggattaccttatgttgaggaggcaattaccaatgctggtgactggttgattggtggggacttggaggttatagaaccaatcaagtacaatgatggtctagatcagtatcgcctgtctccagcacagctgcgtgaagagtttgccaggcgcaatgctgatgcagtatttgcctttcagcttcgcaatccagtacacaatgggcatgctctacttatgaccgacacacgcaaacgcctccttgagatgggttataaaaaccctgttcttctgctccatccactgggaggattcacaaaagcagatgatgtgcctcttagttggagaatgaagcaacatgagaaggttcttgaggaaggtgtcctcaacccagaatcaactgttgttgcgatcttcccctctcctatgcattatgctgggccaactgaggttcaatggcatgctaaggctcgtattaatgctggtgcaaacttctatatcgttggaagggatcctgctggtatgagccaccccacagagaaaagggacctctatgatgctgatcacggaaagaaggttttgagcatggctcctggccttgagaggctcaacatccttcctttcaaggtggctgcgtatgacacaaagcaaaagaaaatggatttctttgatccatcaaggaaagatgatttcctgttcatctctggcacaaagatgcgcactcttgccaagaaccgagagagtcctccagatggttttatgtgcccgggtggctggaaggtactcgttgaatactatgacagcttggtgccatctgagggcagcagcaagctgcgtgaaccaattgcagcctaaaatctggaaaatccttcatataaggaatgctactatatcttagcaagcggttctttgcgacatagaaccgatgctatatgattgtatactggctgtaagactttaaaacactaggcttgattcggatgttaatgtgtgctttgtacccggtgtaccttctctgccggcagtgttgcacatgcactggagcacatcaaacgtttggtgttaataaggacaggctatgtatcctctgccagattgtacatatatacattgtggtgatatataattataaagctgacctctgccgtccgggctcgtagtgatgaacagttttatcactagttctcttt

SEQ ID NO: 24970 - DNA, 2232 bp, Zea mays
  Clone ID: LIB3689-228-D1_FLI
tgatctcatctcttccatcctagcttgctcgccgctgccagtctctcctccacctgcaactcccatgtctcagtcttctcctctcttctccgtcgcccgagcgcacgccggagcaggagggcgagccgtggcagccgctctcctgctccgtcgtcgccccattgcacagctgccgcacagcatccatggcctacggtgtctctctccagccagagcgacaccttccaagacgctcctcagcctcccccgcgccacgctgtcctccttcgccgaccccgacggcgacggcggctccagcgcgaaagccagcgacggcggcgccaaggccggcgccggcggggaggagcaggtcggggaatgcgagatgtcggagatggccagggcgttccacatctcgccacgggtggcgacgtccatctccgtgacgatcgcgttcgccgccctcaccgtgccgctggcgatgcgctcgctggtctgccacgggaccttcaggatgaacgcgctggcgtacttcacgctcctgtcggggttctacatggcgtggaacatcggggcgaacgatgtcgcgaacgccatggggacgtcggttgggtccggagctctgacgctccggcaggcggtgctgaccgccgcggtgctcgagttctccggcgcattcctcatggggacccatgtcaccagcaccatgcagaagggaatcctggttgcgtctgcgttccaagggaaggactctctgctcttcgctggactcatatcctcccttgctgctgccggtacatggctgcaggttgcttcgtcatatggctggcctgtctcaactacacattgtatcgttggggccatggttggtttcgggctggtgtatggaggggtggatgcagttttctggagttctttggctagagtatcttcatcctgggtcatctctcctttgatgggtgcagctgtctcttttcttgtttacaagtgcatacgcaggtttgtatacagcgcaccaaatccaggccaggctgcagctgctgctgcaccaatcgcagtcttcaccggtgtcactgcaatctcgtttgctgcttttcctctcagcaaggtgttctccattgccatcctgcaagcagtgtccagtggggcaataggagccatcattgtctcccgagtgatccaaaagcagctaggtgacttgctgtcttcagaagcagagaagatcgcgtctgctgagaagtcaagtgcccagcaggctggatttctctcggacattgctggccctacgggagctcagctgcagatcgtgtacggtgtgtttggttacatgcaggtcttatcggcatgcttcatgtcatttgctcacggagggaacgacgtctccaatgccatagggcccctggctgcagctttgtccatccttcaaggtgtggcaagcagcgctgagatagtcatacccactgaagttcttgcttggggtggttttgggattgttgcagggctcacaatgtggggatacagggtgatagcaacaattggcaagaagatcacagaactaacacctaccaggggctttgccgcagagtttgcagcagcttcagtagtcttgttcgcatcaaagctcgggttgcctatatctgccacgcatacacttgttggtgcggtgatgggtgtcgggtttgcaagagggctcaatagagtcagggcagagacagttcgcgaaattgtggcgtcctggttggtcacaattccagttggtgctgtcctatctatcttctacacattgatcttaaccaaaattctggcgtacttcatgtgagtggattgtaaaataaaagggctgcttttaagtggtacagcccattgtcacttcataaattttgatcagtggaaaaaggattttcttttgcaaaagtaaagagatggactgattccacaagttccaccagaaatttacaagaatttccaagaccaaataaccattttcttggaaactgagcaaattagaagtgtttcccagcaaataatcatggtacaggctcctgaattattatttttttcaactttttatactaccttgtatgtctatcacaaggtcgaatactgtaacttctcgtagagctgttatacatatagatgtaatgtaatggttggtcaaatttattcttgtaaattgtaatgatatcgcatgactttgttcattgccaatcatcctagaataagagctcattcctctgcaggaaattatatgac

SEQ ID NO: 24971 - DNA, 1252 bp, Zea mays
  Clone ID: LIB3689-228-D9_FLI
tcttcatctcccaggttttcccctccaatcacccccaggtcttcctctcgcgagttgcggtctcgcgcccccctccgccgaccgccgcctcctcacaaccgcggaagctgcttccctctccattggacgcggccagcttccatctctcggtcacctccctctacatcccacggccgctaccaccttccctctacctcacacggccgccggcctctccaaggtctgcacacggaaaaaccttgccacgagtcgccgacactccatcccggaagagctaacgaggtgactccccaccgcgcccatgggtgacagccagtactccttctccctcaccaccttcagtccgtcggggaagctcgtgcagattgagcacgcgctcacggctgtcggatccgggcagacctcgctcgggatcaaagctgccaatggtgtagtcattgccactgagaagaagctgccttctattttagtggatgaaacatctgtgcaaaagattcaggcactaacacctaatattggagttgtctatagtgggatgggtccagatttccgtgttctggtgaggaaaagtcgaaagcaggcacaacaatattatcggttgtacaaggaacatatacctgtaacacagcttgtacgagagactgctgctgtcatgcaggagttcacacagtcaggtggtgtgagaccatttggagtatcactgttgattgctgggtatgatgacaatggcccgcagttgtatcaggttgatccctcaggatcatacttctcctggaaggcatcagccatgggaaaaaatgtgtccaatgcaaagacgtttcttgaaaagagatacacagaagatatggagcttgatgatgccatccacactgcaattttgactttgaaagaaggatatgaggggcaaatttcctccaacaacattgaaatcggaattattcgagctgatcgtgagttcaaagttttaagcccagcagagatcaaggatttcttggaagaggtggagtaagctgtctgttgatgatactagttcagacaacaatagcagtgtcacttatgagcagccagcctgaagattgtcttggttttattactctgtaaactgatttgctccagcgccatgtggtggttacatttgaaccctcctcaacgcatactgtagacaatgagataacgtaggatgaatgctgtatttgacatactttgcagcttgtttatgtgatgcacgttcttgcggacagtatcgataccc

SEQ ID NO: 24972 - DNA, 1268 bp, Zea mays
  Clone ID: LIB3689-228-E11_FLI
catatcccatggtgcctagccaagtagcccatggaggcttcctccccacgcctagccctctctactgatggccgccgtccctgctccatcctatggcgcttgccctcagtccagcttgccagcagccctctgccctcctccctcaagccctagccgagttttccatggtgccctggatgccagcccctttacttgatgcccctgctaggttcctggcatgttcgcccagccatcacccaagctcagctcgtccatggcgcacggaacaacagcccccttcatccatgacgtctagccctccattcccttgcccctgcagattgttctcaagccgccaaccctggtgcgtcgtccgtctcagtgaggatttgtcatttcttttgtgagtattcctcgctgatatttgtatctagatgatgtattttgcgtgtttgtgtatgtggcttggaggagaaattttcccggtgttggagggcgaagagatcgaagttctaaaggtaacgcccgtcgggtgctcggtggaacacctcaatcggaggttattgtcgatctctcggattcgaggcgatttaattgtgacgacaagagccaagtgggcgagttgacatatgcaagggttaagtgctacatatgtcgtgtggttggagatccccagctgggtattaatcgattcggatcgccgaacttctcggatatgaagaccggatcttcgaccttcagcgtagatgacaagtgaaactaaagatgctaaaatgaagctagtataggacaagtgaatactctagattaggcgaatctagattcaggaaaaatacttaactggtgaagtaaaaacttggcataaggatccactactagtaagcttttctgcaaaaatacgtctttaaaatttgataagctttaccttgattcccaataaaccaacatacccttgagagtcttttctttagtcaggtaagtcttgctgagtaattgcgtacttagggttttattccctgttgtttttcaggttataatttttttttctgttgtggatggtgctaagtgccggtgggctcgtccttcttatataagtataacccatctttagcttctttattgaggattgtcacttaagctagcacgtattttaaaacttataaatgttttatacattttaaagtgtaattcttttgaatcactttcttttgtaatcactccgataattgtataatgtaaacttattataacatgtaataattttacaataaagaatttattttcgctgc

SEQ ID NO: 24973 - DNA, 1332 bp, Zea mays
  Clone ID: LIB3689-228-H12_FLI
ctccctagatcgccgcctccggcagcggcgaggctgcatcgcgagggcggcggaggagccgggcgacggggtcgacgaaggcggggaagacgaggctagggttcggggtcgctgctggtgggctgcgtctgagggaggaggatgcatatgatgcggcggctcaagagcatcgcctccggccgctcgtcggtctccgatccgggtggtgactctggctccaaaagaccaaagtttgagcaggatggagcaggagatattgttatggagccacacttaaccaaggataaacctgtgcggatagaccaagaatcatcgtcatcatctaatagggatgctgaggcaagcacatctactagcatgaaacctgttaaaactgaagaagcaggagcagatcttcttcccaaagagatgaatattatgacaattagcgacgacaaagctgatggtcataatgataaggaaggtgagggtgttacacttgatgggactggaacagagacagggcagataattgtgacaacaataggaggtcacaatgggaagccaaagcagaaggtctcatacatggcagaattggttgttggtactggttcgtttggtattgttttccaggcgaaatgcttggaaactgacgagacggtggcgataaaaaaggtgttacaagataagcgctacaagaatagagagctccagactatgcagttacatgaccacccgaatgtagttcagctgaagcatcacttcttttcaacaactcaaaagggagaagtttacctcaaccttgtacttgaatttgtatccgagacagtttatcgtgttgccaaatactacaaccggatgaaccagcgtgtacccataatatatgttaagctgtatgcatatcagatgtgccgtgcgcttgcttacatccatcgtgttgtcggtgtgtgtcatcgtgatatcaaacctcaaaatctgctggtcaatcctcatacacatcaacttaagatttgtgattttgggagcgctaaaaaattggtccctggtgagcctaacatatcgtacatttgctcgcggtattatagggctcctgaactaatatttggagctacggagtataccactgcaatcgatatctggtctgttggctgtgtagtggctgagcttctgattggtcagcctttgtttcctggtgaaagtggtgttgaccaactggtggaaataataaagattttgggtactccaacaagagaggagatcaggtgcatgaatccaaattattccgaattcaagttccctcagataaaagcccatccatggcacaagctttttggtaagcgcatgccacccgag

SEQ ID NO: 24974 - DNA, 2287 bp, Zea mays
  Clone ID: LIB3689-229-A2_FLI
cacaggcaacacgcgtctccgtcctcccacctcactctagtctagtcttctcccccagcagcaaaaatggtaaaaggtttgaggtctgcgtgacatgtgaagaagagagagtgctccagcattagcctttgctctcgtctgctcgctcaacggctacttcctgcgtcgccgtggtgctgggtttgggagactgggggaggcggattgtaggaagagctggtgtgtggtgcggtggtcaccaaagagcgccggaaccggagcggcgatgggctgctgccagtcgcggctggagcggctggaggcggtgtcgcggtgcaaggctcgccggcggtacaccaagcacctggtgcaggctcggcgggacatggctgcggcgcacgcgctctacctgcgcgcgctccgggccaccggcgcctcgcttctacacttcgccagcgccgaggccgaccacccgcacccccattcctccgcggcccaccacgagccgccgccgtccccaccgccgccgcctcccccgccgccgctcagcccctccacgacagccaggtcctggacgaccaattcctcctcgatctccgcgtccgcgatcttgcctcctcccccgccgccgccactgccgccactgccgtccagctgggacttctgggaccccttcgcgccctcctcctcccgctccgctgccgacgacgccgactgggacgacgccgccaccaccgtcgtcgacgcacccatcgccgcgccgccgcccgtggtcacggccgctgcggcggtggccgcgcccccttccatcgtcaccgccaccaccacctccaccactcccagcgagctcaccgtcgttgcggtaccccgcggcggcgccgggaagaaggacctcgcggagatcgccaccgagcttgatgagtacttcctcaaggcagccgacgccggcgcccgcgttgctgcactactcgaggctcccgtttgcgagccccccgagcccaccaccaacagcagcctaccagggaaggtacttagttacagcaagagcttgaagcccatgggatgggcatggggcggcggagggtatgggaaaggtaacgatgggttcacaaggttcgggagaggagacggtggaatgcccatgggcaatggcggaggcggtggaatgctcagtcattcatccaccgtggagaagctctacgcatgggagaagaagctgtttcttgaggtcaagagttacgaggggtataagcaggagcatgataagaaggtcagtctgttgaggaagcaagaggtgaagggtgtggattacttgaagatggagaagaacaagatggagattgagagcctggagtccaagatgctggttgccaaccagtccatcgagaccaccacttctgagataatcaggctcagagaatccgagctatttccccagcttcttgagctgattgctggcttgatgagcatgtggaggggtatgtacgagtgccatcaagttcagacccacatcgtgcagcagctggagtacctgaacaatgctcggaataccaacccgacttccaatgtccaccggcaagcagctcttcagctcgagatagaggttgacaggtggtattcagccttctgtagtctggtgaaatcccagagagactacgtctactcattgaccggctggcttcgtctatccctgttctgccaccacgacccactgactaaagctcagaactccgatatctatggcttgtgtgaggaatggcagctagccatcgacagaatcccagataaggtggcctcggaagggatcaagactctcctgacagtgattcatgctgtcgtcattcaacaagctgaggagcataagcagaagaagagggcggagtctgcattcaaagagtttgagaagaaggcagaggagctgagagccctggagtcaaaatatgtcggcgctgaaggttacagagaaatgtcacgaaaatcatcggtagctgacaagcgggcgaaggttgaggctctgaggagccgtgccgacgaggagaagatcaaatacgagaagagcatcggggtcaccagagcaatgaccctgaataacctgcagactggcttccctaacgttttccaggcgatgacgggcttcgccagcgtgtgcatggaggcatttgagtcggtgtacaacttcaagcggagctcggacccgaagaggctgctgacctgaagcaatgttgtataaaatgtatacagtcctaggtttttagtaacaatgataccttgcaacctttgtctggctgttatcaggttctaatggcgc

SEQ ID NO: 24975 - DNA, 1774 bp, Zea mays
  Clone ID: LIB3689-229-B3_FLI
gcagagataggcgtcttcgtactcgcctacctccgcggctcaaacctttcccccttctcccaattccctccgtcggccgccgctccatcccgtacgacgacaccatgagggagtgcatttcgatccacatcggccaggccggtatccaggtcggaaacgcgtgctgggagctgtactgccttgagcatggcattcaggctgacggtcagatgcccggtgacaagaccattgggggaggtgatgatgctttcaacaccttcttcagtgagactggtgctgggaagcacgtgccccgtgctgtttttgttgaccttgaacccactgtcatcgatgaggtgaggactggcacctaccgccagctcttccaccctgagcagctcatcagtgggaaggaggatgcagccaacaactttgcccgtggtcactacaccattggcaaggagattgttgacctatgccttgatcgcatcaggaagcttgccgacaactgcactggtctccagggcttcctcgtcttcaacgctgttggtggaggaacgggctctggccttggttccctcctcctagagcgcctgtctgttgactacggcaagaagtccaagcttgggttcactgtgtacccttccccccaagtttctacttcggtagttgagccatacaacagtgtactgtccacccactccctcctcgagcacactgatgtggctatactgctggacaatgaggccatctacgacatttgccgccgatcccttgacattgagcgcccaacctacaccaacctcaacaggcttgtgtcccaggttatctcatcccttactgcctccctgaggttcgatggtgctctgaacgtggatgttaacgagttccagaccaacctggtaccctacccgaggatccacttcatgctttcttcgtacgctccagtcatctctgctgagaaggcctaccacgagcagctctctgtggctgagatcaccaacagcgccttcgagccatcttccatgatggccaagtgcgacccacgacatggcaagtacatggcctgctgcctcatgtaccgtggtgatgtggtccccaaggatgtgaatgctgctgtggccaccatcaagaccaaacgcaccatccagttcgtggattggtgcccgactggcttcaagtgcggcatcaactaccagcctcctagcgttgtgcctggtggcgacctggccaaggtgcagcgtgctgtgtgcatgatctccaactccaccagtgttgtggaggtgttctcccgcatcgaccacaagttcgacctcatgtacgccaagcgtgccttcgtgcactggtacgtcggtgagggtatggaggaaggtgagttctctgaggcccgtgaggacctggcggcgctcgagaaggactacgaggaggtcggcgctgagttcgatgagggcgaggatggcgacgagggtgacgagtactagagaagtttgctgatgacgcagcatcaggccagtgtgctgcccttatcccgtgatctgccgtgagttgctcctgctatcgtgttatgtgtgtctgttctgaagtattgtgtggtttacaacacctgatgttgtaagagttgttaattcccctgcattgctaccgggttattgagaataattatggctgtttacgttgttgcttcatctcggagatgctttacatttaccaccttgttcatcttttgtcatcggtaaaatcgagtcggcggatgattttcttgcgtcttgttcatctttacattttcttgcggatt

SEQ ID NO: 24976 - DNA, 2475 bp, Zea mays
  Clone ID: LIB3689-229-B5_FLI
cacctcctgtcttccttcaccttcgcgctccgccgccgccgtcgattcgtgctgctctcacccctaacctgtccaacatcgccggggagggaagcagcagaagaagctccccttacctccggctatcgcctgaggataaagtggggtctgtaggggagtcttaggggggagcaaaagggataggatagggagagatgaagcaatcaatttcttcgtccgccttcgcccctgcttacgtccccgctactaaccctaggatcattctgtcttttctcgtttcttatccgactcttcttcgttttatgcctatcagttatgaggttgaacgccttcagaagcttctctactagattagtgtaaatagtagacttgttcgagtttagcttggctggaagaattagtctctggtccgtgtttatatctgctagcaataatggctgcgatgaacggagaggtattgggtgaatgtggaaggaacataaatagtctcaagagaaagcgggagagccccgctgcatatgctgctggcgtattctgcacctctgaattgcatcagcatactgtcaatgattctgctgttaggtttcatcttgataaagaccgtaaggcaaagatcgtgtgccacttcaacaagcaggttttgcagagctataagaaattcatgagtagtgcaccacctaagcgtattttgcttcgccaaggtgctgtctggaaagactttccagaaaagattgtcaaattggcccaagctgacttcagggcaaaaaagatgatcacagaaacaggatatcagaaccagctatttttgctggattttgcccatatgacattcatagacacaaagacaggttttcagaggccaattgcttggatcgatgaaaatgaaaagtgctacttcccggaatcatttatacaagatcagaagttatttatgaagaaagattttggcaacggaaatcatgagtacattagtgaagagcgaaatgggacacgagaaacgaatcaccagtttggagcatcagaaagttctgctgaaagctcaaactttgagtcaagtattggagatgtttctagtcctaagagagctagggctgaaaagaatttcattgtaaaaaaatattgtgatatgggagaagctattggagaaaatgagccatgcactttgttgcctacagcctgtaacctactaccacaccaagctaatctgggtgaggtatcccgtgctcagcgcactattgaagccgtggagaagctgttgctgcaggggatgggttcagttattgaatccaaggacattattggaatctacaggactccattattggatgaccacggacaagtccgttaccatattcaccaaaagcaagtacaggttaccggatgtcatcgtggaaacgcaaatgtccgttatgcatggcttccttgctccaaaagcactgtgcatgtaatgatgctgaatggtgttttgcaagttgataagcctcccaataagtgtgcagcctatggagagggcactctccttacaccagcaaatcgttcggatgcctgtgtgaaatactctgatgttgatgaaaatggcattgtccgtatgatgttgtgccgtgtaataatggggaacgtagaaatagttcaccctggatctaagcagtgccaacctagtaataagtattttgatagtggagtagacgaccttaaaaatccacggcattacgttgtgtgggatatgaatctgaatagtcatatctattctgagtttgtagtcactgtcaaattgccttctaaaaccaaagattcctttgtatcgcaagaaaactgtcagaattcgtctgatctatcactggtgttgaactctagttcacctgattgtatttcacaggagatgaacctggaggcacctccagcattgggaggtggatgtgcagcccccatgctaggagattcgatggaaaaggctccaagctcaccttggatgcctttctccatgctgtttgcagcgatctctaccaaagtgtctcctgagaatatggacgtgattattggttgctatgaagagtttaagagcaagaaaataagccgaggtgaactagtgaagaagctgaggcatgtagttggtgatagagtgctaatatcgacgataatgcgtctccaagataagcagttacctccagtggataagcgtgaggaaccagacacatcggcgtccaaggtggtggcggaaccatgagatgggtgtcaggaggtgggcgaggaatgcagaaagggaggaaccagccgacttgacatagaaaaccctgtgggaagcagcaactatgaagcctcttgcatcagtcttgtgcatggaggctgctgtttgttctctgtatcgtaggtgtctacgtttgcgaggaaattgtatccggtgtttctctttcttcaaattaaaccacgcacatgcagctgccgtactttttggaccattgaagtgtttcgtccgtg

SEQ ID NO: 24977 - DNA, 795 bp, Zea mays
  Clone ID: LIB3689-229-C11_FLI
ccggcgtcatggtgcagcagcccgcctgacgagatgagcaggggaggctacccaagccctgtctcgccattggaggtcgctgtcgccgacgaggatcgtgatcctcaagccctgccccgagctgagcgcggacgacgtcgaggagtcctcgctcgggtcgccggagctggtgaagaaggagaacaacatggaggccttcctggaggaggtcaagaagaggctcaagatcgagctcgagggcggggtggcctccgacgacaaggcggaccgccgttggttcgccgccgcagccgccgccgacgttattccggccgacccgaagcagatcgcgcggagcatcgccaaccagatcagggagaacgtcacgacgctgtgcgcgttcgacaagtgccacgccatggcgccaaggagagcctccggtggcaaggcgctgctagaggcgctgtggaagtccatgcaggtgtggatagagccgccgagcgaccgcaggacggcgagctctgcctccgtggacgtgctgatcggccgtgacctgagcgtgtcggcgtggcacggcgcgttccgcgaggacgcggacgcgctggctggggacgtggaggcggagctgctggacgagctgctcgaagagacggtgtgggacgtcctcctcaatgtgggggactcatgatcggatcgtatgcctcttctgacgagtatacttgtacattttggggtgcctttttttctgcctcttttgggtgcttgccgggtttgtgaacggtgttgcattggcgagtgagatatgtaactataact

SEQ ID NO: 24978 - DNA, 1530 bp, Zea mays
  Clone ID: LIB3689-229-C3_FLI
ccgacccgcgcgcaagccctcatgcggttagggctgtaacgatctcgtctcgctaccggcggccggctgcggaacgggccaccccacgcgctcctctgagttcgttcgactaatctaccgctgactgtactttgggctgtcgccaccagaaagccctcacgagtcctttgcctcctcactccgtcaggctcgtcgccacagggttttgttcctaactttttagcttcaatttttgtcttgaatggcaacacctctggatgttccactggatgatttgattaagagcagagctgggaggggaacaggaagaggcaggggacaaggagggggtcgaggcagaggtgatggccaaaggttggctcgtggttcgtggcgtgggcgtggtactggcaacttccgtgaaaggggacttggggtgtcttcgcggaggccacttggtgttaatacttggtcctcatcatttgctattgccaagtcattcaataaagcaaaggattttgtgtggagacatgatctctttgaggatagcatggtagcagctgggctttctgggatagaatctggaacaaagctttacatttcaaatttgcactatggagtgacaagtgaagatctacaggagcttttttcagaaatgggtcatttgaagcactgtgctgttcattatgacagttatagacacccaactggttcggctgaggtgatattcaccaggagaagtgaagctctcgcagcactgaagcgatataataatatgcgccttgatgggaaggccatgaagattgaagtaataggagcagaattgggtctatcagctgctgccgtaccccagattagtgttgttcctggtgcaagcagaagagggcagagagaagttgttatgatgcctggtggaagtgggtttggacaaggtgcatctggcccatctagttcgcttcctgggtggaagcgtggaggctttgttcgaagaggacaagggcgtgttagttttcctcaaagagggcgagggcaagtgcgcagccgtggccgtggccgtggccgcagtagctttgttcagagccgtggacgtggctatgtgcgcaggggtaatgcagagaaatcagccaaacaattggacaatgaacttgacaactacaactctggtgcgatgaatgtcgactaagttaatccatcgtgacatcattcaatccaacctggaagttggaactatgttgaagctaagcttgttttctgtcggtattctgtcaaatgtgcacacttctgtcatgctctagtggcatcagttgaagattagatattccattattcctactgcaatagtcttgtgatatcagaatttgctgtaattgaatgatgaattatgttttcaaccgttgaaaggtttgctgtcaaaatttcaatattatcctagttattgtcagaattttcagtaggcattagccaaaaagattggtgctgactactggtatatcagaatttgctgtaattgaatgatgaattatgttttcaaccgttgaaaggtttggtgtc

SEQ ID NO: 24979 - DNA, 1267 bp, Zea mays
  Clone ID: LIB3689-229-C8_FLI
cgcgtgtgcccggagccaagtcgcgggagggaaagcggcgcgcgtcatccgttaccagtggccagtgggggcaacgtcaccacagcggccaactcgaacgaatacgcatccatcccatcccaagccagcaccagcagttcctccaccaccagcccagccctcgccccgtccgttcgtccgcccgcgcccgctgctgcttgcctgcttcccacgcacgcgagctctgttccgtgctgcagcaaccgcaaccgcatccgcatccgaatccgcacacgatccccgcgccacttgccccgtcaccccccacgcggcccgcgcctccgcccgctcgtcggccaatgcccggcgcaggccagctcggcgagatgagatgacgccgccgcgcggcggtgcccggcctcccgtcgctcacgcgcgccagcaccagcaccacccggccccatcgggattcttcatcccgtcctccacctagcgcggtagcgccgcatttattccctccccagcacaacggtcacgtttccatcgccccgtcttctctccctcgtcgcatccggcgctcctcctcgtctcctatttaaagcgcgccgggctgggagccagcgatcatgctattctctaggaggcggcgagaagaaggccgacaaggagaagggtgccgacaagcccaaggaggagaagaagaagcccaaggaggtcatttactagccgattattcaagtccggcgaccctcgtctcgtcaccgtctgcctccttgctctgcaactgaacgacggtcttttttttcttttctttcaggagactgtgacgctgaagatccggctgcactgtgacggctgcatcgagcgcatcaagcgccgcatctccaagatcaaaggtgaggttttccttggcatccgtcgcagttttattcgcatcccacgagaatcgtcaaaaggctttgagagccttttccgtggagatctaaaaattggacctgacaattttgtgcgtccattccattccattccaggcgtgaaggacgtggcgttcgacgccgccaaggacctggtgaaggtgaccggcaccatggacggcgccgctctgccggcgtacctcagggagaagctcagccgggacgtggaagtggtggcgcccggcaagaaggacggcagcggcggcggcggtgacaagaaggacaagggcgcaggagacgggggagagaagaagaaggacggtggcggcggcggcggcggcggggccgaggagaagaaggacaaggccggggcc

SEQ ID NO: 24980 - DNA, 1424 bp, Zea mays
  Clone ID: LIB3689-229-F1_FLI
ccagagtgctctgctctcgctggaggccgtggttcattcacgttcatggaggccgccgccattcccaccagtgccccggaaaccaggtccgtacgtgccataccctcatgctttgcttcgttcttgcagtcgtccgtgcagtctttacgagaacacaagtgtgcgtgcagtccttcaactgacctggctggaactggaacctaccaggttttccttacaggaagtcgtagtttctacctactggtactgtacgtaaaaaatgtaacacagatcgatacaactcctggtgattgaccctggccttagcttgacaggattgccgttgtcaccggcggcaacaaagggatcgggctagaggtgtgccggcagctggccggcgccggcgccaccgtcgtcgtcttaacagccagggacgagacgaggggtgcagccgctgcacaagagctcagagaatctgggctctccgatgtcatcttccatcagctggacatcaccgacgctgcgagcgtcagtcggctggctgagttcctcaaggctcgttttggaaagctagatatcctggtaaataatgccgcagttggtgctgttgagtacgtccaagatcctgctgacagttcaacgagcgaggaagagctgagtggcatggatatggtccaaaggcttcagtgcatgcttaagagagtccgggagacctacgacgctgcgacagaaggcatcaagacaaactactatggcataaagcatgtgatcgaagccttgctgcctctgcttcaagcttcctccgatgggaggatcgttaacgtctcctctgacttcggactgctaagggtaacaactaaccagtatatatatataaactctatctttcagcaacaacgacagacattttaattcagttcagaaaagctatgtaattaatttggtggtgtggtgtagctgatcaacaacgaggaagctaaggcaggagctaaacgacgtggagaagctcaccgaggagaggctggacgaggtgctggccgcgtacctgagagacttcgacgccggcgaggtgggggcgcgcgggtggccggtggacttctcggcctacaaggtggccaaggtggccatgaacgcgtacacgaggatcctagcgaggagccacccggggctgcgcgtcaactgcgcgcaccccggctacgtgagcaccgacatgaccgtccacaccgggcctctcacgcccgagcaaggcgcggccaacgtcgtgaaggtggcgctgctgccggagggcggcccgaccggcgcgtacttcgcgttgggagaggaggcgtcctttatgtgacgaaagcaccgtcgtcgttaagttcgtcgttgttcgccaactccctgttagtcgatttctaaatcgacgtacaatgaaatacatcatcgctgcaaactcacaaatg

SEQ ID NO: 24981 - DNA, 1885 bp, Zea mays
  Clone ID: LIB3689-229-F12_FLI
ggatttggatagcgcggcgcagagaaaaatggcggcttcggctctccacctccaccgccggcgggtgtgaagcttcagcagaggcagctgcgctcgcggcagggtggcctatctcgaagacttttgaaagttgtgtcctattacagtctcacaactccaccatataaactggttgtaagcttgttgacgtcaatctcaaaagattcacgtgctgtcattaaaggaatatccaaattttaactttgtttacctttgttttctggtacaatgctcaggatgctctggaaccttacatgagcaagaggacagttgaacttcactggggtaagcaccatcaagattacgtggatggcttgaataagcagctggctaccagccctctgtatggatatacgctggaggatctgataaaagaagcctacaacaatggcaatccattaccagaatataacaatgcagcacaggtctggaaccatcacttcttctgggaatcgatgcaaccagaaggtggtggcttacctgagggaggtgtgctgcagcagattgaaaaggattttggctcgtttactaattttagggaagagtttatccgctcagccttacaactattggggtctggttgggtttggcttgtcttgaagagaaatgagacaaagctttcagtggttcatacacaaaatgctatcttcccacttgcttttggtgatatcccaatcatcaacctagacttatgcatgcttactacttagactacaaggatgataggctaacatatgttacaaactttatgggccatctcatctcttggcatactatcactctacgcatgatgcgtgcagagtcttttgtgaaccttggtgagcctaatattccggtggcatgagctacagatacaccctagttatcatcatgaggcatcctttggatacgtcgggtcaaatcctgctggaggaaccagagacatgcttatcactcgaatgccatacacgcaaagataagctgcatgcttgattttcaccactgcccttggatattgctacagggaaaccactagtcagcatccaatctgaagatgtgcagcaatgcagctttagaagctctgggagctggtaggtagcgatccaacttgggcttcgaagccatggcgctttcgctagatggctatgcccgtggcacgatctggagcagcagaccagacgctactggtgacagatgattcagacatgaaaagattaaattgtgcccggccctatgacactcgaacagggttccccaggaccctgaattctgctgtcatcacagacaaaacgaaggacacgaagaatagattgtgtcggatcggtagcagcagtgacaggtaaactacgcgaacgaatgccttgtgtttggaatcggaaatcgggtgataacaatagcaatgacaaaagggtgtggtggttcaactgaaatcatggcgctacgacatgcatgctttattaggtttgccacaaccagactaaaaggagacaggctactgaaactgaatcatcatcatcatcatcatcgtcactagggtaaggtagaagtggcggaggcgatctccatctgcgtctcgatcgtcctctgagctggagccgggctagtcgcagcagcagcagaggcagtcgaggcagcactcgcaggtctcgtagcagcagaagcagcacagcgccgtgaagatgctgccacaccacacacgtacgggttgagcaacacagcaggagttagttcggcagaaagaaaagaaaagaagtgtaggcatctgatggagttctgtctgagacgcacggagccctgactcaccaggcatagaggcagcccttctcctcgtgcctcttctggcagtgctcgtagtaggacatgtcct

SEQ ID NO: 24982 - DNA, 2485 bp, Zea mays
  Clone ID: LIB3689-229-F3_FLI
cccaccaaaaacgcactcccgaacccgactctcctcttgctcgctctcggtggcgtctccgcctccgcagtccgcactcgcgcacgcttcccttcccttcctcgcccacgcggacgcggccacggccgctccaagctagcagcagagcgagagcagccaatttggcgcacctctctcactctccctccctccgttcagcagcgttcgtttcgttgctcactcagatccagccattcaggtgagagagtaggggcagcgatgcccacgccgccgctccgtggggcggggctcctgctccgtatctgcctcttcctctgcctctcactccgcccccgcctggcctcctccgagcccgacgccgacaaggcggcgctgctggcgttcctctccggcgtgggccgcggcgccaccgcccgcgcgcgcatcaactggtccaccacccacctcgcctgcagcgccgacggccccggccccggctggacgggggtcacctgcagcgcggacggcgcgcgcgtcgtggcgctgcacctcccggggctgggcctctcgggcgccgtgccgccgggcacgctcggccgcctcaccgcgctgcagctgctcagcctgcgctccaacgacctctccggcccgctccccgccgacctcctgcgcctgcccgcgctcgagggcctccacctccaccgcaacgccttctccggcgcgctccccgccgccctcgcggggctgaccgcgctccaggtgctcgacctctctttcaacgccttcgacggcgccgtccccggcgcgctcgccaacctcacccgcctcgtcgcgctcgacctctccaacaactcgctttccggccgcgtcccggacctcggcctccccgcgctccgtttcctcaacctctccaacaaccgcctcgacgggaccgtgccggcgtccctcctccgcttccccgacgccgccttcgccggcaacagcctcacgcgcccggctccggctcaggcgccgccggttgttgtcgctccgcctcctggcctcgctgcgcctccccccgcgaggcggcggcccaggctcagcgaggcggccatcctcgccattgccgtgggagggtgcgtcctcgggttcgccgtcgcggcgctgctgctcctcgcattctgcaacagcagcagggagggccgcgatgaagagacagtaggcggcggcgcggctgcagggaagggcggggagaagaaggggagggaatcgcccgagtccaaggcggtcatcggcaaggccggggacggcaaccggatggtcttctttgaggccccgtcgctggcgttcgacctggaggacctgctccgcgcctccgccgaggtcctgggcaagggcgcgttcgggacggcgtaccgggccgtgctggaggacgccaccacggtcgtcgtcaagaggctcaaggaggtgaacgccgggcggcgcgacttcgagcagcagatggagctgctcgggcggatccgccacgacaacgtcgtcgagctccgcgcctactactactccaaggacgagaagctgctcgtgtacgattactacagccggggaagcgtgtccaacatgctccatgggaagaggggagaggacagaacaccattggactgggaaaccaggctaaagatcgccctgggagcagcacgaggagtggcacacatccacaccgagaacaacgggaggttcgttcacggcaacatcaaggcctccaacgtgttcatcaacaagcacgagcgcggctgcgtctcggaccacggcctggcgtcgctgatgaacccggtgacggtgaggtcccgttctctcgggtactgcgcgccggaggtcgctgacacgaggaaggcgtcccagtcctcggacgtctacagcttcggcgtcttcgtgctggagctcctcacggggaagtcgcccgtccagataaccggcggcaacggcggcgacgtggtccacctggtgagatgggtgcagtcggtggtgcgggaggagtggaccgccgaggtgttcgacggcgagctgctgcggtaccccaacatcgaggaggagatggtagagatgctccaggtcgcgatggcgtgcgtgtcgaggtcccccgagcggcgtcccaggatggcggacgtggtgaggaccatcgaggaggtgcgtcggagcggcagcgggaccgcgaccgggacggggacgcggccgtccaccgaggcctccaccccggccaccgccgctgaagcggcccagagcagggcggaggagggcggctcgtcggcggtggcgcagtgaccggacgcgacgcaggccgagctgcttgctggtggctcgtagcttggatgatcctgtgctttattttggcgggtgctgtaccattcgttctttcgtgttacgaaatcgtaacagaatgtcacgtggacgtggacacggtggtcggatttttggcagcaactgctcgctgctgactattgattgactctttgtacaagtgtgaaggaag

SEQ ID NO: 24983 - DNA, 1708 bp, Zea mays
  Clone ID: LIB3689-229-G10_FLI
ctcttcttggtcatgcccttccctcccatcaattcttcaatgctgcgtaatccctactgaaagaggcaccaatcagccattctgcaacttgccttcccgtgcttgcctcactgacatgaactcatcgtctttcttcctctgatccataagatctggccaacaagatcggtggcgcacaggtatcgggtcatcacttggtctctgaattctcaggattggagttgaagaagagcatcatgcttggtgggcagagcgagaccgtcaagtacagggtctttgctggaacatggaacgtgggcggcttggcgccgccggatgacctggacttggaggattggctggacacgaagaacgactcctacgacatctatgttcttgggttccaggagattgtgccgctgaacgcgaggaacgtgcttggccccaagcagaggcgggcggccatgaagtggcagctgctcatcggcgacgcattgaacagcacgaggcatggagctgcaggaatgcatggtcaaggacaggggggcgcgttcaggtgcctcatgagcaagcagatggtcggaatcttcgtgtcggtctggacgaggagcagcctctgccggcacgtccgccaccccggcgtgtgcagcgtcggcgccggcgtcctcggccggctcggcaacaagggcgcggtgtccgtccggttcttgctccacggcacgagcttctgcttcgtctgctgccacctggcctcaggcggcgagaagggcgacgcgctgcgccggaacgccgacgccgcgggcatcctctccaggaccagcttcctcggcttcggcggcgtggcggcagcacccggtgaggtgcccaagaagattcttggccatgaccgcgtggtgttgctcggcgacctcaactaccggatcgccatggacgatgacgaagcacggcagctggtgagggccaggaaatggggcatgctgctggagggcgacgagctgctgctggagctctccagtggccgtcagttccacggctggcacgagggccacgtcaccttcgccccgacctacaagtatcgccgcaactccgaccacctccactggtgcgctgacggcgtcgccgccggccgcgagaagcagcaccgcgcgccggcatggtgcgaccgcatcctctggcgcgggaaggggatgaagcaggtccggtacgagcgctgcggttgctaccggctctccgatcaccgcccggtcagggctttgttccacgccgtgtgcgaactggcggatggctaagctgtaggctagcttgcgtgctttgaatgaaaagcgtttaattaacaaacgagactcttaattttacaaagtgttcaaaaatttcggccagaaatttcacacggaactggttactggttcctgcatcgatgcgctttcaagctggtttgcgcctgattcctatctgctggagaaaattggagcacattttctgttctcggctgaggatatatggaaccaaaggatcattgaccaattaattatctgacaggttattgtccacacctgattcatgtgccggaggcatacaactttgtgcgccgggtcaactcgatgaaaccagtttttcgtggtttcaacaagatgcatgtcttcactatgatattgttattcgcatccatgaaaaagatgtatcaggtgtaaaccaagtttccatataaattttatacaaaccaactaac

SEQ ID NO: 24984 - DNA, 1843 bp, Zea mays
  Clone ID: LIB3689-230-B6_FLI
cccagacaaagcacgagccacgcacggcccccgctgcctcccttccgccgccgccgccgccgccggcgcgccaccgtcgctgctctcccgccttcaccgcgcccaactccaatccttgcctcccccgcgcgcttcagcctcttcactccccatcgttttcgcctggccagatccaggtttccttgaccgagacctcgcctgctttacgcctccggtcggattcttcgccgtccttgtccccactgggcaccgctggggtggagcggagatcggatccgccgggagctgattccttctctcgcagcatgatcctgcggtgattgcggatagcttgtgcaagctggtggcttgggtgttgtctttttaatctggcctaaagatatcctgagacggtagcgtcacatggatgctagtacagaggttactgatgctattggtgcggtgggctttgacaatggggccgcggggaagttgccgcccagtgatagtgtagaggggcacgcagaagaacacgatgtgctggctgatggtgcccattcaggcgagagcgaggtgatcaacccatctgaagaagtagaaatggaagccacctcgcagtcccaggacataaagcctcgagttcctgagggggttcaaggccattcaatgaaggttggtactaaatctcagcgacagagccctcgaggcggggataagagtcaaactaggaaaagctcttttaatccttcttatcctaaggcgcccattgcacgggtttctgatccagatctagttgattgctctttgagcaatggtgatgctggttccagtaagaaaaaggccgaaaagagcagtttccgcccagttgccaaggagaccccatcacttgaggactcaaatgagaagaaaaaaactcagaaggcatcaaaccaacattctgtcaaaaaggatattgaagaagaatcaaatgaaagtgtgaaacctcaaagggttggcagcactccttcatatggatttagttttaagtgtgatgagagagctgaaaaacgaagagagttctactcaaagctcgaggagaagattcatgcacaggaactagagaaaagcaacttgcaggcaaaatcaaaggaaactgaagaagctgaactcaaaatgctgagaaagagtttaaatttcaaggcaacaccaatgcccagcttttataaagaaccacctccccccaaggttgagttgaagaagatacctacaacaagagctaggtcaccaaagcttggtcgctccaagaacacatcctcaggagggacagaagggaatccaaatcctccagctcgttcagctcgactgagtctcgatgaaagggtctcccaaaatggtgtcaagaaagcacctgttgcaaatgcagtgaagaaaccccaacggaaatctctacctaaactgccttcagagcaaacaaccaaagttgacattgcaccatctgttccatctgcagaagagctagaaaacaagtcgccgacgaagggtcttgatcgagagccgatccgcgctcaaattacacctgacgaacctggacttactgcataggaacctatcaagccgactcctatgaaaggagggagttgtgccccagcttccttttatcacattttgctatttctgcagtaaactgctggctggtattatgtattagaattagtctcagcaccaggagcttgaagagtggcaagtgacaccgtgtattctttatcttagtttctgttgacataccaggtatttgtagttggcagacaggcagaattttatattattctccagggctaccagtcaattaagttgccgtccaagtaagatatgtacacgattttgc

SEQ ID NO: 24985 - DNA, 2108 bp, Zea mays
  Clone ID: LIB3689-230-C12_FLI
cctcctgccgccgcctcccagaccgtctcctccgccccagccgggatgccgacggtgagcgtcggccgggatcgtctcttggctgccattggtcgaacctacacacaggaggagttcgaggcgctctgcttcgagttcggcatcgagctggacgatgtgacgacggagaaggctattatcaggaaggagaagcacctcgaggacgacagtgaggtggacgaagatgacgaggtcatctacaagatagaggttgccgccaacagatatgatttgctatgttttgaaggactagcaagagctcttcgcgttttcactgggactgaagcaagccctgtattccaagtttcatcaatccctcggggttcaatgcttcagatgcatgttaaaccagagacttcaaaaattagaccgtacatagtttgtgctgtcctaagaggggtaacttttgatgaagcaagatacaacagcttcattgatcttcaagacaaactccaccaaaatatctgccggaagaggacactcgttgctattggcacccatgatctggacactctgcaaggacccttctcatatgaggctctaccaccgaatgaaatcaattttgtcccattaaagcaggagaaaagcttcagagccgataaactgatggaattctataaaacatgaaactgaagaaattcttgcatataattgagaattctccagtgtacccagttatctatgatagcaacaggactgtattatcattacctcctatcattaatggcgcacattcagctatcacccttgcaacaaggaatgtctttattgaatgtacagctactgaccttaccaaagcaaatatagttctgaatacaatggttaccatgttctctgaatattgtgagactaaatttgaagtggaacctgttgaagtgatacatcatgatggaaggaaaacagtttaccctgatctttcatgttacaaaatggatgttttgttatctgacattcttgggcctattggcatctcccaggacgagaaacaggttgtctgtcttttgaataaaatgcaactgcaagctgaaagtcactccttgaaaggggaggctcgcatttcagtgtctgttcctccaacaagaagtgatattctgcatgcccgtgatttgtcagaggacgttgctattgcttatggattcaacaatgtgccaaaatcaaagccgaagtgtatgacaataggaggaaggcaaccattaaacagattctcagataaaattcgtgctgaggttgcaagagctggttatatggaggtgctcacatttatcttgtcttcacacgaagagaactttgacatgttaaacaggacagatgacaaaagtaaagcagtcattattgcaaaccctcgcacttctgaattcgaggttgttagaactagcctgatgtcgtgtttattaaaaacactgaaacataatatagaccatccaagacctataaagatttttgaagttggtgatgttgtgatgctggactcgtcacgtgatgttggtgcctctaataatcgcaggcttgcagctttgtactgcaatagggtttctggatttgaggaaattatgggattggtggatagtattgtcaaagttgtcagagctccacatgttaactttggcgagaattactatgtacctacagatgaacctgagttcttcccgaaaagacaatgtaaaattgtgacaagtgatggcaagcaagttggctacttaggaattgtccatgctgaggtcctaaggaaatttggcattccggatccctgcactttcgttgagatggacctcgaagcactgttgtaatgcagtcaacctgaaacaaaggaatgcttgaagctgatacctcatacctgccacatattggttttgttcgtaagcatggtggggtaccagcaagaagtgcatattacccaagctgcagtatctcgatgtacttctcaattgcattggattttgctgtgggaaaaaagggtacaacgatacagcaaatacccagcctaatttttgtgttagggattatgtttgcattgtaagggcttattcctatccaactttctatgaaaagtgtaccgtacatccttttgt

SEQ ID NO: 24986 - DNA, 1178 bp, Zea mays
  Clone ID: LIB3689-230-E12_FLI
ccggcatttaatcccgcgttccattccgaacagcgagcacaaccaccgctgctgcgatctcgccgtctccctcctccacgccgtctcggtctccctcccatggccggctacccgcctcccggctccggctacccctacggtcccggcgggggctacggcgccccgccgccgccctacggctcctcgcccgcgccctccgccccgccgtacggcgagaagccgcccaaggaaggcaagacctcgacctcctccgcgcccccctactacggcgcgcctcccccatcctacggcgcgccgcccccctcccagccctacggcggcgggggcgggggcgggggcgggtacgggtacggcgcctcgcagccgccgccctacggcggcgccccgcagcagcagcccccgtacgggggcggggccccggcagggttcggcagcccgttcgcgtcgctggtgccctccgcgttcccgcccggcaccgaccccaacgtcgtggcctgcttccaggcggccgaccgcgacggcagcggcatgatcgacgacaaggagctgcagtccgcgctgtccgggtacaaccagagcttcagcctccgcaccgtccacctcctcatgtacctcttcaccaacaccaacgtccgcaagatcggacccaaggaatttacttctgtgttttacagtcttcagaactggagagcaatatttgagaggtttgatcgtgatcgaagtggcaggatcgacatgtcagaactgcgcgatgctcttctcagtctcggatattctgtgtctccaactgtccttgatctgcttgtgtctaaatttgacaagactgggggcaagagcaaagcaatcgaatatgacaacttcattgaatgctgcctcactgttaaggggctgacagagaagttcaaggagaaggacaccgcctactctgggtcggcgactttcacctacgaggccttcatgctgaccgtgctgcctttcctcattgcgtagtggcagtccactccgccgctcaaaacaagctttataagcttttccaatagtactgtaatattatgcctgctgtaaagagatttatgttcgcagagttgtttttagacgagttgttttgattctggatttaacttgtgttgtgaatcataaagttgctctgaaatggagaatgtacctgttggttgaac

SEQ ID NO: 24987 - DNA, 776 bp, Zea mays
  Clone ID: LIB3689-230-E2_FLI
cgcctacgtagaacccctccgctccttccagctcgctctctacctgcaccagcctcgcccgcccttcgctcgccgccgccatggggaggggaaagttcaagggaaagcccaccggccgccgcaacttctccacaccggaggagatcgctgctggtacttcaggtcgccctcgcacctttaagaagaaggaggaagaggaagaggaggaagaagaaagagaagagtcagaggaggaagaatctgaagacgagtctgatgacaaacctaaacataaaggtactgagggtattattcagattgaaaatccgaacttagtaaaagtgaagaatataaaggccaaggaagttgatcttggaaagacaactgaactctcaaggcgtgaaagggaggagcttgagaaacaaaaagctcatgaacgttatatgaaacttcaggagcaaggaaaaacagaacaagcacggaaagatttggaacgtcttgctttaataagacagcaaagggctgatgctgcaaagaaacgcgatgaggagaaagctgccaaggagcagaggaagtcggaagcacggaagtaactgcaatatcatggacgatgagaccacgaaagcatgatctgcgttagttggatatttatttctaatgcatcagttatcttgttataaacctggtccctattctgtatccccataaaatatgcattgacaaaattagtaacagtcttgtgggcgtgtcttcctgtaaacttgagcttgacaaaattagaaagtagtattaaggtc

SEQ ID NO: 24988 - DNA, 2860 bp, Zea mays
  Clone ID: LIB3689-230-H12_FLI
tggacgtgcccttgccgaccgagcctttcgttctatcctcgccgccgccgtcgccgtcgccgccgtctcgtatccctcggagattctccattcccgcctctccggccgccgcaggtacgcctggccccagggccaatcgtttcctcccaacctgcaggtacctctctatacggattactcactcggtccatctgtagctgtatgctgcaagcctgccttgtcttcttccatcacctccagcggcccagcgtgcacgcaaactcccacccactgatggctggccctaccgtcgctgccgccctacctcgtctcctcctacggcgacgagcacccccatacgcgctgccctgtctccccttcctgctgtgcgaaatcttgcgcccaaaacctaacttcctattcgtattcggatctgaattcaaattacaagtgtataccccatttttcttatttttttgtcccaatttatgtagctgacaaaatcccttgacttgtgcatcttttgccttgttctttctctactttagattaccaaatacggtgaaccgtgtggtccagtggaattttgcacctcattgtactttgaaggcaaataaagccattctccaatctgaaggcgaaacaaggagtgcacatctttgttgtagagggcaaagtttgctcagctgctgctggacattggagagcgcagtggtggttgtacgcctgaaaggaattctttgtaaatttcccctatatctggttctgttatcatcattattttccttgcgttagacaataatgtcggagaacgaattagcagtaataaaaccagaggtacatctcctgttgcacttcctgttaattagagattaaatgttgcattcttatcttgattgcatcatttgggcctaaatcaactaatcaagtttattggtgaactctgacaggcattgaaaacttatatttggcttcagtgctttgatggctccatacaacaagtggaggaagaagttgcgatgttctgccctatgatatgtctggaaatagtgaaaaatgggacaggatcatctaagaatcatgctatagtactaccagaaagagttagtccggcaagtttgagtttgattcttaattattgtcgctttcatcaggtccctgggcgctcaaacaaggagcggaagtcatttgatgaaaagtttgtccggatagacacagaaaaactctgcaagttggcttccgcagcccttggtctgcagttaaggccactagttgatcttacttgtggagcgcttgctcgaatcattggaggaaagacacccgatgaagttagagatattttccatttaccagatgacttaacagaggtaagggtaccacttatagttgtatataggaaaaagttctctttatctccctgagtacaactcccccacctggagctaaaaaaacagatttcatcaacacaagctcagcttgataaagtggaccatttcattttagatgttgatacatttgatacttatttgtcaggaagagaaactagagccactaaaaaatgtaaatgatgatcctacgattcgattattgaaccgattgtatgcaaagaagcggaaagaactgcaggaacgccagaaactaaaggatgtccaaacacaagagcaaaaagatgagagatctttggatgaattactttgttttataaatggacatggaggttagcgtttttatcgaatatttgaaaatcttgccacagaagaacaaccaaagtgtgtggtgtttgccgtacaacattaggtgtcctgcccactgcagtctctacaaaataatgtcttacatcaaaatataaatgttactgtagtctctacaaaatatcagtttttggtgcttattcagaaagaaactaaaatgactttcaaatggcaaattgcacactttttataagctatgttgttctcacattagaccagttgattaatattgaacaattaatacagcaaaaaaaatgccatgaaccagctactatgtatgaacttgataagtatttttagcaggcactcaagactattacagtggactattcgtgtgtcacaagttttttgtagaaccagcacttatgatggtatttttcccattgaagctaaaactttttttattggtagactggttgctgggattgaaggaaaaattaactaagcgtgttaggagcacgtgattatttttgttaagttgcttccttccccttctggtgtgtcgtacccacccaccaaaaaccctgaccccctccaaaaaaagctgcagaagcatgtggcgcaacaaatcattgcatgagttcattatatttttttattaaaaaacttctgggcttcatgtaaccatttcacagattccagaggtgggaaagcgtctaagaataagaaaaggaataaaagaaggaaagatcaagttaagaatcccacaaaagcggactctgaacctgtaaataaggagggagcttcctgtgtggttccgtgcaaagaagatagtaataacctctctaggcatccttgccaaagtccaaatttgcaagatgatgttgagtaccccttcgacaatgctgaccttgatgatggacttgatcctgcaatgagggaagagcttgataggtgagggcattagatgtcttataggttgatgcatgtaggctcttcgctgtgatactggcctgtttttcaattgaaaaaggcctgtttttgtatgcgacacagcaaaatttctaatgtttatatgctggcattttaataagtacaggctgatttctggacgtaaaatcgatgaattctgttacttgcttccactcttcattcaagttctgcttgaaacttgtggttgctgtctgttc

SEQ ID NO: 24989 - DNA, 1557 bp, Zea mays
  Clone ID: LIB3689-231-B7_FLI
cgatctctctctctatatatatacatatgtgtcactcacgactccacagatagatagctacacgtacgtacgtgtgtgtgcaaacaatccgatcagctgggaagcaaacaacaacgaacgaacgccatgatggcggcgtgcttggaggcgaagaaaccctacctgatcgctcttgccatccagatcatcggcaccggcatgttcgtcatctccaaggcagccttcgacgacggcatgagcaccttcgtattcatcttctacaggatggccgccgcctcgctcatcctcgtgcccacagccattgtccaccaaaggaagaatatgcggtccatgtcttggaagctgcttctcaagctcttcttgctcgccttgatcgggaacacattcagcttgaacacgtacaacctgaccctgaagctgacgtccgcgacggtggggtccgcgctagccaactccgtgcccgtattcaccttctgcctggtgctggtgctgaggatggagacggtgaacctgaggacggccgccggcgtggccaaggccgccggcgtcgcgctctgcgtcgccggagtcctcgtcctcgccttctacgccggtccggccatgagccccgtgaaccaccaccgcgccttcgccgccccgaggcagcacgccgcctccaccggtggtccgccgagcaggtcgaggtggatcacagggacgctgctcatggtcctcgccaacgtcacgtgggccctctggatcgtcctgcagtcggcactgctgaaggagtacccgaacaggatgcttgtgacggcgacgcagtgcgtgttcagcatgatgcagtcattcgtggtggcagtggtggccgagaggggtgacatgtccaagtggaagctccgatgtgacattaccctcgtagccgtcctttacgtgggttttgtggtgacgggactgtcccattacctccaagcatggtgcatggagctgaaaggccccgtgttcctggcgatgacgaacccgctctgcttcgtcttcaccatattcagctcctccttcttcctgggagagatcgtgcacctcggcagcatcttgggtggagctctgcttgtggccggcctgtacagcgtgcactggggtaagctcaaggaagacaggaggtctgaggcggcggaacaggagaagaccaagccgcaggaagaaccagcagcagtagctggagtgccctccgtgctcgaccaagcgtgatgctcatacatatggttgcttcatcagagcgccctagcttgagcgagctccatcgaccatcagctaactaatgaactgttgggaccaatatgcatgatgcatatcactgtgcatgaagaaccaattaattaactgtggattattaagagagtgagcatgtagttctacttgcatgcatctgggtattttgtatagaacacatcaagttgcgtctgtgacatcaatgcaagctagggcatgcatgcattccatcattcaatgcatgcataactcacttgaatgctgttgtatccactccacccatgcactttgaataaatacatatgtcgactt

SEQ ID NO: 24990 - DNA, 2259 bp, Zea mays
  Clone ID: LIB3689-231-C8_FLI
ccagccgccgcctcctccttcgccggcgtcgacgatgggtgactatggccacggcggggggcagatgcggggcaacccggactcccgccccaggggccagggccagcgccctaacgtccagcagctcaagctcatggggcagatccacccgacggggctcacgcccaacctgcttaagctcttcgaaccgcgtccaccgctcgagtacaagcccccgctggagaagcgcaaattgccggcctacaccgggatggcacaatttgtgtcgcactttgctgagcccgaggatccagagtatgctccgccagtacccaagtgtgagaccagggcagagaagaaggctagaattcgcaataataagctcgagcaaggcgcagctaaggttgctgaagagcttcagaagtatgacccacaaagtgaccccaatgctactggagatccatacaaaacactctttgttgctagacttaactatgagacatctgagcagaggatcaaacgcgagtttgaaggttatggtcctattaaaagggtaagtaatgtggtaattcctgtgcaggtgaagttattgcactttggtaaggtttatggatttttcaatcattctaaaatgtaaacaatcattggacaaaactgtggaaaagttgcctcattagtttatggcttccttttaagctcctccgacaagtgtttgcaacaccaggggtccttataaccgctttcttgctccatttcatatctagaatcaaaatctgcagtttcttcatttcctttctggtttctgaaaacttctctggaaatgctttcaaagaaactgggaactctcagtttcatagtcatttttggtaaacttagcatcaatgttttaattgaatttttgtttttggagccaacaacttgtttgctctgtttcacgcacatgtatagtgtttgctctagaatgtattccatgacaactttttttttatggttttgagctgtgaatttgatcatttagctgtaattcattttatttgattacttaattatgaaattggttctagaataaaatattttcagtagttttatacagttcaatgcaatgatgtaaaattttacctagttaagggtatttaaacatcagacaagaaatttttcatggggaggggtgtggagtaactcttggcagttgtgttgtcctaaactaaggaaataacaatcatttctgtggcacagaaggtctacaactcttcacaatctctctttttaagcgatctttataccttttggggcttagatggaatacatttcaaatggaaaattatatagggttcaggcatatgtatgctcgctggtaatttagttaaatcttttggactttcattggaaagccattttactatgtgcatggttggtacaaccaattaatgacaaggcatctctgggaacacaaatatgcgtaaacaggtaattatggctgcacctgtatgtggcccaggttctctatttcctagtacttttttgtcgtcagcaagaaatttcttgagaagagcaaattgcttctaacgaaggtagtaaatggttgagctgttctctcattccacagatttgcatctaccataatggtcaactgggggtaaacaagcttgaaaaatgctgacagtggcacaaattagcatagatcactttgtatttttcaaaaagcagcttgtctgtagacagggattttctactgtatgtaggcttaattgggtaggcttgctggtgagtatagtatttatagttccttcagattagctatgaaagctatcactgctaccaaattttggttgtggagcaatcagcaaccttacacaatactaattgcatctctcaactcctagagtcgaagatccatcgattttgtgcataaggggtatacatcactcacttggtatttatcacctttctgttaacttcgttatcattctgtttgtttggaaaacgaaggctgaacaaatttcaccgatggagggcaacttggtatagtatttagttctatcgtacaccctttcctttagtataaaattccctggtaaggggatatccaatttatttcccaacgtatgccaatcggccagacagcgcttttcctccaactgtgttgatctgtgctggatttcactcctcgtgtggaagctctacatgtgcaaggttagcacggctgttttaggctttatgcctgtctgtcgtgcagcataaaatatgctaaaaattaaaagaacaaacacaattacaact

SEQ ID NO: 24991 - DNA, 480 bp, Zea mays
  Clone ID: LIB3689-231-E4_FLI
aatccatctccaattcctgaatataacagtgccatagagaaggaaggtggtagcacggatgaacttgctcttgcgctgtatggaatgacctctctgccagaatttcttccagttctttctgtcattcctgagcttccaccggagtcccaacagcagttgcttcttctgccagcggatttaaccaatcgtattttatctcgggctctcgcgagaaccattagaagactcatgtaaagccataggtgcagaaattttcggtccctgcttccttaatttttatttaactattctttttggttcactgctagaagatggggattttttttagcatctcatctacaacccaagatcaatcccttttttgttatttacgattaatgcttttgaaacactgctatgtacatattgttcaaactaaagcaggcattgtaaatgaccatgttgttatgcacatatggtgtaactgataaactttgagtt

SEQ ID NO: 24992 - DNA, 833 bp, Zea mays
  Clone ID: LIB3689-231-F7_FLI
ggctcccgacagcccacgctgacgctttgtggctccaaggtcctcgcttccatccaccccgacaggccacggctccgcccccaccgctctcgctagtcgctaccatggtggtatcctacacggaggagcacgtgtaccgccacccctggcaccgggtgaccgccgcggcgatgcgcaagttcacggacccggccgcgcgcgccgcctccggggcgctctcccacatcctggacgtccacacgctgtcccgcgacgtggacgcgcggtcgggccggctgcgcgccgtgcgcgccatcgcggggcggacgccgccgctcccgttccctatccgcgccgccgtggcgggagcgggcggcgacgtggtggtgctctgcgtcgagcgcacggacgtggacgcgcccgcgcgcgacatgcgggtggcctcccgtaacgccacgctccgggggctcgtcgacgtgcgggagcggtgcagctacgagccccacccggcgcggcccgacgagtggaccctgttccggcaggagacgaccatccgctgctgcgcgccgctggcggccgtggcggccaaggtggccgagctcgtggagcggcgctgcgcggagaggttcgcgcagaacgcgggcagggggaaggaggtcgtggagcgcatctgcgaggaccttgcggcggagcaggactcgctcgccagctgaggtacaagttggaacggcgaccaagagagcgtggtgtttgtgccagtgccgaaaattgctgatgcatcacggtgctttgctgtctgtgtgcagaggcttgggccttgtgtgatgtgtgattgtgaatgctccacgtcaaat

SEQ ID NO: 24993 - DNA, 2870 bp, Zea mays
  Clone ID: LIB3689-231-H4_FLI
caaccctcagcgtcctcccgccggcgaaggaggagaggcgcgagaggacaatccctcgtggcagcccttcgctaccgagaacccagccttcgaggagtactacaaggagcagcaaattgtttctgaggaagagtgggatagcttcatgagcatgctccggaagccattacctgccacttttaggattaatgcgagctgtcaattttttcaagatatctgctcgcaattggaaaacgacttcaggaaatcattagagactgaggtgaccgatgatcatgaagaagatgctattcggcctttgccttggtacccgggtaatcttgcatggcatttgaacttttctcgaatgcagctgaggagaaatcaggcacttgagagttttcatgaattcttgaagcgagagaacgaagttggcaacataactaggcaagaggctgttagtatggtcccaccactgtttctgaacgtgcaacctgatcatcatattcttgatatgtgtgccgctccaggatctaaaactttccagttacttgagatgattcaccagtcaacgaagcctggactgcttccaaatgccctggtggtagctaatgatgttgatgtgcaaagatgcaatcttcttattcaccaaaccaagagaatgtgcacagctaacctgattgtgacaaatcacgaagcacaaaactttcctggttgtaatcttgcaaagttctgttcaaaaatgtgtatggatgaggcaaaggtgcagaggttggagtttgatcgcgttctttgtgacgtgccttgtagtggcgatgggactgtccgtaaggctcctgatatgtggaggaagtggaatgctggtatggggaacggacttcatcacctgcaagtggaaattgctatgcgtggtatgagcttgctcaaagtgggtgggaggatggtttattcgacatgttcaatgaaccctgttgaaaacgaaggcgttgttgctgagattttgcggagatgtggggactctgttgaacttcttgatgtttctaatgaactacctgaattagcccgtcgtcctggacttagcacctggaaggtacgggatagagggtcttggtttggtgttcatgaagatgtacctcgctacaggaagcatgtgatatcagcaagtatgtttccttctgggaaaggcagcaaagatagtggtacggggagcagcagcgttgaggtcaacacagatgtagctgatgcagacatgaaggattcaacagacatgggagagggagaacaagaaacaactgtaacaattgatgacagcaataatggtgacaatctgaaaaccgaagagggaactaaagttgattgcgagtctggtgaagtcacaactagtagtagttataaaaagttaaattctacttccatccgtacggaacattcagattacccactgcatcgctgtatgagaattgttcctcatgaccagaacagtggggcatttttcattgcagtccttcataaactctctcccctgaatgagaaccaggtggtagatggtgtcagaattgaccagaatatctcaaaagacaagactgagaaacttgagaaggatttagtatcacataaggcatcatctgaagaaaatactgtgcatcagcaagtgattgataatgcaaatgttctggatggagaacagaatagagacagggataacaaaagttcagaagataagagctcagaggattctaaggtcaatgttaatgaggcagcaaagggtcaagcaggaacaagggataggaggaggcagcaaaaccaaggcaggtggagaggggttgaccctgtgatattttttaaagatgaagtgacagtcaaaagcattgtatctttctatggtatcacagattcatttccacttgaaggtcatctggtgactagaaaccctgatactagtcatgttaagagaatatactatgtgtcaaaatctgttcaagatgttttggagctcaacataaaaattggcgaaaggctaaagatcacctcactgggcctaaagattttttggttctcatatacctttgcactctttcaggaaaggcagtcttcaaaggaaggctccccatgcacatttcggttgtcatcagagggattgccgctcctgcttccatacatcacaaaacagattctatatgcatctgcaattgacttccaacatcttttacagtacaggactattaagtttcctgatttcgtggatgcaaaatttggtgaggaagcttcagctttgcttccaggttgctgtgttgtagttttacgtgaagggcatcaggatataggatccatagctacagatccctcggccattgccattgtttgctggaaaggaaagaccaatttgtgcgtcatggtttctccgctagatggtaaagaattgcttgagaggatttctttgcgccatgggctcaaaatccccaaaggggataaagagaaacccagccaggagattgctggatcagacgagctgcttgattgtgccactgaggtggacgatcaagagtctcttcctgaaagcaaagcatctgacatcgaaatttcagatgctaaggaggctgagtagcttttgttttatgtcactacgcatattacacaggaggtagctgtatcctcgagatggctattagcttttttaagtcacttcggttgccaagggagagagatgatagcccaccacatgggaatgacagactcaaaacaccatctggtaatcgttcacggtgacacagaatctatagacttgtaacttcttggttttatttcttcgagaggatgtattgcatcgattttaatttgttgcactcaacacagaatctagtaaagattgagaaaaacattttttttgagat

SEQ ID NO: 24994 - DNA, 1483 bp, Zea mays
  Clone ID: LIB3689-232-B1_FLI
gaaaccccaagcgccaccaggaccaggcagcctcctccgtcctatctcctccccgcgccgccgcggccatgctcctctccgggcctccgccggtgcccaccccgccgctcctcctcccggagagcagtggcgaggacggcggccacgattcctcctcccgcgccgcggcagcggtgggatcggcgccaaagaggcgcgcagagacatgggtccgtgaggagaccctttgcctcatcgcgctgcgccgggaaatggacgcccacttcaacacctccaagtccaacaagcacctatgggaggccatctccgcccggatgcgggaccaagggttcgaccgctccccgaccatgtgcaccgacaagtggcgcaacctgctcaaggagttcaagaaggcgcgcagccactctcggaacagcggcggcggctctggctctggagggaacggcaacgccaagatggcgtactacaaggagatcgacgacctgctcaagcgccgcggaaaggctacgggaagcggcaccgccggctgcgttggcagtagtgccgggaagagccccaaatcaaattgcaagattgattcctacctgcagttcaccacagataacggctttgaggacgctaacattccctttggtcctgtggaagcaaatggtagaacgatactgagcattgatgatcgtttggaggatgacaggcatcagcttcccttgacggctgctgatgcagttgcaaccaatggtgtgaacccgtggaattggagagacacctctactgatggtggagataaccgtggcaattttggtgggagagtcattttagtgaagtggggtgattacactaaaaggattggaattgatggtactcctgaagcaattaaggaagccatcaaatcggcatttggactaagaacaaggcgcgctttctggcttgaagatgaagatgaggttgttcgaaccttggacagagacatgccagttggaacatacacacttaatcttgatgatgggatgacaatcaaactctgtgatgcaagccgcatgcagacgccagaagacaagacattttacactgaagaggactttcgagatttcctgtctcggcgtggctggacatttctcagggagtatggaggctatagaaacgttgatagccttgatgatctccggcctggtgtgatgtatcaggggctgcggtcgcttggtgactgattttgcaacatctactttggccagacatgtcgaagtggaattgctagcagtgccatttagtgtaaatttaagtaaggccatccagattccagatatatgagcggtcctctcgcatttgtggagcaaaacttgcctccacttatcttttcttcagttcacactcatgtcggagccgcctctgtgactagtatgcaggttcaggcttatgtaaaatgtagccgcgtgcaattggagtgtgcagctaatgatcctccagataactagcttgttctacc

SEQ ID NO: 24995 - DNA, 1198 bp, Zea mays
  Clone ID: LIB3689-232-C12_FLI
gccgtctcctcctccgtcccatcactctctgctcgcgcactctcacctgcccgcgccgtcttcgaccgccaccaagatgaacaaggagaggctcatgaagatggccggcgccgtccgcaccggcggcaagggcaccatgcgcaggaagaagaaggctgtacacaagacggtcaccacggacgacaagaggctgcagggcactctcaagagagtaggggtcaacaccatccctgcaatcgaggaggtgaacatattcaaggacgatctcgtcatccagttcttgaaccccaaagtgcaagcttccatcgcagcaaacacatgggtggtcagtggatctccacagacgaaaaagctacaggatgttctccctgggatcattaaccagcttggtatgttacaatctgtaccttaacgtttaggatattatccaaaaaatggttatcttgtactacctccgtccgtttcgaatatttgtcttccgttaattcacttttaactaaaacatggcaaataaaaaagaacagagggagtaacatatttgatgctttgtttgattaggcaagttctgctcatttaatttgtttgttattatctatagtcctggtcttttctaattttattagaaatgtgttgctgcattccaccatttcttgttttgtcatttgtggtgttctctcgacagttaccacttctagacgcacgacaatggatgtatacttctaggcatattttatctgttgccttgaagtttggcagtttctgttctgcctccctgttgctgtatgtgtttcaatcaatcaaatacaaaaagcaacaagcgtgaagcaaacagaagcttgttgccacaatacaaatgatatgaaagagggattaacaccttttctattcttccaggccctgacaacatggagcacctgaagaggattgccgaggagatgcagaagcaggtggctgctgccggtgcggcagcacaggtcaaggaagacaacgatgacgatgttccagagcttgttcctggagagacttttgaagaagtagctcaggagacaaaagcctgatcataggctctaaatagtgaaatgttactgcaccaatgctgtgaggtcatggttttcgtgtgatggcactcttcttcctcccctcctaggccagccccagccactctttgtgttcgctgttggaaacttttagtttctcc

SEQ ID NO: 24996 - DNA, 1166 bp, Zea mays
  Clone ID: LIB3689-232-D2_FLI
gcaaaagccaaaaggcatcaccgccgcgacgacgatggcagcctcgctccaagccgcggccaccctgatgcagccggccaagatcggcggccgggcgccctttgcctcgctgccgtcccgcccgtcgtcgcaactcgcctgcagggcgttcggcgtcgacgccggcgccgccaggatcacgtgctccctgcaggacgtcgccagcaggtgcgtcgacgccgcgaagctcgccggcttcgcgctcgccacctcggcgctcctcgtctcgggcgcgagcgcggagggcacgcccaagaggctgacctacgacgagatccagagcaaaacgtacatggaggtgaagggcacgggcacggcgaaccagtgcccgaccatcgacggcggcgtggagtcgttcccgttcaaggccggcaagtaccagatgaagaagctgtgcctggagccgacgtccttcaccgtcaaggcggagggcatcgccaagaacgccccgcccgagttccagaagaccaagctcatgacccgcctcacgtacacgctggacgagatcgagggcccgctcgaggtcggctccgacggcacgctcaagttcgaggagaaggacggcatcgactacgccgccgtcaccgtgcagctcccggggggcgagcgcgtgccgttcctcttcaccgtcaagcagctcgtcgccaccggcaagcccgagagcttcggcgggcccttcctcgtgcccagctaccgcggctcctccttcctcgaccccaagggccgcggcggctccaccggctacgacaacgccgtcgcgctccccgccgggggcagaggtgacgaggaggagctccagaaggagaacatcaagaacgccgcctcctccaccggcaacatcacgttgagcgtcaccaagagcaacccggagaccggcgaggtcatcggcgtcttcgagagcgtgcagccgtccgacaccgacctcggggccaaggcgcccaaggatgtcaagatccagggggtctggtacgctcagctcgagtgattcgagtgtctaactgctaggtgtccgaccgccgtcatggatcttgggaaggtgtatgtataccatggaaaactttggagagcagaggaggaatcgtgtatgtaatgtacttgttaatgcaaattcgggctgtcgctttttt

SEQ ID NO: 24997 - DNA, 2154 bp, Zea mays
  Clone ID: LIB3689-232-F5_FLI
ccctgagcagtcactacggctcgcatcactcactcactggtgcactgccatggccatgaacgtgattgcactacttggcctcttggcacttgcatcagtggtgaggacggcttccggcgctggcgggcatgactacgcctcggcattgaagaagaccatcctctacttcgaggcgcagcggtccggcgtgctcccgcccaaccagaggatcacctggagagagaactccggcctcttcgatggaaaggccaacggagtggacctcgtcggagggtactacgacgcaggcgacaacgtgaagttcgggctgcccatggcgttcacggtgaccatgatgtcgtggggcatcctggagtacggcaggcagatggcggcggccggcgagctgcgcaacgccatggacgccgtcaagtggggcaccgactacttcatcaaggcgcacccggagcccgaggtgctgtacggcgaggtgggcgacggcgacacggaccacggctgctggcagcggcccgaggacatgtccacgagccgccaggcgttccgcattgacccacagaaccccgggtccgacctcgctggagagaccgccgcggccatggccgccgcgtcgctcgtgttccgcagcacgtatccgggctacgccaacctgctccttcagcatgccaaggagctgttccagttcgccgacaagtaccgcggcaagtacgacgccagcatcaccgtcgctcgcaactactacggatccttcagcggatacggggacgagcttctgtgggcggcggcatggctgtacgaggcgacagatgaagggtgctacctcgagtacatggcccggaatggcgacgctctcggcggcacgggctggtccatcaaccagttcggctgggacgtcaagtaccccggcgtgcaggtcctggcagccaagttcctcctgcagggccgtgccggcgcgcacgccgcgacgctgcagcggtaccggcagaacgccgagttcttcgtgtgctcgtgcgtgggcaagggcgccgtgaacgtgccgcggacgccgggcggcatgatgtaccaccagcgctggaacaacctccagttcgtgaccagcgcctcgttcctgctgacggtgtacgcggactacgccacggcgctgcccggctccggcggcggcgccttgcggtgccccgcgggcgccgcgcggcccttcgagatcctcgccttcgtcaggtcccaggtgaactacatcctgggcgacaacccgcggggcaccagctacatggtcggctacggcgccagcttcccgcggcaggtgcaccaccgcggcgcctccatcgtgtcggtgaggacggacccgtccttcgtcagctgccaggaggggtactccgcctggtacccgcggcaggccggcaaccccaacgtcctggagggcgccatcgtcggcgggcccgacgagtacgacgacttcgccgacgagcggaacaactacgagcagacggaggccgccacctacaacagcgcgccgctgctcggcgtcctcgcccgcctcgccggcgcctgcggcaccgggctcgaggagtaccagctgcatccgccggaggaggccaccgcgaaccagacgtcgtcgtcgcggttgaggcagccgtcgacgtccccgatcgagatcgagcagaacgtgacgaggacgtgggcgatgcggcgcgcgacgtactaccgctactcggtgacgctgacaaacaggtcgaggaagaccgtccgggggctccacctcggcgtctcggagctccgtggccggctctggggcctcgacaaggcgcgctacgggtacgtcccgcccaagtggctgccggcgttgcgcacaggtaagagcctcaggttcgtgtacgtccagcgcgggacgccggccaacgtccgggtcatcggctacaagctactctgacgtcaccaagtgactgcggcagtgtgctgctactgctagtagcaagctagtttggccggcgaggggctttgagagatggagtaagtgttcgtcctctttgcccctgcgagttatcgattgttacatttggaatgcgaaccaagaggcccgggggagtgaagtctaatgtcaaccgactgtttcttctaaacattctgtccgtgcgagatcaattggaagctgcaaattgc

SEQ ID NO: 24998 - DNA, 668 bp, Zea mays
  Clone ID: LIB3689-232-G4_FLI
ccgccggcgctgagatgttggtttatcaagacctcctatctggcgacgagctcctgtcggattcattcacctacaaggagctcgagaacggcgtcctgtgggaggtcgagggaaagtgggtcacccaaggtcctgttgatgtagacattggtgccaatccatccgccgagggtggtgaggatgaaagcgttgatgacacagccgtgaaggtggttgatattgttgacacattccgtctacaggagcaacctccttttgacaagaaatcatttgtctcttacataaaaaaatacatcaagaatctcactgctgtgttggagccagagaaagcggatgagttcaaaaagggtgtcgagggtgcaaccaagtttctccttagcaagctgaaggaccttcaattttttgttggtgagagcatgaaggacgaagcgtccgtggtattcgcctattacaaggatggtgccactaatccgacattcctctatttctctcatggtcttaaggagatcaagtgctagattagttacccatgttgggtactatatatgttctattgttatagccacaactatagctgccctgcctgaactgaactcaggtttttttttaagaaaaaactgtccaagattggattgcttgttaaagctaaatattgttattgacgtgtt

SEQ ID NO: 24999 - DNA, 1601 bp, Zea mays
  Clone ID: LIB3689-232-H2_FLI
ttagtgctaaagctaccccttccggccacttccgcaattgcgaacctccgtcgcggcgcggccgaaccggcgaaggcgccctcctctcgttctctcccgaaaccccggcatgggaaacaagaagtcgaagcggagcaggagcaagaagaacaaaaccaacgccgaccaggccctggccctagactacgtccgcgcctgggtgctccccgtgccgccacccctgaagccctcggcggccgacgtcgacgacttcctgccggtccaggctacacgccggggcgatgtgctgtttgagctccactcccactcaaaccacagcgacgggttcctctccccttccgcactcgtcgagcgcgcccatcgcaacggggtgaaagttcttgccctaacagatcatgacaccatggctggcataccagaagctgtgtcagcagcctccaagtttggcatgagaataattcctggagttgaaatcagtgcgctatataatccaagggaagttgctggtgcgtgtgagactgttcatatccttgcatactatggtatgtgtggtccgtcaaggtgtgatgagttggacggcatgctattgaacattagagatgggcgatacttacgtgcaaagaacatgctggaaaagctaactacactgaaggtgccaataaagtgggagcatgtgaataaaattgctggtgacggagtggcacctggccgattgcatatagctagggctatggttgaaatgggttatgtagagaatttaagacaagcattcaacaaatacctcggcgatgatggccctgcatatgccagaggaagtgaaccatttgctgagactgttgtgcagttaattagtcgcactgggggtttttctgcacttgctcatccttggtcactgaagaacccagatgcaataatcaggtctttaaaaggagctggtcttaatggtatggaggtctacagaagtgatggagaagttaatggatttagcgaactagctgagaagtatggacttctgaaacttggaggttcagatttccatggaagaggtggaaaagatgaatctgatgttggaacagttaagctcgctattacaactttgtgctgttttttgaagatggctaggtctatctggtcttctgctatgaaagacatcctgcttaagtttgcagaggaaccgtctgctgcaaatctaggaaacatgctcaagtttggacgtcttaccaaatttgctggtttttctccaataaacaatggtattcatgttgttgatttctgcttatcttcttggtcaagcaatgatgatatcgaagatgttgagcttgaagaggtaagattgaagcttgctcattatgcagaataaagataacctcaactacatggtcatcttgagcaatgttttcacacttgttcaaattacagtatgtgctgttgcaatgttcacttcttttgcggcccagtataactaatgttgaaattagatatgctcaatctggcagctttggcattttattcaagaacatatatttctctactatgataactgaaatggcgtgcatagaatcagagcacatcagcatattaatataccgtttcttatcgtg

SEQ ID NO: 25000 - DNA, 1403 bp, Zea mays
  Clone ID: LIB3689-232-H9_FLI
gctgcaagtcaaccgaacagacattcgctggaagctctgctcggagtgaggtcgctgcgcatctaccacacgatgccgccgcctctccgctgtctccttctcgccttcgtcgtcgtcctctccggcttcccccgtctcgcccaccccttcacggctctcgagtctgaccagatcgcccgcttccaggaatacctccgcatccgaactgcgcacccatcccccgactacgccggcgccagcgccttcctcctacactacgccgcttcgctcggtctccacaccaccacgctccacttcaccccgtgcaagaccaagcccctgctcctcctcacctggcgaggctccgatccctccctcccctccgtgctcctcaactcccacatggactccgtccccgcggagcccgagcactgggcgcaccctccattcgccgcgcaccgcgacccgaccacgggccgcatctacgcgcgcggcgcacaggacgacaagtgcctccccgtccagtacctcgaggcgatccggggcctgcaggccgcggggttcgctcccgcccgcaccatccacatctcgcttgtccccgacgaggagatcggtggcgcggatgggttcgacaagttcgcccgatcggaggagttccgcgccctcaacatcgggtttatgctcgacgaggggcaggcgtcgccgacggacgtgttcagagttttctacgcggacaggctggtgtggaggctcgtcgtgaaggcggcgggggcgccagggcatgggtcgaggatgttcgacggcgccgccgttgacaatttgatggattgcgtggagaccatcgctgggttcagggatgcgcagttcaggatggtgaagtccggggagaagggtcctggggaagtggtctcagtcaaccctgtgtacatgaaggccggcataccaagccccacgggtttcgtgatgaacatgcaaccttcagaagcggaggtcggctttgacctccgccttcctccaaccgaagacatcgagcagatcaagcggagggtcgaagaggaatgggcaccatctcacaaaaacctgacctacgagctggtgcagaaaggtccggcgacggatgtgtccggacgtcccgtatccacagcgacgaacgcgtcgaacccgtggtggctgacgttcgagaaggccatcgcctccgcgggtggggagctgtctaagcctgagatcctgtcttcgaccacggactcacgctttgcgaggcagctgggcatccctgccctcgggttttctccgatgaccaggacgccgatactgctacatgaccataacgagtttctggaagacagagtgttcctgaggggcatccaagtgtacgaacatgtcatcagagcactaagctcgttccaaggctgattcgtaaaaac

SEQ ID NO: 25001 - DNA, 732 bp, Zea mays
  Clone ID: LIB3689-233-A11_FLI
ctgacggttgctctagatccgttcatcctggtggttttgtgaggtcgaaagcggcgagcgaattagaagatgctggacaagctgtgggacgacgtggtggccgggcctcgcccggagacgggcctcgagaagctccgcaaggccaccaccgcccgtccgctcgtcatcaacaaagacgcggacggcggcagctacaagcgggcgcagtcgatgccgtcgaccccgacgacgccggtgacgccgtcgtcgtcgtcgtcgtcgacgacgccgcgcggcgccggcaacgtgtggcgcagcgtcttccacccggggagcaacctggccaccaagggcatgggcgccaacctcttcgaccggccgcagcccaactcccccaccgtctacgactggctctacagcgacgagaccaggagcaaccaccgctagatcgggcgagatggatggacagtgaagaggccatgtttgctggtccttgtggttatctaaaacgcacgcatgctctattatagctagtcatcactatatatatacttgtgtttgtgtattgttgttcttgttctgctggtgtctccgccgtttaatttgacctatgttatggagtgagtgatatatgtgccgtcactcctagtatatagtagtgagtgactagttggtatgtgtagtactgtactatcttttctccatatgcatgttttgccagcgcgtaatgaatgtaatgtcagtactgctact

SEQ ID NO: 25002 - DNA, 1393 bp, Zea mays
  Clone ID: LIB3689-233-B11_FLI
cttatatatatatcaactggactcgaacgtcctgctctctgctctcccccgcagacaaaaaaaccctagaattcccagccgccgctctcctttccctcgatccgttcctccaagcgcgcacgcatcctcacgccagcgcaccgccgcccaacgatctacgagctgccatggctaactcagcggcaccgggaggagtgaggtcgttcctgcaggccgtgtctacggtcaccgaggagacgcggacgccgctccgtgtcgtccagatggagggcctggctgtactgaagatcattaagcactgtgaggagtttgcgcctgctttagttacaggtcaattgcttggtttggatgtcggtagtgttctggaagtgaccaactgttttccattccctatgagggaagaggatgatgaagcagatgcagatggtgccaattatcagcttgagatgatgaggtgtttgagggaagttaatgttgacaacaatactattggatggtatcagtcttgcttgcttggatcttttcaaactgtggaactgattgaaacatttatgaactatcaggagagcataaggagatgtgtgtgcattgtctatgacccatctagatctagtcaaggcgtgctagctctcaaagccttaaagcttacagactcgtttatggatctttaccgtaacaatggtttaactggggagaagttaagagagaagaaattgtcctgggttgatatttttgaggagataccaataaaagtttccaactcagcgcttgtcagtgccttcatgaaggagctggaacctgaatcacctgttactcagtgtgacctggaccgacttaaattgtcaactgccccctttatggaaaggaacttggaatttctgattgggtgcatggatgatctttcatcagagcagaacaagttccaatattataaccgcaacctctcaagacaacagtcacagcagcaggcatggcttcaaaagagaaggcaggagaacatggcaagaaaagcagctggcgaggagccactgccagaagaagatccatccaatcctatatttaagcctattcctgagccatcacgattggaaggctatcttgtaaccaatcagatctccagttactgcaaccatatcaacggggttgctggtcagaatttcgacaggctatacctgatgaaggccttgcatgaggattagaagactgggttgtgactgaaggctgctagatttagctcgtgatactgcttaaaatcacaattttgcgatgtaccttacatgagcgcacctgtcttgtacttaatgtttccgattagatggttagcacacattttgacacacttcctaattataccagcattcttggtagtaattcaaaaatgatcactttgatt

SEQ ID NO: 25003 - DNA, 2009 bp, Zea mays
  Clone ID: LIB3689-233-B2_FLI
agaccgcaacctcaaaaccctagcttgtccctcctgctcccagatctcttccactcggccactccctagcacatcaaaccctagctccgcccagcccccaaccatgtcggcgatgatgcaaccgcagatcatcctgctcaaggagggcacggacacgtcgcaggggcgcgctcaggtggtgagcaatatcaacgcgtgcacggcggtgggcgacaccgtgcggaccacgctggggcctcgggggatggacaagctcatccacgacgacaagggcggagtcaccatctccaacgacggcgccaccatcatgcgcctcctcgacatcgtgcaccccgccgccaaaatccttgtcgacatcgccaagtcgcaggactccgaggtcggcgatgggacaactactgtggtgcttctagctgcagaattcttaaaggaagcaaaaccttatatcgaggacggggtgcacccccacagtctaattcgcagttatagaactgcaggcaatatggcaatccaaagggttaaagagctggcagttagcatagaaggaaaaagccttgaagagaagaaatcactgctagccaagtgcgctgctacaacactctcttcaaaacttataggtggtgaaaaagaattctttgcttctatggttgtggatgctgtccttgccattggcaatgatgacaggcttaatcttattgggattaaaaaggttcctggaggtaccatgagagactcttttttggtgaatggtgttgcgttcaagaagacgttttcatatgcaggatttgagcaacaaccaaagaagttccttaatccaaagattcttttgttaaacattgaactagaattgaaatctgagaaggaaaatgcagagatcagattgtctgaccctctgcaataccaatcaattgttgatgctgagtggaacattatttatgacaaactggataaatgtgtgaaaagtggagcaaagatagttctgtctcggctagctattggtgatcttggaacacagtattttgcagatcgagacattttctgtgctggccgtgtcactgaagaagatttgcaacgtgttgctgcagcaactggtggaactgttcaaacttctgtaaataatgtcatcaatgatgtactcggttcctgtgaggtattcgaggaaaagcaagtaggcaatgaaagattcaacatatttagtggctgcccttctggccagacagcgactattgttctccgtggtggtgcagaccagttcattgaggaagctgaacgaagtctccatgatgccatcatgattgtgaggagagcacttaagaactcgacagttgtgccgggtggtggtgctattgatatggaaataagcaagtatctcaggcagcatgcacgaacaattgctgggaagtctcagttctttgtaaattcatttgctaaagcccttgaggttttccacgccaactttgcgataatgctggatttgatgccactgacgttctcaataagctgaggcagaaacatgcatctggtgaaggtgctaattatggtgtagacataaacactggcggaattgctgattcctttgcaaactttgtttgggaacctgctgttgtaaagatcaatgctataaatgctgcaaccgaagcttcctgccttattcttagtgtcgatgagacagtgaaaaacccaaagtcggagagcgcacaaggtgaggctgctgccggtgcgatggctggtcgcggtcgaggtgcaatgcgaggacgtggtggcaggggcatgcgcgcgataaactgggtcaagtagatcatggtgagatttttttgcatgtttgcgagtgcttttgtgccttactgcacatgtatggacgctgcacttactattgtgcgcttttggttgtgaagcagtcgtagactttttttttgtttcagaagagatgcaccaggcgtttatcagtgtaccgtccgctggatgtgttatagtagacctgagctttggattctaatttgtttgacatt

SEQ ID NO: 25004 - DNA, 2241 bp, Zea mays
  Clone ID: LIB3689-233-D1_FLI
aaggataagctccctgtgcaagcaaaagcccacagaacgagtgaggccaggcgacttcatactgctcgcctcgccgtctttcccccaatctgttgctcctccaagctgcgggcgatcgccgtaccccggccgccgcagggaaccccctcgccatggccttgcaggggaagaagctcatcaacaaccccgacgatgtggtggcggagttcatcgaagggttggtggagacttacccgggtctgcagtacctcgacgggttccctcagattaaggtcgttcttcgtgctgatgtcgagcgcggttcctatgacaaagttgcagtcatctcgggtggtggaagtggccatgaaccttcccatgctggatttgttgggccagggatgttgacagctgctgtttctggagatgttttcgcctctccacctgttgattctattttagctgctattcgagctgtaactggtcccatggggtgccttctaatagtaaagaactacactggtgatagactcaattttggattagctgctgagcaggcaaaatctgaaggctataagatggaggttgatagacacaaatattactatgttgtgtggcagatcatattagttttaatgcctatgtatcatttatcttccaattgtagatggtcattgttggagacgattgtgcccttcctccacctagagggatagctggtagaagaggtttagctggaacaattcttgtgcataaggttgctggggccgcagcagatgctggtttatctcttgcagaggttgccgcagaagcaaaacatgcatctgaggttgttggtacgatgggagttgcactttctgtttgcacattgcctgggcaaataacttctgatcgtctaggtccaaggcaaatggagcttggccttggaattcatggagaacctggagttgctgttgttgaactccagccagttgacgtagtggtagaacatgtccttaaacagatattgtcacaggaaactcagtatcttcctgtcacaagaggttgcaatgctgttctcctagtgaatggattaggagccactcctatcatggaacttatgattgcagcgagaaaagcagttcctgagttgcaattggtgtatggcattgctgttgacagagtctacactggcacacttatgacatcacttgatatggcaggattatctattaccattatgaagtccggcgaaagcattttgaagagacttgatgctcccactaaagctccagcttggcctgttggttctgaaggaaaccgtccaccagcaaagtttcctgttcctctaccaccatcaccttcaatgaaggatgacgagattcttgctccatctcaggagctgagcaagcaagggtgtatcctggaggctgttattgaagcaagtgctactgaaattatcaatctcatggatagcctaaatgaatgggacagtaaagtgggcgatggtgactgtggaagcacaatgtatagaggtgcaacagctattcttgaagatatgaaaaagcgttaccctatgaatgatgcagcgggaacaataaatgaaattggggcaacaatccgaagggtgatgggtggaacaagtggaatcttgtatgccatactctgcaaggctgcgtatgcaagcttaaagcagagctcaactgtcactgcgaataaatgggctgatgctttagaggcctccattgctgctgttagcaaatatggtggtgccagcgcaggataccgcacaatgttggatgccctaattcctgcttctgctgttctgaaacagagacttgaggctggggatgatcccgtgactgctttcatcgcgtcttctgaagcagcatcagctggcgctgaatccaccaaacaaatgcaagcgaaggctggacggtcatcatacatcgctccagatctcctggcctcaatccctgatcctggtgcaatggctgcagctgcatggtacagagctgctgcccttgcagtgaagaacaaagtgcacggttcaaagagctagtagcatacgcaatgcttcattgctagacccaaaatagactgacaggaaaaatcactggggcattttctcactccccttagatttggtttccgcttgtgcttttgcatgggccgagaaaaaaaatgacttccatattgtctcacccttctcacatcatacaaagagatgttcaaagagttcgtcgtccgtacaagttaagggaagctatgcttttgcactgc

SEQ ID NO: 25005 - DNA, 1423 bp, Zea mays
  Clone ID: LIB3689-233-E4_FLI
cggcggacagggagagggacaagggcaaggacgaccgccgccgctgggcggctcgctgcggtttcgccgtcctcggcatcatgagcaccctcctcgtctacggcgtcctgcaggagaagatcatgagggttccgtacggagcggacaaggagttcttcagatactcgctattccttgttttctgcaaccgtatcaccacatccatggtgtctgcaatggtgttactggcaagtaagaaatccttggaccctgtggctcctctacacaaatatggcgttgtctccatatcaaacatattgaccacaacctgccagtatgaggttggactggtctctgcccttttggttcttttgccattgtgttgtttcgtgttactatgtaaagtacctttttccaggccctcaagtatgtcagcttccctgtccaaacactcgccaaatgtgccaagatgatacctgtcatgatctggggcacaataataatgagaaagaagtatggtggaaaagattacttctttgctgtcatcgtgactctgggctgcgcattgttcattctatatccggcaatgatggatgtgagcccatttaatagaggcagagaaagcactatttggggtgtttcactcatgtttggttatcttggttttgatgggttcacaagcacgttccaagataaactcttcaaagggtatgacatggaaatacacaaccaaatattctacacgacagtgtgctcttgtcttcttagtttaagtgggctgattctccagaatcatctgattccagctgtggattttatgtttcatcacccagattgcttctctgatgttctaatcctgtccagcgttgcaacagctagtcagttctttatatcctacaccatccgaacatttggggctctcacatttgctaccataatgacaactagacagctggtaagtatattgctgtcctgcatctggtttgcacatcctctcagctggatgcagtgggttggcgcagccattgttttcggagctatatacgcaaagagcttcttgaggactaaaccgcagaagacagcggtggcaagcccgtcgcatggctctagcccgaaccctgctaacagtagttgacgattgatgacatgataacattaggaaacaatggacttgttgcggtaccgggacgaagtctctgtgtttgagatcagtggcgccatagcgccatggtgaggtaactggacaaatgggtcccagatgtagctgtgtaaactgctcctgacctggaggtgatggaggtggtctccctttttagtggaaaaaaaccaaggtagtcctgatgttagtttagtatccagagaccaatttttcagccatcccaggctgtgctatgttttttttttctcgaactcgcaagagaattaagtgtcaaaataataagag

SEQ ID NO: 25006 - DNA, 1593 bp, Zea mays
  Clone ID: LIB3689-233-G3_FLI
cttttcgagatctgcgccgctgttgctgtccccactcggcctcccctctctctccccttcttccagacccttcccttctcccgtaccgccgccgccgtcgtacgatacttcgggtgtaggggagcatgcggaagaaagggcgggcggtgccggagtggctcaacagcccaatttggtccgctaccccgcccgcgcccgcccagccggacccctacggcgccgacctcgctccgccgccacccccaaagccgccgccgccgccagctactgcctctcccgtacctccgacttcaaggccgcgctatcgaagaaggtggtgaacatgggagagctgcggcgcttagcctgcctcggcgtccccgacggcggtactggtgtccgacccgtcgtctggaagcgctggtggtttgtttggtaaatggggaatggacaatactctgttggtgccctgttacgtgttacattttcaatgcggtcatggaaatggaattagatgttgctgttgtgaagagagatgaccttggaaagaaaagatgtattttcccaacccaccattgtgcagcttcttttggggtatttgccaactgatcgttccttatggacttatgagttagaaaagaagcggagtcaatatagtgcatacagagaagagtttcttctaaatccttcagaaaaactacgaatgattgaggaaacaaagctgtcaagaaagaaagacacaagtattgagaggattggctttctttcgagattcgaagttactaatgaagagcatcctttaagctctggtaaatctagcctgtggaaccaatattttcaggattcagagttactagaacagatagaccgagatgtaaagcgaacacatcctgatatttcatttttctcatcaaagtctaaccaggaatccttgaggagaattttaattatattttcaaaattgaaccccagtataagatatgtgcaagggatgaatgaagttttggcacctttattttatgtattcaagaatgaccctgacccaagcaactcagcgtcagctgaagcagacgcatacttttgctttgtcgaattgttgagtggctttagagacaactattgcaagcatcttgacaatagcagcgtgggtattcgatctacactttcaaaattatcacaactcttgaagcgacatgatgaggaactatggcgtcacatggaggtcaccacaaaggtttacccacaatattatgcctttagatggatcacactgttgttgacgatggagttcagctttaacgtgtgtatacatatctgggatgctatcttgggtgatccagaaggcccatcggacacattgatgaggatatgctgtgccatgctcatcctagtccgaaagcgtctcttagctggagacttcaccgccaatgtccagctgctgcaacattacccagccaccaacatcgatcacctcctccacatcgccaaccggttgagaggaactgtacccggctagtgttttgttgcctttcctgcatacctgtacttcagttttgcccatgtgaccttcgtctggttaagtcgctaaatgcaatgttggtagcttgaaatatc

SEQ ID NO: 25007 - DNA, 1544 bp, Zea mays
  Clone ID: LIB3689-233-H6_FLI
catcccgtcgcatcccatcccactaccacccatctcgtcgtccgccgattcgatccggttcttccaacccaggggcagtgatggcgacgaagaggagcgtgggcaccctcggcgaggcggatctgaaggggaagaaggtgttcgtgcgcgccgacctcaacgtcccgctcgacgatgcccagaagatcaccgacgacacccgcatccgcgcctccgtccccaccatcaagttcctcctcgagaagggcgccaaggtcatcctcgccagccacctgggtcgtccaaaaggtgtcaccccaaagtacagcttgaagcctcttgttccacgcttgtctgagctccttggagttgaagtcgtgatggccaatgattgcattggtgaagaagttgagaagttggctgccgctttgccagaaggtggagttctgctcctagagaatgttagattctacaaggaggaagagaagaacgaacctgagtttgctaagaagctagcatctgttgctgacctttatgtcaatgatgcttttggcacggcacacagagctcatgcttcaaccgaaggagttaccaagtatttgaagcctgctgttgccggcttcctcatgcagaaggaacttgactaccttgttggagctgttgccaacccaaagaagccatttgccgctattgttggtggatccaaggtctcaagtaagattggtgtcattgagtccttgctggcgaaggtcgatatcctcatccttggtggtggtatgatctacacattttacaaggcacaaggatattctgttggaaaatctctcgtggaagaggataaacttgagctcgcaacttctcttattgagaaggcgaaggcaaagggggtttctcttttgcttcccactgatattgtagtagcggacaagtttgcagctgatgctgagagcaagattgtccctgccactgctatccctgatgactggatgggtcttgatgttggccctgatgccaccaaaacattcaacgaagcattggacaccaccaagactgttatttggaacggccccatgggagtgtttgagttcgagaagtttgcagctggcactgaggcgattgccaagaagctagctgagcttacaaccacgaagggtgtcactaccatcatcggcggcggcgactctgttgctgctgtcgagaaggctgggctggccgacaagatgagccacatttcgaccggcggcggtgcgagcttggaactcttggaaggcaagactctacctggtgtccttgccctcgatgacgcctagatccgctgctgctgctgctactcaggttctgccagctttgcgtgtcatcttgtttcggaccttggtgtagcactgcaaggctaaggtttactcctccgcacatggacttttggggataggcttgccaccgtgttttgctagatgagtcgtggaataagcttttacttcctcgctgctgtgggtgaagtgactggaattcggaaatttggaactaacaaaaccccccgtggatttgtatgatatgttttgttcgac

SEQ ID NO: 25008 - DNA, 1096 bp, Zea mays
  Clone ID: LIB3689-233-H8_FLI
ccgggcacaccccccgagctcagcttagctccactccagctccaatcacagtcgtgaccagagcgcgagagctagctagagggccgtgaaaatgccgatcaataggatcgccctggggagccaccaggaggtgtaccacccgggcgccctcaaggcggcgttcgctgagttcatctccaccctcatcttcgtcttcgccggccagggctccggcatggccttcagcaagctgaccggcggcggcccgacgaccccggcgggcctgatcgcggcggcggtggcgcacgcgttcgcgctgttcgtggcggtgtcggtgggcgcgaacatctccggcgggcacgtgaacccggccgtgaccttcggcgccttcgtgggcggcaacatcaccctgttccgagggctcctgtactgggtggcgcagctgctggggtccaccgtggcgtgcttcctgctccgcttctcgacgggcgggcaggccacgggcaccttcgggctgacgggcgtgtcggtgtgggaggcgctggtgctggagatcgtgatgaccttcgggctggtgtacacggtgtacgcgacggcggtggacccgaagaagggcagcctgggcaccatcgcccccattgccatcggcttcatcgtgggggccaacatcctggtgggcggcgccttcgacggcgcgtccatgaaccccgccgtgtccttcggccccgccctcgtcagctgggagtggggctaccagtgggtgtactgggtcggccccctcatcggcggcggcctcgccggcgtcatctacgagctgctcttcatctcccacacccacgagcagctcccctccaccgactactaaaagccgaagccgaccgacccaggggtgcgcagcgcagcgcagctagcatccagcgctctctccccgctcgccgccgtttagtttctctcgtgcacgtgcatgcatcgtagactgtctcaggccgccgctgcgccggcgccgctcgcatcgtttgcttccttggaccagcagtcgtcgccgtcaggctgaactgcttgtaaccgtgaattccggacccgtttgcttctgtaagatttgtgcatttgcctgagt

SEQ ID NO: 25009 - DNA, 1796 bp, Zea mays
  Clone ID: LIB3689-233-H9_FLI
gtgtgtggttggagtggggctaacaattgagcctgccgcgcacaatcaatggccgcgctcgagtccaacaagaagctgcgcctccttctcgtgcccttcttcgccaccagtcacataggcccgttcaccgacttcgccgtccgtctagccacagccaacccggacgccgtcgagctcactctcgccgtcaccccggcgaacgtccacgtggttcgctcggccctcgggcggtacggcgccgaggcgggcggcgtggtcaagattgccacctacccgttcccgcgcgtggacggcctcgctccgggcgtggagaacctctcggccgccggggacgacgggtggcgcattgatgccgtcgccgtcgacgaggcctcgacgcgaccggcgcaggaggcgctcatcagggaacagtcccctgacgccgtcatcaccgacgtccacttcatctggaacaacgccgtggccggcgagctcggcgtgccgtgcgttacgttcagcgtcgttggcatcttctcgacgctcgtcatgtaccacctcggccgtgacgtcgtcatcagagatggccaggaggtgaccgtccctgggttgccgcttgccggggccggagatacggatccccgtatccgagttgccggagttcctgagacgccggcaggagcacgacggggtcaggcggtgccatgtggagatgggcaggtgcttcggcgtcaccctcaactcgttcgtggatctggagcagccatactgcgacatgtgcgtgagcagcggatacctgaagcgcgcctacttcgtcgggcccctctcgctgccgttaccaccggccggagcaagcaccagagattcgccatgcctcgcgtggctcgacaccaagccgaggttttcagtggtgtacgtatgcttcggcaccttcgctgccatctcggaggaccagctccgggaactggcgcttgggctagaagcttcaaagaagccattcctgtgggtggtgagggcggacggatggacgccgccggaggggtgggaggagcgcgtcggagagagggggatgctagtgagagggtgggcgccgcagacggcgatactgtcccatccagcggttggcgcgttcctgacgcactgcgggtcgagctcgctgctggaggcggcggcggccggcgtgccgatgctgacgtggccgctggtgttcgaccagttcatcgaggagagactggtgacggaggtcctcaagatcggggagagggtgtggagcgggacacggagcacgagatacgaggagcaaaaggtcgtggcatggcagcagaggtagtggcgcgagcggtggcaaggttcttggagccgggtggcaccggcgaggcggcgaggagcaaggcgggggtgctcgctgcgaaggcgcgctcggctgtggcggagggtggctcgtcattctgtgatctgcgccgtctcgtcaatgacctgatcgaagcaagaacggctgccggaaccaacgcctgagttacaaaaatcacgacaaggctctccactcgctttcctgcagagcatcagggcgaaatgtcagtggcagagtcaatatgcagaggatccactccggttcaaatgggatttttttctcataaataaatgtaagtaaagttaatcgacaaaaatcgctggaattctaaagtgagacttcgacaaaaaccgctatgcactcaagattctcgatgtaatcgatgtacaataaaattattaatcgatgtaggactaaatattacccttgtgttgtaaccagagcaacaaaaaatatttgttatttttgt

SEQ ID NO: 25010 - DNA, 1707 bp, Zea mays
  Clone ID: LIB3689-234-E7_FLI
aacttcttttccccctcccctgttaaacacgcgcagcgaagcaacgcagcagcaacaaaccttttcgctcgcagctgccaccacctcgtcgtctcgcctccccctcggcctccgcacgcgcgcgcgggatctcgccctcgcccgcctcgccgctcgcgcgcgcgcaccgaggaagggcgcacccacccgcaggcttcctggcgggccgatacggcggcgatggcgagccgggtcaaggaggacgagaggcacgagaagatccttcgcggcctgctcaagctgcccgccaacaagcgctgcatcaactgtaacaatttgggaccacaatatgcctgcacaaatttctggaccttcgtttgtaccaattgcagtggagcacatcgggagttcacgcatcgagtaaaatcggtttccatggccaaatttactgcacaagaagttactgcccttcaagaaggggggaatgaggtaacatgtatctgtttttttttttctacttttcccatcaatcccatgtcttctattcaacacggcattgattttgaaggagaatagaattggtgtaattgaatggatgtattgcaatattgcattgagcccttagtcagtttatgtagagtacaagacttgggagacaaggaacacatggatacatgtggcggtctacgatacacaatatctaaactaccaaatatactctaacaaccctccgcagtcgtagcgggaacatcgcagacgattggactggagaagaggagccaaaggctaacattctcctgaagtcgtagtgacattgcaatgcaaatgttgcaactagagtagaaaccaacaaggagcttatgtggttgtgccaatgcgaggtagccgagcataaggcacaattgatgtggttgaaggagtcgtgctgaagatagcgaggccgacatagttgtggtgaggttgctgtgttggtgtagttgcaagcgcataagaggtgtcaaggagatgatgaagacatgtctgggtagtcgtcgtggaaggaggctatactgaggttcatacagtcagggctgccaaagacgaaggtgaaaggagacgatgcaatcgaggcagatggggtgggaacatgagagttgatgcctaccactttgtgcccccagtactgcaatcttttggacaatcttttaagcttcaaagacaccttctctagagggcaggagccttgaactggctggttcaagaggcagcaacctcatccaagaacccagggaatttaggccacaaactttctaagtgtaacctgcgctttcccttgaggtccattttgagcttgagaatcaaaggacaatggtcagaggtttcggtggcattactatagagcatacgatccgggaaaaactcttcccagctgctagtacagaatacatgatctagcttaacaagagtaggatcctccctctgatttgaccaagtgaatctccttccagccaacagaatttccttcaaatccaaggagttgactgagtttctgaaactacccaacaaggtctggtttacattggaattgttcttgtcttccgatctgtaaatcatattaaaatcacccgcaatgatccatgggcccccacatttgttcctgacctctctcagctcatggagaaaagcttgtttgagattgtcctgataaggcccatacacacctgtgaaccaccaaagttgaccagacat

SEQ ID NO: 25011 - DNA, 658 bp, Zea mays
  Clone ID: LIB3689-234-H5_FLI
gaaggtgcggttcccgcgccggcccggggagccggactgcagctactacctcaagttcggcacctgccgcttcgggatgaagtgcaagttcaaccaccctgcgaggaagaagaagactagtagggtgagaggcgtcgggagcaacggcagcgggagcaacagcagcagcaataaagcatcttctcctgatgatgatcaggctcctaaagaagaatacgaaggtcttgttccggacatttcggattccatgggctttgatgacaaggggagcttatctagttcagaaaatcataggaatatgtcatatgaagttattgatatgaaaagggggaaactagagccaaaggaaaaggtttgtgaagaacctgaaaaggcaattcattttacgaagttagacttagtagaaaccctcttcactagtggaggtatcgaccatcactcttcactgtaacccgatggtgatcagcgaccgtgagcttccatgttattgcgttctgataattgagacttttattatgactatgtatgagatattgtctcttattagtactggatgatgagatgtgtcttatttatgactatggatgagacttttgtgatgtaattgatgagactatggatgagacttttgtgatataattgatgagactatggattt

SEQ ID NO: 25012 - DNA, 1949 bp, Zea mays
  Clone ID: LIB3689-234-H6_FLI
gctagcggacacaacagtcaggcagcagcagcagttaccactccgtgctccaccgtgttgcctccctcccaagtcccattggccgccatgggctcctgcctctcctccgagacccccgccgccagcgccggcgcggcggcgtggtggcggaaggggcgccgcgggacccgggaaggcgcggctggcggcctccccagcggcggcaagaagccgcccggacgagggggagagatgacggaggacgagctcgcgcgggtctccggcaggatgtgcggcaacggcgccagcgcggtggcgtgcctccacacgcagcaggggcggaagggtaccaaccaggacgccatggtcgtgtgggagagttttaactcaagtgacagcatcttctgtggtgtgtttgatggccatgggccatacggtcattttgtcgccaagaaagttagagattcacttcctgtcaagttgcgcacacaatggcagactagtgctaatgggccctgctctagtcctcatcaaaatggaagcatctctggaagtatcaactccgaagaaacagcttctattgtcgatgacgaatggggagatggtgataacactgagaagcttcctgagatgtttcttccacttaagcgatcttacctaaaagctttcaaattgatggacaaggaactcaagctgcatcccacagttgactgtttctgcagtgggtctacggcggtaacgttggtgaaacagggattggaccttgtaattggaaaccttggggactcgagagcaattatggggacaagagacgcctctaacaatctaactgctctgcaactcacagttgatttgaagcctaaccttcccagggaagctgagaggatacaacaatgtaaaggacgagtctttgctcttcaggatgagccagaagtcgccagagtgtggttgcccaataacgactcccctggactggcaatggcaagagctttcggcgacttctgccttaaagactatggtttgatatctgttccagagatatcgtatcgccttctcaccgagaaggatgaattcataatactagccaccgatggggtgtgggacgttctctcgaacaaggaggccgttgatattgtggcgtcagccccgtctcgggcaacggcagccagggctcttgtcgacagcgctgtcagatcgtggaggctcaagttcccaacatccaagagtgatgactgcgctgtcgtctgcttgttcttggatcgtgctggctcggctcaagagagcgagagcgaagccattgtggagacggcagagcccaccggggaggaggtctgcaggcgggatgccggtgaggtcgacgaggacatggcagtcgcagatgctggtgtacatgtagtatccagcgcggagcacagtgccgaggcgactccgttgcagcactccaccacgtcaagggagctcgacgacgagattgtaccggcggacgagcacgagcctcccgtcgtcctgaaggagcctgcgaggtgcgggtctgctcgcagcctggcagagtgcatatcgacgagcgaggaagaggagtggtccgcgctcgaaggcgtgacgcgggtgaactccctcctgaacctcccgagaataatgtccggcgacaggagatcggccagctggaggaagcgacggtgaacagcagaggaagctctccactggagttcttcgccgagttcaaatcctccctcagtctctgggaatcttccccaggttgttttgacctcaaccgcgtcagcgtgtgcgttccggatcgtttgtttgttcattcttgtgccttttttgccggtaggtgttccatgcttggggcttctctgtgtccgtttgtgcatagaaaagttttttttttggttctgtgagaagcttctgtaaaacatgcagcacctcctggagtgctatatgtgtatcattaggtcatcgttttgctc

SEQ ID NO: 25013 - DNA, 1240 bp, Zea mays
  Clone ID: LIB3689-236-A4_FLI
cgaacaaaccctctcgaaaaccctctctcatattcaccccgccgccgcctcctcttccccttttcaacttcgtcgaaaccctaaccctcccggcgaagtcgccatgtcgaacccgaagggctccaagatgctccagttcatcaactaccgcatgcgggtgacgatccaggacggccgccagctcgtgggcaagttcatggcgttcgaccgccacatgaacctcgtcctcggcgactgcgaggagttccgccgcctcccgccctccaagtcctccaaggccaccggcgaacgcgaggagcgccgcacgctcggcctcctcctgctccgcggcgaggaggtcgtctccatgaccgtcgagggcccgccgccgcccgacgagtcgcgcgccaaggccgcggcggcgggcggagccctcgccggccctggcgtcggccgcgccgctgggcgcggcgtgcccaccggcccgctgctccaggcagctcctggtcttgctggccctgtgcggggcgtgggtggacccgcccctggcatgatgcagccccagatctcgcgccctccgatgcccaacctgtcggcccagccggtgtcgtacccgcaggtcgtgcgcccgccgcaggggatgcctccgccaatgcgtcctggaatgccgccgcagatgccgatgccattccgcccgcctggggcgccgcctgctccgttccccggggcaccgccacaacagtacatgaggggaccgccgccgatggggcctccccaggtgaggcccgggatgccggggccgccaccgcctggaatgaggcctggaatgcctccgccaccattcggacagccgaggccagggatgccgcctccgccacctggtccacagcagcctggacagaacccgccgcagtagcttcctggataagcttcttgcagatacacctatggaagagttttttatctcgagagaggatcataatcgcacctggggatgacctgtgaattgcaccaaagcttcaccattctgtctcatcagggcagtagtttcctttgggtattgtgagggaggagaaccttgcaagcgtgtgtaccactcatcctttgatgtgagaagggaccttgtacgtagagaggccaggacttgtattttaactgttggtgttggttatgttaggaaatatggataactggctgcagtcttgttgttacggtgttgattcatgctctgttgaagttgaagcccttgttttctctctct

SEQ ID NO: 25014 - DNA, 1827 bp, Zea mays
  Clone ID: LIB3689-236-B7_FLI
cgcctccgggttggccgcgagccgggaaagcgaccgcccctcctcttctcctccctttctctcgtctcgtcggctcctagctcctcctcctcgctcgccaagggagacgcacccggtccattcgtcctctcctcctatcgcctccccctctcctccccggagatccccgctaccgaaggattatcccgtgcagaggcccactagtatatcagcttggagttgaggagaatggctgttggtgggactcaaccagtccttaggaagtacctaggcgccctcaaggacacgacgactgtgagcttggcaaaagtgaacagtgattataaggaattggacattgcaatcgtcaaggccacaaaccatgttgagcgcccatcgaaggagaagtacataagagaaattttccattccatttctgctgctaggccacgggcagatgtagcctattgcattcatgcccttgctagacgtctttcgaagacgcgcaactgggcggttgcgctcaagacattgattgccattcatcgcgcccttcgggaagttgatcccacttttcgtgaagagcttattagttatggcagatctaggtcccatatgttgaacatggcctactttaaggatgactctagtgcagaagcttgggattattctgcatgggtgcgcatttatgctttatatttagaggagaggctcgaatgtttccgagtgttgaagtatgatgtagaaacagatcctccgagaactaaggatcttgatactgttgctttgcttgatcatctaccatcattgcagcaactccttttccgtcttcttgcttgccagccacaaggagcgtcgtcttacaatgttataatccagcatgcactctcaatggttgctttagagagtattaagatctacactgcgattagtgatggaacaatcaatctagttgacaagttcttcgagatgcaaagaaatgatgctgttagggcacttgatgtatacaaaagagcaactaaccaggctgaacgactttcagagttttatgaagtgtgcaaaactatacacattgggcgtggtgagaaattcctgaaaatcgagcagcctccagcatcattcctgaataccatggaggagtatgttagagatgctccaacaggtcaaaaagagaaggctatactagcgatagaatacaaaaaagagccagaggaggaagaaaaaccgtcctcacctcctgcggctccagaaccagaaccggaacaagtgcctgagccagaacccgagccagtgaaagaggaagcaccagaagctgaaccagatttgctgggtctgaacgaacccaaccctgctgcaactgcgatagaagagcagaatgctttggcgctagccattgttccgatagatgatgctccgaaagctgctcccacttttggaaatggagtcactggctgggaactggcccttgtgacagcaccaagttcaaatgagaccgccgttgccccaagcaagaaactggccggtggtctggacttgctgacccttgacagcctgtacgacgaggcgaaccggagagcgagccagccagcaagctacaacccctgggaggcgacccccgccgcgcctgccccgatgatgaccatggcgccggtgatgcacgacccgttctacgcctcgaacgggtacgctgcgccgcacggcgtgcagatggcggcgatggcgcagcagcagcaggccttcatgctgcagcagcagcagatgatgacgatggccccggcgccgcagccggtggtccaccacccgatgcagatgcagcagaaccccgcgaacccgttcggcaaccccttc

SEQ ID NO: 25015 - DNA, 1260 bp, Zea mays
  Clone ID: LIB3689-236-H9_FLI
gattctccggtgggggttccttggtctcgatttgctgctgatgggggtgccgaagcagcgctggacgccggaggaagaggccgcgctcaaggccggcgtcgccaagcacgggcccggcaagtggcgcaccatcctccgggactcggacttcagcgcgctcctgcgcctccgctccaatgttgacctcaaggacaagtggcgcaacttgagcgtcaccgcaggaggttacgggtctagagagaaggcaaggatggcgttgaagaaaggcaggcgcgtggtgcctaagcttactgctgagccaatggatgtagatgagaaggatatggacaacgctcatgacacagtcattgatgtggaaccgttagcaatggctttcgagcccttgccacttttggaaagcccagataagtcagttgctaggctcgatgatctcatagtagaagctataaggaagcttaacgagccatctgggtccaataaggcagtcatttctggatatattgaggaccaatactggccgcctgctgattttcaatacctgctatctacaaaattgaagtcattggttaattctggaaaattaatcaaggtaaaccaaaagtacagaattgcaccaagttcttccttgggcggaataagcactaaggtatcctcttctgaagggatgaacacagaaaataataatgttaaacggctaactaagcctcaagtggttgctgaactggagaagatgaaaggcatgaccagggaagaggctgctgccttcgctgccaaggcagttgccgaggcagaagtagcaatggcagaagctgaggaagcagcaagagttgcagaggctgcagaaaatgatgctgaagctgcaaaggcttttcttgatgctgtcattttgtcaatgagaaacaggaacgctgcttccatgatacttcgagcttgctgatccttcacccatgccgtcgcatggttttggcagcagcacaccgatgttctgctgcaaagattttctggatagatgagtttcttgtatagtcttatagatcatggcgggttttcaacagcttgctgttgtcctgtgctgtgcagccaatcgacaacatgataacaagaatgatcgagaaagtagtcttcatttttttttgtttcccattgtgttgctttgtaattaaactatagccttttcctttcattagttgatgaagtgatgtcgtctaatagaacaactgtagtgaaaagaaaatgtcagaaagccgccttagttaatgc

SEQ ID NO: 25016 - DNA, 2502 bp, Zea mays
  Clone ID: LIB3689-237-B11_FLI
tctttgggtctgggggcacaaatttgaaatattgggagtgctggtgtgatatagaggtctaggaggagatatgaggtactacttgcgtcaggtccagcgtttggttggagatatggaaggaggagctctcttgtttatagacgacctcaactccaagtgacaaagcgaacagctgttgaacgtttcccttctatttctgtttctttttgccggatttggagatggagatgaattcctctggcgaggaaactgtggtaaaggtaagaaagccgtacacaataacgaagcagcgggagcggtggacagaggctgaacacaaacggttccttgaagccttgaaactttatggcagagcatggcagcgcatagaagagcatgttgggacaaagacagccgtgcagatcagaagtcacgctcaaaagttcttcactaagttggaaaaggaagctatgaacaatggtacttctccggggcaagcccatgacattgacatacctccaccacggcctaaaagaaagccaaacagtccatatcctcgaaaaagttgtctcagctccgagacacaaaccaaagaacttccaaatgacaagtcaacaaaaccaaatatgcccttgagcaatgggcatgtaaaaatggtaggcgatgcatctcttcagaattttcaaaggaaggagttgtctgaaaaaggaagtcgctcggaagttcttaatctcttccgtgatgccccatctgcatcattttcttcagttaacaaaagctcttcaaatcatggggcacccaggaggaccgaggcaagtaaaacagaaagccgagatatgtccatcatggaaaataattcttttaaccccaacacccaagaggatgtaaaggtgatcagtgatcaggaaatggaaaggcttaatggtatccagatcagatctaaatgtgaacattctcatgaggggtatttggacatctcaacgcaacaaatgaagctaatgccaaagtctgtggagacaacatatgtggatgaacaaactgcaagagcttcacacaccctagcagagagcaacgggacagctagcgttccagtgactgtacctgaaggaactcatcctgatcaaacaagtgatcaagtgggaatcaatggaagcatgaacccatgcatccatccaatggtttctgcagacccaaaaatttggtagtagtgccacaccacagacttttcctcataattatgctgcctttgctccaatgatgcagtgcaactgcaaccaagatacgtacagctgccaggctcgcagcatcatactggccagcagctgaaggtaacactcctattgatccgaatcaagaaaaccctgcagatggcgtccaaggaaggaacataggctctcctccaagcatggcttctattgtagcagctacagttgctgcagcatctgtatggtgggcaacacaaggtcttctccctttcttcgctccacccgtggcttttccatttgtaccagctcctagtgctgcctttcccacagttgatgttccacgaccttcagagaaagacagagattgcccagttgaaaatgcacagaatgaatgccaagaagctcgaaaacaggtacagttcgaaggtttaagagttgctgcttcttcagagtctgatgggagtggaaaaggcgaggtgtctctccatacggagttaaagctatctcctgcccagaatgctgatgccacacctaccacaggagctggcacaaatgatgcattcaggaataagaaaaagcaggatcgctcttcatgcggttctaacacaccttcaagtagtgatgtagatgcgggcaatgttcctgaggaggacaatgctaatgagaaggcgaagcaagcctcctgcagcaactcttcagctggtgacactaaccaccgcagatttagaagcaatggaagcacaagtgattcatggaaggaagtttccgaagagggtcgtctggctttcgatgcgctgttcagtagggaaaagcttccgcaaagcttttctcccccacaagcagtagactcgaaggaggttgccaaggaggaggaagatgaagtgaccacagtggcagttgacctcaacaagaatgccacaagcattgatcatgatgacctcgacacaatggatgagcccagggcttcctttcccaatgaattgtcgcacctgaagctgaaatcgcgccgtacaggcttcaaaccatacaagagatgttctgtggaagcgaaggaaaaccgggtgccgactagcgacatggttggtaccaagaggattcgtcttgatagcgaagcatccacataattgatttcttcaaagttatatttacatctaagctactataggacttcagatcttgcaatgcagtgcttcattaaaactcaatctgttgtgtgctgtattttaatgcttgtcaagcagcccgctagactgctttaaaaccttatctcgtagactctgatttaagcatcatgcaactatcaaacttttttttggtc

SEQ ID NO: 25017 - DNA, 1723 bp, Zea mays
  Clone ID: LIB3689-237-D5_FLI
atttggtcgaaataaacaagcagagcagaaaaccccccacacgctttagttggccgtccgtccgtccgtctctgaggagcacacagcagtcgattttaaactgcagctacagaggtcaggtcaggggacacagcctgagcggctggctggcgggggctagcgagcggcgccacagcgcagcacgcagagagccagggcggcggccatggcgagcgcggcgagtggcggcggcgggtcgctgaagcggatgggcccgctccgggtacagtactacatcgtgatgggcgcggtggcagcggcggtggtgctggccacgctgcgctacatgccggggccagccgtcccggcgaccaccgcccgtaccagcggaggcggcgtcgtgcgctcggccccagcagccgcggccgtccctgtgcccgtgcccgccgtggaggtagaaacgggggaggatgagcaggcgcagaggaggaggaggaggaggaagaagaagggtgacggggtcgtgctcttcaacttcggcgactccaacagcgacacgggcggcgtggcggcggtcatggggatccgcatcgcgccgccggagggcagggcctacttccaccaccccacggggcggctctccgacggacgcgtcatcctcgacttcatctgtgagagcctgggcatgccgcacctgagtccgttcatgaagccgctgggctccaacttctccaacggcgtcaacttcgccattgcagggtccacggccatgccgggagtaaccaccttctcgctggacgtgcaggtggatcagttcgtcttcttcaaggagagatgcctcgactccatcgagagaggtgagagtgccccgattgttgagaaggcgttcccagatgctatatacaccatggacatcgggcacaacgatataaacggtgttctccacttgccctatcatacaatgctcgaaaatctccccccagtaattgctgaaatcaagaaagccatcgagaggttgcacgagaatggagccaggaagttctggatacatggaacgggagcattagggtgcatgcctcagaagctttctatgccgagggatgacgacagcgacctcgatgagcatggatgcatcgcaagcattaataatgtctgcaagaagttcaattccttgctgagtgaagccttggacgagctgcgtttgacactgaaaagttcgactatcgtctttgtggatatgttcgctatcaagtatgatcttgttgccaaccacacgaaatatgggattgagaagccattgatgacatgttgtggtcatggaggccccccttacaactatgaccccaaggagagctgcatgacttcggacaaatacctgtgcaagcttggcgaaaagttcataagctgggacggggttcacttcactgatgctgcaaatggcattgtggcttccaaagtactcagtggtgagtacaacattcccagggtcaagctggccagcctcgtccccgttccaaaatctgacgattaatggtgatgcagcaccttaattggcctttagtttggcctatcaaggatgatgaagatgaaactactaacaaaactgacaccaccgaagtttaattattttgaggttcttacgttacatccattgtagaagaagactttccttttgtttacttctctttttgtacaatcggcgcatatgtatatcctagggttaatatatggcgatgcaggtgtc

SEQ ID NO: 25018 - DNA, 1069 bp, Zea mays
  Clone ID: LIB3689-237-H4_FLI
gcacgatcggcacccggccatcccctccctcctcttcctcgcacgtcctcttccattccagtaatgggctctgcttcatcagatggtctccgggagcacttgctggacgtggacggcggcggagcggcggcggtgcccaagatacgggtgcgcgggctgcggcgccgcgcggacgcgaccggcgaggagatcctccgcggcgtccacctcgacgtgccgcgcggggccgtcatgggcgtcatcggccccagcggcagcggcaagtccacgctgctccgcgcgctcaaccgcctctgggagcccgcgcccggcgccgtgctcctcgacggcgccgacatctgcgccctcgacgtcctcgccctgcgccgcaaggtcggcatgctcttccagctccccgccatgttcgacggaaccgtggctgacaacgtacgatacgggccgcagttgcgcggcaagaagctaaccgaggccgaagtgaagagcctgctgcacctggccgacctggaccctgctctgtgctccaagccggcgtccgagctgtcggtcgggcaggcacagcgcgtcgccctggcccggaccctcgccaacgaccccgaggtgctcctgctggacgagccgaccagcgcgctggaccccatctcgacgcagaacatcgaggaggccatcgtgcggctgaagaagacgagggggctcaccacggtgatcgtctcccacagcgtgaagcagatccagcgcatcgccgacctggtgtgcctcgtcgtcgccggcgaggtcgtggaggtgctcgcgccgtccgacctgtccgacgccaagcacccgatggccaggcgtttcttggagctcagcggctgaaagcccgcctgctcgctgctgcttcgttggatttcgaaactcttctacctaatcggatgctttcgagctgttctggatggaaaggatcggacgtgtggttatctttccaatcgcctatcatgttctctacttttgttctcgtgtatacatacaatctgttaaagtagcttctcacagctagaaagtgtttgcaatacaaacaagttcttggcggatt

SEQ ID NO: 25019 - DNA, 1611 bp, Zea mays
  Clone ID: LIB3689-238-A5_FLI
ctgtccacctctctcgctctgggccgccgccgccgccctaagccacgtgctgaggctttcgttggtctcttcgccggcgacgagcacccagcagttctgtagaaatggctgatggtgaggacatccagcctcttgtctgcgacaatggcactggaatggtcaaggctggttttgctggcgatgatgcaccaagggcggttttccctagcattgttggccgtcctcgccacactggtgtcatggtagggatgggacagaaggacgcatatgttggcgatgaggcacagtccaagagaggtattcttacgctcaagtacccgattgagcacggtattgtgagcaactgggatgacatggagaaaatctggcatcatactttctacaacgagcttcgtgttgccccagaggagcaccctgtgttgctcaccgaggctcctttgaacccaaaggccaacagggagaagatgacccaaattatgtttgagactttcaatgttcctgccatgtatgttgcaatccaagcggtgctctcactctatgctagtgggcgtactactggtattgtactcgactctggtgatggtgtgagccacactgtgcccatttacgaaggatatgcccttcctcatgccattcttcgtttggatcttgctggtcgggacctcacagactccctcatgaaaattctcactgagaggggttactccttcacaacctcagccgagcgagaaattgtaagggacatcaaggagaagctagcatatatagcccttgactatgagcaagagttggaaactgccaagaacagctcttcagttgaaaagagctatgagctacctgatggacaagtaatcaccattggtgcagagagattcaggtgccctgaggtcctcttccagccgtcgatgattggtatggaggctgctggaatccatgagacaacatacaattcaatcatgaagtgtgacgtggatatcaggaaggacctctatggtaacattgtgctcagtggtggttcgactatgttcccgggtatcgctgatcgtatgagcaaggagatcacttcccttgcaccaagcagcatgaagatcaaggtcgttgcaccgcctgagaggaagtacagtgtctggataggagggtcgatcctagcctcgctcagcactttccaacagatgtggatatcgaaggaggagtacgacgagtctggcccggcaattgttcaccggaagtgcttctagggtttcacaagttcctcgtcgttacctagtctcaaattatgtcccctccatttctcgagatatgtgtggcagatttgcatgatacgtttgtttgtttccatcggacctgaagtcttcttggggataggctcccccctttgtatgttgtggctccaatccatgtgcgagcacgctgtgtctgtcgtgacacctggttcgtgagatgggttgtcaaacttgattggtttgttgtgcgtggctggaagagctgatagttatatatttggcttggactgtgccgcttgtatgtatctgaattctgaaagcgttgtaatctgagcatccgtgcaaagtatgaatggcccttttatatgggctggattttccggtttct

SEQ ID NO: 25020 - DNA, 3703 bp, Zea mays
  Clone ID: LIB3689-238-A9_FLI
ctcttccccgttcccccgtcgcctcggcattccgccgccgactccgacgagggggccccacctgtcatcctcctcccccgccgccgttcgccggacggcagcgcgacgaggagccgtttaccccttcctgccccgcggcatccgcgttcgcgttgtgcgccgctgatccgagcggaccgcttcccgcgctgatcgctttctccgttcgacccctagggtttcggcgttcccctgtctccccgcgcccccttggaggcagcaccagagatctcgatcttccgcggcctcggtcgcgctacgcagttgaccccgctcgatttatcaccggggaattagagaggcgttttccgggggagtttcttcgcggggaagaggggccatggcctcgagtctgctcaccacggacaggagatggggtgctactcctgcaaggaaatctggtatgactgttctaggaaaagtcccaaaacctattaatttaccaagccagaggttggaaaacaatggtcttgatcccaatctagaactggttccaaagggcacccacacctggggcagcaaagcaccatccacaacaccaaatgcatggagttcctcgtcaattctgtctaccaagaacgatggaagttccagttcatctagccacttcaatggtcgaccgtcctctggcggaggctcaaggccatcaacagctggaagtgaaccacttggttcacccaatgcttggggtccaaattctcgcccatcttcagcatcaggcacatttccatcatctcatctaccaatggccacaaatcgtccccgaagtgcggaaacaagacccggaagttcacaactttctcgatttgcggataatgcttcagataatgtgaaagcgtcgataaggactattgatagaccggggtcttcatcacatgggcctgggttcacactaagtactggtgatttcccaacacttggctctgaagcaaatagtcaacgaggccatagttcgaaagggcgcccaatttctagttcgggtaaagaggtgtcgcaaggtgaacaagtgaagagcctaacaactggaaatggtgaattaatttcacaatccaataatcaacctgttgatatcatgaagacagagcagcatgcacacactggaggtgctcctgtcctcgccacaaatgtgccaaatgaaggcctgcaaccgcggccatatccaccaaattttcctatgcctcatccgcagtttgattcatggcgtgcacctcctggtcacccccctgagggaatgtggcatagaggactagtgccaggtgggccatacagaccagttggcccccctggtagttttcctgtcgaaccatttggttattatggtcagttcccacccaactctgaagttgcagcaaggcagggcccagggcatggtggatatcaggctaaaaatggagatgtgtatcatcctacgcctcctaattcctatattatgaatcagcctgttattccagtcagaccagtttatcagggtccagtgccgtatgatgggtattatggccctcgagcacatttcaataatgccaatgttagagatcctcattttgttggaggtcctggaatattaaatcaattccctaatcagaatgacaggtttcaccctggacatcctcaaaacagaccaggcagacatgaaacagttccaagggagcagctggaatctgataaaatacatgtgtttcatcgaggaaaccctgggagtttgcatgataattctgatcgtctaggaggttcccgtgaatttgaaaggaatgcgcagccagcatcgccacttcttccacatcctgatggaaaccggactgatgtgaacatgaggacagatacaagggacacctttagtgaaagtgaaagaaccagggtacttacaaaatcggtgcctaatcagagaggttcggttggtacagaacatttgtctgtttatgacaatgcacattcccatcacagagaaactggcgatggcactctgcgcaagaaattcaaggaggatggttcagctgcactgcatcctgtaattaagaagaatgcagctttaatagagaaaattgagagtttgaacaacaaagccagaaatgttgatgcacgtaatctcccagaatcagcttcgtccaaggaattcaataagcataaaaaaagcactgatgtttcatctaatgatgtcatgggtatggcatgcaaatctgacccggcagtttctgtttcctgtgtttctcctgcggtgcagagactaccaaacgtgcccatcaagggtacaattcttggtccggcacatccacagttaactgaatttagcaaagctgaaaagcttggtgattcaattagcgatcatgtacataggaaaagtgattcttcaagaaacagttaccatggtccttctaaagataggccagctaataaattcggaagtcatggacggggagaaagttccacaactgatctgaggaataatatcgatcatggccaacaacctgagattgcttcgcagctgcaacctgcgattgtacctgatgatatgccagcttcactcgattatgagtctcagcgtgcaaaaatgaaggagttggctgcagaacgtgcaaaaaagttgaaagctgaggaagaggaacggataaagaaccaaaaagcaaaagcgctcgcaaagttggaagaattgaacaggcgatcatcagtacttcagaagaaatcaaatgatataaaagtagaaacttatgatgcacatgataagcaacatgctggacttgatgtgactgctaaacttgacacttcaactgaaccacatgatgttattgcgcctgataggcttactgatcttctgcctcctaatgatcccaatcatactatggttcatatacaggcccagtctacagcacaatcacatgctttagatggtggcaaagaccctgatgctcatgcaacctcgtctttggtcaagaacactcacagcaacatggagcctgttgtgcagaagagtatctcgcagttgcatgacatcactgtggtaaaggccaagcaagggtacaggaaaagacatgtgtcagaagagaaaatttctgatgagaaggcaagtgcttcaataaccactagaaatattacgaaaaatgttgatgttctcatcgacacagtgacggctgttgttgcaccacatgatgatccacctactcagaacaagaagggaacccgacatttgagaagtaagaaaaagttagatgatgctccagttacttctaaacatccacctgtggtgttgaatgagccgaatacagtgaaagtctctaccgagccaaagacacatactggtggtgttatcatcagcagctctattgttcccactgaaggtactattgtaactgttggaagtataactgttggtggaatttcacttaaacctatgaatcaggagcgggttaaatcaccagatggaacaaataatactgaaagtagccaaccaagacctcagcaaacgagaaaatctggaaagcatcagcatgttcttcggcctgttgagaagccacatgggaatgatggtatcttgtgtgcaccagttaagccaccagtgccgaatgagcactctgatggagccatgccgactgcagcagtagctgacctcactaaaccagtagggaaagccataaatgatggggagaatgtgacaagaacaaagagggcgcag

SEQ ID NO: 25021 - DNA, 1808 bp, Zea mays
  Clone ID: LIB3689-238-B3_FLI
ccgtgctcagatttgcccccctctgcctgcctgcttctactacctgctgacacggcggtgcgggtcgtgctcggtggacgccagggggctacccctacccgggatccaggatcgtgctgtctgctcgccctctcctgctccttcaatcccatcggagatccgtgctggcgtttcctccctttcagcgcccaattgtttggtttgaagaaatcaagttcagatgggctccattctaagtgctactagtactacggctaagtctatggatcagcatgaggcatctggaacagatcctaataagagggtgaagatatctacttatgagtatgggtcaaacccaaggataattccaactcttcctgatgagctctcactccagatcctggcaaggtcaccacggatccattaccttaacttgaagctggtttgccgagcctggaaggcagcaatcatcggctatgaactttcccagctgaggagagagcttggtgtaagtgaggaatgggtgtatgtactgaccaaggctgaggcatacaagctccattggtatgccctggatccagtgtttcagaaatggcagaggttgccaccgatgccttctttcgtcaatcaggaggaatccaatcggacagcatcttcggcgttctggatgtggaatgttgtgggatcaagcattaggattgctgattacgtgaggggcttattttggcgcaggaacagtttggaccagatgcccttttgcggttgttcagtgggtgttgctgatggttacttgtatgtcattggcggtttttccaaagctgttgccctgaatcgcgtttgtagatacgacccttttctcaatttgtggcaggaagtgagcccaatgatgactgggcgggctttctgcaaggcggcatttttgaatggcaagttatatgtagttggtggagtcagcaggggtcggaatggcttgcttcccctgcgttcagctgaggcgttcgaccctaaaactggattgtggagcgacctaccagaaatgcctttcgcaagagcgcaggtactccccactgctttcttggtcgatgtgctgaagcctatcgccacaggaatggcaccctacaagggaaagctgtatgtccctcagagcctgtactcatggccattcttttttgacattggaggtgagatctacgacccagatctgaatgcctggtcaacgatgccggatggtctcggcgatggatggccagccagacaggcaggcacaaagttgggtgttgtgatcgatgacagactttacacgctagagccttccagctctttggacagtggtaagataaaaagatacgactccgaggaggacgcatgggtaactatcaccccacaagttccagttaatgatttcactggtgcagaggccccttatttactcgctggcctcggtggaaggctccatgttataacaaaggcggcgaacaacactcttcaagttatgcaggctgtggtgcagaataactcggtatctgaagaaaatgtggtatggacaacagtggcttctaggaactttgggacggctgagcttgtcagctgccaggttctagatgtttaaaatgtgggtcgcaagttacgctttgtagaggatatagtatgccatagaccaacgatttagccaagaaaaatattacatagtttttgctttgtgtgtgtgtggaacaagagttcaatttgacgtggagggagatcaattacagatattcagatatgtataactgtataagctaactcatttgctgggacactgtgtatagacatacgatcgacgtgtt

SEQ ID NO: 25022 - DNA, 1890 bp, Zea mays
  Clone ID: LIB3689-238-C11_FLI
tataactccacctccatccactccagctctactcctctccccgagtcctctcctctccggggtattgaattcgaaccaaaaaatcaaaacaactcagcgattcgattcgcggcgagtcaagcgggatgccgccgcgcacggctccggcggcgacctcaaccccgccgcggaaggtgcccctccggaagctgctgcgtgcggcgtcggtcgcctgcggggtgcagttcggctgggcgctgcagctgtcgttgctgaccccgtacgtgcaggagctgggcatcccgcacgcctttgccagtctcgtctggctgtgcggtccgctgtccggcctcctcgtccagcccctcgtcggccacctctccgaccgcatcggccccgccgcttcgccgctcgggcgccgcaggcccttcatcgccgccggcgccgcgtgcatcgccgcagccgtgctcaccgtcggcttctccgctgacctcggccgactcttcggcgacgacgtcaccccgggctcaacgcgcctcggcgccatctgcgtctaccttgtaggattctggctgctcgacgtgggcaacaacggcacgcaggggccctgcagggcgttcctcgccgacctcacagagaatgacccaaggaggactcggatcgctaatgcatacttttcactcttcatggccctgggaaacatacttggatatgccaccggagcatacagtggatggtattcgatatttcctttcactgttacagagtcctgcggcatcagttgtgccaaccttaagtctgcctttcttcttgacattattgttctggtcatcacaacgtacactactgtaacatccgtgcaagaacctcaaacttttggaagtgatgaagcacaaaatccaggtgctgaacaggaagctttcctctgggaactttttgggtcattaagatacttcaccctaccaatttggatggtcttaattgtcactgcccttacttggatggcatggtttccttttaccctctttgatactgattggatgggccgagaaatctatcgaggaagcccagacaacccaggagagacccaaaggtaccatgatggtgtgagaatgggttcttttggtctaatgctcaactctgtcgtccttggattcacctctgttgtgctagaaaagttatgtaggaagtggggagctggacttgtatggggtgtctccaatattctaatgactttgtgcttcttggcaatgcttgtaataacatatgttgcaaagaacatggattatccatccagtggtgcacctccgactggcattgtcgttgcttctttggtggtttttacaattttaggggcacccctggcgatcacatacagtataccatatgcaatggctgctagtcgtgttgaaaatctcggtcttggccaaggcctagcaatgggtattctcaatttagctattgtcataccacaggttattgtgtcacttggcagtggcccatgggatcagctgtttggcggtggaaatgcacccgcttttgcggtggcagccggtgcatctttcatcggtgggctggtggctattctggggcttcctcgggcacgcattgcatcctcgtcctccaggaggagaggcgggacacaccgataagtctgctcatttaccattacaggcatcatcaagtctggaaactctttgtgggttggagaagagcacgctgggagctcttgaatgctgtgtgctctttggtggtttgccccgttgagctattttttgccttgtctccaaatcttttgttgttcaattcaactcgaatgtatgtacgcacgtatgcatgtatgtatttgtatgtatgtggatcatttgtagagagcttaagcaatgaataaaagttacaggagttacgttc

SEQ ID NO: 25023 - DNA, 977 bp, Zea mays
  Clone ID: LIB3689-238-F1_FLI
caagacacgaggacagggggggaagctgcaggagggagacgagcagccggcggtgagagcaacccggccccgccccgccccaatggagacgcaagtggcggctccgccacaccaccaccagcagcagcagcagaaggcggccaacctggcgcgtaccttcaccaagctgctccgccgcaagcgcgccgaggccgcggcgcagggcggcgcgcccgaggcgcccgcttctgtggctccgggagacgcgttggaggaggagcggacggagcctccgcccgccatcccgtccctcagcaagctcaagctgtcggggaacctcgccgccgcctactcgttcgacgccttcttccgcaacgccgccgagaagaaggcggcggcggcgggagggggagcggtccggcaggctgcgggtgcgggggaggtgacgctggaggccgcggcggatgcgctgctggccaacctcttcgcgggggtctcggcggtgaaggcggcgtacgcgcagctgcagctcgcgcagttcccctacgacgcggaggcgatccagtccgcggacgccgccgtggtcgccgagctcacgaggctctccgacaccaagcggaggtacctgagggaccccgccgccgcggcccggggcgcggcggcggcgggccacaccgcgctcgcggcgcacgccgaggagcagcgccacctcctcaagacgtaccagatcacggcgcgcaagctggagtcggacctccgggccagggacgccgaggccgagcgcgccaggagctccctcaccgccgagctccgcgccgagcgcgccctggaggcgcggctccacccggggcggaccctggcgtcgctggacgagctccacctctccggcctgaacccgacccacttcctgaccgcgctgcggcacacggtgaagtcgatccggtccttctccaggtcgatgctgagctcgatgcagtccgccgggtgggatctgggcg

SEQ ID NO: 25024 - DNA, 1031 bp, Zea mays
  Clone ID: LIB3689-238-F12_FLI
agcggcgactgggtacctcccgactgttttcgacggctcgtctcccggcgccggcaagtttgggtacctgaagagtaggcacttacatgggccgcaagatgatcaagtgtgctgcatccaacctactttcagaattgttgctctcgtgtacgtctacgcaaccaggcgactcaagtcccgacgaatatgaaggacatggcgtcgacctcctgaaatctgaagcgtcaatggagtatctatgcaacttaccaccacataggtatgaagctgttttcgcgaaagaaattccggagacgatcactggcgatgcgtttttagagaagtatggagaccacaacgatgcggtaacagaagttgacccaaagcggtcttactgtgtcaaggctcctactagacatcccatatacgagaacttccgagtcgaggccttcaaagcgttgctaacagctgccaaaacagacgagcagctctcagcccttggagagctgatgttccagtgccactacagctacaacgcttgcgggctcggctctgacggcacagacaggctagtgaatctagttcaagaaatccggcacaggaagagctcgcgcgccggagggcccagcctgttcggcgcgaagatcaccggcggagggtccggcggctcggtctgcgtgatggggaagaactgcctgaaaagcagcgaggagatactcgagatccagaagaggtacaaagcggcgactgggtacctcccgactgttttcgacggctcgtctcccggcgccggcaagtttgggtacctgaagattcggcgccggtccacgtcgccgtctgattgaaggaggaggaggaagagctcttctcggtcggccgtaccctcacggtcgtattgattgtatcgtatcccacgcgctacgcccaagatgccaataaatgggacaaagattgatcggcaataataatactagtagccatagaaaactctagtgataagctgcgaaacaacttgtatgtcgaagaaaatatttgaaaccatggtatctttg

SEQ ID NO: 25025 - DNA, 2765 bp, Zea mays
  Clone ID: LIB3689-238-G4_FLI
cgacgcggagcggaagccccagtggccagtgcccaccaccttcacgcctcctcgcgtcgtcgcaaccgcagatctggccaacggcccccgaccgatcgacccccctccccctcggcgcggcgaggcgcagcaattcaagtgcatcaccgttgttacttccataacgtgctaacagtcaaatttgtcaagctactgttgatgctccagatatagtagaaaaccatgggagaagttagtgatgataattccaacatgtcctttctaaaaagaatcgctacaagtgacgtgccgctgttgaaagagtatggtgtgaacggagttgttgtcgccctgcttctggctgtagttactcctgtcctgctttccatgatgtttggtaagaagacaaagcaaagggcggtgcgagctgatgtgggtggagaggagggatttgcaatgcggaacaacaggttttcctccttagttgaagtcccatgggagggcgccacgacaatgtcagctctgttcgagatggccagcaaaaagtactctcgacggaggtgtcttggcacgaggaagctaattaagagggaatttatggaatcttctgatggtaggaagtttgagaaactgcaccttggtgaatatgaatgggatacctacactgaggcatttaatcgcgcatgtaatttttcttctggacttatcaagatgggccacgacctagatagtcatgctgctatcttctctgatacaagagctgagtggatcattgctgctcagggatgcttccgacaaaatttaacggttgtaacaatatatgcatctcttggtgaggatgcattggtgcattcactaaatgagacacaggtttcaactctgatatgtgattcgaagcaacttaagaagatacctgcaatcagctctaaattgcagagtcttaggcgtattatctatattgaggatgaacctgtcgaggctgagacactgaaccaaatgaagcatttgacaacattgtctttcactgaagtagaggagcttggcaagacatctcatgttgatgcaaggttaccttcaggctctgatactgcagttatcatgtatacaagcggaagtactggtcttcccaagggtgtaatgatcacacatggcaacatggtggccacaactgcagcagtcatgacaatagtcccaaaccttggcatgaatgatgtttatctggcttatcttccattggctcatgtctttgaactagcaggggagactgtcatgttagcttctggcagtgccattggatatggttcagcattgactatgactgatacatcgaacaagattaagaagggaacaaaaggagatgtttctgtactgaatcctactcttatgatttcagttcctgcaattttggatcgtatcagagatgcagtatttaagaaagttggtgagaagggtggcctgacaaaaaagctgtttgatttttcatataagcgaaatattgcagcaattgaagggagttggtttggatcttgggcaccagagaggatgttatgggatcacattatttataaaccaatacgggcaatgctcggaggacgtctaagatttgttctttgtggtggtgcacctctgtcaagtgacacacaaagatttatgaatatatgtctaggtgtcccagtgggtcaaggctatggattgactgaaacttgtgctggagcagctttcactgaatgggatgatacaaatgtgggtcgtgttggtccaccacttccttgctgctatgtgaagcttgtctcatgggaagaaggtggttacaagatttctgattctccgatgccgagaggagaggtcgtggttggcggacacagtataacaaaaggttatttcaacaatgaagcaaagacgaacgaagtatacaaggttgatgagaggggcatacgctggttctacactggtgatattggtcagttccatcctgatgggtgccttgagattattgacaggaaaaaagatatagtaaagcttcagcatggagaatatgtgtctcttggcaaggttgaatcggctctagcaacaagcaactatgtggagaacatcatggtttatgccgatccatttcataactactgtgttgccctggttgttccagcgcaccaggccttggagaagtgggctcagaattccgggataaactatgaaggctttgcagagctttgccaaaacgaccgagcaattaaggaggttcagcaatcgctatcaaaggccgcaaaagcagcgaggctcgagaaattcgaggtgccagcgaagatcgtgctgttgcctgaaccgtggacgccggagtccgggctggtgaccgcagcgcttaaactgaagagggagcaaataaaggccaaattcaaagacgatctggacaagctctaccactgaagaagcgacagaggacggtttaatttgcacctaccgcttccagacgcttgcggtgccaaaagctgcctggatggaacttttactgacctgcacgagtggtgtgtgtgtgtgtgtgtgtctcccagctgccgatacacaggactacaggagcttcgttcttctgtgatgactgaggaaaaataaacccagtgttggaatgatcttgatttgtaatagcttcacgtcatgggattttaattttgttatagcacagaggatgctcaatttcacgtccgttacgggtcagttatgacactaagcatattgtaaatgatgttttttttatatagacacacaataaataggccctgggcacatcccct

SEQ ID NO: 25026 - DNA, 774 bp, Zea mays
  Clone ID: LIB3689-238-H1_FLI
cggaggcggccacggcggggacggccaaggtcacgccggcctcgtctggcggcgtcagcctcagcgacgtgctctggccttctgccggagcattcctggccatggcggtactggggaaaatggaccagatggtggcgttcaagggagtatccttgacgattgcgccccttggagcagtctgctgcgtgcttttcagcgctccagactcgcctgcggccaagaaatacaatatgttcgtcgcgcagattgcttgcgcggcctttggcgtattagccctctcgttgtttgggcctggctggttagcgagaggcgccgctctttcagcctgcatagcattcatgaccctcgccgactacaacatccagaaggagagcaccctccacctggtgctccgcttgcgaggtggtatgcagatctttgtgaagaccttgactggcaagaccataaccctggaggttgagagctccagctgcgagcttgcccctcttgtttatcgatggccccaagtttcacagtttgcagctttggtacgcgcttttccctggagctgcaggctgcatcgtcctttgcttgattcaagaggtggtggtttacctgaagaagaacttcaagttttgactcaagcagcttgacgctatggatttttgtggaagtggtccgattaattattcaatcatgtaacataaattacattgcctgcatttgcgataaagttgtgaaaatgaaggtttactgtctcctgtcttggttaaagaagaaagaagactttccttg

SEQ ID NO: 25027 - DNA, 1916 bp, Zea mays
  Clone ID: LIB3689-239-A4_FLI
gagagggggaaggaaccgcctccgctaatctctcgatctatgtatgcatgcgtggtgcggaaggagtcaggagcgagaggagaggactcgggcaaagcagcaaccgccgccccctgcgaaccgctcgttcgccggcccttgatttataaaaggagccgaggcctgttcctcacttgagaagaagacaagtgagaacaatcatatatatattgttgcttaaagagaagagaagagaagagaagatcgacaagagattggcggtaatggactcctcggagctgcacatactggccttgcagagggtgaagcaggtggagccggagaacgcgagcaagatcctcggctgcatcctcctggaggaacccgacaaccaggatatgctgcagctcgcctacggcaacgacgccgaggtgcacgccaagatcagccacgccaaggccatgctggacgccatcgtcgcgtgctgctcctcctcgccggccttcggctaccactactggccgccggtgcccaataaggcgcaggcagaggagtacgcgttgcagccgcagcactacagtggcggagggtgctactacgcctctgagaacgcgctcatctacaatggcggggggccgccgaggtccaggctgtcgtcgacgcggcgcccctgccactacttcatcaagggaatctgcaagaacgggcagagctgccactactcgcaccaccggcaggaggcccaggtctgctccggcgcgctggagaagctggagctggagatcattgagctgctcaagtcgcggcacgggcagccgctgtccatcgcgtcgctgcccacgctatacggcgacaggtacgggaagagcctaaaggccgatggctacctcacggagagcaagcggcatgggaaggccggctacagcctgagcaggctcatctcccgactcagcaagatcacaaccatagaaaggccgcacgggcagcactatgtggttctggcggaggacgccggcaggtacaaggagttgatgagcaggggcgagagaggaggagacatgggcagcagctcgcaccaggtatacctcaccttcccttcagagagcaccttcatggaggaagacgtggccaattacttcggtttgtatggttcggtgcgcgacgtgaggatcccatggcaggagaaacggatgtttggcttcgtgagcttccacaatccggagacggtgaacaccatactcacgatgcgcatcccacatttcatcggcgaatcaagggtcctggtcaaacgctacatagagaaatccaagtgcatcgaacgctatcgtccgagggcgcttcgtcgcttcgtcggcatggacatggacatggacatgaacgacgatgatgatgactacgacgaccagcctccagcccggatggtgatgaggaatcagcaacgactactggcgacggagaagcggctgatcgagctcgagaggaagcgcttcttcgcgatgccgccgcagcagtaccagcacgtctacttcgactgcagcatcggggacgacgacggccagggccagccaccaccacgacatcttcccctcatcataacccaaccagctcgggcaagcagcagcagcagttacgacgacgacgacgacgacatccaactcccagaaagcccattcacgtcgtcagccgtgccgatgctgatgtaatgggccgggaaagggaaaccaaggtccacttaattagcttcctttgttacacaggacaggacaggacacaaaaacaccctcttttttgttgtagatataaacaaattaagggagtcacagtacacagagagagttggtgttcttagaatgcaggcacactggtgagttttaaacaagggtgccagaaagaattacttattagctgtgccataataataataagatcgtcgtctc

SEQ ID NO: 25028 - DNA, 1187 bp, Zea mays
  Clone ID: LIB3689-239-A6_FLI
cttcttctctcacctcctccccatcgtcgtcgtcgcggccatcgcgggcgcggcgccactggacccgcagcaggagaagggaagactcaaacgagggatctccgagagaggagtgtggtaggcaggaagaaagaataaggcgagccgagagccattcgcatggaggcggcgatggatctgatgcggcggatgccgccacggagcgcggagacggcgctcaacgcgctgctctccctcctccccgaccactccctcgacctcctctcccaggtttgcatggataaggagagcctgaaggaatacattctatgcgaatataaccgtgatgctgactcctaccgatctccttggtcaaacaaatatgacccccctttggaagatgggacagttccttctcaagggatgaggaatcttgaggttgaggcaaacgaagttttctcagtgtatcgtgaccagtactatgaaggtggcatctcatctgtttacatttgggaggatgaagataatgggtttatcgcatgcttcttaattaagaaagatggacaaggaaaaagagggtacatgcagattggttcatgggatgctattcatgttgttcaggttggtcctgaagaagaaggagcggcacattactgcttgaacagcactgtgatgctctcattgacaacagacaacaagcagtctggaaccttcaacctgtctggatccattagacggcagatgagtatgactcttgctgtagctgatggacaccttgttaatatggggaaaatgatagaagaaatggaggggaagctgagaaattcactggaccaagtttattttgggaagaccagagaaatggtttgcactcttcggccaccaccagaagttcttaatatgagactacctgacagctgagccagtgcatagaagtgtcaacttaacaaagaaaaacgtattcttctccactctaggcgtggtctgttcttgcttcgtagttaatagtctgtgcatctgtatcgacatctgttgaggtatctatgataggagcttattatcttctgatcttttgtgattagctgtaatccgcgaagtgtttgacaggagccagtgtttgcagtggaactcagttaccaacagatgaatctccacaaaacgttgtgttggcgttctgtatcttctgaagaatctgatggtgttgtggc

SEQ ID NO: 25029 - DNA, 2856 bp, Zea mays
  Clone ID: LIB3689-239-A7_FLI
tcgccgccgcgccgcgccgcacgcccccgcctccgcccgcccttcgctcgcccccgcctacctctgcccgcgatgctacttcgatgccgctccttcgatcccccgtccccgcgatggccgtcacccccacccctcgcgacgccgcgatgcccgcgcttgctctgccttcttcgctgcgtctcgcactcgtgacgctgcccccctccccaacctgctccgccccctccgcgtggacgtcgtcccccgtcgtccttgcctcgccgattccctgctccgtcccaccgggcatccccggggtccgcacccaagacgcctccccgttgtcctcacttcctccctccaacgcctgttgcctgtctcactccacggcatggatctggaatggtggatccctcactgaggccctgaatcccgcaaccaatgtcgccttcttctcccccctcccctctgcacgacattgcctccccagtcggcggctgaggtgcagcgccaagtggccaagtgtaccatctactcgatccaggtatccagccacgcccacggcccaccagaggccaggatccttccgtggaggaggcgcacgagagaagcaggcagatcagccaccaatgctgaaggtgggctaggggttatccagagatgacaaggccctcaagttggctttccagcactggatcgaagcgatgagtacaaacgggcagtggagattgactccaactgacagagttaaaacaaagatgaagcttcaccttatagagacaggccaaccaagaggctgaacagagctgtgcaggtgagcatgcattcattatattcccatagttgatattctttgtggtactacatctatggcagatttagtcgctgctgccatacaccagatgcccagatcttcttcaggcccttcgtcggcgaggagtatcacaaggtggccgaggcgtgaggctgacggtggtgctggtagtccgcaaggaaccggatttggacgcgctctccctcgtcactaggtaagagacccaggagtgctggcaggaaaagatcgattttgcaatataattatcattgaagacccaatttactatgttacaccccttggcttccgatgaggtggccgaggcgtgaggctgacggtggtgctggtagtccgcaaggaaccggatttggacgcgctctccctcgtcactaggtttggctacaaatggataagtcatcaaatctcctgagacagtacttcagcaacttgcacgatcaactgagtacacgtcctttttccacagtcaggttgcaaagaaatggcttgatttttaggatagaatgagacggcatgggcaatatggtgaagcggatattaactccatggtcgttgcgagttgcatcactaccaggcacaacaaagggtacagaaacaccatgagaatagctacactggaagagatcctgcacaagcttctgcggagcatcagtacactccccctaaggcaagacaaagtcaatgggatcgaggtggaccaaatgtgccaagccaggttccatcatatgttggatcgaggttatggctccacctttgcaccaactgcagcagcgcctacttcgcccccccaccccccatgcctggcagtgccaagcaaagcaagacttctgtagagttatgcgtccttgcttgctttcacatttgggtgtgttctgctataatttacggtaagaattgaagacaatgatgtcggcatccctccagacactggcatgcttctcaattctgtctgcccttatgatccgatctgtggagggaagcataccaatgccttgaaggagatgagtgagccattgaagattttcaagcagcttgatggcatcaaatctgttttggaaaaaaggaaagctattctgtctgaaaagattagcagagaagaaaggatgccggcgggggagacgagacatgctggagaatgggtaccattattactggaatgtgcaccagctgaagctgattgattgagcctttaaataaataaataaaaaggctggtaaaattaaacctgtatcagtggttgcaaccgaatggtggtccacgtgattccctgcaggatgaggcacctagctagctgttggattcctgcacgaggccaagaagaagccgtgcggacgatgcaccgaacgaatgctcgcatgaaattgaatgaacacacacacagggagggaatgaaggaaggaagctccggtattgatccgccggccgacagatgctgtctgatcaacactacactatgatgagtctatgacatgagtggagtggagggacggtgcacatgcatcttgggcagtctgcagtgtgcagcaaggacgagagcatgcggtttgcttttggcggctctattctacctgcaactgcaactgcaactcatcagcagggagggaaggtagaagaggagcaacatgtaggaggtacagtaacaacaagctagcatgccaagtaacacactactgttcctgtcgcgtacagtacgtccattctacgtactgggatctgggaatgggatgctggtgcagcagtacgtagcagagagccagcagcaccgggggtccagtccaggggcctgcctaccctcctctctataccgtctgcatcaagacgtgcatctaaaggtcaacagaaagaaagatgcatgcagctagcatcgtcgggccaccgacggtttgacaatgtgctccatgttggagagagactgattaataatgtatgcctgccttctcaccctgactttattattcttagcatttaaatcatgtactgtaaaaaatcaccaatatatatatgcactgaaagaggaaacgggcacacagtaccctttttatgtc

SEQ ID NO: 25030 - DNA, 1490 bp, Zea mays
  Clone ID: LIB3689-239-B5_FLI
gccaccgcatcaccgtgctgtgctgcggcggcctcgtcctcctcctcctcctgcccgtcaagatcatggacgccgccgccgacgacaagccggaaatctccgacgacacggcccaccagattagcgttgatccttggtatcaagttggcttcgtcctcacaaccggggtcaacagcgcatacgttctaggatactctggatcaatcatggtccctctaggctggatcggcggcacatgcggcctcctcctagctgccgccatatccatgtacgctaatgctcttcttgcacggcttcatgaagtcggtggcaaacgccatatcagatacagagaccttgctggacacatatatggaccgaaaatttacgggcttacatgggctctgcagtacattaaccttttcatgatcaacactggctttatcatcttagctggacaagctctcaaggccacgtatggactgttcagtgatgatggagttctgaaactcccttactgcattgcgatatcaggattcgtctgtgctcttttcgccattggaatcccttatttatctgccctcaggatttggttggggttctccacgcttttcagcctcatgtatattgtgatagcagttgtgctgtcgtcgagagatgggataaccgcacctgcaagggattacagcatccccaaatcatcgcagtcaactcgagtcttcactacgataggttccatagcagaccttgtgtttgcttacaacaccggcatgctgccagaaattcaggcaaccatcaggcctcctgtggtgaagaacatggagaaagctctatggttccagttcaccattggctccttgcctctctatgctgtagtttttgtgggttactgggcttatgggtcctcaacatcaggctacctcctcaacagtgtcacaggcccagtctgggtgaaagcggttgcaaatctgtcggcattttttcagacagtcatagcgctgcacatctttgctagccccatgtatgaattcctggacacaaaatatggaagtgggcgtggtggcccttttgagatccacaacgtggcgttcagagtagcagtcagaggaggctacctgacggtgaacacgctggtggccgcggtgctcccattcctcggcgacttcatgagcctgacggggctctcagcaccttcccgctgacgtttgtgctcgcaaatcacatgtacctgatggtgaaggggcctaagctgggtgccatccagaaatcatggcactggctcaatgttcttgggttcactgcgctggctgttgcagcggcggtctccgcaataaggctcatcatgcgtgattccagcacctaccacttcttcgctgatctttgagatcgatcgttttcttttctttttgttggaatgctgagccagagctagtattttttcattttcagagaattattatccatgtatgtaaggatgacgcatatatatattgaatagatgatttaagatc

SEQ ID NO: 25031 - DNA, 1327 bp, Zea mays
  Clone ID: LIB3689-239-B6_FLI
ctcactcctcagctccgaccttcacggggcccacggggcccgacgcccggtggctttactcagggcaccatggccttctcttcgtcactggcgccgttcttcccaccttctggaaccttccgagcccatcccgctaggaggctgcgggccgatgcacccgggagattcgtggcgtcctgcttgccccctcccgacgtcgtggtgacgcgcgagcagggaaagaacgccaggctcatctccgcgctggtaagtctcccaatggatcctttgttcattgtactttcttgttgaaatcagattgttgaaggcccggaggggtggcaggacgaacggcttgggcgctattggtgctgtggaaaagcataatgtacaccctctggaacttccacttattaagcatgttgaaggccctgatacagataggctttcagatgtcctacgtaatgacaagttcgactggattattgtaacctctcctgaggcagctgcagtgttccttcagggatggaagactgctggaagtcctaaggtgcgagtagctgttgttggagaaggaactgcaagggtttttcatgaagtatcagaatctgatgatcaatctctagagcttgcattttcaccttccaaagctttgggtaaagtcttggcttcagagcttccaagaagcaacgggaactcatgtaaagtattgtaccctgcatctgcaaaggctggccatgaaattggcttcatgatacttgattatttgcaatgcagaggatgtgctatcagaacgaggatttgacgtgacccgactgaatacatatacaactgttcctgtagaagatgtcgacccactgacattaaaccttgctatatcagctccagttgttgcggtagcttctccttctgcactgagggcatggctaaatcttatctcaaaatctgataactggaacaactccgtcgcctgcatcggtgagaccactgcatctgcagcgaagaaactgggcctgaagagcatatattacccaacgacccctggacttgaggggtgggtcgagagcattctcgaggcgctcagagtccacaggacagcatcaaaagaggccccaaaacgttgaaaacgggcggatggcggagcttcttcttggcgttggtagccgtccgtccgcagtgtcgaagaaattctttgctttctttgacgacaattgccccccgttgagggcaggtggtggtgtcaagccatggctttccactggcccagtttgtaatggattcttgggccgaaaggcccatctctacatgtcttgactcgcaaggcgattgcatcagtccatgtccatcc

SEQ ID NO: 25032 - DNA, 1155 bp, Zea mays
  Clone ID: LIB3689-239-B8_FLI
gcagccatcccctcccgcggcaagtctctctgaattgtgggtctccggcgatggcggctctagctccatccaagattctgggcaccaagctcaacttcgccggctcctcccgctacgccacggcagcgcccaccgcgggggctcagaagatcgtctccctcttcagcaagaagcctgcccagaagcccaagccctctgcggtgtcgtcctcttctccggacatcagcgacgagctcgccaagtggtacggtcctgacaggaggatctacctgccggatgggctcttggaccgctcggaggtaccggagtacctcaccggagaggtccctggagactatggctacgacccttttggcctgggcaagaagccagaggacttcgccaagtaccaggcctacgagctgatccatgccagatgggccatgctcggtgccgctggcgctgtcatcccagaggcgtgcaacaagttcggcgctaactgcggccccgaggccgtctggttcaagaccggcgccctgctcctggacggcaacaccctcagctatttcggcaacagcatccccatcaacctggtggtcgccgtgatcgcggaggtcgtcctcgtcggcggcgccgagtactaccggatcatcaacggactggacctcgaggacaagctgcaccccggtggccccttcgaccccctgggcttggccagcgaccccgaccaggccgccatcctcaaggtgaaggagatcaagaacggccggctcgccatgttctccatgttcgccttcttcatccaggcctacgtcaccggcgaaggccccgtcgagaacctcgccaagcacctcagcgaccccttcggcaacaacctgctcaccgtcatctccggcgccgccgagaggacgcccagcctgtgaggacgcgccacaagccggcagcgatgccaagtcatgcgctgctgccgtccttgattttaccggggaaagagctgtgtgtgagggtctgaagtgaagaacgtgccatgcccatgcgtgtacattatcgagagggggaagaaaccttctcattctgatctctgatatgactgctgcttcagattgcgcctgagatatgctaagttttttaaagctaattagttcgtgcacattaagggtgtgtttgagttggatt

SEQ ID NO: 25033 - DNA, 1387 bp, Zea mays
  Clone ID: LIB3689-239-F1_FLI
ctaagaacggcaagagccagctctgcctagcagcagcgcacagccacatccatggacgccagcccgaccccaccgctccccctccgcgccccaactcccagcattgacctccccgctggcaaggacagggccgacgcggcggctaacaaggccgcggctgtgttcgacctgcgccgggagcccaagatcccggagccattcctgtggccgcacgaagaggcgcggccgacctcggccgcggagctggaggtgccggtggtggacgtgggcgtgctgcgcaatggcgacggcgcggggctccgccgcgccgcggcgcaagtggcggcggcgtgcgcgacgcacgggttcttccaggtgtgcgggcacggcgtggacgcggcgctggggcgcgccgcgctggacggcgccagcgacttcttccggctgccgctggctgagaagcagcgggcccggcgcgtccccggcaccgtgtccgggtacacgagcgcgcacgccgaccggttcgcgtccaagctcccctggaaggagaccctgtccttcggcttccacgacggcgccgcggcgcccgtcgtcgtggactacttcaccggcaccctcggccaagatttcgagccagtggggcgggtgtaccagaggtactgcgaggagatgaaggagctgtcgctgacgatcatggagctgctggagctgagcctgggcgtggagcgcggctactaccgggagttcttcgaggacagccgctccatcatgcggtgcaactactacccgccgtgcccggtgccggagcgcacgctgggcacgggcccgcactgcgaccccacggcgctgaccatcctcctgcaggacgacgtcggcgggctggaggtcctggtggacggcgagtggcgccccgtccggcccgtcccaggcgccatggtcatcaacatcggcgacaccttcatggcgctgtccaacgggcggtacaagagctgcctgcaccgcgcggtggtgaaccggcggcaggagcggcaatcgctggccttcttcctgtgcccgcgcgaggaccgggtggtgcgcccgccggccagcgccgcgccgcggcagtacccggacttcacctgggccgacctcatgcgcttcacgcagcgccactaccgcgccgacacccgcacgctggacgccttcacccgctggctctcccacggcccggcggcggcggctccctgcacctaacgagccggccgtctctttcgccggggcccgcgcggggttcgcccacgtggtgatcaggtggcagacatgtggcccacgggccccgcgccgccttccccatttttggacgaccctactgctactactactagtgtacatatgcaaaaaaatacatatatatataggtactttctct

SEQ ID NO: 25034 - DNA, 1635 bp, Zea mays
  Clone ID: LIB3689-239-G2_FLI
gctcgcgcccaaggcgctcgcggcgtaccaccagcctgcgctcatcctccaccagcgacgccggcatggaccgccccccgtcgccgcggtcactgcctccaagccggttctcaaggacccgaagaagtaccaggagtgggactccatgacggccaagttcgccggcgccgccaacatccccttcctactgctccagctcccgcagatcgtcctcaacacccgcaacctcctcgccggcaacaagaccgcgctcttcgccgtgccgtggcttggaatgctcactgggctgctgggcaacctctcgctcctctcctatttcgccaagaagaaggaaacggaggctgtcatcgtgcagactcttggcgtcatctccacctatgcggtcctcgtgcagctcgccatggcggagtccatgccggtgccgcagttcgtggccacttcggttgttgtggccgcaggactcatcctaaacttcctcaactactttggctggctccctggaaccctcttgctgatgtgggaggatttcattacagtcggcggccttgccgtgctccctcaggtcatgtggtcaacttttgttcccttcatccccaatagcgtactgcctggcataatctctggttctttagctgttgcagctgttgcgatggcaaggatgggcaagctttccaatgcaggggttaaatttgttgggtcattgtctggttggacagccacacttctcttcatgtggatgccagtggcacagatgtggacaaattaccttaacccaagtaacatcaaagggctgtcagctttcagcatgttgcttgcaatgcttggaaacggacttatgattcctcgcgctgtattcatccgtgatttgatgtggttcactggttctgcatgggcatctgtcctacagggttggggtaacctggcctgcatgtactgctttaatagcatcagcggagaagttttctttgcaacatcagctggtctgcttctatggctaggatttactctatggagagatgccattgcctatggcaacagctcgcccttgtcttccttgaaggagctgttttttgggaagtgatgaaccgtcggcaaccttgtttctcttgcactttaagcagctaactgttcccgggtaggacgctctcctgcaataaatcatggtagctgttaagaacggtggttcagttgctctcatatggtctgaagaaacggtgcttcagtctttagcattttgaggaggaaacgtgaaacttactggtcagctgaaagctataaacattgccatggccctggactggaagccccaactttcccaagcctgtagaaagcgccatgtgcctctacagaagccaccgcgtgatgaccagcttcatccggcagggtgggtacagtagctagctatagccctagtctgatgtaagaacaaatttatattatccatcccatattgtctttaattagattcttttttgaaaccaatgcaatttcagctcttgctgtcgtgcaaatttgtaccattgtccatggatgagtagatgacctgggagaatcacacaatacatattgtaattgtaaaggctctcaggcctactggctatatatataacctatagttcttaggaactaatcatc

SEQ ID NO: 25035 - DNA, 1099 bp, Zea mays
  Clone ID: LIB3689-239-G6_FLI
ctctcgtcgtcttgccgccgatcctttttccgaaacctagctcgcccgcccgacctccgaccttctagaaccttgcctccgaggtgccgccctccccgccccgcctgcgccgcttgctcatcgcttctctccccgcggcggcctcccagatccggttggatcgaggggcaaggtcaagagatggggcaggccttccgaaagctgtttgatgccttcttcggcaacaaggagatgcgggtggtgatgcttgggttggatgcagctgggaaaaccaccatactctataagcttcacattggtgaagttctctccactgtccctaccataggtttcaatgttgagaaggttcagtacaagaatgtagtgttcaccgtgtgggatgttggtggccaggagaagctcaggcccctgtggaggcactacttcaacaacactgatgctctgatttacgtggttgattcactggatagagagagaatcgggagagccagggcggagtttcaggctataatcaatgacccttttatgcttaacagtgtgttattggtgtttgctaacaagcaagacatgaggggagcaatgactccgatggaagtgtgtgagggccttgggctgtatgacctgacgaaccgcatctggcacatccagggcacctgtgctctaaaaggcgatggcctgtatgaagggttggactggctagcgactactctggacgaaatgcgtgcctctggacggttaacctcagcatcatcatcggcatcctgaatcacgtgtaacaggagggacaaacgatttgatcctcgtgatacgcccattgaaggatcatcttgtgattcaggctttgcgcgctttgttttcttttgtgtttccccaattgctgttggctatacatgtgtgctatgaactgggtggtgcatctggcaaggctaggtagtcagagttacagacgccggttccgtggtgacgatgtcagtacggtggtggtgtcgtactcgtctgctagtcggaagcaggcatcatcatccatctcgtcgcttgtgtgtgggagtgactgtaaatactaccactgatgacatggctctcgtggtttcttcgtctg

SEQ ID NO: 25036 - DNA, 1940 bp, Zea mays
  Clone ID: LIB3689-239-H8_FLI
gtccgccaccgccttccccctccctcgaatcattcgattcgcctcccgtcgtctcgtccgcctgattctactcggccgtcacggtgatcggagccggctagggttagggttccgtacttccgttgatctccacgcccatggtgcagctgccgagctccggtaagcggcacgcggaaccggccgagcagacgatggctccggcgcggcgcgcggcggcggtcaagctggaggtggaggagctcggggccaacgagcgcggcccgctcagcaagcgcgccaggccagctcagccgatgcccccgacgcctccgcagccgcagcaggatatgtaccacaatgtacttgatgaacctagcccattgggtctgcggctgaaaaaaagcccatcactcttggatttgattcagatgagactttctcaagcatccaacgctggggagtcttccatggacaacagtggttctgagccttccaagaagaaagacagtaaatccggtgtgtcttcagcaggcgaacggctaaaagcttcgaattttcctgcaaatatattgaagattggttcatgggagtatgtctcacggtatgaaggtgatttggtggcgaagtgttactttgcaaagcataaacttgtgtgggaagttctggaaggtggccttaaaagtaagatagaaattcaatggtcagatattgctgctttgaaggcaatttgccccgaaaatggccaaggaaccttggacgtggtgttggccaggccacctcttttctttaaagagacagatccgcagccaaggaaacacacactgtggcaggctgcctcagatttcactggtgggcaagcaagtatgcacaggcggcattttctgcagtgcccttcaaccttgttaagcaagaattttgagaagcttattcagtgtgatcagcggttatatcaattgagtcaacagccagagatcacattagaccctacattgtttgaacctaggtgcacaatatttgaggatccggttgaatcaaaatgcgctggttttactaatttgaaagatgaacatcgggctttgcctggctattcagattcggtgtcaccatgtgccggttcctccatatctgctaagaaagaaaacaatgattccataagaatgccagcagaatatcctcctcagacagtaggaataggagttggtgctgtaggtgcacaagctgtcagcagaaatgtgaatggtgcagcaccagaattcaatatccccaactggtggagtcaattgaaggtgcctgggcttagaccatccatgtcagtggatgatctggtcaaccacctaggcaactgcatctcagagcagatcacttcaggcgatccggcattggccaacaacgaggtgccaaccaaagaaacactcgaggggattgctcagtaccttcttggtgacacacaaggcccgccggttactgctgcagtcgagagatcactgatggccagggtggactccctctgctgtttgattcagaaagacacagcaccagttgccaaaccaaagcccgagccaaatgacggggacagcatcggcgtggaagcctcagatggttccgacgaagaattcacctccgcgccaacagggaaacctacagatgccaccaacccgccagccatgtcaagaaaggattcgtttggagagctgctgacaaacctcccccgcatcgcctcgctaccacagttcctcttcaagataccagagggtactgagaactgaacgtggaagttaagatccctggaataggtagtttgctgtaagcctgtaaagattgtatccaagcaataagaaagccccttatcacctcctcggaggcgtgttccccgctctgtaaatttgacaccggtaggttgctccagttgtatgttttgcgaatcatgggtagtggaaaattgaaatgttcattggttcttt

SEQ ID NO: 25037 - DNA, 936 bp, Zea mays
  Clone ID: LIB3689-240-A9_FLI
ctcgctgaattgtggcatgcgtccgtgacattctgcaccgtccatagcactggctatttttgaacgatcccctcccgttttgactccggccccgcgcgccggcgcccacctccagctccgcgtgtccctcgcttcgtcaaggtgcatgccgcacgttcgccgggtaaccgccctccttgcatcccctaacgcacactgccgcgccgccctcggtctcccctctcctctccctcccttcctcttccacggacacgggaggagaagggttgatcacgaccggggaggacgcgtggccagagatgggtctccacggaggcgtcgtcgtgctccgcgcggccgtgctcgccgccgtcctcggcttcgtcgccgctgccgggttcatctcaagtcagttaccttctgatacgcacacgccgtcgtggatctggtggtctcgggttccttcctggttcgccttctaacgcccccgccgtttcgccgtggatgcagacgacgcgctgctggagcgcgggcacgacaccaccggccggagcctgctgcaggccaagaaaggtttaaatgagaaagcctgcgtttcccctcttttttcttgacctctgccaccgccggccgtctgatcatatctggcttgcgtcgtctcggacagattgcccggtgagcttcgagggcgccaactacacggtgatcacgagccggtgtaagggcccgctgtaccagccgacgctgtgctgcggcgcgctcaaggacttcgcgtgcccttactccacctacatcaacgacgtgagcaccaactgcgccgccaccatgttcagctacatcaacctctacggcaagtacccgccgggcctcttcgccaatacctgccacgagggcgacaagggcctcacgtgccccgaggacaccccgcagatcgaacccgggcagaaggcctccggc

SEQ ID NO: 25038 - DNA, 1678 bp, Zea mays; identical to SEQ ID NO: 4238
  Clone ID: LIB3689-240-B3_FLI

SEQ ID NO: 25039 - DNA, 1924 bp, Zea mays
  Clone ID: LIB3689-240-C1_FLI
gagtcccgaccccgtcctgctcgctccgccgtccttcgcccgccacccgccacccgccggactgccaaagcccggaggcctgaggcccgagttacgcgaggagcagccgaaccagcggcccggcgcctcatccctcagcggccccgcccctggggccgtgtagtcagcaagcggccacgcgagtgcgcggtcggcgcggagtgagcaggagcaacccgtggctggcggtcagtcggtggctagctggagcctggagttgcgacttgcgagcggcgttagaactcgctccacctataatttttgtgtggctccgtcactgattccacccgttctgtggccggcgacagaggcacagagaagcgccaatccgccggcttgatctgaagcatggacagggtaagaaagggatgggcaatggttcaaagggatgtacgagcattctaaattgaattgcgcttttgttgcaagctgtgtcctccaagactgttttgcaccaactgttcgctcataaaattctgatatgcctgaatgaataacctgtttagccgttgcgtaatgcaaactagttcttatgcttgcaaaaacgaatacctgctctggtagaagatgcagcccatgaaaagggatgggcaatggttcaaagcgccaaaggaacttgcaatattaggaataagtaaatcaagtttcattgtgtctatctcattgagtgatgggaatatagaaaagtaacattgtgtatgtagttaaatatgtgtgaagggacatcataaataaatcaggtttgtttcttttttaaggtgcatacatagtttatgaaaatgtgcaacgaaatgcattggtcgttattatattagtattttaaatcttgattggaacacaatagagtaatttgggtaatctttggtagctatagttatatccatgtttatgtctgtctaccattgcagtatgaaaaggtttgttgaatgttgctttagtgagtatagcacaaagtttctgtgaaaaggcaacgtacagaaagttgctaatatggaggtaaatcaataatcaggtggaggggggaggggtgatgtactgttagctcaatgtacctgttttattataaatagtctaacaaagtcagcaatgtttttatttccctggtttctcaagttcagtatctctgaaagtccaaacggtaaccctggttgttttagcagcgattaattttgcaagtggaatatagatcaatctgaagctatgtatctgtgtgaattgtgccaagaggaaacatactcagttatttgggttcagcaagatggggtataaaccttatcaagttgcaaagtaaggctgtttctgctctccaaagagatgagtagtccgccgctacacttctgaataagatccctccaaccggtttgcctaaaaaatcatcagattacaatttgtaaacagaaaggttatacaatactatgtttatcgtacttaccaaactggaaagttcgttatctgatcgagaaagatttagagatttgtctgaatgaatgacaattaaacatccttatctacaaagtaaataacagataaataaagtatgtcaaggtggggccattttatcaccaagttttgtttgcaaggtggggccatttacaatactacctccctctcgcttcctcctctcactgcagccctcatcaccggtcgttgttggttctgccctctgttgctggagatcgtgaccatggaactcgcgtcgtcgtcctagaactcctcgcgatgttgctgctacaggctgtcatcctcatgtcaacggtggagggccttgtgcggatcgtgcaagaagctccacaagttcctcatcaataagatcaggtcaggccacactcccatctgcccgcctcacttctgagttccgactctcgagcggagcgccacagctccg

SEQ ID NO: 25040 - DNA, 1614 bp, Zea mays
  Clone ID: LIB3689-240-C2_FLI
cccccacctctccagctccgtcgctagggctccatttcccctgcacctccgccgccgccgccgcttcaacatcagaagcaccggattcggtggtgtttctcggctgcctcagcttccgccgccgggaggcccctggcggcgttcgccgccgccctccggcctttgctgagtcctctagacttgacaaggctgctgctgagtatatggtatctgcgggccattgtgctgtccatgcgagcggagagcatgcgtggcagctgtgcttcgggtgatgcccctgaccagagtagctgccgatgcattcggtgtgttgacgatcggactgttggcgctgcttgccgctctgggcctcttctgcatcttccaatcggtctacttcaggtgtcagatccggagaggaccctccttcctcccgctcggctactttaacggcccatgggtgacccgcgtcgctctggttctgatcaccatctggtggggagtaggcgaggtagcgagactgagcttcttgaagcaaaagctgttctccagcttgacatggcagaggaacatatgcgatgcgtacatactttccaacctagggttcgcggagccggggatcttcttcgcattcgctttcctgctccatggctcgttgcagaagaaggagctgggcactttaaaccagagatggaactggaagagcatggcctacacgctggttttctgcgttccagtgttctccgtgcaggcagtcctggtgttcgtcgtcgggcccaggcttgttagagactcgaaccatgatctcgggaggaggaagatcgcgaaatacttcgtacggacgcacacgccggttggagacaccagcgtctgcacctacccgttgttgggcaccatctttctcgggctcgtggatgccttcctgatgagctacgtgtcgtacgtcggatcacgggcgctgtccttggtcatcaacaagtcgctgcgaaggagggtgtacctgctgatgctgtcggtgctctgcttcctcccgaccagggtgcttctcctcggcttctcggtgctgcccaggccaggagacgctgccttcgagggcatcgtgttcctgtcgttcttgacgatgctgtcctgcacggccgtcgggatactcttgctggtctactaccctgtggccgattcgctggccctcagagacatgggccagagggacacggcggcagagatggtgccatacgatgactactactgctacgaaggcgcgtcgctcgtggccaaccggagtttccgagaactcgagcgcaactccgacacctcgacgaagccgggatccatatcgttccgcactatgatcagggaagaccagcttcagcaggacggcgccgccgacgagatcggcttctcttctcgcagcggtgcccatatcggatcaccatcacccgcaggctcttcgccgagcgcggcaatgccgatgctccctgtcaaggagatccctagatactaaggagtattcagctgtgctgtgcgttttgcccctctgtgctatgtcctctccttcaccctctttttttcccccttctcttcctcttactaccttgatgataacagttttgtggcaatcaaaaggtttttttttgt

SEQ ID NO: 25041 - DNA, 1589 bp, Zea mays
  Clone ID: LIB3689-240-D10_FLI
attataggaataggagcgggggagtccgaggataggcaactcattgcttctgaatctctctctcctcgtcgcgacgagatcctctgcatctctacttccccggggaagtagctgctggcgtgtgtatctgactctcctcatcccgagttcttcactttcaggcatggtcgccgtgaagcagctcaccggccctgccagacccgctcacacgtgcgctgctcatgctcaccagctgctcagtgctcgatacgatcaccgtggcgcgtctcaagctgaattaccggaccggatttcgccatccaacgcttccacgttctgcacgagcatgtactcgtcgtcggcggcggattcctccaagtcgtgccggcaggcaggcgctctgccgttcctgccccatcctcctaaacgtgagcagcagcagcagcagtcatccagctctccatcactgctcgtctgtactgacctcggcaacggtggtcaagacgaggctgaagcggaacatccggctgagctcaaggacttcctgaacctctctggagaagcttcatggagaggcggtttccatggagagagcagcggcgtcgctttcagattcagagagaaggtggagtttcagttcttgtctgaacagctcgggatcgccatcaccgaccacgacgagagccctcgactagatgatcaggaggacatatacgacaggccgccgcaaacctcttcttgtccggtactgtcttgctccaaccaagaagagggtctccagagggcagggtctcctgttaaagctcagctgagttcatatcgagctgcatgtaataacaagccaagactgaggtggaatctggagctccatgagcttttcgtgaaggctgtcaacaagcttggagggccagaaaaggcaactcctaagggcgtgttgaagcttatgaaggtagaaggcttgaccatctatcatgtgaagagccatttgcagaagtatcgctttgccaagtatcttccggagacaaaagaagacatgaagtcctcttcagaagacaagatgccaggaagcaatcctggcagaaagaagattctcaaaagcttacaagtagcagaagctcttcggatgcaaatggaggttcagaaacaacttcatgaacaattagaggtgcaaaggcagctacaagtgcgcatagaagaacatgcaaagtatctgcagaagatattagaacagcagaaggcaaggaattccttatcagctacgacaagttcaatacaaacagagctttctgaatctacaaaggaagagaaacctgagacacaagcggatacttcttcagctcagttgccaaataaaaagaactcagatactgacatggaatgactcataaccaaagaactcattatgttcatagccgtgatgaacaactgaacatgttgactcgccagacactttccttctctaaccttgtagaatacaagcacttctgcctagatgcttctctcttgtatcatcatccctagtgcttgaaagagttctagctagccattgtatatgatttattttcagatgaaaatgctacaaaaaaaggaggaggaccagccattcatct

SEQ ID NO: 25042 - DNA, 2627 bp, Zea mays
  Clone ID: LIB3689-240-D8_FLI
cccctccggctgcccgtgcccagacgtcgtggcgcggcggcggcggtcggtctggtagggctcccctcctttccaccagagcagaacatatagtcatagatcagtgtcacaccacgacccgccagccagaccgccacttgccaaccaacgcctttccctcctcctcctccgcctccgggcgctagcgggaatggacgccgccgagctgcccctcgtctaccacatcggcctggtgctggccgcgctctgggccgccgccgccgtcggcttccgcggctccctcctctacctcctcgccttcctctacctctacatggtaaatgctcgctgtgcagtgagactgcggaagaggatacaacatgaagagatgaaatctgcctaccaacgaaggctcctctctgatgcagaatcagcacgctggttaaaccatgcaatcgacaagatgtggcctgtctgtatggagaagatcgtttcaaaacttctacggcccatcataccatggttcttggataagttcaaaccttggacagtcagcaaagcaagtattcaggaactttacatgggcaggaatccaccaatctttacctccatgagagttctaccagagacatcagatgatgaccatttggttcttgagctgggattgaattttctttctgctgaagatatgagtgctgtacttgctatgcagctgcacaagagtgtgggacttggaatgactgcaaatatgcatttaacaagcatgcatgtcgagggaaagatattagttggtgtgaaatttgttcggagttggccatttcttggccgtgtaagactatgttttgtggagccaccttattttcagatggctgtgaaaccactcattaatcacgggctcgatgtcactgagtttccaggaatttcaggatggctggataagttgatggatactgcatttgggcagacattagttgagcccaatatgatagtaataaatgtggaaaaatttgcatctactccttcagaaaataactggttcagcattgaggagagacctcctattgcatatgtgaagcttgagattctagaaggaactgacatgaagccatctgatataaatggtgaggatgaattgtgcagcttctgtgttactcttaattggtgtaacacaattgatgatccaatgcacaggactagcggacccatatgtgaaaggtcaccttggtccttttaaattccaaacacagatacagaggaaaacattgtcccctaagtggtttgaagaatttaaaataccaatcacatcatgggaggcaacgaatgaacttgtcatggaagttcgtgataaggaccccatgtttgatgactcacttgggcaatgtaccattagtttacatgatctgagaggtggacaaagacatgacaaatggatatcactgaataatgtgaagaaaggaaggattcacttggcagtaacaattgatgatatatccgaggaccaaaatacatcaagtttggaccaatcattgaagcaagccgatactgaactaccagtatcaacatctgtttgtagcgaagtggatgctagtgaacctcctgaagaaaagaaagtcttaatggatgaagtggagcacataaacattgatggacaagaacagcctggaggtttatatgtacatcgccctggcactggggttccaaggacatgggaatcccggaaaggacgagcacgaaacccagacacacagattcaccaagaggttgacaagcaaaaggaagtcccaacaccaaaagggagtgggcaagggggtctatttaacgtaggctcctttttccggtggaactcgaggaaggggagctccagaaatctcgatgccagccctcctgcaactccgggttctcagagcgtgacagagcttgatccaaagctccctcaaactccacgtcccaacctgaaggagctaggcgagaagcggacgtcgataaagatcgtagtggacgaagaagcaagcccggcagacacggtgggaggtgcggataactcgggagaagatgtggcgaaggtgatagagaaaaatgcaggtgaaccgggcaggtcactgacaagcacattgagcaggaagatttgcagaaggagagcagatgataggctatcagatatctccgagcagattgaagctcgtggatctaagccggtgagtgaagggcctattcttgttagaggtgagccaatgataacagaggatcatccgacgacggaacatagcgatggaggtggcgctgagcaagatgcggtgggagcaaaggttgctactcagatctcgtaaggattgcgacttaaggtcagcagttcttgttcttgtaatctttgctggtcgatttggttcgcgcatgggaccttgctttccgtttatagactcatggtggtgaagaatgtcagatcatggacttgtttcagtgtccatagttgcgaagggtatccatttagaaatggctgaaaaatatagtaacaaagagcagcgtgttgtgcagtgatatacgctcatgttgataagatggctctgttagatcttttttacttatgtaaagaaacatgaattgcatatatttcttgacataaataatgtaaaacgtattttttttgttgc

SEQ ID NO: 25043 - DNA, 1685 bp, Zea mays
  Clone ID: LIB3689-240-E8_FLI
ggcgacgttgacgttggagccagccgcgatggggtcgaccgcgagcgaggacgccgagacggtggcccggatgacgattacgttgctggtgccgtgcgcgaacctggggacggacgcctcacccagcgggacggccgtggcgaccgccgctgtgtggctctcctcccggctctagcagaaggagcggtgtccccctccctcactcttcttggccccgatctaatctgccctctgtgttaggatatgtttgactgggtgacactcgatctatcggattcggatatgattttcttgttgttgtcctgtgcagctcgatggcttgttggcgatggtgcagcctgtcctctccaatgatcccaccgtacagttgatgccttgcatcgtctgatccctaggttgtgtggtatgtttgactctgcaaataacataccactggcactgaacatcaaccctaaaaaatatttaaagacaccattctctgcatgccaacatctagctgatgaagcaccctcattaccaagtcagcaaaaagagctcaggctttacaagcaacatgttgatagtctgcaccaattggcatgttgtactgtctcccacaaccggtactctgagcatggctgcaatcatgaacaagagcactcatctggacatactgccttcgcctagggataattcagctgatagtggccaagaagatggaggctctcgggagtttgaattcaagcctcatctcaattctcaatcgtcgtaattatatgacccaagacaccgttcggtgggcggcaacggcgacgactgagaaggcgttgtcgtacaggttgggctccaaagttgcaatgttccagtattcctcagtcgaaatttatagtgcctgcaaaccacagcctactcttgagattcacaatcccgatatgcacaaagatgccccaaggggatctcgcattgcagaatttcttctggatggtaatctggttggtccgctgaagaagaccgtctcggatctagacgagtatgatcgctatgcttttgagttctgtcgcaaggtggcttcacactactcaaaacaactttttgcaatctaccagaacaaggaggcccttactttcatccatagccctggacgggacatggatcttgttgaactttctgtctatggaaatgtctggcgagggccagatttagggggctgcaaaatccaatgaagtagatatatctgaatggcgtcaaagttcgaagtagttgcctgaggctcaatggagaaagcttgattcattgttctgtcaaatatctccaatcatgtttatactatgtagcttaacacttcaagtgatttaccccagaaaagaaatcgtgatatatttgaatcaatgattgcctgcattcatactccaggttctaaagatgtggaaggacatcacgactccaggatcgtgatagctattgcaagatgatgcacaagtacataggatcagatgttacatcacttgtgacacttccagtcataatttttgagccaatgacaatgcttcagaaaatggctgagctttgttaggtgttccattttagttatctatctacttcctttaaactggttctgtttatatgcgcgcgtatctattattatgtataagcattgttgctactggtccttatcgagaatcgcataagaagacaacttcatgggt

SEQ ID NO: 25044 - DNA, 2588 bp, Zea mays
  Clone ID: LIB3689-240-F1_FLI
ccctcgtcaacgcctccgtttcgtcgaagccacatccgcggcgtttcataatcccaaaagtctccctcccgtctcgtctccaacggtgtgcttcttcctccggacgcctcgctcgtccgaccgctttacctccctcctccggcgagctccctccgctgttcctggtgtgtctacgcgccagctcctcctcttgacgattttgggcgcgcccccctccgccgccgggctgtgctgcgcggacgcggttcgtggattcggcagacggatctgcaccgtcctcgccgccgatatgcaggagcactagcaaagcggcttcgccatccctccggagtccggagcagccagttgtgcatcaattctaaaacagagttgataccttttttccatcttcaaggttctgctctctcatgccgcagttttacaacgttgaaggcttaaaaattctacagaactagatgatacttgcataatgcagccctcagatatttggaaggcgcatgctggttcatcacagtcagaggcttcgggtctggatatggagaggaacggatgcaatcataattgctgtccatctcctctccagccaattgcttcagctggtcagcactctgaaagcagcgctgcatacttttcttggcctacatctactctaatgcacggctcagctgaaggccgtgctaattactttgggaatctacagaagggtgtactaccaggacatcttggtcgcttgccaaatggccagcaagccaccaccttacttgatttaatgattataagagcattccacagcaagattctccgccggtttagtcttggtacagcaataggctttagaatcaggaaaggaacattgactgacacacctgccatccttgtgtttgttgctcgaaaggttcacaggaagtggctcagccctactcaatgtcttccaggtgcccttgagggacctgggggtgtgtggtgtgatgttgatgttgttgaattttcttattatggtgcaccagccccaacaccgaaggaacaactttatgatgagcttgttgatggattgcgtggtagcgaccctagtataggctcaggttcacaggtggctagtcttgagacctatgggactttgggtgccattgtgaagagtcgaactggcaacaagcaagttgggttccttacaaacaggcatgttgcggttgatctggattatcctaaccagaagatgttccatccgttgcctcctaatcttggacctggagtttacctaggtgctgttgagagagcaacatcatttataacagatgatgtttggtacgggatatatgcaggaacaaacccagaaacttttgtccgagctgatggtgcatttataccgtttgctgatgactttgaaattgctagtgtcagcacctccattaaaggagttggagtcattggtaatgtaaaggcaattgacttgcaatccccaattggcagtctcattgggagacaagttgtcaaagttggaagaagttctggtatgacaactgggactgttgtcgcatacgcacttgagtacaatgatgagaagggaatatgcttcttcactgactttcttgtcgttggggagaaccaacaaacatttgatcttgaaggggacagtggaagcctcataatcttaacaggtcaagacggtgagaagcctcaacctataggaattatatggggtggtacagctaaccggggaaggttgaaacttaaaagtggccagggtccggagaactggacaagtggagttgatcttggccgccttcttgatctcttggagctagatctgatcacaacaagtgaagggctacaagctgccttggaagaacaaaggattactctagctgccgctgcggctgcagccactaattcaactgccacagaatcgtcacctgttgctggccctcaagaggatgataaaatcgacaaaatctatgagcctctcggcattaacatcattcctcgagacggttctgccatatcaacggaccaacccaacgaggatgtggaagagctaaacctgatgtctccaatgcgcaatggtgaagaaggcaacggtgacttcaataacttgatggacttggaatcggaaaattcacctgatggtatttctattgctctgaacctgggagagcgggagccagaaagactccgctctgtttctgattcgatgctggacatagacttgcagaaatgaggctgcccgctgctatgctgcagacgtattgcaggaggctccgtatcattcagctttttttatcgatcattgcaggtatggccacaaaggaaataatctgtttctaggcgactggaccggttgttctgcttgaaacccggtctgggttaagctgtgaagctcctgcagccgcttgctcctgcagttttgcgtcaagtgtctaccaactctagcatatgtagtgctgcgtaagatgtcggcacctcagatagacagaggcgccatatttcttgctcatgtaatgttatttgttgtatgctcgtttgtatgtactgcatgaagcattgtaaaattgagcaacagcaaccagagctcgagaatcttaggcgcaacc

SEQ ID NO: 25045 - DNA, 1569 bp, Zea mays
  Clone ID: LIB3689-240-F10_FLI
ccttgtcgccgtgacgcctgacgccttctccccggaccccgatccggctccggcaatcccacgcccaggctgtccagctccaggctccaccgctccagcacgacagcaccaccagcgccgccctgcccctgtccctactccctaatcccacgcggccacacccaggtcccaggaaccagcactaggaaccagccggcgtccactccgtccagcggaaattcgaaaccagcgtccagcactagggtgaactggctgtttggacccgttctttatcttgcgtcgttcagccggcgtcctctctctctctctcgtggcgacgactgggcgacctccccgcccccgctgctctacgccaggtgcccaggtcttcgtcgggcccttcgccgaagagcagccaacaggttgccggtctgcgagttgaatcatggcggagcacttggcttcgatcttcggcactgagaaggacagggtcaactgccctttttacttcaagattggggcctgtcgtcatggggatcgctgctctcgtctgcacaacaggccaactatatcaccaactcttgtgcttgctaacatgtatcagcgccccgatatgataacccctggagttgatgctcaaggccaacctattgaccctgagaagatgcaggagcattttgaggacttctatgaggacatctatgaggagttggggaagtttggtgagattgagaatctgaatgtttgtgataaccttgctgaccacatgattgggaatgtctatgtccagttcagggaggaagagcaagcagccgcagcatacaatgctcttcaggggcgcttttactctggccgccctataattgttgagtattctcctgtgaccgacttccgtgaagcaacctgtaggcagtttgaggagaacagctgcaaccgtggtggctactgtaatttcatgcatgtgaagcaaattggcagggatctcaggaggaagctgtatgggcgttctgcttccaggaggtaccatgggagaagccgaagccgaagcccgccaccacaaaggaggggccaccgtgaccgtgatgactaccgtggtggcggcggtggtggaaggggaagaggtagcaggtatgacaggtacgatgatggagccggcagaggtggcaggcatgacaggtatgatgatggagcaggcagaggcggcagacatgacaggtatgatgatggaggaaggcgcaggcatggtagccccccaaggcgtgcaaggagcccagtcagggaaagcagcgaggagcgaagggccaagattgagcagtggaaccgtgaacgagagggaaaacagtgagggctactgttcgccggactctctcatccctatattctaagtatgcttgtgtggatgacattctgcctggctaagtaaaacctttttaagatcaggattcctcggttcattttatggttaaaccagacatcatttgtttccatctgtgttgtgtcggatcctttgctattatgttattttgacaattggtgtcaaatcttttgaggtgtgctattagcttatgatgatgtcagttgtggtttgtc

SEQ ID NO: 25046 - DNA, 1113 bp, Zea mays
  Clone ID: LIB3689-240-G10_FLI
ggcacagcagcaccgactagccaatctctacttgcctacacagcagaaggaaccagacagggaagtagggagagagcatagcaatggtgcggaagccgatccacgctgacgacgccggcgctaagagcacggaggcgagcaaggagaggaaggggttgtggtcgccggaggaggacgagcggctcttcacccacatcacctaccacggcgtctccacctggagctccgtcgcgcagctagcaggcaagattcagttcttgcaaaccgatcgggactctcggtaccggattctatttcagctatcgatcggacagcacaacgcggtatgattaatctcttcttaaatgttcaatgcacaggcctgcggaggagcggcaagagctgccggctgcggtggctgaactacctgcgcccggacctcaagaaggaacccatctccaagcgcgaggaggagaccatcatctccctgcagcagtcgctcggcaaccggtggtcgacgatcgcggcgaggatgccaggcaggacggacaacgagatcaagaactactggaactcccgcatcaggaagcgcctcaacgccgccgcctccagagctgcaggctgcgacggcggtgacagcgcggccgagccatcgggggccgtggcagcgggaggaaaggaggattcggccaacgctgcgacggcggtgacagcacagcctacgcccatcccggcgcggttcccggtcttcgggtgccagctgcccgacggagccggcggcggcatttcgtctcccggcagcggcagcggcaagagtccccagtcgtcgactactgcgagtatgccgcagaacgagggtgacgagagcgaggcgagcgacggtggcggtggcgacagcgacatggtccatttcctctcgttcgatgatctggattatcccggggatttgctcattgatgtgccgggagccatggacgcgtgggagagccaactgtgctatgcgaatccgatgatgagctcgctctgttgatccacactaccaataattgcatagcacagccattgtcttgttcccgctaatcatatataggctgtctgaattatttatgtgaaatttcactgggttttttggac

SEQ ID NO: 25047 - DNA, 1313 bp, Zea mays
  Clone ID: LIB3689-240-G12_FLI
cttgtcctcctcacctcccaaattgaaatcctcctccctccccgcctagggttccgcttcctcccccgtccgagcaccactcaagcggcggcagcagcggtggcagcctggaagcagtcccatctcgtcgccctagacttccctgccgccgcacgtctcagtttcttgttcgcccgctctcctgccggtccgcccatcgcctgaggttcttacggtgccacggagttggcaactgcaaggagtgatattgtggtacaacactagttctaattgaagtaataaggcgggggtgaaactgtctgctaccattgcttccatggcaactaatgagaacctcccgccaaatgtcatcaagcaattggctaaagaactgaagaaccttgatgagtcacctccagaagggattaatgtgattgtcaatgatgatgacttcactactatttttgctgacattgaaggccctgctggaactccatatgagaacggagtattcaggatgaagctattattgtcacgcgatttccctcaatctcccccaaaagggttcttcttgactaaaattttccatcctaacatagctactagtggtgagatatgtgtaaacacactgaagaaggattggaatcctggccttggattaagacatgttcttctggttgtgagatgccttctgattgaaccatttcctgaatctgcacttaatgaacaagctgggaagatgttacttgaaaattatgaggaatatgcacgacatgcaaggttatacactggcatccatgcccttaaacctaagaatacgtccaagaccggagctatatctgagtcaaccacagctctgaatgtcgacaagtcaagtactgcctctagcaagaacacaccatcgatgccaccggcggtatctacctccagtgcatccagagcatttggtacgagtttgcaggatcagaaccccactgtttctgatcctgctgtaggagctgcggcggcacgaaagaaggatggcccaatggcttccaaagttcctgtggataagaaaaggctggatgcgcggaagaagagcttgaagagattataggcggaacgtcctgggaagaagagagagggtttagagttcagaatttttatcggaaactcagcagatgcttatttaagctgggagacaaacaattaggggaggagaggcatctgatgacctggctttcgggagaagggggtccggggcggggccaaaggtgaataatgtgaagcaactgagtccttcgggacaactgtatgtgcaatgcccaatcatttggaagaacacttgcctattt

SEQ ID NO: 25048 - DNA, 3491 bp, Zea mays
  Clone ID: LIB3689-240-G7_FLI
cttttctctcttcgtcttcctgctctcgctgagcctgcaggatctgaatccgagctcgctcgcatccactatctgcaggccccacgcgccctgttccttcctcccgctaacaatcgccctgttcccggtttgatccgttgaattctgcccggcgcgcgggggcttgcgggtgcgcaccggaggctgcatcttttcccggccaagattcggtccggtggggccgttcttggcacgatttcacgggccgtttggccttccctcgccggatttgttccggctccaggcaccaaattccaatcttttcctgctgctgctgcctctgcgacactttattcttctcccccaattagcggcggttagtgtggattctgatttgtaggttcatttcctggtttcctccgtgagcttctgcggttggcgtggttacgccagtccctcgcgatttacatctgtgattcgtttgaaaatctgggagtgtggagatttgggaggtcttctcgctcctgtgctctatgaggagcagcttcctgtcggagtcgccgtgcgacgagcagcgcatccatggatatggtttcaacccgcagtcatggctgcaggtggagcgagggaagctgcccaagtcgtcctactcgccttcctccattgagtcacttatcaagattgctgagccacatgtagtgccattgtataagcctttggattatgttgaggtgctgtcaaggatccacgaggagcttgaacaatgtaggccgagcgagctgccaggcctgtacttggtccagtcccaggtgtttcggggccttggagaagcaaaattgcgccagaggagcctccactctgcctggcgttgtgcaagcagcgtccatgagaaagtcatatttggggcatggttgcggtacgagaagcagggggaggagatcatatctgacgtccttgcatcatgtcagaaatgctgtcgagagtttggtttacttgatgttgcctctgagatgcctgtgcggaattttgaggtaattggttcatgggagacaggctcctcgtctcaagtttcttccatggtaaccttccaagtacaggatggtagggtgacatgtgataggtgcaagattgcgtctttgtcaataccattttgctccatgcttaatggaccgttcaatgagtcacagcttgagcttgttgatttgtcagagaatggtatttcgttggagggcatgagagctgtttctgagtttagttctacatgtagtttaggggatcttcctgtggaaatcttattggagatcctggtgtttgcaaacacattttgttgtgacaggctaaaagatgcttgtgataggaaactggcttcatttgtttcaacaaggcaggatgctgttgagctcatgccgttggcatttgaagaaaatgcgccagttcttgctgcttcttgcttgcaaatttttttacaggaacttcccgattgtctagctgatgatctagtaattagcctcttcttaggtgcaactgcacaacaacaacttatcatggttggacatgcatcctttttgctgtactgcttgcttagtgaagtagcaatgaacattgatccgaggacagaaacaactgtattattgttagagaagcttgtgcagctagcagttacccctactcagaagcaaatagcttttcatcaacttgcatgcattagacttttgagaaaggaatatagtgaagctgaacaccaatttgaggttgccttctctgccggtcatgtgtattcaattgctggtattgctagagtcgctggcattcaaggccaaaaggctttggcttatgagaagctcagttcagtgataacatcaaatttgccactggggtggatgtatctggagaggtctttgtattctgaaggtgatagaaagctggcagaccttgacaaagcaagcgagctggatcctactctcacttacccttacatgtatcgagctgcatccttgatgagaaaaaaagatgctaaacatgccttagaggaaattaaccgactcttgggtttcaagttagcattggagtgcctggagctacggatctgtctatacctggctcttgaagactataagtctgctatctgtgatatccatgcgattcttactctttcacctgattatcggatgttggaaggacgtgtagctgcttccaaaataggcactcttcttggtgcacatgtcgagcagtggaatacggctgagtgttggctacaactttatgagcgctggtcatcagttgatgatattggctccctttcagtgatctatcggatgcttgagtcagatgcagcaaaaggtgtcctctactttaggcaatctttgctgctccttaggttgaactgtcccgaggcagcgatgcgcagtttgcaattggcaaggcatcatgcagcaactgagcatgaacgactagtatatgaggggtggctcttatatgacacggggcactatggggaggccctacaaaaagcggaagaatctatttccattcaaagatcatttgaagctttctttctgaaagcctatgttttggctgattcaggagttgatccttcttattctgcgacagttatctcacttcttgaagatgcattgaaatgcccttcagaccggcttcggaagggtcaggcattgaataaccttggtggtgtctatgttgattgtggaaagttagattcagcagctgattgctatacaagtgcattgaaaattcgacacactagagcccatcaaggtcttgctcgtgtacattttctgaggaacaacagggaagctgcatatgaagagatgacaaagttgatagaaaaagctaaaaacaatgcttcggcttatgagaaacgctcagaatattgtgaacgagaacaaactatgacagatttgcaaacagtgacccaattggatcctttgcgtgtttatccatacagatatcgagcagcagtgctgatggatagccacaaggagaatgatgcaatagcggagctcagccgtgcgatatccttcaaagcggacctgcatttgctgcatctccgtgcggctttccacgagcacattggagatgtacccagcgctctccgtgattgtagagccgccctctccttggacccgaatcaccaggagatgttggagcttcagaaacgtgtgaacagccaagagccctgacacattgtggtgctgtattgtgtattgtacaccacgactcatgccactttggtttgcctcgtgacagacagccttgacctgattcattttttttcgtttttccgttaattaattaatcaatcactgtaatacgaagttttcaggaagaaagtaacagagagcaagagagagaactagttatatgaaagcaggcattgataaagcctttttaactcgatgcctgtggcctctgtagaagtattgtgctaatccctgaactgtatcttgaaaaagtgattcgtgcataatgtatttttcagttctgttctcttt

SEQ ID NO: 25049 - DNA, 3258 bp, Zea mays
  Clone ID: LIB3689-241-A11_FLI
gtttccttgcgcggcggttgctgctcgcccgatctgccgccgtcagccggcgcccgatctgctcctatactgtggcgcggaggcgcggagcagcagattgtaaagctaggaatacaaatacaagatgggcgcgtcaagacccccaagcacccctgcatcgaagggtgagcacacaccgatgtcgactcctggtggcagctcaagggccaaggaggagaagatttttgttacggtgagggtgaggccactaagcaagaaggagctggctgcgaaggatgacgtggcatgggaatgcgctgatacccagacaatcttgtacaagggccccgcgcaggaccgagctgcacccatgtcttacacttttgataaagtgtttgggccagcttgccaaacagacgtggtctatgaagagggagctaaggatgttgcaatgtctgcactgacaggcattaatgccaccatttttgcatatgggcaaaccagcagtggtaaaacattcacgatgagaggcgttacagagagtgctgttagtgatatttatagacacatagatagtactcctgagagggaatttgtgataaaaatatctgctatggaaatttacaatgagattgtcaaggatcttctgcggcctgactctgctccccttcggttgttagatgatcctgagaaaggaaccattgtggagaagttgcaagaagaaattgcgaaggatagccaacatctgaggcatctaatcagcatttgtgaagaacaaagacaggttggggagacggcactaaatgacactagttcacgttcccaccaaatcattaggctgacacttgagagcaggctccgtgaagtttcaggatgtgttaaatctttcgttgctaacctgaattttgttgaccttgctggaagtgaacgagctgcacaaacacatgccataggtgcaaggttgaaagagggttgccatataaatcgcagtttattgactttgactactgtcatcagaaagctaagttcggggaaaagaagtggacacattccctaccgggactcaaagctgacacgcattttacagctttctttgggtggaaatgcaagaacagcaatcatctgtaccatgagcccagccctgacacatgtagaacaatctagaaatactctattcttcgcaacctgtgcaaaggaagtcacaaatactgcgaaagttaatatggttatatcagataagcaattggtgaagcaccttcagacagaacttgctagactagaatcagagctgaggacccctgaccgtggctcctcttctgatatcctcataatggaaaaggacaggaagattagacagatggaaattgaaatagaggaactcaggaaacagcgagataatgcacagtcagagctcgaagaactgaggaagaagaaggttgatcaccagccagggtggaatccctttgactcgccacaaaaggcgcgaaagtgccttacattttcaggatcgctagagccaagtaacaaaaataagatgatgatgagctcgattaggcaatcatctactgctccatttatgttaaagcatgaaatccgcaagctggagcagctacaacaacagcttgaggttgaagcaaaccgcgccattgaagtacttcacaaagaagttgaatgccacaagcatggcaaccaggatgctgcggaaaccatcgctaaacttcaggcagaaatcagggagatgcaaactgttaggtctgagaacagagacatggagatgattacagatgaaggaaatggatccgatttgaaagatgagatttctagacttcatatgcaagacaatgatattgccaaacttgaggcgaagctggaaaatgtgcaacggtctattgacagattggtgatgtcacttccaaacgttgccatgccgtgtaatgagactaccccaaagtcaaacagatcaaagaagaagaagaggctgcttcttcctctgggtgtgagcaacaacatcaacagagcaaatcttctcagagcaccctgttctccccattcttctagtaggccttcggaatcagaagttgagaacagggcgccagagggtgacactatgtctgttgagggttcagaaaaggctactcccaccaagagtgaagatggagatatgtcatctcgtgatgaaacgccacgctacaggcgctccagttcagtcaatatgaaaaagatgcagaggatgttccaaaatgctgcggaagaaaacgttaggagcatcagggcttacgtgactgaactgaaggagcgagttgcaaaacttcagtaccagaagcagctgctagtctgccaggtcctggagctggaatctaacgagggcaagccgaatggagaggataattctgggcctctacaggatggtcctgattcatgggacagattattcaaagagcagatgcagtgcatcattcatctgtgggatcagtgccaagtatcgatcatacacaggacccagttctacctgttattcaggggggacaaggctgatcagatatacatcgaggtcgaagtaagaagactggtatggttgcagcagcactttgccgaggtcggtgatgcaagccctggtgctgttgaagaccctgcagtttcacttgtctccagtatgaaagcgctgaggaacgagcgagagttcctcgcgagaaggatggggtcaaggctgacggacgaagagcgtgagcggctcttcatcaagtggcaggtgcccctggacgcgaagcagcggaagctgcagctggtgaacaagctgtggacggaccccaacgaccaggtgcacatcgacgagagcgcggggctggtggcccggctggtgggcttctgcgagggcggcaacatcagcaaggagatgttcgagctcaacttcgccgtccccacgagcaggaggccgtggctggtgggctggcaaccaatctcgaacatgatcagggagaagacccagcagctctggtgagaactgaacgcatcatggcgcagcgccgtgttgtacagatggaatggaacaagagacagacagtgcatttcggtttcagctctggaaattgctgatcaattaattgtggggggaagcgtctctacttccttcccggttgatcaaggcggacaagcggtcgtcggtctggtatccccttcctgtgtccctctgtgtagatggcgaattcgtggagtccgaagaatctgaatgatctcgcattctttacataatcccttgccaatttatggcaagttttgttt

SEQ ID NO: 25050 - DNA, 3151 bp, Zea mays
  Clone ID: LIB3689-241-C2_FLI
tagaccagcataaaagattgaaattcctttcttgccactaaaaaaatctgcagttccctttaagtgtcaattactatgggaaatgattagatcacccttgcttcctctgcaccaaacaagcaaaagagaaagcttccttttctcccttcatttcttctcccctaaaggacattaggcactagctccatccgattaagtcccaagatctcccacttcctggacacagctgtggccctgcacttgcacatggagcactgagcggtggtgcaggggatggggacatggcttcggcagtggcctttgaggcactgatgctggcggatatgccgtgggtggtgccacttgcttcttccacaagaagcacactcgcggatcagcgacacagagatcacggaggcacaccacagaagacatgcagtgcagaagggtgctctactctggtgccatggctccatgcccgcacggcggcctatactgtgctggtgtcacaacacagcatcttggtggatctctaagaccagtgtaggtgcactatggtgaaggcgggctaggggaagggaaaggggtgtcctcggtggcagacatcgactccactggggatgccgtggttcagggctagcagcgacaacatggcagcaaaggatgacaacagtgagacctgcctctcagtcaccatggcaaaggtgagtctaactgcgcccggcgctcagcctacgtggggtcttccttgtcgtggcctatgttgatttgatagtcaagagggaaaagggaaggagagcacgcattaggtgttggacctctgacctgtggctgcacaatgcaagcacaaggcagaacgcgagacacgcagcaacacagcaaggaacgccagcctctgacgtgcagtggcctatgaccgtggtgatgaacaattgaacatgtgtggtgctgaggtgaagggcgtgggacgcggcaggctggcaaggtgcgtgcaatgcaagcctgagtcagagtgtggagccagtggcaccatagcaggctgtaacgactgattgagcacaggcctccatcaaacgtgtatcccatttgccctggttcctgtacagctgtgttccagtgacctttgaggcatgtaggtgaaggagaaataagagctgggtagagaagaacaaaataacaattttagactcctgttaactactgtttcagcaaaattagatggcagtgatagacagggaatgaaaaatcgaaatgatggcaggcatgacaacttttttcatggcgaatataggatttcaatctttttttaatgtcagataaggaattttcttattgtttttagtgttaaccattccaatatagttatttatttatgtaagttatgttgaaatttaagcaatccaagaactagactagtggtttgatcatgcaatatatggtttagtttttttttgtcagtattgtatgtgcactattagagctatttcactgagtcactaggtcctgtgttcgaagcagcctctccgcagctgcggcggaaggcttgcctcaatttatttcttctctagacgccactcatgtgggagcctccgtcaccaggtctgcctagtgcctattgtatgtgcactattatttagctagcatctatgctagtacatgtcgcagagtaactggagacttgaacagaaaatcctaacccagatgataatctgtgctagtacatctcttgatggtaggcagtcatgtgcaaataataggagcttgtgcctttcgtacccagaaaagaagcaggtcccagggtcggtgaggcatgttggttggctggcttgggatcacacctgtttccttatgccaagtgtttttcctcactgctcgtgctaatcttgtccaagtaggggagccaaatcggctccggctcaatgaggattttcttggtagtgccatgaagcttgcctagcaaagcaagctcttagtactcctgccaaatatgtatccttgcccagcaaggtcaagtaagactaggcaagagatctaaaagtgcccaagcggaccataacaaacctggcaaacaaattatagcatgccctacatcttccataaaacagaaggtttttgaggttacgtttcccatacccagtaggcactaaacccttaaaatgtcttaatcttcctaagtggtatttgagaatagtattttgaattcttaatcactaacaccctctaactctccaactaacatcttttagtctttaaaaccaagaacagttgtcaacttgttatatctgtactgttctttttctgaatttttgaattgagaactatgacttctgcctgtacccgttagttattactgtccatcagaatcgtttgttttgtcagcatttcttttcgttttttccaaatccatgtggattgaggggggaataaatccacaactagtcaaaatccacctcaatccacatggtttaagtacaaaacgaaaaggcctaacagggttcatcatctttgccaatttattctgtaacatgcaaatgcaatccttcattatcttttcttatgttttgacgtgtatgctggttctcttccaccttcagggtgcacttgccctcagtggtatgcctgacgcacagtcaaaacctgtgctactgtgttcattaaatgacaacactgtccgcttatatgatctgccatcgttcagtgacagaggcagattattctccaaaaaagaaattagggcaatacagatgggtcctggtggtttattttttaccggggatggaactggtgagctcaaggtttggcagtgggtagatttagcccaaacctaatgaacatagtgtgctagattagttttctctcatgtattttatgagggagttcgtacaaatacgcataatgagttcaggttgtggtcggtggccatttctttttttgtaatatgccccacatttgtcacaaatgacacgagattcggtggatctgttcggcagtaaaatcagaagcagagtatgtgttatggactgtagttttgtcctggaatggattttaagacaggagaataattggttgttgtaatatgtaaggcactggaacgagcaattctgacgactgcttggaggtggtggcagtttcaaaaggatatatgctaatatacaagggtttgttcaggcgc

SEQ ID NO: 25051 - DNA, 2175 bp, Zea mays
  Clone ID: LIB3689-241-D7_FLI
gcgcccctcctcggctccgatccagtttcgccggcggccatgtcgcagccggcggcgacggtggccgcggcggcgcagccgcagggtcgcggccccgcggggcgccagggcggcctggggcagagcatcgcaggcatcgtgcggatggcggtgttctggtactttgcgtccaagttcttcgggcccaagcgcccacccgcggaccccgggatgctcatgtccaacctcttccagaagggcgagccaatggatatgtggatgtatttgtcagagaacgagaagttcaacgattttgctaatgaggatgcacttatttggcacgaggcaaacataccatatgcagtctggggacctaccagtactagaacacggtcattaacatactatccgtcagaggctctcaagcataatggctctttgtatgctcatgtttacttcgcccgttcgggttatcctgtggaccctacagatccagaatatgagcagaaatcttcgtttgggaggacccatcctgttgtggcattcttgccaaaatcaaaagctggtaaaaagaagagcttgcttggagattcagaagagcctgaagagaaaacaccgcgcaataaggagaataaagaatctgaggataaagatgagggtccgactgaatatatatcttattggaaaccaaatgtaacaataaatcttgttgaagatttcacacggtatcccaacaataatgtacctcccattgttgctccatatctgaatgtggatccagttacgggcgattattatcctacagtattcttcaatgagttttggctactgaaggataaattaatagcgctcaacgagactgtggaggaattgcccttaaaccttgaagttggtccttttagcatgaccaagtggcaattatttttacagattgagcagtccttccaggttcatcgtagttatggaagtatgcttgaaggcgaggctgatgaactcaagagggtttttcttgaaggaaatccttatcttcttggattgactatggtcgtttctctattacactccctgtttgattttctggccttcaaaaatgatatccagttctggaacaagaacaagtccatggaaggtctatcggcaaaatctgtggttctgaattttgtgtgtcaactagttgttttcctgtaccttcttgacaatgacacttcatggatgatccttgctagctctggagttggtgtgtgcattgaattttggaagattggaaaggcaatgcatattgaggttgatagaagtggaaaaattcccatgttgaggttccgagaccgtgaatcatatgcacagaataagactaaagagtacgatgccattgcaatgaagtaccttacctatgtacttttcctccttgtggtcggtttctctatctattcacttaagtatgaaaagcacaagagctggtactcatggatactttcttctatgacaagctgtgtgtacatgtttggtttcattatgatgtgcccccaattgtttatcaactacaagctgaagtctgttgctcatatgccatggagacaaatgacctacaagttcctcaacactataatcgatgacctttttgcatttgtcatcaaaatgccaatgcttcaccgtctctcagttttcagagatgatgttatcttcttgatatacctctatcagaggtggaagtatcccgtcgacaagaagcgtgtcaacgagtttggcttcgggggcgaggacgaaccggcagcccaggaggctgtggaaggaagtgattcagctgcagcaccccagctaacggaggccgggtccgagacgagtacggaggacaagaaaaccaagtgatctccagtcttcggatcatccaaatacaagcatacatctctgcaacacctgccttcccagccggcgtgaaatttcttttgctgaaactggatgctggactcttgcggtcttgtcttaccgagacgtgctgaccataagataaggcgtgtaacaagggacacgatagtcttttgtctagagcagcgggcgaacaggcacacactttcacaattacgtttccagttcgtcttttagcagccattactagttgatttgcttgtttgattggtttgtgtacaattttttgtgcattttttcttaaaacacacacaattggcggttcgtagtttg

SEQ ID NO: 25052 - DNA, 1729 bp, Zea mays
  Clone ID: LIB3689-241-F7_FLI
cgctcggccaccagctttgaccgcctcccctcccctccgctcctgttcctccataccccacccccccgcaggagcggcgcggcggcggcggcggcaaagccaaaggcaagatgttcgggcgcgcgccgaagaagagcgacaacaccaagtactacgagatcctcggggtgcccaagtcggcgtcccaggacgacctcaagaaggcctaccgcaaggcagctatcaagaaccaccccgacaagggcggtgaccccgagaagttcaaggagctcgcacaagcctatgaggttttgagtgatccagagaaacgtgagatttatgatcagtatggtgaagatgcccttaaggaaggaatgggtggtggtgggtcccatgctgatccatttgacattttctcatcattctttggaccctcttttggaggaggtggtggaagcagcaggggaagaaggcaaaggaggggagaagatgtagtccactcacttaaagtttctctggaagatctttacaatggaatctcaaagaagctctctctttcgcgcaatgtcatctgctccaagtgcaagggcaagggctcgaagtctggtgcttcaatgaggtgccctgggtgccagggctcaggtatgaaagtcaccattcgtcagctggggccttccatgatacagcagatgcagcagccttgcaacgagtgcaaggggactggggagagcatcaacgagaaggaccgctgcccagggtgcaagggtgagaaggtcgttcaggagaagaaggttcttgaggttcatgttgagaagggaatgcaacacagccagaagatcaccttccctggtgaagctgatgaagcgcctgataccgtcactggagacattgtattcgtcctccagcagaaggaccactccaagttcaaaagaaagggtgaagatctcttttatgagcacaccctgtctctgaccgaagctctatgtgggttccaatttgttcttacacatctggacaacaggcagcttctgatcaaatcaaaccccggcgaagttgttaaacctgaccaattcaaggcgataaacgacgaggggatgcctatttaccagaggcccttcatgaaggggaagctctacattcatttcacagtggagttccccgactcgctggcgccagagcagtgcaaggctctcgagtcggtacttccgccaaagccttcgtccaagctgacagacatggagatcgatgaatgcgaggagacgaccatgcatgatgtgaacaacatcgaggaagagatgcgcaggaagcaggctcatgctgctcaggaggcctacgaggaggatgacgagatgcctggcggagcccaaagagtgcagtgcgctcaacagtaagcagactaccataatgggattcaaggcactttggttgctcttcaattatgcgagtgcgcctgtggactgtgtggttctatggttttgctgtcgctgagctacgaagtaggaagctgatgcgcccctggccatgcaagcggggaatgtatccttttttgctgctaccgaaaaatgctacccacgcatagctggctaccttataacttttgcttgtgagatttgctagagtgacgattttaatttataggtggacttaatgtttgtgtaaggctaggcataacatcatgtctcaatggacgttgccgttgcacattggtgcattttattttaatgtaacgcatgtgcttgtgctgtcgaac

SEQ ID NO: 25053 - DNA, 1286 bp, Zea mays
  Clone ID: LIB3689-241-G6_FLI
cactagctagatcgactgactggagaggagctaccgtctactacctctgggcgagctgcgtgtcctgtcgtccttctcgctcctgtggtcgcctcgcgcgcgcccggcgctgcgatggggcggtcgccgtgctgcgagaaggaggccgggctgaagaaggggccgtggacgtccgaggaggaccagaaactgctggccttcatcgagcagcacggacacggctgctggcgctcgctgccggccaaggccggtctgcggcggtgcggcaagagctgccggctccggtggaccaactacctgcggccggacatcaagcggggcaagttcacgctgcaggaggagcagaccatcatccagctccacgctctcctcggcaacaggtggtcgtcgatcgcgacgcacctgcccaagcgcacggacaacgagatcaagaactactggaacacgcacctcaagaagcggctcgccaagatgggcatcgaccccgtcacgcacaaggcccgcgccgacgtcgtggggggctcctctggcgccggcaacaactctggagcgcgctacagggcagccgcgcacctcagccacacggcgcagtgggagagcgcgcgcctcgaggccgaggcgcgtctggcgcgcgaggccaggctgcgtgcccttgcctcgccgccgccgccgccagggccagggccgggacccgcgtttagcgggctcgagtcgccgacatcgactctgagcttctccgagagcgtgctgttcgccagtgcggcgcacgacacccacgccctgacgtcacgcgcttacgcagaggcgttcggggcggagcagcaacagcgcttcgctgacactgccgccgccgccgacgccgcgccaggcttccttgcaggcgtccttctcggctgctccgtcgccggcgcggagaaggggttcgcggcctcgtcgacggacgccagcgtctgtgagcagcagcaggaggaagaggacaagggctactggagcagcatattgaacatggtcaactcctccatgtcgtcgtccacgtcctcgctgacttccgatgctgtcacggaccccgccgccgcgtacttgccgccggcgacggcggcggccgagttctgagtgattgtcgtgcaataataacgaacctgtgctaatgttaccttgtcatgtgtgttgcttactagtaagtgcgttttttggtgctagttagtttatttacgtgctaatggggtgtcgtccacgtgtgcttgtgctttatgatgtgcaataaacatgtacgtactgattttgtt

SEQ ID NO: 25054 - DNA, 1861 bp, Zea mays
  Clone ID: LIB3689-242-G2_FLI
agccctccccttctcttctctcgccttcaccacgcgccgcccgatccgccaccgcccgccgcagccagcaagccaaggccagatggcggcctcactcgtgtcctcgtttactgtgcccctcgtctccgccgtcctcggtgccgccatcgccctcgtcttcctcgccggctacctccgccgcaagcgcgccgccatcgcccacatccctcccaccgcgaccgccgccgccccggaccagcctaagcatgtccgcccctccaaccaggcccagtacaagaagggccatctccgcccgcatcaccacgcggccgacaaggacgcggccaagaagcaccaccatcttgatgtcaacaccttgagggggcatactgactccgtcactgcacttgccttctccaatgacgcctgcaacctagttaccgtatgtgctgatggagccatcagggtattcaggatcgatgatacctctagcaagagcttcaagattctgaggataaacttgccagctggagcgcaccctacggctgttactttctcagagggctcatcatctgttgttgtggcggcgcaggcgcttctgggatcatctctttatatgtatgcggatgttagcgctcctccaaccgcggaaaacaaactgcagggaaagctttctccacctgaaatcaagtggagtcaccccaagatacatggcaaggagtctgtgctcaaccttgcagcggcccgtgcaactcatgggtctggtgatgggagcactattatcatttcatgctcagaagcaactgatatcaaagtttggcatgggaagagtgggaaggagtttggtacagttgacaccaatcagttaaaaaataatatggctgacatatccccaaatggtcgcttcatagctgctgcggcttttactgctgatgtcaaggtgtgggagatagtttactcgaaggatggttcagtgaaggaggttaataaagttatgcaactcaagggtcataagagtgctgttacttgcttgtgctttgctcccaattctgagcaaattattactgcatccaaagatggttccattcgagtatggaacattaatgtaagataccaccttgatgaggatccaaaaaccttgagagttatgccaattccacttcatgactctaaaggttctgtttgccagtatgatcacatgacagtctctcctgatggtaaaattctggctgtaacaagtggatcaacgttgcaatggttacttgtggaaactggtgcagttttggatacagctgacaaagcacatgaaggtgatataactggcattgcttgggctccacggacaattcccaatggtggcgtgcatgtttttattttggcgactgctggtgtggacaaaaaggtgaaactttggacagctccagatgttggttcaacatgagtggtcgaggattgaatctgcataagacagctttgccaagggcacagaattgaaggtgagacaatagatggatgcaggcttgatgtagcccagaacagtaggtgctccactgataatattgcactgaaccgaggcagacattgttagttttgttgcgtagagtttgagaggaggaagggaagggaggcctggctgttactgatgagaccccaatgcatcacgcaggcggcagccttggggctgtagtttcgctaccttttatacaataaactgaatgttgtctgcatttgtatttttttttctttccttcctttttactgttggaatgatctggctgtgtgatcaacataatttaagctgctgctgcttggaatagacgtcattttattttgtcaagcaaatgtgctgctttgcgcattgtttgacattatattgtttgat

SEQ ID NO: 25055 - DNA, 2653 bp, Zea mays
  Clone ID: LIB3689-243-D10_FLI
gcggcgaggcatgcatggcggcgacgacggctaaaccatagcgagacagctcggggtcacggtgttggaacctgtcgtgcgcgcgtgtcgcagatgtgcattgcagatgttcgttcaccagcgaacctgcagctgccgaatctacagagaccataggtgagcaacgacgtagggaaatagggctggcgggggcacgtgggtaacttggtcctggagcattggagaaggagcataccacaaggaaaccaacacggtcagtcaaaaccaaatctagataatcatcatgctacttctatgttttatgtctgtttttgtctgctatgaagtgttcatgcaagtgttatcaagtgttcatccatgccaagatggttactaagcgaacacacgcaacatgagtggtctccatctgatcttgcttcattttgatttattatctctgaggagtgtgtgagttttaatggctttgacggagaaggctattaattggccccttttttggagtgactgtagcaaccacttctaattcattttctaccgcgacaactggcgttgcaaggaatttatttcactagtatgcaacagatggccatgccatcgttcgccataacctcacctccgtcgcatggcactaccttatgggcgcctcatgcttgtcgtcctcaaagactgcacaagagacacgtgcgcagccaagtccgggcagtggcacaagcacagctgcagtaccagaagctaggggactcagacctcctcatcagtgaggtcactcttggaacgatgacttttggcgagcaaaacacggagaaggaagcacatgacattatcgcttattctttcgatcaagtgatcggatatacttctccattttcccttttggcctttagtacccagttccaatgaacaaggaaactcaagggagaactgatctttatattggcaggtggatgcaatcaaaaccacgagacaagggttatgttgtgtaccttgtctgtgtgaggcgtggtggtaggaagaggcctttgcccaagtgtattatctatggctagcccaagcaccagggtatcacccaactcaagttctagaggtacaagaggtctctcgctgatgagagagctagacgcaagcttggtggactgagggttcttaactcctactgggtgaacgaggtggagctgctatttatggagaggagcgttgatagccattgtcctgggatggtagtccgcatggctgaacgagcactctgccatcaataaactcattagcaaggtggtttggagagcctgtaagggctgctattctgcaaaccgaggcttttcttacaaatgcaaaaggatatccttgtttatcaaagcgccatcagagtctgctaactggattttttaaacattctgttcaggtgataatatatggaagatcaaatcacaatgttttcccagtatctgaatgagtgctctcaggtgatgagagctacgcagaagattcccgtgttcgacatgcattaactccttaccttgaatacattgcgtacctatatcagaagatggatccgcttcctgagcaggaacgcattgagattaattacagggactttttgcagtctcctctgcagcctctaatggacaatttggaagctcaaacttatgagacatttgagaaggatgttgtgaagtacactcagccggagaattttcaaagtaaaatgttcggtgaacaggatgcagaaaaagttaaaagctgcaacgataaggcaaaaaaaatgttcccaaaggtgccctcaaagatcagcttcaacatagttctgagccaattactgaaaacaatgatgatatcacgcaattgttgtttgccgtcattgtaggttcttcctttccatgcttgaagattctaatccagacaggtgcaaacccaaatatgagagctggtggagcaaccccattacatgttgccgtagggagcgcaagtattgaagtaatcagactcctactagaagctggagctgaccctaacacctgcagtgatgatggactaaagccaatacaggttgctgctttgagaaataaccgtgaagttgtggaacttcttttagcattaactatcccatttctaagtgtgtcaaattagagttttgatggaatcacagaatacatgttgtctaaagctgctgtgggagagtcacaagtaaatgaagttacatctctaaattcagccagtttagccggaccacaatctgctggggtgtcatatagcgcaaaaaagagattcgatggaagctaatttgagaggtcatgatgcctataaaaatgaaaattacattggagcggtggatgcttacacacaggccattgacttggattctagcaatgccacactctggtcaaacagaagtctttgctggttgctgcttgggatggctgaaactgccttggaggatgcaaagcaatctcgaacattgagacaagattcagtgatagcttgctacagggaagggatgctgttgaggagggaatgaagtcgcaagccaaacctaaccagtcttccaccgcagccaggagtcttttcgacccaaatttgatgtgatgatgatgtgacaaatgattgagtgttttgcaccagaatccaaaacagttgcaacacaatttgttttttaggg

SEQ ID NO: 25056 - DNA, 2339 bp, Zea mays
  Clone ID: LIB3689-243-E3_FLI
ctggctttgcgtggggggctgcgtttggctgcccagatccgcgtcgcgcgctcttggtggttttcctccccctctctgagctagcgagcttttgcttgcccgggaatgaaatcggggcctcagactcccactgccgttttcggccactgcatttgggctacatgctttcctcactttgtatcttgtggttgtggagggctggacagcttgcttctcctctaacgatcttttcagctttgtttttttaccacctcggaagcttgttatactagtgctccgcttaccgagattacggttattccagcatgtttcttttagttttctttcgctaaagtaaagtcggttctgttttactggtatatatcagttgtactgacgagctctggaatttccagtgcgggtgcattaggctgatatgggcaagtcgccggggaagtggatcaaatcggtgcttttggggaagaaatctaccaagtcaggtcctaccaagtcgaatgaatctaaggctgacaacaacagatactcgaccggggaggaccgcacattgtctgagagttctcctgtgatttctgagccggtactagttaacatccacaagaacgtagctatcaatgggaaggctgcagatgccagtgatagggcacggcaacaagatccgcagagccaaagcgttgttgagtccagatcatcggctccagctgctcagctgggagaagatcaagctgcagcgaaggcacaggcagcctttcgtggttacctggcacgaaggtcattccgtgcattaaaaggtatcgtaagactccaggcgctgattcgagggtatcttgtaaggaggcaggctgtatcaacccttcgcgcaacatggttgattgtgaagtttcaggctctagttcgtggaagaaatgttagactctctggcagtcgcatgcagctcaatgtgaagtttggtcagagtaactttgggggtgttagatcgtctgatgcatggaaagagaagctatcttcaaatgcttatgttcggaagcttctgtcttcaccaattgttttagaacctcttcacttccagtatgacaagagggatcccaattcaacctataactggtttgagagatggaccataggttgcatctggaagcctgcttttcaacccaaaagagttgctgatgggaaaccactggtaaagaaggctagttatgcaatggaaactcaatcagccaagttaaaacgcaacattcggaagggttctgctgctatcgctgggagtttccatacatctggtgaatctgataaagtaaaaaggaatccaaagaatttctctagcttccctgctgattcagtaccagatagccagttatctgaacttgaaaaggttaaaaggaacctcaggaaggtaactgattcgatggctgaagcctcaaagatatctagttccagggttgattcctcgaaggtatgtaattctacagctgaggttccaaaggaatctaatcctgtggcagaaatctcaaagatacgtagtctcctgaatgggatctctgaccatcaggatattcaatgtgagaatacacgtgaatcttcatttcctcttggaactcaagaagactctgacaatgatcatctattgcgatattcaaatatggatagcttggacttggtacctggtttgaaaagtgatcaggaaattcagctggattcggtttctataggagaaaatgttgatgatcccactgttgttgctccagcagttgaagaaatgtcaccgcaaaacattgatacggaagacaatgttttatgcaagaaagaggaagcaaggtccaaggaagagcacttgtctaatggaagccttagaactagcaagaggaagtcttcattccccaacaaatcagaatatgtagaaaatgggactcacgctactcctgttcagccaaggcagccaagctatatggctgcaacggagtccgcaaaggcgaaattgcgagcccagaattcacccagtctggattctgattcagcggcagaaaagaatggtttcacccgacgccactctcttccttccagtacaaagagtagagcacttaaagctgaatggaagcgctgaagaggcaacccatcgtccacttgaattgaattgtgcactgctctgaaacttcgctggatgaactcgaccggtcttgtcccatgttcttgctgtattgaacaaccccttgtgaagttgcgattctggttcagtttgtcgtaggttcatgtgcaaccactagtgccttgtgtcgtatattgcatggttcttgtcgaaggaacaatgcctgcgaaagctgatgttaggactgcattaactgaat

SEQ ID NO: 25057 - DNA, 1794 bp, Zea mays
  Clone ID: LIB3689-243-F10_FLI
ctccctcccaaaggtgaggccgttagccaggaattccggcaacaatgacttccctctcctccgcggtggcactgccgtcctcgtgccgggcccggccggcggggggcagccggagggcgcggatggtggtgacgcgcgcggcggcgtcgagcccgaagctgccgaacgggcggcggctgcgggtggctgtggtgggaggcggccccgccggtggcgccgcggcggaggcgctggccaagggcggcgtggagacggtgctaatcgagcggaagatggacaactgcaagccctgcggcggcgccatcccgctgtgcatggtgtcggagttcgacctgccgctcgaccttgtggaccgcaaggtgaggaagatgaagatgatttcgccgtccaacgtcgccgtcgacatcggccgcacgctcgcgccccacgagtacatcgggatggtcaggcgcgaggtgctcgacgcctacctccgctcacgggcacagtccgtcggcgcggaggtcgtcaacggcctcttcctaaggtacgaggcgcccaaagagccgaacggctcgtacgtggtgcactacaaccactacgacggcagcaacggcaaggtcggcggcgagaagcggtcgttcgaggtggacgcgatcgtgggcgcggacggcgccaactctcgcgtggccaaggacatgggcgcgggcgactacgagtacgccatcgcgttccaggagcgcgtcaagatccccgacgacaagatggtgtactacgaggagcgcgcggagatgtacgtcggcgacgacgtctctcccgacttctacggctgggtgttccccaagtgcgaccacgtcgccgtcggcaccggcaccgtcacgcacaaggccgacatcaagaagtttcaggccgccacgcgcctccgcgccaaggacaagattgagggcggcaagatcatccgcgtcgaggcgcaccccatccccgagcaccccaggcctaagagggtgtccgggcgggtgacgctggtgggcgacgccgcggggtacgtgaccaagtgctccggcgagggcatctacttcgcggcgaagagcgggcggatgtgcgccgaggccatcgtggcgggctccgccaacgggacgcggatggtggaggagagcgacctgcgcaagtacctggccgagttcgaccgcctctactggcccacttacaaggtgctggacatcctgcagaaggtgttctaccgctccaacgcggcgcgcgaggccttcgtggagatgtgcgccgacgactacgtgcagaagatgaccttcgacagctacctctacaagcgcgtcgtgccgggcaacccgctcgacgacatcaagctcgccgtcaacaccatcggcagcctcgtcagggccaccgcactgcgccgggagatggagaaggtcaccttgtgagccgccgcccgcgacgtcattgccgtcgaaatggtgtcgcagctgatcggccggtgtattagtagagatttgcggctgatcgggttaatttaggccaacatgcgtgggcagtgggcgcggagaggaagagaaacaagttgtgcaagtgcagcaagtagatcaaaagtgctgcctgtttgtatcgatggatcctgcaacatatagcatctggtgatgttgagaattcggagcagttcatcgactggattctgacgccggcaagcatcgacgtcaatgaatgtctaatacttagtacatcaagacatgtaataaaactgaaactcccccgttctggttctgattactgtaaccctaatccatgtatcttcagtttctg

SEQ ID NO: 25058 - DNA, 2019 bp, Zea mays
  Clone ID: LIB3689-243-F12_FLI
ccggcacgagaccgaccccgtttcctcgctccttcgtctctcgctgacactgtttgacccctgtcctccaggctcggctccagctaaggtcgagcggcgaggcgacagccctagtgtagcgcggcgcggtaccatagatggggagacgaatggaggccccctcctcgccggcgtccctcgtcgtcgtcctcctcctcggctcgctgctcctgcaggcacgcgccgatgacccctacaggttctacacctggaacgtcacctttggcgacatctacccgctcggcgtcaagcaggaggggatactgatcaacggccagttcccggggccgcagatcgacgccgtcaccaacgacaacatcatcgtcaacgtcttcaacaacctgccggtccccttcctcctctcctggcagggaattcagcagcggaggagctcatggcaggacggcgtgtacggcaccaactgcccgatccctccgggcggcaatttcacttacaacatgcagttcaaggaccagatcgggagctactactacttcccttcccttctgtttcacaaggcagctggcggttacggtgccatcagggttctcagccggccgaggatccctgtcccgtttgacccgcctgccggggatttcaccatattggcgggtgactggttcaagctcaaccacaccgacctgaaaggcattctggacagtggcaatgacctgccgtttcctgacggccttcttatcaatggccaaggttggaatggcaacagattcacggtggaccaagggaaaacgtatcggttccgggtgtcgaacgtgggaatcgcgacctcggtgaacataaggatccaaggccattccatgctgctggtcgaggtggaggggtctcacaccatgcagagcacttacacgtccatcgacgtccatctaggccaatcatactcgttccttgttactgctgatcagccacctgcagactactccatagttgtctccacacgctttaccacccctgtcctcaccaccgctgccatcctccactacagcagctcaaatggtgctgcaagtgtgccgcctcccccggcgcctaccgttgagatcgatttctctctcaaccaggctagatccatccggtggaacctgacagcgagtggaccaaggccaaaccctcagggttcctaccactacggtctcgtcaacaccacaagaaccatcaggctcgccaactcgcgggcaaccatcaacggcaagctgagatacgcagtgaacggcatctccttcgtcccggccgacactcctctcaaggttgctgatttctacagcatcccgggagttttcacgctgggcagcatgcccgacaacccgacgggcggcggcgcttacctccagacgtctgtgatggcggccaacatgcgggactatgttgaggtcgtctttgaaaacgcggagaacttggtgcagtcgtggcacatcgacggctacgcgttctgggtcgtcgggatggatggaggacagtggacaccggctagtcgtcagggctacaacctcagggacgccattgctcggtacacattgcaggtgtaccctcagtcatggacggctatctacatgccgctggacaacgtggggatgtggaacgtgaggtccgagagctgggccaggcagtacctcggccagcagttctacctccgcgtctactcgccggcgaactcgtggcgggacgagaacccgatccccaagaacgcgctgctctgcggccgggcctctggacgccggaccaggcctctctgaagctgaatccctgagcccaagaagaccatgtttgttcggccacgaaggggtggccggaacttgcggggatcaattgaagttgagggaagagatgattggagtgttcagattgctgaactgagttccattttgtggcgctgatgatcgttcagctcatatattatttagcaattgtagctaaaacattaattcccggtcgatttgttgtatgtgaagcttcctcgcttcctcgctc

SEQ ID NO: 25059 - DNA, 628 bp, Zea mays
  Clone ID: LIB3689-243-G11_FLI
gcaggcttcgccgctatcactccaaggggcgcgaccatggtggccacaaagaagacgaagaaatccacggacaacatcaataacaagctgcagcttgttatgaagagtggcaagtacactctcggctacaagaccgtcctcaggactctcaggaactctaagtcgaagctagtgatcatcgctaacaactgcccgccccttcgtaagtctgaaattgagtactatgctatgctggccaaggtcactgtccaccacttccatggaaacaatgtcgaccttggaactgcctgtggtaaatactttcgggtctgctgcctcagcattattgatcctggtgattctgatatcatcaagactacaccgggtgagcagtaaagaagcccctgcagtagggggatcttactgcatttgttcttctgtcttgttaaacagcatttacctgctagtaaactgagttattcggaacattgtcttgaattgaatttttgctccggtgttttgacacttaaatagagctttagcttataccgttgttcaggtcgcagctgtatgttgtcactatcaaaccgtcaaacgaatgctccaccagtggaggtatctcctataataaggattcattgtttgtagt

SEQ ID NO: 25060 - DNA, 1517 bp, Zea mays
  Clone ID: LIB3689-244-A6_FLI
ctctatttcccccagtgctagctctctctctctctctctctctcaaatactgcccatgcggcttgccctcctcgtttgatgaggccaatggccagcaatggcatggcgtccgcaccctcgcccttcttccctccaaacttcctcctccaaatgcagcagacaccctccgatcatgagcatcaagaacagcatcaccaccaccaccaccacaagcaccacctcgctgctcctccccttcatcctcaccacaaccccttcctcccctcttctcaatgcccctcgctccaggacttcagaggtatggcgccaataatgctggggaagcgtccgatgtacggggcggacgtgcaggtcgtcggaggcgaggaggtgaacggctgcggcggcgtgaacgaggacgagctgtcggacgacgggtcccaggccggcggggagaagaagcggcggctgaacgtggagcaggtgcggacgctggagaagaacttcgagctcgggaacaagctggagcccgagcgcaagctgcagctggcgcgcgcgctgggcctgcagccgcggcaggtggccatctggttccagaaccggcgggcgcggtggaagacgaagcagctggagaaggactacgacgcgctgaagcgccagctggacgccgtcaaggccgacaacgacgccctcctctcccacaacaagaagctccaagccgagatactgtctctgaagggcagggaggcagggggctcgtcggagctgatcaacctcaacaaggagacggaggcgtcctgcagcaaccgcagcgagaacagctccgagatcaacctcgacatctcgcgcgcgccggcgtccgaggcccccctggaccccacaccgccgcccggcgccggcggcggcggcatgatccctttctacccgccttccgtcggcggccgtcctgcttctgctgctggcgtggacatcgaccagctcctgcacacctccgcccccaagctggagcagcacggcagcggcggcgccgtcgtcgtccaggccgcggaaaccgccagcttcggcaacctcctgtgcggcgtcgacgagccgccgccgttctggccgtgggccgaccaccagcacttccactgatagatcgcctcctcttgtccccgccacaagaaataataattctcaatgccacaattgcgatcaacgttcgatgcagccagatggaacagcggaggatcgattcttggcgagtggagcagcgagggagagagagagagagagagagcgagtaagcaaggttgtgtatgatctgatcgatcggcgaggtcgtagctgcgagatatgcgatggagctagtagctgatcatggtggaaagtggggtttgtaagcgcaataagcggagatgcggtgtaatttaattaggtaggttttggtttgagttttgatagtatctttatttttgcgtcttcattttttttttggtcttcgcgttttgttcgcttttttttttgttcacacatatataaatttgtgaattgtgatg

SEQ ID NO: 25061 - DNA, 1752 bp, Zea mays
  Clone ID: LIB3689-244-B4_FLI
ccctcctcgtctcccccgttcggcggcgcgacggtagagagattccgtcgaacacatggccgctctcgcctcagccgcccgctcgaggcgccggctccttccctatctgtaccgcctcctccactccgcgtccacaaccgctgtctccccgtcgccctccaccagccgcttcctccgccacgcctcgccggtgccccgcacccctgaccactccccttaccttcggttccccgccgcgcgcgtctctacgctcccctcaggcctccgcgtcgtcacgcaggcctacccggtcgccacacggattgcctccgtcggcgtctgggtcgatgcggggagccgcttcgagctccctggaaccaacggaaccgcacacttcctggagcacatggccttcaagggcacacggcgccggcccaacgcgcaggtgctcgaggtggagatcgaggacatgggcgcgcgcctcaacgcgtatacctcccgcgagcagaccaccttttttgccgacgtgcaggcgcgccacgttccggcggcactcgacgtcctcagcgacatcctacagcacccgcgattccccgaaagggctatccagcgggagcgcggcgtcatcctccgtgagatggaggaggtgcaaggtatgatggaagaggtgatatttgatcacttgcatgcagcagcattccaaggccatccactaggggacacaatattaggtcctgaagaaaatattaggtccatttctaagaaagatttggagcaatatatctcaactcactatacctgtcctcgaatggttgtatctgctgctggaagtgtcagtcacgatgaggttgttgatcaagtgaaagaattattcacagaattctccactgatccaactactgctgatcagcttgttcaggcgaacccagctatttttactggatctgaggttcgtgtagaaaatgcagagtttcctctagcacacatcgcaatagctttcaaaggttcatcatggactgaccctagctccattccccttatggtgatccaaagcatattgggatcctggaacaggagcattggggttgggaactgctcagggtcttctttagctcgtggtatcagcaatgctaatttagctgagagcctgatggcgttcaatactaactatcgggacacaggaatatttggcatttatactattgctccgcctgacaccctgcaagacttgtcacggttaataatggcggagtttagaagacttgcatcccaggtgtcagaaacagaggttgcccgtgcccgcaatcagctgaaatcttctctgttacttcacattgatggatccactgcagttactgagaataatggtcgccagatgctaacttatgggcgagtcatgccgttcctagagctttttgcacgcattgatgctgttgactgtgctacagtaatggaaactgccaaggagtacataattgataaggatattgctctggctgcagtgggacagctcacggaattaccagaacttagttggtttcgctccgaaacatgttctgacgatgattttactcgaagaatattatttgggaatgcaaagtagttgaagctgtggctctgttttggtattgttgtaactctaggtcaatcattctaagaaactatcaattgatagatagcatcagctatttcagttatttgttagttttgcgcttgtactgtgtacttatttgacgcaaaatgtgcaaataatttactttgctgtggtgctct

SEQ ID NO: 25062 - DNA, 1413 bp, Zea mays
  Clone ID: LIB3689-244-E11_FLI
gggcgacagaactgattgggtgatgtacgaatacagaatggaagatgaggatttggtttctgctggtttctcaaaggatgcttatgtactctgcaaaattttcaagaaaagtggccttggtccaagaatcggagagcaatatggggctccatttaatgaagacgaatgggataatgcagaagtcgaaacttctctgtttcctttgacttgttcagaagtgaatccaacagagggacaacgtgctcagcctactgtcctggctggtgctcttctggaacccgaaccacctctacataattcatcttctacatgtgctggagaggaatcatcatttggtcatgccactgctgaggacttaacttttagctatactgttgctagctctgctatcgaagatacacctgctcggatgtcaggagacggtgtggtttctgtgaacaacatatccaatgtggccaatgacatgcgtagtcctcgtgactgtgatgaatttctatcggagttgtctagatttatgaatgattctcctctgcataacactcctcttggagagtgctctggtcttcctccgatgtctgaagctgaggctcatgcttttgaagtcaactcttttggcctctacaatgaattatcagagcttgttgagttaggaggcgcggataacaacttaaacaccagcaatgtggaaactacagattacctcatgttgccacctgacagagaactgtcggctaatgattacatggaactaaacgatctccttgctcctgacccaagcttccccagtgaattttctgctcaggacaatcaatatatgcagcattctcttgctcagtacaatggacattatgatctgtcaggtccttcggagccaacaatgcctagcattttcgatgtttttcctcccaataatggagtcctcttaacagatgatccagccaactacttggacccagccatgcagttccctttctcatgattggtcagcttttgtcatggaggtacggatgtttatacctgctctttttgtgcttgaacttgtctggactgcttcggtgttgcaacttgcagctcgctgttgctacaactctatccaccctgaacgtcaaggacgtcattgatgtcatgcctgggcccatgaaatcttctgttgctcttctgaaccaagccgaccttggctggtattcttggaagcacggtgcttggaacaatctgcatcgactgctgtatgctcccaactggttgagctaacggccaatctcggctcactctgctgaggagatcatagcctgtaaatctttgattatgctattacttgtgtgtgtcgcaacctgcctgattaccattgtcttgtgtttcgagttttgacaatatgcaaaccataataatgtcgtaatatggaactcgtttatc

SEQ ID NO: 25063 - DNA, 1371 bp, Zea mays
  Clone ID: LIB3689-244-E2_FLI
aagaacctgtttggtggttgcattgtttgctttggtaattcaactttgcttttgcttgtttcttctttattccgtgccaatgatgattcactttcaaggtgaattctttgatggttgcattgttggctttggtaattcaactttgcttttgcttgtttcttctttattccgtgccaatgatgattcactttcaaggtgaattctttgattgttttgtgatgttcttgaggcgttcaactgaggcacgaccgaatcgaaatttaattactgctttgtagttcatcaaaatcttggctttaattcagtagtagaaaattgaactttgaaactttgtattcgtgtcaaatctttttttatgttactcatctcaagtgtactagtgatgctgaattttggatgactttatttgctggttcacagctacggtgatatgcatttgaggtgtacacctgaggcacgtcgcacgcttgaagaagcctatgcacttgttctttctgatccttaagtttgaaggttcattcgtttggtctttcgaatggttcttattgcatcagcagctaatttcttgcatgaaaatagcgatttgcttaggttaccctgcacctactttcaacaaatatgtcatgttttttctcattcatttgtgatttgcctccaacgtcctcatgagtttgatcagtacaatatcatgcattttcttaatcaagtgtatggtttggaaaaaaagatgcgttgaagtatcaatgccaattagaataaactagtgctaacttagtcatgctaaaataactagcatgaaccacggaaggaggaaataactggattcgtgtggctgcatgtatgtatgttaatttggactttagacataatatagcattagtttgtatggggtgtgggttttatctatctcgatctggtcttaataaattaagattttctctcagttcggattccatctctgtttgtatcctttgtaaataaagtaccttaattttgtagtgaaaacttttataagaaaactacagcggtggttaccttggcgaagtgaagggtggtggttggaactttggtgaccaaaaaatatgtaaagtggtggacagagatataaagtggtggaaagcattggaatatgatactttggtttgttttgcaaaatttcattgttaagagaattttggtttgtttttctattgataaatggcttgccttttacatcgtagttccatgtttttagctctatttttaagctacataagtgtagctctataagttctattctagaaaaaagagtttttagagcatttaaaaggatgttatgtaacaagagcccaggatcgtattttgaaatatatgataacaaaatcctattat

SEQ ID NO: 25064 - DNA, 1419 bp, Zea mays
  Clone ID: LIB3689-244-F10_FLI
cctcccccgaaccaaacaaacctcaccgaatcgcaacgacagcgagaacgtccaaacgagcgcgagtctccggcgataaccaagagcgcgggcacgcaaagcggcgaagcgcgaaggaagcagcaacgatggggcttgactactacaagatcctaggcgtcgacaagggcgccaccgatgacgacctcaagaaggcctaccgcaagctcgccatgaaatggcaccccgacaagaaccccaacaacaagaaggaggccgagaacaagttcaagcagatctcggaggcgtacgaggtgctgagcgacccgcagaagcgcgcggtgtacgaccaatacggcgaggagggtctcaaggggcaggtgccgccgccgggcgccggcggggcgggccccggcggcgcaaccttcttctccaccggcggcgacgggccaacggtattccggtttaacccgcgcaacgcggaggacatcttcgccgagttcttcggtggctccagccccttcggcggtatgggcggcggtggcatgggcggcagcggcatgggcggtgggatgcccggcatgcggagcggcgggacgaggttctcctcctccatctttggggacgacatattcggctctgcgttcggcagcggcccggacgggcacggcatgcacgccggcgggcgggccgtgaaggcgccggccatagagcggaagctgccgtgcagcctcgaggagctgtacaagggcaccaccaagaagatgaagatctccagggaaatctctgacgccagtgggaagacgatcccagtggaagagatcctaacgatcgacgtgaagccggggtggaagaagggcaccaagatcacgttcccggagaagggcaacgagacgcccaacacgatcccggcggacctcgtcttcatcatcgacgagaagccgcacccggtgttcacccgcgacggcaacgacctggtggtgacccagaagatcccgctggcggaggccctgacggggtacaccgcgcacgtgacgacgctggacgggcgcagcctgacggtgcccatcagctccgtgatccacccgggctacgaggaggtggtgcgaggggagggcatgccgatacccaaggacccgtccaggaagggcaacctccggatcaagttcgacatcaagttcccggcgaggctcacggcggaccagaagtccggcgtcaagaggctgctcgggcagtagaacgcgcttgtgttgttttggagtattgtgtatcagacattttcgtgttggttcatcttgaactggggtggagggagctgccatttgcagcctccgcaacgacgacgatgacgaggccaccaagtgttgagtacagaacagctactattgtacggtgtatggttgagaaacttgagatgtgtagcggaggattccttgtgcg

SEQ ID NO: 25065 - DNA, 1547 bp, Zea mays
  Clone ID: LIB3689-244-F4_FLI
cacgccagtacttttcgcagccgtcgtgcaaagctctctccaagccctcgccctttcacgctcccttgagggctttgatgcgggtggagtccagcggcggcctcccactcccagagctggaaagacagcaggcgggcgccaagagacgccgccggcgggcacgggcggcggcggcggcggcggcaccccgaacgatggccgcgcccgccaccgccgtgcagcggctcttcgaggcgtgccgcgaggtcttcaccggagctggtccaggcgcggttccaccgccggccggcgtcgagaggatcaagtccgttctagatagtatcacagcagcagatgttcgtctaacatccagcatgccatatttccgacgtgttgacccctacggcactccaaaaatcacttacttgcacctatacaagtgcgaggctttctcgatcggcatcttttgtttgccatcgaggggtgtcattcctctccacaatcaccctggcatgactgtgttcagcaagcttttgtttggtgccatgcatataaaatcttatgactgggctgcttctcaacaagacacacctgatgttcagttgcaagcaggaccacgtttggcaaaggtgaaggttgatggcatcttgactgcacctcatgaaacggcggtactatatccagaagatggtggtaatatgcattgctttaccgcacagaatgcttgtgcagtgcttgatgtccttggccctccatatgatgatggcagcggaaggcactgccagtactacaatgtccgttcctctgcaatttctgttggctcaactatattgcctggaggtgacagatatgaatggctggaggagagcgagccatctcgagatttttatcttgttggatcaacatatatgggcccgaaaatttgggaccactgaacttatatgcctgtgagataggatgtgcctatagctgttcggctgctagaaaagttgctgcacccacagcgtttcctgagaggaaaaaaaaagcctactgctcacttcaacagttcaacagcatcgttacctgcctcttcagcagttcaacagcttttaacagatcagtatatgttggttttggaggaagtgattaggaagaagaaacgatggaccacaatggtaagtgctcaccgttcgtaaatatatgacaccgttgattttttttaaaaattttaatcactcgtcttattaaaaaaataatgagttatcatttatttttatatgatttagtttgtgtttgacttaaaatgtttacattttagaataaatattttgaataagatgagtcgtcaaagttttcaaaaaaaatcaatagtgtcatatatttatgaatggaggtagtactcacttcggactgaattattgtggaaagaccatgaggatgtccggaaagtcacagtcatgcttcagtatgaatacgacctggatcctcggacgattatcaagtgtattgtatcctgtaatagtgtcaattgtcaaacacgcattgccaccggagataaaaaaaaaagtctcctgataacttgccgt

SEQ ID NO: 25066 - DNA, 1724 bp, Zea mays
  Clone ID: LIB3689-244-G12_FLI
ctgcagacaccaccgctcgtttttctctccgggacaggagaaaaggggagagagaggtgaggcgcggtgtccgcccgatctgctctgccccgacgcagctgttacgacctcctcagtctcagtcaggagcaagatgggtgccggcggcaggatgaccgagaaggagcgggagaagcaggagcagctcgcccgagctaccggtggcgccgcgatgcagcggtcgccggtggagaagcctccgttcactctgggtcagatcaagaaggccatcccgccacactgcttcgagcgctcggtgctcaagtccttctcgtacgtggtccacgacctggtgatcgccgcggcgctcctctacttcgcgctggccatcataccggcgctcccaagcccgctccgctacgccgcctggccgctgtactggatcgcgcaggggtgcgtgtgcaccggcgtgtgggtcatcgcgcacgagtgcggccaccacgccttctcggactactcgctcctggacgacgtggtcggcctggtgctgcactcgtcgctcatggtgccctacttctcgtggaagtacagccaccggcgccaccactccaacacggggtccctggagcgcgacgaggtgttcgtgcccaagaagaaggaggcgctgccgtggtacaccccgtacgtgtacaacaacccggtcggccgggtggtgcacatcgtggtgcagctcaccctcgggtggccgctgtacctggcgaccaacgcgtcggggcggccgtacccgcgcttcgcctgccacttcgacccctacggccccatctacaacgaccgggagcgcgcccagatcttcgtctcggacgccggcgtcgtggccgtggcgttcgggctgtacaagctggcggcggcgttcggggtctggtgggtggtgcgcgtgtacgccgtgccgctgctgatcgtgaacgcgtggctggtgctcatcacctacctgcagcacacccacccgtcgctcccccactacgactcgagcgagtgggactggctgcgcggcgcgctggccaccatggaccgcgactacggcatcctcaaccgcgtgttccacaacatcacggacacgcacgtcgcgcaccacctcttctccaccatgccgcactaccacgccatggaggccaccaaggcgatcaggcccatcctcggggactactaccacttcgacccgacccctgttgccaaggcgacctggcgcgaggccagggagtgcatctacgtcgagcccgaggaccgcaagggcgtcttctggtacaacaagaagttctagccgccgccgctcgcagagctgagaggacgctaccataggaatgggagcaggaaccaggaggaggagacggtactcgccccaaagtctccgtcaacctatctaatcgttagtcgtcagtcttttagacgggaagagagatcatttgggcacagagacgaaggcttactgcagtgccatcgctagagctgccatcaagtacaagtaggcaaattcgtcaacttagtgtgtcccatgttgtttttcttagtcgtccgctgctgtaggctttccggcggcggtcgtttgtgtggttggcatccgtggccatgcctgtgcgtgcgtggccgcgcttgtcgtgtgcgtctgtcgtcgcgttggcgtcgtctcttcgtgctccccgtgtgttgttgtaaaacaagaagatgttttctggtgtctttggcggaat

SEQ ID NO: 25067 - DNA, 978 bp, Zea mays
  Clone ID: LIB3689-245-A11_FLI
tcgtggtgctgggcgtggccgccgcggcgtcggcgcagggcccgacggcggcgccaacgacgcccacgccggcaacccccgcggcgcccgcgcccgcgacggcgtccagcaacatcacgggcgtgctggccaaggccgggcagttcaacaccttcatccggctgctcaagtccacgggcgtggcgtcgcagatcgacaaccaggtcgccaacggcgggaacggggtcacggtgttcgcgcccacggacaacgcgttccagtcgctgccctcgggcacgctcaactcgctgtcggaccaggacaagaacgcgctggtgcagtaccacgtggtgtccaccgccatccccatgtcgcagttcgacaccgtcagcaacccgctccgcacgcaggccggcagcgcctcgccgggggagttcccactcaacgtcacctcctccgagggccagcaggtcaacgtcaccacgggcgtcgtcaccgccaccgtcgacaactccctctactcgggcgacagcctcgtcgtctaccaggtcaacaaggtgctgctccccatgaagctcttcggcgccgcggaggcgcccgcgcccgcgccgctcgcgccggccaagaagaagggcaagacgccggcggccgtcgccgactcgcccgacgcggcggaggcgtccccggacgccacgaccacgtcgctcgcgcccgcgaggctgacgcggggtggcctcgccacggctcttgcgctcgccggcgtttggtgggggctgtagtcacggcgaggagtgtctcgtcaggtctctccggtggccgtgacatctatactttttttttcgttcgcgggtcttgtttgtcttttcgtttttactttattgcccatttttggatgaattgttcttccctgtcattcaaattgctaggagtatgtcatgtcatgtaacgtccttgtcccatttttatgtaatgttaactaaataaatatgagttgtgtat

SEQ ID NO: 25068 - DNA, 1367 bp, Zea mays
  Clone ID: LIB3689-245-A12_FLI
gctctctctcgcctctggttggcagagctctcttgaagcctcgagactcgtctcgccgctgctccctcagctctgccgctgcgtgcctccgttagctgttgcattgcagcgcagccccgcgagccttgagctgctagctcgcccttcaccacagtcctcagacatggagttcgaagaccgctgccacaaggtccaggagcccaagttcgactgcctgctcttcgacctcgacgacaccctgtatccgctgagcgccgggatcgcaggccatgtcaagaagaacattgaagattacatggttgagaagctgggtattgacgagaccaagatcgagaacctgggcaatctgctgtacaagaactacggcaccacgatggctggactcagggccatcggctacagcttcgattacgatgagtaccacgccttcgtccatggaaggctgccgtacgacaacatcaagcctgaccccattctcaagcacattctcaagaacctgcgcatccgcaaactcatattcaccaacggtgacatggtccacgccgtgagagccctcaagaggctgggcctggaggactgcttcgaggggatcatctgcttcgagaccctgaacccgccctgcccgccgcagggagaccaggagcccgagatcttcgacatcgccgaccacttcgcccgctccggcaccgccgacgagctgcccaagacccccgtgctgtgcaagcccaacgtggacgccatggaggaggcgctcaggatcgccaacgtcaacccgcacaaggcgatcttcttcgacgacagcgtacgcaacatccaggccgggaagcagattggcctccacacggtgctggtgggcaaatcgcagcgggtgaaaggcgcggaccacgcgctggagagcatccacaacatcagggaagcgctgccggagctgtgggaggaggccgagaaggcggaggacgtgctctaccccgaacgcgttgcgatggagacctcggtcaccgcgtaaaacccctgaatgcctccggtgcaccgtcagccgaactttctcgacatctccaggaccgcatcaacgatcacatgtcactcgctccccgagccagggccggtgatgatctcgcgctggaactgaatccaccagcaatggccgggccgaggatcgatttccgacagcaggaggggtgcagcatgtaaagggggaacagatgagatcatgtttgggttggtcccccgttgtatatgtagttatgtatcagccagtcctttgtttgtaaattaccagtatttagaagtaataagaaaatgggggtttacgtgtacgtttcctgtgctctgtcatctgaagcaataaaactggttagcatgaccgg

SEQ ID NO: 25069 - DNA, 1289 bp, Zea mays
  Clone ID: LIB3689-245-C12_FLI
gagagagagagactgccaacgaggcgaagcagccggccaatctagcatcagcgcgcggggtctgagagcagagcggcagggcgccatggcggcatcggtggcgctgagcagcgggcaccggatgccggcggtggggctgggcgtgtggcggatggagaaggcggacatccgcggcctcatccacacagcgctccgcgtcggctaccgccacctggactgcgccgctgactaccagaacgaagctgaagttggtgacgcgctcgcagaggcattccagaccggactcgtcaagcgggaggacctgttcatcacaaccaagctgtggaactcagaccatgggcatgtgcttgaagcctgcaaggacagcctgaagaagctgcagctagactatctcgacctctacctcatccatttcccagtagccactcggcacaccggagtcggcacgacttctagcgctctgggtgacgatggcgtgctggacatcgacaccactatctccctggaaacgacatggcacgcgatggaagagcttgtttccatggggctggtgcgcagcattggaatcagcaactacgacatcttcctcaccagagactgcctggcctacgccaagataaagccggcggtgaaccagatcgagacgcacccctacttccagcgcgactcacttgtcaagttctgccagaagcacgggatctgcgtgaccgcgcacaccccgctgggtggctccaccgccaacgccgagtggttcgggacggtctcgtgcctggacgaccctgtcatcaagagcttggctgataagtacggcaagacgccggcgcagctcgtcctccgctggggtctgcagcgggacacggtggtgatccccaagacctccaaggtggagaggctgcaggagaactttgacgtcttcggtttcgacatctccggcgaggacatggagaggatgaaggccatcgaccggaagtaccggactaaccagcctgccaagttctggggcatcgacctctatgcttagcttttagttcggttgcgttgcgtcgcgtactcgcgtgctgcgtctctcggcccccccagacaagacagcatcaataatgaggataccctcagacggcatcagtcaaagtcatgaggatctcagacagcatcttccatcacatgtgacggtgtgaggttgatggtagggtttggtatccccacgtgtccctctctctttcagctcagctaatcatcaccatgtagactacgcagtgtttgcctccgattatttactgtttttcttcctt

SEQ ID NO: 25070 - DNA, 1699 bp, Zea mays
  Clone ID: LIB3689-245-D11_FLI
ctcactaaacccttttgccctaaaccctaaacaagaagctacccgccttccccaccccaacccccaatcctgccgcggtgccgccatgtcgtccacgccgccggccgtcgcgtcccccgcctccgagcaaacaaaatccaagaagaagaagcacaagtccaaggatctccccgccactgacccgccatcgctcgccgaggctgaggagaagactgatggctacctaatcaagccccagtccctggtgccgtccctggacacctcgacctggccgctcctcctcaagaactacgaccgcctcaacgtccggactggacactacaccccgctcccctccggccactcgccgctgaagcgccccctcgccgagcatctccgctacggcgtcatcaacctcgacaagccgtcgaacccgtcctcccacgaggtggtcgcctggatcaagcgtatcctccgagccgagaagaccggccacagcggcacgctcgaccccaaggtcaccggcaacctcatcgtctgcgtcgaccgcgccacgcgcctggtcaagtcgcagcaaggcgccggcaaggagtacgtgtgcgtcgctcgcttccacgccgccgtgccggacaccgcgcgcgtggcccgcgcgctagaggcgctgacgggcgccgtgttccagcgcccgccgctcatctccgcggtgaagcggcagctcagggtgcggaccatctacgagagcaagctcctggagcacgaccctgagcgccacctcgcggtgttctggatctcctgcgaggcaggcacttatgtccggactctgtgtgtgcaccttgggctgctccttggcgtcggcgcgcatatgcaggagctgcgccgtgtccggtcggggatcctcggggagcaggacaatatggtgaccatgcacgacgtgatggacgccatgtggtcgctcgacaactacaaggacgagtcctacttgaggcgcgtcgtcatgccgctggaggtgctgcttacaagctacaagaggcttgtcgtgaaggattctgccgtgaatgctatctgctatggcgctaagcttatgatccctggcttgctccggtttgagaatgatatcgagaccggggaggaggttgtcctgatgacaacgaagggggaggcgattgccattggtattgccgagatgaccactgctgttatggcaacctgcgaccatggcgcggtcgcaaagatcaagagggtcgtgatggacagggacacgtacccgaggaagtgggggcttggtccagtggcactcaagaagaagaagatggtcgccgagggcctccttgataagcatgggaagccaaacgagaagaccccagctgagtggctccgcaatgtggtgcttcccactggcggcgatgtatcgatcgctagcatcgcagctgctcctgagccagagaaggtgaaggtggaacaggatgcagttgccggtgaaaaggtcaaggagaagaagaagaagaggcagaaggatgaaaacaatggcgacgatgcttccgttccggctaagaagatcaaggtcgaggaagatgccgaggtagtggaagtggaaggggacaagagcgagaagaagaagaagaagaagaaagaaaaggtagaatcagaatcagctgatgccgccgaagcgaaggaggtggagaaggctgatgatgcagctggcgagacgggcagcgaaaag

SEQ ID NO: 25071 - DNA, 1621 bp, Zea mays
  Clone ID: LIB3689-245-E10_FLI
caaccacttactctcgtgcgctctccgtgggagcgaggactcgcggccggcgcagcggcaggttctcctagatctccgggtaagcggtgaaagaagaggaggtgttggaggaattagttccgaatctttctccattacgattttcgtggcgtcgagcatcatcagtaacaaatggctgacggtgaggacattcagccccttgtttgtgacaatggaactggcatggtcaaggctggttttgctggtgacgatgcgccaagggctgttttcccaagcattgtcggacgcccccgtcacactggtgtgatggttggcatggggcagaaggatgcgtatgttggtgacgaggcccagtccaagaggggtatcctgactttgaagtaccccatcgaacatggtattgttagcaattgggatgacatggagaagatctggcaccacaccttctataatgaactccgtgtggcgcctgaagagcaccctgtgctgctgacggaagccccactcaaccccaaagctaacagggagaagatgacccaaatcatgtttgagaccttcaatgttcctgccatgtatgtcgccatccaggctgtgctttccctgtacgccagtgggcgtacaactggtattgtgttggactctggtgatggtgtcagccacaccgtgccaatctacgaaggttatgcccttcctcatgccatcctgcgtcttgaccttgctgggcgtgacctgactgacagcctgatgaagatcctcaccgagagaggttactccttcaccaccacggccgaacgggaaatcgtacgggacatcaaggaaaagcttgcatacgtggctcttgactatgatcaggagctggagaacgccaagagcagctcatctgtggagaagagctacgagctgcctgatggccaggtgatcaccattggggcggagaggttccgatgccccgaggtcctcttccagccttccttcattggtatggaagctcctggcatccatgagaccacctacaactccatcatgaaatgcgacgtggatatcaggaaggacttgtatggtaacattgttctcagtggtggcacaaccatgttccctggcatcgctgaccgtatgagcaaggagatcaccgcccttgccccgagcagcatgaaaatcaaggtggtggctccacccgagaggaaatacagtgtctggataggagggtccatccttgcctccctgagcaccttccaacagatgtggatctcaaaggctgagtacgatgagtcaggaccagcgattgttcaccggaagtgcttctaagctcaagggcccccttcgtccccattctatgtattcctttccttgagtgcttttcttataagctactatgtttgagattgccggcctttgagcaggcaatgttgttggatctgtatcttgtggatcactacaatgcatgcgttgctccatcttcttttcatgccaagtttgctgtcatacttgctagtggggaaaacaacaatgacaacagtggtgagaacagcaaccacaaaaaaagagaggatggaaattattgaagttcctaggatcgtattgtaactgtacttgtgcgagtaacattattggttctctttgt

SEQ ID NO: 25072 - DNA, 1080 bp, Zea mays
  Clone ID: LIB3689-245-E2_FLI
tcccaccgaatggacagccgcctcgccatcgccgcgctcctcctgctcgcctccgcctcctccgctgccgcggacggcgggaaggtggccgtggcgctgtactacgagtcgctgtgcccctactcggcgcgcttcgtggtgaaccacctcgccaaggtcttcgcggacggcctccgcgaggtcgtggacctcacgctcgtcccctacggcaacgcccggatccaccccggcggagagatctcgtgccagcatggtccgtacgagtgtctgctcaacaccgtggaagcttgcgccatcgacgcctggccggatctggtaatacttctctcacctcttaaactctgctcctagtcataggacttttttcatgcgaggaggagtctgagaaactccggtaaaacgtgtaacaagccgatcgttgatcggttgatcaaaatgaatctgccatcgacaaattagctgtgatcaaagcttcgggggggcaaatcgacaccatttctgcagttttctcaagcaaatcttgtacagtactagttctcaaggcttcagtggatgcccacttcgccgttgttgttgggtacaggatgtgcatttcagcttcatctactgcgtggaggacctggtggtgaagcggcagtacaaggactgggagtcctgcttcgagaagctgggccttgacgccaagcccgtaacagaatgctacaaaagcgagcatggccacaagctcgagctcaagtacgcgaaccagaccgacgctctcgagccgccgcaccggtacgtgccctgggtggtcgtcgacgggcagcccctgctagaggattacgagaatttcgaggcttacatctgcaaggcttacaagggcactccaccgaaggcctgtgagggcctggaacgtctgcagatggccctcgagacagcggcggaggcgcgcaacggcgtcagctacaactccggtgtcagcaagcttgcgactgctgaagatgagggtggggagcataaggtgggagaatactagtacgtaattgactagcgacgtgcccttttttgggtcatgtgaagatatgaaggaccgttccatct

SEQ ID NO: 25073 - DNA, 1167 bp, Zea mays
  Clone ID: LIB3689-245-F3_FLI
ggcaaaagccaaaaggcatcaccgccgcgacgacgatggcagcctcgctccaagccgcggccaccctgatgcagccggccaagatcggcggccgggcgccctttgcctcgctgccgtcccgcccgtcgtcgcaactcgcctgcagggcgttcggcgtcgacgccggcgccgccaggatcacgtgctccctgcaggacgtcgccagcaggtgcgtcgacgccgcgaagctcgccggcttcgcgctcgccacctcggcgctcctcgtctcgggcgcgagcgcggagggcacgcccaagaggctgacctacgacgagatccagagcaaaacgtacatggaggtgaagggcacgggcacggcgaaccagtgcccgaccatcgacggcggcgtggagtcgttcccgttcaaggccggcaagtaccagatgaagaagctgtgcctggagccgacgtccttcaccgtcaaggcggagggcatcgccaagaacgccccgcccgagttccagaagaccaagctcatgacccgcctcacgtacacgctggacgagatcgagggcccgctcgaggtcggctccgacggcacgctcaagttcgaggagaaggacggcatcgactacgccgccgtcaccgtgcagctcccggggggcgagcgcgtgccgttcctcttcaccgtcaagcagctcgtcgccaccggcaagcccgagagcttcggcgggcccttcctcgtgcccagctaccgcggctcctccttcctcgaccccaagggccgcggcggctccaccggctacgacaacgccgtcgcgctccccgccgggggcagaggtgacgaggaggagctccagaaggagaacatcaagaacgccgcctcctccaccggcaacatcacgttgagcgtcaccaagagcaacccggagaccggcgaggtcatcggcgtcttcgagagcgtgcagccgtccgacaccgacctcggggccaaggcgcccaaggatgtcaagatccagggggtctggtacgctcagctcgagtgattcgagtgtctaactgctaggtgtccgaccgccgtcatggatcttgggaaggtgtatgtataccatggaaaactttggagagcagaggaggaatcgtgtatgtaatgtacttgttaatgcaaattcgggctgtcgctttttt

SEQ ID NO: 25074 - DNA, 1094 bp, Zea mays
  Clone ID: LIB3689-246-A12_FLI
gctgcaaatctttctctgaattgtgggtctccgacaatggcggcgctcgctccatccaagattctgggcacccagctcaacttcgcgggctcctcccgctacgccaccgcagcgcccaccgcgggggctcagaagattgtctcccttttcagcaagaagcctgcccagaagcccaagcccgctgcggtatcgtcgtcttctccagacatcagcgacgagctcgccaagtggtatggtcctgacaggaggatctacctgccggatgggctgttggaccggtcggaggtgccggagtacctcaccggagaggtccctggagactatggctacgacccttttggcctgggcaagaagccagaggacttcgccaagtaccaggcctacgagctgatccatgccagatgggccatgctcggtgccgctggcgctgtcatcccagaggcctgcaacaagttcggcgctaactgtggccctgaggctgtctggttcaagaccggcgcgctgctcctggacggcaacaccctcaactacttcggcaacagcatccccatcaacctggtggtggccgtgatcgcggaggtcatcctcgtcggcggcgccgagtactaccggatcaccaacggactggaccttgaggacaagctgcaccccggtgggcccttcgaccccctgggcctggccagcgaccccgaccaggccgccatcctcaaggtgaaggagatcaagaacggccggctggccatgttctccatgttcgccttcttcatccaggcctacgtcaccggcgaaggccccgtggagaacctcgccaagcacctcagcgaccccttcggcaacaacctgctcaccgtcatctccggcgccgccgagaggacgcctagcctgtaaggacggacgccacgccgccgagcaatgccaagtcatgcgctgctgcatgccgtctttgattttaccgggataaaaagctgtatgtgagggtctgaagaatgtgcaatgcccacgcgtgtaaattatcgagagggggaacaaaccttttcattctgattgtgatatgactgctgcttccattggtgcctgagacatgctacttactt

SEQ ID NO: 25075 - DNA, 1449 bp, Zea mays
  Clone ID: LIB3689-246-B12_FLI
gccacgaacaaaagcgcatcgatctcgctgtcgtcactcctcgtcacccagccacgaacagaggcaccacccagcatggccctgcaggcggcgctcctcccatccaccctctcatccgtccccaagaagtgcagcctcgccgtcgcggcgaaggacacggcattccttagcgtatcccagaagaaggtgcaggcggcgtcgctgtcggtgagaacgcgggtggcgacgacggcgcctgtggccacgccggggtccagcacggcggccaaggatgggaagaagaccgtgcggcagggcgtggtggtgatcacgggcgcgtcgtcggggttgggcctggcggcggccaaggcgctggcggagaccggcaagtggcacgtggtgatggcctgccgcgacttcctcaaggcggccaaggcggccaagggcgccggcatggcggacggcagctacaccatcatgcacctggacctggcctccctcgacagcgtgcggcagttcgtggacagcttccggcgcgccggcatgccgctcgactcgctcgtctgcaacgccgccatctaccggcccacggcgcggacgccgacgttcacggcggacgggtacgagatgagcgtcggcgtcaaccacctgggccacttcctcctggcgcgcctgctcctggacgacatgcagaagtccgactacccgtcccgccgcctcgtcatcctcggctccatcaccggcaacaccaacacgctggccgggaacatcccgcccaaggccgggctgggcgacctccgcggcctcgcggcggggctgcgcggccagaacggctctgccatgatcgacggctccgagagcttcgacggcgccaaggcgtacaaggacagcaagatctgcaacatgctcaccatgcaggagctgcaccggcggtaccacgaggagacgggcatcacgttcgcgtcgctctacccggggtgcatcgccaccacggggctgttccgcgagcacatcccgctgttccgcctgctcttcccgccgttccagaagttcgtcaccaagggcttcgtgtcggaggcggagtccggcaagaggctggcgcaggtggtcagcgaccccagcctcaccaagtcgggggtgtactggagctggaacaaggactcggcgtcgttcgagaaccagctgtcgcaggaggccagcgatccggagaaggccaagaagctctgggagatcagcgagaagctcgtggggcttgcctgagctcgccggcacggcgacggcgacatgatgactctgtcgagcagaggagctttcgcttcgttgtattatgtgtaccattagcatccattttgtttgtttctagaagttggtaatgaccgtcggagaagagcctgtaattgttcgatcatgtattattgcttacaaaatttttttcaaaaaccgatgaaataaaacaacaggcttaacatc

SEQ ID NO: 25076 - DNA, 2018 bp, Zea mays
  Clone ID: LIB3689-246-C11_FLI
gccagatattattgcagcctcatacaccgcccttccctactgcttcctgagattcgagagctcgggcgccagatctgaaacctcttgtgttgtgcctttggtagtttggtgtagcattgagctagtagaggtgctgttctagttccaggatgagcaaggaggatgtcctcaaggtgcagacattgatgctgagagtgaacatacactgtgacgggtgcgagaagaaggtcaagaagaccctccacaagatcgacggtgtctaccagagcagcatcgacgcggaacagggcaaggtgacggtgtccggtttgctggatccggataccatcatcaggaagctcaacaaggccggcaagccggctcagctgtggggttccaagcccggcatcactcagaacgcctaccatggcggcggcaaggcccattccaaggacgctggcggcggcaagagccattccaaggactccggaggtggcaagggccattccaaggatgccggcggcggcaaggcccagaagggcggtgcgggtggcggcggtcacaagggccctggcggtggcggtggcggaggcggtggcgtgggcaatcctaagatggtgatgccgcagccgacgccgcagcagctccagcagctgcagcagcagctgcagatgaaggggctgaagcttccgccgcacctcttgggcggcaatatgccggcgttccccgcggctgcgccgatgaaggaccccaagtccgtcaagtttgccctcccggaggacaacttcgacgactacggcagcgagttcgacgatgacttcgacgacggcttcgacgacgacgaggacgactacgacgacgacggcctggacgacgacgtctacggcgaccccaagatgatgatgaagcccatggctgtgccgccgccggccggcgggggcgacaagaagggcggtggcggcaagaagggtggtggtggggggaacgagatcccggtgcagatcaagggaaacaaccacggcggtgccggtgggcagccgcacaatgcaaagggaggcgccccgggaggcggggcccacctgggccaggggaagaagggcggcggcagcgccgccgccgtcggcgtcggtggcccgatgggcggaatgctgcctcaacaaggcatgatgaggcctcctaacattcttggtggtgctggtgccggcttccccagcacggcccagatgggcggcggacctatgggcatgccggttggccacccgcacatgggtattatgcagcagggcggcggtggcggtggtggtggcatgccgggcctggggttccacccgggattgggcggcggcggaatgcattctggggcggatatgcttcaggccgccgcggcatccgggaaccccgtggcgcagcagcagtacatggccttgatgcagcagcagcagcagcagatgatgatgatgcagcagcagcaacagcagcacgggaacggcggtttaggatacccggcggcaatgggctacggctatggccggccaccgatgcattacccaatgggctacccagtgctgcccccgcactcgcatgctgagccttacaacatcttcagcgacgagaacgccaacagctgctcactgatgtgatcagcaattccgcatggaatggccctgttccaagtaaaccatctcaaggagctcaatgtcaccgctgatcaccgacagacatcgccatggttgaagcgccgtgaatcaatcaacaatcagtatgcttggggatgagtcctagctagaaccctgtccctttcctgctccttccccccctttctctagcttattttcgccttgctttaaaaaaaaaggaacttccttgaatgcgaagttaggtatagtaattatgaggtttccataagggaggggaggagagaggagacgatagggacttcgtacggggtcgttcgcttgtgggttcttccctcctggcttcattaaggtggactaatggtagaacaatgttgtcaatctcagtcgtaaatcagtgtgaat

SEQ ID NO: 25077 - DNA, 2253 bp, Zea mays
  Clone ID: LIB3689-246-C3_FLI
ggctgctggtgatctttgtctacacaagctaggggcaaacctatacgaacgaatcaagaaagaatgtgaaatacacatagctgaaaagatatcagcattagtgggccaaagcccagatttggttgtatttttgtctctggtccaaagaacatggcaagatttttgtgatcagatgttgattattcgcggtattgctttacttcttgatgtaaaatatgtcaagaatgtagcaaatatttgttcagtgtgggatatggggctgcagctgtttcgcaagcatctatcactatccccagagattgaacacaaaactgtaactggccttctcagattgattgagagtgagaggcttggtgaagcaatagataggacattacttagtcatcttttgaagatgcttaccgctcttggaatgtattctgagagttttgaaaagccctttcttgagtgcacttctgaattttatgctacggaaggtgttaaatatatgcaacaatctgatattccagactacctgaagcatgtagagtcgaggttgcaagaagaacatgaaaggtgcattctgtatttggaagctaacacgaggaagccactgatcgcaactactgaaacgcaattgctagaacgtcatacatctgcaattattgagaaggggttcgctatgctcatggatgcaaatcgtataaatgacctcttgaggatgtacaaccttttccagagggttaatgctgttgagctgctaaaacaagcacttagttcatatatccgggctacaggccagggcattattatggatgaagaaaaggacagagagttagttccatttcttcttgattttaaggcatccctcgacaaaatattggaagaaagttttgctaagaatgaggctttctccaataccatgaaagattcgtttgagcaccttatcaatctaagacagaaccgtcctgcggaattgattgcaaagtttcttgatgagaaacttcgagctggcaataaagggacatcagaagaagagctggagggcatacttgataaagttttggtcatgtttcggtttatacaaggcaaagatgtatttgaggcattctacaagaaagatctagctaagaggttgctgcttgggaagagcgcatcaatagatgctgaaaaatcgatgatcacaaaactcaaaactgagtgtggaagtcagtttaccaataagctggagggaatgttcaaggacattgaattatccaaagaaataaacgattcattcaggcaatcatctcaagctaggacaaagcttccctcaggcattgaaatgagtgttcatgtgcttacaacaggctattggcctacatatccaccaatggacgtgaaactcccacacgaactgaatgtgtatcaggatatatttaaagagttctatttgagcaagtacagtggaaggcgtttaatgtggcagaattctttgggacactgtgtcttgaaagcagactttcccaaaggcaaaaaggaactcgcggtgtcattgtttcagagtgtggttttgatgttgttcaatgacgcacaaaaattaagcttccttgacatcaaagattccactggtatcgaggataaagaattgagacggacactgcaatctcttgcatgtggtaaagttcgggttctccaaaagataccaaaagggagagatgtagaagataaggatgactttgtattcaatgaagattttagtgctcccctctatcgcataaaggtaaatgcaattcaaatgaaggagacggtagaagaaaacacgagcaccactgagagagtgttccaggatcggcagtatcaggttgatgcggccatagttcgaataatgaagacgcggaaggtcctgagccacacccttctaataaccgagctttaccagcagcttaagttccctgttaagccagctgatatcaagaaaagaatagagagcttaatagaccgggagtacctggagcgggacaggagtaacccccagatctacaactatctggcttgacagagctttggaggatcattaaagagaccgctcactttattatcagaaaagacactgtaaattggtttgttttccagttccttgttctttcctgtttttcttctctgggagggagttgtaactgttgcaacgtgtctgtatacgagaacgtttttttttcagtatcagtataaaatgtataagcataatgcatgtatctgtttacattacatgtatgcttgtcagttcgtgtcgtc

SEQ ID NO: 25078 - DNA, 936 bp, Zea mays
  Clone ID: LIB3689-246-D10_FLI
ccgccggggacatggcggaggaggcctacaggaagaccagggcgcgccgcccgcccggccccggctccggccctggtcccgccctcgtctcgcgccgcgagcacgtgtccatgcgcgacggggccggcggcggacaccggacctgcgtcgtcgtgcgcggcagggagcgggagatcgcggtggatctcgtctcgcgcgcgcagggccagggccaggggcgggagcgggacagggccgaggtcggcatgtcggtctccgtcgacggcgatcgcgtgctccacgtccgccgcctgcgctggaagttccgcggcaccgagaagctggacctcggcgccggcgaccgcgtcctcgtctcctgggaccttcacgactggctcttccccgcgcgcgacgcctcgccacccgccgccacggctccgcccgcgcgcgccgtcttcgtcttccgcttcgagctcgccggccgcgacggcgaggagcgtgacccggccgacgccagggagaaggaggtggtccaagtcggaggcggcttggcggggtacgtcgacggtaggaggtgggggagaggggactggagcgagagcagcagcagcggtgagaagcggaggacgaggggccaggcgagcaggctggcaaaggcgagctcctcctcgtcggcgtcagtggcttcctcctccgcgtcgtgggcgagcggctccaccgtcatggactggggcagccccgaggaggccgagctgcagagcggcgacggcttctccctcctcgtctacgcctggaagaactagcgtgcttgggccttgggctagcggcggccaaaggggcttgcccggcattgtttcgattgatgattggttcacagttcagtgaggatttctcttcccattgttgttgtaagttgcagttgttcagcgagcaatgttcttgtgcagctttgagtgc

SEQ ID NO: 25079 - DNA, 1174 bp, Zea mays
  Clone ID: LIB3689-246-F12_FLI
gcaaaagccaaaaggcatcaccgccgcgacgacgatggcagcctcgctccaagccgcggccaccctgatgcagccggccaagatcggcggccgggcgccctttgcctcgctgccgtcccgcccgtcgtcgcaactcgcctgcagggcgttcggcgtcgacgccggcgccgccaggatcacgtgctccctgcaggacgtcgccagcaggtgcgtcgacgccgcgaagctcgccggcttcgcgctcgccacctcggcgctcctcgtctcgggcgcgagcgcggagggcacgcccaagaggctgacctacgacgagatccagagcaaaacgtacatggaggtgaagggcacgggcacggcgaaccagtgcccgaccatcgacggcggcgtggagtcgttcccgttcaaggccggcaagtaccagatgaagaagctgtgcctggagccgacgtccttcaccgtcaaggcggagggcatcgccaagaacgccccgcccgagttccagaagaccaagctcatgacccgcctcacgtacacgctggacgagatcgagggcccgctcgaggtcggctccgacggcacgctcaagttcgaggagaaggacggcatcgactacgccgccgtcaccgtgcagctcccggggggcgagcgcgtgccgttcctcttcaccgtcaagcagctcgtcgccaccggcaagcccgagagcttcggcgggcccttcctcgtgcccagctaccgcggctcctccttcctcgaccccaagggccgcggcggctccaccggctacgacaacgccgtcgcgctccccgccgggggcagaggtgacgaggaggagctccagaaggagaacatcaagaacgccgcctcctccaccggcaacatcacgttgagcgtcaccaagagcaacccggagaccggcgaggtcatcggcgtcttcgagagcgtgcagccgtccgacaccgacctcggggccaaggcgcccaaggatgtcaagatccagggggtctggtacgctcagctcgagtgattcgagtgtctaactgctaggtgtccgaccgccgtcatggatcttgggaaggtgtatgtataccatggaaaactttggagagcagaggaggaatcgtgtatgtaatgtacttgttaatgcaaattcgggctgtcgcttttttactccgct

SEQ ID NO: 25080 - DNA, 951 bp, Zea mays
  Clone ID: LIB3689-246-G10_FLI
tgaggagctgatcctcaccggcgtcgccatcgtaatcgccttggacagcggcaccagaacctctgcctccgcagggtgcttgctggtatcattacaatctggtagttttagtggttgggcttgacttcctactattcagaaacacagtaccgagaagtctttaggtggggtcaaagatggtgtcgctgaagttgcaaaagcgccttgccgcgagctacctcaagtgtgggaaaggcaaggtgtggcttgacccaaatgaagttagtgagatctccatggcaaactcccgccagaatatccggaagttggttaaggatgggtttatcatcaagaagcctcataagatccactctagatcccgtgcaagaagggcacatgacgccaagcaaaagggacgccactcaggatatggtaagcgtaggggtaccagggaggctaggctacccaccaaggttctgtggatgaggaggatgcgtgtgctgaggcgccttctccgcaagtatcgtgaggccaagaagattgacaagcacatgtatcatgacatgtacatgaaggtcaaaggtaacgccttcaagaacaagagggtgcttatggagagtatccacaagtccaaggctgagaaggccagagagaagacactttctgaccagtttgaggccaagcgcgccaagagcaaggcgagccgtgagaggaagatcgctaggagggaggagaggttggcccagggtccacgagaaataacaccacctgtctcatccacagctccagctactggggcaccgaagaaagcaaagaagtgaagtattgaaataaagctgtagctttctagtccagtactgcactttcttttataagctctagtcaaattttggagcgcctgaactgttttgctgttatataacttagtgtattgataaattcgactatcacatctggattattctgctggat

SEQ ID NO: 25081 - DNA, 1667 bp, Zea mays
  Clone ID: LIB3689-246-G7_FLI
gtttgattatcaaaaaaaaggaatatgtttgatctaatattaagaaaacagagcaaagagtgctgcagccaccggggccagtgccaatacagaaacggaatgcccgtgtagccacctatgtgtccagaaaaagttatttgcaccatcaaccacagaagcagcaaagagtgctgcagcattagggcatatacaacctcatttaatatgaagtctcttgaggggtctttagggggttagataaaaaaaatacaaaagacgggctcttcacgaatattgtttatattgtctcttaactgcatttatagtctagaggcttgtatcacagagtcttttaagtgtctcctatacttagaaaaccgaaccagagtctcaaagttgtacatgccaggttgtacatgcccttagagtgaacaagtgactgcaggtccttctaagggccgtcattcctggccttccttaaccagagccacctcatgttcagcgagacagcgaccaacccaaagcttctaaattatggattccaagaccgccttggttgagtgacctgcagactctttcccaaccaacaagacaatgccctccttgtacgtttattcgacctttctagaggaacctcttctaattttatcaatgactttaaaaactcattcagagcagcgcaaatacggagaggctactttgaacccgttacctgactcagtgagacaactcttaccagtgcaccagacctgcccttctgcagtatcactttattgatgatgaattttggatagctctacatgtgctggtttcttatcatttgatttccatacttcttttttttattttggggttaaggtatatgtgaagcagttgaaggtgatttcctggatgctcatagtttgcagctgctcaacccttacatgccaaacttaagtgcatcatggttgttccaacgagcgatgtcagtaaggccacatgtcaatgtttcaccaacctttatcaatgagcttctctttgctaattttcagtcaatgcagaaactaggggattcggtacttcggccatttctacaggatgtaatacagtttggacctcttgtgaaaactttggggctagtaatgatcactagaccacaaattttaccttccatatttaagcaggttggactgggagtcatccttgagtggtcaggccattttatgatgcttggttactacacattcctttctacctatattgatccgatcctgaggtcttgggtggaatccttgcccccacgggacaaatatcagtggaaacggtacctggaagcttggagatatggagccggtttagattaccgccaaggggaataaactgtttcactaaaaacacatgaaagtttcctcagaaacaaaattatgtatagatacatgaatatagcactgtcaggggaaagatgaatagagtacatatatgatctctgattgatttagttttccttttccagagcacaagattgaacatcaagtttagaatgtgtattatctagtttcacttgtaatttgcccactttactgaactgatggagtgaatatgtatagtactctagaatttcaaataatgctgaatggagctgagatgctcaatatttgttgatcaatgtatcaattatgtgaaataaaagtaaatgtccggtttcattc

SEQ ID NO: 25082 - DNA, 3307 bp, Zea mays
  Clone ID: LIB3689-246-H11_FLI
gtcgctacgcttggaagggtcccgcggggcgcaagatcgttttttccccttcttgctggtgttgtttgttggtggcggaatgcttcggcgccgccgttgaggttgcgcctcggcgtcggcattggaggtggtggcaaagttggattgattacctcattcaagatttgactggtgcaacaagtaatggttctcatcatcatgagtttggttcaaaaactcctagaaggccaggagctattgacaataccgatttaattgatgatgtgccacttgaagtctccaacatggagattgagatacatgataacttggttgagggtcgggattacatactgcttcctcagcaagtttgggaaaagttgcatggttggtatggtggaggaccaacattaccaagaaaggcaatcaatactggcttttctcaaactgatttggcgatagaagtttatcctctacgactgcagttaattctaatgtcaagaggagagcgaacctttataaggataagcaagaagggtacagttggccaactccataaaatggcctgtaaggtttttgacttggcaccagatgaggtatgcatttgggactattatggtcgaacaaagcattcattgatggatagcttggacaaaacccttgatgatgccaacattcagatggatcaaaacattctagttgaggtaaccactgatgcaagtggtagtcgggatggtttggttaagcgaaacaatttttttgagagtgatgctccgaaatcaggattgccagatgagaattttgcagccaacaactatgcttccagaagctatagctctagtctgacaccaagcatctacctgcgatcacccaatggtgatctggataatgtgcatggttctagtggcatgatcacgaggggatcgcccttaggtcttacagggctacttaatcttggaaatacatgctatatgaacagtgccatacagtgtcttgtgcacacaccacagtttactaaatacttctgtgaagattatcatcgcgaaataaatcggcaaaatccactgggtaatgtgggtgaacttgcattagcttttggtgagctattgagaaaactctgggctcctggaggacgtgcccctgtttcacctagaccattcaaaatgaagctttctcggtttgcatctcagttcagtggatacaaccagcatgattcacaggagctgttggcgttcctattggatggactccatgaagatttgaatcgtgtgaagcatagaccttacataaattcaggggatgctgatggaagatcagatgaagaagttgcagatgaatattgggcaaatcatattgccagaaataattcaatcattgttgatgtatgccaggggcagtacaagtccactttggtttgcccagtctgtgggaaggtttcagtgacttttgacccgttcatgtatctttccttgcccttacaatttgcctcaacccggagcgtgactgccgtggtgttttcttgtgatggtagtgttccaccaacaccattcactgtgaatgtaccaaaacaaggtttgacgattgtgtgtccttaaacattttggttgaatttatctacagatacggaatcataagatctaccgttttattgatgatccagtgcttcagctgtctacaataagtgatgatgatcatctggcagtttataagctcccaaagttggaaaagagggtgaattacattcagtttgtgcatcgtcatgaagatctggaccatggaaacaataacagcttgacatcttggaaaccgtacggtgttcctcttcttgcacaaatttctcgcaatgaaattgtcacgggttttgatatccatgagttggtccataaaatgcttgtgcccgtgctaaggaatccggactctctgcatttggctgttcaaagttctgtttccacaagaactcatagttatcataccgacagcagcaaatgtcagcttctgttggttgatgatagcaacacagtcattgaaaaatcaaatgatgctatcaggatcccacaatcttcacttgcaactgtattttttatcaactggcccaaggcagatctgaaaaagatagacactcatcatttagagtaccttccagaggtgtttatgtatgctccgcctgcgaagagaacccgtggtgaagctctgtcactctatgcatgcttggatgctttcttgagagaagaacctcttgtacctgaagacatgtggtactgtccaaggtgcaaggagcaaagacaagctagcaaaaagttggatttgtggagacttcctgaagtactagtcatacatctaaagagattttcatttagtaggtcaacaaaacaaaaactagaaacttttgttaattttccaatacatgacttggatttgacaaattacattgccaataagaagacttcagagcgccagatctatgagctgtatgctgtgagcaatcattatggcaacatggcaagtggacattatactgcacacattaagcttgtggatgagaatcggtggtacaacttcgatgatagccatgttgcttccattgatgaagatgaggtgaagactgctgcagcttatgtgctattctatagaagggtcagagaacaagacatagcaaggggaactagtaatggatctcagttatatgcaaaaagaagtcacggatatagccataggtaggctgatgattactgtggttcggtgcaagggggattctggaaatgacacccgcacgcctttagtcattgccaggagtatatggcttgctggaaaaaatgctcatcacgtgcagtcaatgcaccgttgtccagttgtcacagaagatatttcgtgcagtgctggtacaagatgggaattttgtatgaggtgagttgaaggagtaattgactctttatgataactgggtagcttcaacaggaacgccggggcttggtggcattttgttcgtctgttttcttctagaagagaaacaaggggaggcaagaaaacatttaggaaacaccttttcgttaatttgattttttatttccatttttagatttagctagtctgtacactgttgttggaaatgggtccgctgttgttggtcgatgcttgtggtggccaataatactacacccaactataccaggctctgcaatggcgaatcatggtgcacattatggtgctctgttgcgggaagaattgtagctgatgttgtacttatatactggcaaaaaggccccagaaatgtaaaaatgtatcgatatgctgacatcttaaaccctattttggattcgtgctctttcct

SEQ ID NO: 25083 - DNA, 942 bp, Zea mays
  Clone ID: LIB3689-246-H7_FLI
cgaaaacccaaatccaaacgtcgccgcaaaccgcgcgatccccaggcccaaagcgccgccgttcatgagcttcctcgccggccgcctcgccgccaaggagggcgcgtacttcctccaggagtcaaagactgccgtcggccgcctcgcggagaagctcccgccctccgcttcggcgcccgggggtgcgtcggcgcagccctcccccgacgtgctaccggagatcctccgccactccgtgcccatcaaggggacgccgcccccggccgaagcctccctctccgcgtcctcccgctgggccctcccgccgggcggcggcgaggctgcgggcttgcaccccgacgcgctcaacccgctccgctcctacgtctcgctgccgcaggccaccttcggccccaaaagatggcagcttccgaacgaacaacctaactacttggcgtcaacagcaaatgaaaggcggcgagatcgggccccacctcccttggaccctgagaatttgaaagccttgggaaggcattcattactgcaacttttatggtgtttggaggagcaacagctgtgctgttgtacacagcagataagctacagttgcattcagtagatgatgttaaaactaaaggaaaagatgcactgcagccacgagctgatatgattaaagaacaaatagctccattaagaagttgggctgaagaaatgtcccgaaaatggcatttcgaaggtggtaaagaagctaaggagaagtctggcatcgttagagaactttcaagaattttgggctccaggactccccctggttgatcaacaatgacatacggctgttgtaaatccaccgtccactttgttgtatgcgtccttatcgtttccatatgtttgtgtataggaaacaaaacatcctgacatctagtttggatgtatatattggagtatagaattggaattggaatc

SEQ ID NO: 25084 - DNA, 171 bp, Zea mays
  Clone ID: LIB3689-246-H8_FLI
gttcagattcacttgttaaaggtgaatgcataaatggaaccaagctgtttaagccgattgcggcaaaatgatgggtgaatcagcttggttccatttatgcattcagattcacttgttaaaggtgaaaaatcccaatttatgatataccatggtactctccgttcttttttt

SEQ ID NO: 25085 - DNA, 978 bp, Zea mays; identical to SEQ ID NO: 22567
  Clone ID: LIB3689-247-A10_FLI

SEQ ID NO: 25086 - DNA, 1770 bp, Zea mays
  Clone ID: LIB3689-247-A3_FLI
gtgagcagcaaacacacagctagactccgcgagaaccgtcaatgggttctataggaggacccacagccacagccaccgccgaccggcgccgccgcgtgctgttcttcccgctcccgtaccagggccatatcaaccccatgttccaactcgccggcctcctccacttgcgcggtttctccgtcaccgtcttccacaccgacttcaacgctcccgacaagtcccgccaccctgcctacgacttcgtccccgttcccgtccgcggctgcttgccgaagggcagctcggatgccttgcaggtgaccgtggagcgcatcctcgccgtgaaccgcgcctgcgaggctccgttccgggagcgcctggccgctctgctggcgcgggaggacgtcgcgtgcctggtcgctgacgcccacctgctgacgctgctggacgtggcgcgggggctcggcgtgccgacgctggtgctgcgcaccggcagcgcggcgtgcctccgcatgttcgcggcgttccccgcgctctgcgacaaggggtatcagccggcgcaagagtcgcagctggaggcgccggtgactgagctgccgccgtaccgcgtccgggacctgccgtccaccaccagcgcctgccacggcgtaataagcgaggtgatttcccgtttagtgacggccgtgacgacctcctcgggtctcatcctcaacaccatggacgctctcgagtgcggcgagctggcgtcgctccggcgagacctcggcgtccccgtgttcgacatcggcccgctccacatgctctctccggcggcctcgagcagcttgctactgcaagaccgcggctgcctcgagtggctcgacgcgcaagccccggcgtccgtgctctacgtcagcttcggcagcctcgccagcatgtccgccgccgagctggtggaaacagcctggggcatagccaacagcggctatcccttcctgtgggttctccggccgggcctcgtccgcggctcgcagacgtcggaggcggcgccacccctgcccgacggcttcgacgccgcgacgcgcgggcggggcatggtcgtgagctgggcgccgcaggaggaggtcctggcgcaccctgccgtgggcgcgttctggacgcactgtggctggaactcgacgctagagagcttgtgcgcgggcgtgccggtcattgcccgcccgtgcttcggcgaccagatggggaacgcgaggtacgtggaccacgtgtggcggaccggcctcacgctcgacggcgtgctcgagaggggcgaggtggaggcggccgtcgcggcgttgatggcgcctggagagcccggcgacggactgcgtcggagggcgcgggagctcaagagcagcgcggcggagtgcatggccaaggatgggtcgtcctgcacgaatgtcgacaagctggtagaccacattctgacactgtaggcgtttggtacaggagcagccacgtggtgctgttcttgggtactgtttttctttgcggttgaaaaataaataaataaaacccgatggagcttatgatccgcaactcgacactcacagtcacagctatggttgataattgattctaattttccactatatgatttaaagataagatcagattagaattagaccttatttctatttatttttgaaataaaatttatttaaagttttgttattttgtgaagaaacatttgtatcagattagattaggatcaaatctaattttatttatttttgaactaaaatttatttaagatttatttattatatgaag

SEQ ID NO: 25087 - DNA, 1516 bp, Zea mays
  Clone ID: LIB3689-247-D1_FLI
cagcagagaaaggccggcagcgctaatcgtaatagccatgggctccaccgccggcgacgtggccgcggtggtggacgaggaggcgtgcatgtacgcgatgcagctggcgtcgtcgtccatcctgcccatgacgctgaagaacgccatcgagctgggcctgctggaggtgctgcagaaggaggccggcggcggcaaggcggcgctggcgcccgaggaggtggtggcgcggatgcccgcggcgcccagcgaccccgccgccgccgcggccatggtggaccgcatgctccgcctgctcgcctcctacgacgtcgtccggtgccagatggaggaccgggacggccggtacgagcgccgctactccgccgcgcccgtctgcaagtggctcacccccaacgaggacggcgtgtccatggccgccctcgcgctcatgaaccaggacaaggtcctcatggagagctggtactatctcaaggacgcggtgctggacggcggcatcccgttcaacaaggcgtacgggatgacggcgttcgagtaccacgggacggacccgcgcttcaaccgcgtgttcaacgagggcatgaagaaccactcggtgatcatcaccaagaagctgctggacttctacacgggcttcgagggcgtgtcgacgctggtggacgtgggcggcggcgtgggcgccacgctgcacgccatcacgtcccgccacccgcacatctccggggtcaacttcgacctgccgcacgtcatctccgaggcgccgccgttccccggcgtgcgccacgtgggcggggacatgttcgcgtccgtgcccgccggcgacgccatcctcatgaagtggatcctccacgactggagcgacgcgcactgcgccacgctgctcaagaactgctacgacgcgctgccggaaaatggcaaggtcatcgtcgtcgagtgcgtgctgccggtcaacacggaggccacccccaaggcgcagggcgtgttccacgtcgacatgatcatgctcgcgcacaacccaggcggcaaggagcggtacgagcgcgagttccgcgagctcgccaagggcgccggcttctccgggttcaaggccacctacatctacgccaacgcctgggccatcgagttcatcaagtgaatacggctaccaccgtcgccgcgatgagatgcatggctgccacatgcatgcttgcttgcttggtcctcgtatcgtacgtcgccgtcgtcgtcttcttctggttgcgctgctaccttgctgctctcgccctcgcgtatgcatgtacttttgcttaattttctttcttcatatcatgcactctggctggcctagactgcccccgatctatgctggccggtacgtcttgtcgagctcttgcatgtcgtggattctaaattcttcttctgcgtcgaattgtctctgccatgtgcgagtaataacaatcaaggttatacttaccatacaattacatggcggtttaattgctctcttttaatttggtgaagaatcgaatcgattctactg

SEQ ID NO: 25088 - DNA, 2546 bp, Zea mays
  Clone ID: LIB3689-248-D2_FLI
cacgctccatccaatggagcttactctccccttcgtcatcctcctcgcactcctcgcaagcccctcgcttccccatgccaatggcgacggcggcaacacgacgacgtacatcgtgttcatggatccggcgcgaatgccgtctgtgcaccggacaccggcgcactggcatgcggcgcacctcgagtccctgtccatcgacccggcccgccacttgctgtactcctactccgccgccgcgcacggattcgcggcggcgctgctaccgggccatttgcccctgctccgcagcagccccgaggtgctccaggttgtgccggacgagatgttccagctccacacgacgcgctccccagagttcttgggccttctcacgccggcctaccagcctgccacgggcaatctggaggcggccacgcacgacgtggtcataggggttcttgacaccggcgtatggccagagtcgccgagcttcgcgggcggcaacctgccgccaccgcccgctcactggaagggggtgtgcgaggctggcgtggatttcccgccgagcttgtgcgggaggaagctggtgggcgcgcgcagcttctcgcgcggcctccgtgcggcaaacggcggcgcaataggcgtggggaagaggacgttcaggtcggcccgggacagggacgggcacggcacgcacacggcgaccacggcggccggcgcggtggtggcgaacgcaagcctgctcgggtacgccacggggacggcgcgcgggatggcgcccggggcgcgggtggccgcgtacaaggtgtgctggccggaggggtgcctcgggtccgacatcctggccggcattgacgccgctgttgctgatggcgtgggcgtgctgtcgctgtccctcggcggcggctcagcgccgtacttccgggacaccgtagcggtgggcgcctttggtgcggcggcggccggagtgttcgtctcttgctccgccgggaactccggcccatccggatccaccgtctcaaactccgctccgtgggtcgccaccgtcggcgccgggacactggaccgcgacttcccggcatacgtgatgctccccacgggcgcgcgcctggccggcgtgtccctctacgcggggccttctccctccccacgccccgccatgctcccgctcctctacggcagcgggcgtgacaacgccagcaagctgtgcctctccgggacgctggacccggccgccgtgcgcggcaaaatagttgtgtgcgaccgcggcgtcaacgcgcgcgtggagaagggcgccgtcgtgaaggcggccggcggcgccggcatgatactggcgaacacggcagccagcggagaggagctcgtggcggacagccacctgctccccgcggtggcggtgggacgcgcggtgggcgacaagatacgggagtacgcggcgcgcggcggcggtaggcccatggctatgctgagcttcggcggcacggttctgggcgtccggccgtctccggtcgtggcggcgttcagctcccgcggccccaacaccgtggtgccggagatcttgaagccggacatgattgggccgggggtaaacatcctggccgcctggacgggcgtcgctggaccgaccggactcgccaaagacggccgtcggactcgcttcaacatcatctcagggacttcgatgtcatgccctcacatcagcggggtggcggcgctgatgaaggcggcacacccagactggagcccagccgccatcaagtcggcgctgatgaccaccgcctacaccgtggacaacacgaactcgtcgctccgggacgcggcggacggctccgtcgccaacgcgttctcgtacggcgccggccacgtggacccgcagagggcgctttcgccgggcctcgtgtacgacatctccacgcacgactacgccgccttcctctgctccctcaactacagcgccccgcacgtccaagtgatcaccaaggcgtccaacgtctcgtgcggcgccccgaacaagtcccgccccggggacctcaactacccgtccttctcggtggtgttcggccagaagcggaagacgaagccggcggcggccctgcgtttcaggagggagctgaccaacgtcggccccgcggcgtcggtctacgacgtgaaggtggtcggccccgagtccgtcgccgtcacggtgacgccggcgaggctcacgttcaggcaggccggccagaagctcaggtactatgtcacctttgcgtccagggctcggcaaggccacgcgaagccggacttcgggtggatttcctgggtcaacgatgagcacgtcgtccgcagccccgtcgcgtatacgtggaagatgtgatgtgaggttccctgcctgcctaaaatctagctcgatgacgaaggaataggataggttggtgtagtttgctcaccgcttcgcaaagagaatcggcgtgaagctctctatctctctctctcggctgcagtgcagacctgtacttgtttcctatctttcttttcggacatcaagtaaccctgaatctgaatgacgaatccgccgtttggtgtttgcc

SEQ ID NO: 25089 - DNA, 1654 bp, Zea mays
  Clone ID: LIB3689-248-D3_FLI
gacagagaccccgccgcgttttctctagctctataaaatctcaccgatagccagccacactcaacgaactccagaaataatccgccctcgtatcctcacgcccacaaaacacccgaagaaaagaagagactgaacgccgcgagttcacgtgacgatggagaacgccgcctccgccatcgctaagccgtcgctgtccaagaagccctcgccgtcgttccgcctccggaacggcagcctcaacgcactgcgcctgcgccgcgtgttcgacctcttcgaccgcaacggcgacggcgagatcagcctcgacgagatggcctcggcgctcgacgcgctcggcctcggcgccgaccgctccggcctggaggccgcggttggcgggtacatcccggccggcgccgcggggctccgcttcgacgacttcgagtccctccaccgcgcgctcggggacgcgctgttcggccccatgccggtggctgtgaccgaggatgacgacgacgagggggacatgaaggaggcgttccgggtgttcgatgaggacggcgacggcttcatctcggccgccgagctgcaggccgtgctcaagaagctcggcctgcccgaggctcggaacctggccactgtgcaggagatgatctgcaacgtcgaccgcaactgcgacggccgcgtcgacttcggcgagttcaagaacatgatgcaggggatcaccgtgtggggcgcttagctgccgcgcacctgcgttgtcacaccccctctactgcgtggtgtcatgtatgtatccaggcaccgtaggatgcgcttttctacccggcgcttcttcctcctcttgatggcgcagtggattcttcctgttcttggctttgctatctgactctgcttgtagtcttgagaattattgtgattggcattgtccatctgttcgtgcttcgtggcacagaggtctttattttggtctggtagactgagcaagtagtagtgcctcgtgttataacaggggagtaatcttacatgcctcatagggattgctgcttatctctatgccgtaccattgctgaactttggaggcaagaagggttcccaccatccaaacccatatttagggtacggagctgtccatttctcaggcttctcaaatttcaactcaacagggttagaagccaatgcctcttcaactgattctgcgtcgaactggtcttgtaagaccctgtctagccttaacttcatgaatgtgatccagttgccgtcggtggagacaagcgcgacggcggggcgcttgaggcgcttggtgatgttggggaacctgtcgaggaacttgggctccacgacgagccagaagtcctgctccttgtcgcgctcggcgtagttgcgcagcttctcggcgagttgctcctggaaatgctcctcctcgtccagcatgaacttggcgtttgccaccaggaagtagtacgtcttgggcttcttctcctgctctggagactcgggggagccctgctcggagtcgacggccacggcgcggcggatgccactgaagcgccgaggctggtaggaaaaggcgacggaaggggaggtgcggatggcgggcgcgaaacaggcccgagcgcggggcagcccggcacgaggcggcgcggggggcgcgctggggcggagggagaatgtc

SEQ ID NO: 25090 - DNA, 1030 bp, Zea mays
  Clone ID: LIB3689-248-E3_FLI
caacagcgtagtgtagtgtagttccggagagggttggggagagtagtagtgatccgcaatgtcgacggaggaggctgttgtggctgaggtcccggtgaccgaggtgccagcggaggtcccggcggcccaggtggccgaggcgcccaaggcgaagaaggcgcccaaggagaagaaggcgcctaaggagaagaagctttccgcggcgaagaagccggcggcgcaccctccctacgctgagatgattgtagaggcgatcgctgccctcaaggagaggaaggggtcgagctcggtggccatcagcaagtacgtcgaggggaagcatggcggcaagctccccaccaacttccgcaagcagctcactgtgcagctgaagaagctcgctgccgccggcaagctgacgagggtgaagaactccttcaagctgccggccaccgacgccaagcccaaggccgccaagcccaaggcacccaaggccgcgcccaagcccaagccctcgccgaaggcgaaggccaagaccgctgcgaagcccaaggcggcgtcgcccaaacccaaggccaaggccaaggccaagcctgtcgctcctgccgccgcgtcgcccaagccccgcgggcgccctcccaaggtcgccaagacctccgccaaggcctcccccgccaaggcagccaagaaggcggctgctcctgccaagaagggaaaggcagcggcggctcctaagaaggtggcaaccccgaagaaggctgctgctgctgccgccccggccaggaagggcgtggccaggaaggccaagaagtagtctgcctgccttgtcgctggcgagatccccccctcaattccgcctatagattcccctctttcatggattttgatccaatcgtaatattgtcagtagctctagattcgtcggtagctccagcatgagtgtcggtggtagttctgtgcctgtaaaaacttgggatagttgatcgcgtgtgatcagccgtcatgctcctccagtctctatgaacaagctaagctataatagtattttgct

SEQ ID NO: 25091 - DNA, 2114 bp, Zea mays
  Clone ID: LIB3689-249-D11_FLI
cctaattcccgtcctcgtgtgttcgcgttgctcgcttgggtttggatccgatcgagggctcggcccggcggatgctgtagaggaatggcggaggctgtcgcgtctgcgggcaggctcgccatggactcctcgacctccgtctcgcccggccaggtttctgctattctgggctttctgtgggtttttgcagcatgggcgtatgccgaggttctcttccataggaagaatactgcttctattaaaactagacattcagatgtcaatctagcagtgatggatgacagttcagtcaaagcagaagaccagacaatgttattggaggagggtggccaagcaatggctgcaaagccagcttatacttccctcacatcacaaatactcagacttatattcatggaccagttgcttcttctggagaaccgtttaacactgagggcaatatctgaatttggagggtatctactttatttttacatatgtgatcgtacaaacttgcttggagagtctgccaagaattacagccgagatctgttccttttcctctactttcttcttatcattgtagcagctatgacttcctttaaggtccatcaagacaagtcatcattcacaggaaaatctgtactgtacttgaataggcatcaaactgaagaatggaagggttggatgcaggtgctattcttgatgtaccattacttcaatgctaaagaaatctacaatgcaatccgtgtgttcattgctgcatatgtctggatgactggatttggcaatttctcttattattatgtgaggaaggatttcagtcttggaagatttgctcagatgatgtggcgcctcaatttctttgttatattctgctgcattgtcctgaacaatgattatacactctattatatttgtcctatgcacacccttttcaccctcatggtttatggtgctcttggaattctaaataaatacaacgagattagatcagtgatggcaatgaaatttgttgcttgcttcttggtagttgtcctggtttgggaagttccaggtgtctttgacatagtatggagcccattcacattccttctaggctataccgatccttctaaaccagatcttccccggttgcatgaatggcaattccgatctggactggatcgctacatttggattgtggggatgatatatgcatattaccatccaactgttgagaagtggttggagaagctggaagaaactgaaatgagaaccaaactctatattaagacctcaatagttacagtgtcaatgatggctggttatttgtggtatgaatacatttataagctggataagattacttacaacaagttgcatccatatacatcctggatccccataactgtctacatatgcctacgcaacttcactcaagaattcaggggcttctccctcacactatttgcctggcttggaaagattacactagaaacatacatatctcagttccatatctggctcagatcaagtgtgcccaatggccaaccaaaatggctattgtcaataatcccaaattatccactgctcaatttcatgctgactactgctatatatgttgcggtttcccataggctcttcgaattgactaataccttgaagatggtatttgtaccaaatcgtgacaacaagcgcctctcatacaattttgtggcaggaacagccatttctgctgccctgtactttgtatcgtttgttctaattggcattgcaggatactaggaagtctagttattgcctttttcttttgttcgattagttacaacaaggcctgatctactgatcaagtttaaggcgacacagcacgcagccacgcactgctaaggaacctgcaatttcattcactggagtcaggttttatctgggtttcacggtgaagaaaaaaaattgctgtgcaaggcagaagatctcgaagagtgtaacatatgagtgaaccccaatcccaagaggggatatgataaaaatatctctgtataggcgttggaacacataccgacttaccgagtggtcacgtcgtctgtgaaaatcagattttgttccttgttttgtttaaaagcttgaaatagacagaattgttcctttttttgttt

SEQ ID NO: 25092 - DNA, 1370 bp, Zea mays
  Clone ID: LIB3689-249-F11_FLI
cctcggagtccttctccgggagtgggagtgggagtggcggagggcatgtttggtcggcgccagtgtcgccgcgcccggcgccgccgccggtgctcgtcataccggcgcgcgcacggagcaagcgctcccgttcgtccgcgttcaccggcgccgccgcgcgcgccggggcggagacgccaaccatcctcgtgccgacgcccatgtactcgtccgggtcggcccactcggaccccgagagcatcgccgagtccagcccgcacccggcgccgcccatgaagaagaagaagaaggccaagaagcctgcgccccccgcgccagctgcctcttctgacgacaacgatggcgacgccgactacgaggaaggtggcgagctagcggagccgcagggcggcgccgtcaggaggtgcacgcattgccagatcgagaagacgccgcagtggcgcgcggggccgctggggcccaagacgctctgcaacgcctgcggcgtgcgctacaagtccggtcgtctgttcccggagtaccgccccgcggcgagccccaccttcgtgccgtccatccactccaactcgcacaagagggtggtggagatgcgccagaaggctgtccggagcggcgacccgtcgtgcgaccttctccatttcatccgccgccgggattgacgtcccggcatggcgtcgccggactgtcggtcggtctcgtcccccatatagctatatatgtatgcatgcatggttgcttcatcagtcgtcgtcgcccatcatggtcatcatcaccgcttcaccggtcaccgccatggatcgtctcccgcccatcatcacatgcattggtttgtgtcagcatccatccaatcccaatccatcgccgggcgtcccgacgttgttagttcattaggtctttttttttcctcatcgggggctagtgttattttacctttgatccttttgtctattggttaattggttccccctggatgttttttgtttgtatagagagtgaaaaagagagaagaaatagatgagtcagagtggttgctgcattgcaattgcagttgcttgcaagctaggtaggtgagaaggagagctaaaccagcagcagagggagacagatttagagaggaaactttgcagctagtcagtcagtcacttagaaaaaaaaacaaggagagtgcttgaagcaggtgaaagggcaatttgttggtttgctaattagaagagaggttctgtcaggtcaggtcaggtagttgctatcattattcatgaggattttcaaacttaatagggggacagccatcatccatcatagtttgtatttggaacttggtatactgaactctgaaaattctttttgcagttcatctatgcttagggatt

SEQ ID NO: 25093 - DNA, 1744 bp, Zea mays
  Clone ID: LIB3689-249-F5_FLI
ccgagagccgctgtgcctcttctttctccgtgaatgggaaaagctgtctgactcaccctcactgcctctgcgtgcgtgcgtcactgccgcgccgctcgcccgatcacgcgataaataactcgcctctctctctcctcctcaagcagtcaggctcatccagggatcaggggacccgcccgccttgacttttcacgttgcgtttgagcggtgctgctgatctgcgattcctcctctctctctctctctccactccacacctgagagggaatcctgctccctcttgctccgcgcccgcggcggcggcggcggctttggtatccgtgcgggtgtttctgtccggcgtttacttgccgggccagcgcggcattggaggagggagatcggaggcgtgatcgatggggaactgcgtggcgagcgggggcacgacgacggtcacggcggcaggtgctgcaggggaggacgggaggcggcgggggaggaggtggaaggcgccgcgggaggagcagctcggttcggtccccggccggatcttctccaacgacggccgcagccgcaccgccgccgtgttcacgcagcaggggcggaaggggatcaatcaggacgccatgctcgtctgggatgggttcggcggggaggaagacgtcgtgctttgtggggtgttcgacgggcacggcccgcatggccacctggtggcgcgcagagtccgcgatgcgatgccgctgaagctcatgtccgcggtgcgcgcgtccaaggctggcttggatatgcccgccgccgcgtggaggaaggccttcgcgcgcgcctacaagaccatggacaaggaccttcgctcccacgccaccctagattgcttctgcagtggcagcaccgccgtcaccgtactcaagctcggctcggatctctacatggccaacattggtgactcacgcgccgtcctaggctcgagggatggtggcgacggcggcatggtggccttgcaactgactattgacctcaaaccggatgttcccagcgaggcagaacggatcaagaagtgcaggggcagggtatttgctctgcaggacgaaccggaggtgccgcgggtctggctgccgttcgatgacgcgccaggcctggcaatggcccgggcgtttggggacttctgcctcaaggattatggtgtcatttcggttccagagttcttccactggtcgctcacagagaaggatcagtttgtcatccttgcatcagatggggtgtgggatgtcctcagcaaccaggaggctgttgacatcgtgtcgtcgtccccaagccgatcaaaggccgcaagatccctcgtcgaggccgcgacccgtgaatggaaaaccaagtacccgacatcgaagatcgatgactgcgcagtggtctgcctgtatctggacggcaaaatggaccacgaacgtgactcgacggcctccatggacaacatgagcctcgacgaaggttcagccgcggacccaaacgaagcccaggagcaggagccagcgctgacccgcaacttcacggtcaggacggtcgccggaagcgcccacgagaaggcgctgtcgggggcggtggatgcggtcgttgccggcgcagcccacgaccagagttggtcaggcctcgacggggtgacgcgggtgaactcgctcgtccagcttcccaggttctccgacgagaaggcgatcggctgaggagctgtgcaattctttggttttcagttaacttattatcttctcctgtttgg

SEQ ID NO: 25094 - DNA, 847 bp, Zea mays
  Clone ID: LIB3689-250-A2_FLI
ccccactaccagaactcctcacctcacttcagcctcaacgcctaccaaacttacgcagcctctccataactgcgagctgttgctcctcctcccgagctaccattctccgtcgatctcctccaggctgtagcgcgctgccacgcccgcccatggcctcgggctcgaaaccggacagcatggacaccgaccctcttggcggcggcctctccatcgccgtcgagcgcaacccgccggagtcgcgcctgcagcagctcggcgtcaggtcttggcccaagtggggttgcccgccggggaagttcccggtgaagttcgacgcgcggcagacgtgctacctgctcaagggcaaggtgcgggcgcacatcaaggggtcgtcggagtgcgtggagttcggcgccggcgacctcgtcgtcttccccaaggggctcagctgcacctgggacgtcgccgccgccgtcgacaagtactacaagttcgactcgtcctgacggctgacgcacatcgctcccggcccggctccgctgatttggtcccgattattggttcggctgctcgcttaattgtgatgattagcttaatttcctagctaatttggttacatatagcccatagccttctctgtcgtgtaaaaaaaactgggagggatgcagcgcatctagctcccgcgtagcgtagcgcgtaggccagtagatattcatccggcaactgaaaaaagaaacccggtcaatgcaggggctgttcaaagtaccccttgtttattcgtccgagtgcaatccatcttggatgcttctttgaccagcgcccttggcctgcgttgttttttttaataatacctctatcttaaaatagt

SEQ ID NO: 25095 - DNA, 1247 bp, Zea mays
  Clone ID: LIB3689-250-A6_FLI
cggcggacagggagagggacaagggcaaggacgaccgccgccgctgggcggctcgctgcggtttcgccgtcctcggcatcatgagcaccctcctcgtctacggcgtcctgcaggagaagatcatgagggttccgtacggagcggacaaggagttcttcagatactcgctattccttgttttctgcaaccgtatcaccacatccatggtgtctgcaatggtgttactggcaagtaagaaatccttggaccctgtggctcctctacacaaatatggcgttgtctccatatcaaacatattgaccacaacctgccagtatgaggccctcaagtatgtcagcttccctgtccaaacactcgccaaatgtgccaagatgatacctgtcatgatctggggcacaataataatgagaaagaagtatggtggaaaagattacttctttgctgtcatcgtgactctgggctgcgcattgttcattctatatccggcaatgatggatgtgagcccatttaatagaggcagagaaagcactatttggggtgtttcactcatgtttggttatcttggttttgatgggttcacaagcacgttccaagataaactcttcaaagggtatgacatggaaatacacaaccaaatattctacacgacagtgtgctcttgtcttcttagtttaagtgggctgattctccagaatcatctgattccagctgtggattttatgtttcatcacccagattgcttctctgatgttctaatcctgtccagcgttgcaacagctagtcagttctttatatcctacaccatccgaacatttggggctctcacatttgctaccataatgacaactagacagctggtaagtatattgctgtcctgcatctggtttgcacatcctctcagctggatgcagtgggttggcgcagccattgttttcggagctatatacgcaaagagcttcttgaggactaaaccgcagaagacagcggtggcaagcccgtcgcatggctctagcccgaaccctgctaacagtagttgacgattgatgacatgataacattaggaaacaatggacttgttgcggtaccgggacgaagtctctgtgtttgagatcagtggcgccatagcgccatggtgaggtaactggacaaatgggtcccagatgtagctgtgtaaactgctcctgacctggaggtgatggaggtggtctccctttttagtggaaaaaaaccaaggtagtcctgatgtt

SEQ ID NO: 25096 - DNA, 2638 bp, Zea mays
  Clone ID: LIB3689-250-D7_FLI
ctccactcaaatcccaaatcaaatcaactccccagcctgaactgtcctctcctggactaccctcgccatccatcaacgcccgccacagagggggatcccggcctcccggtgccgggagccaagccaagccacgcaccggccggccgcggcggatcggaacctcccccaccgctcgcccgccgcatttgaggagggcgatgtggcgcctgcggatcgcggaggggggcggggacccctggctacgcacgaagaacgcccacgtcggccgccaggtgtgggagttcgacgccgccgccgaccccgaccccgccgtcgacgccgcgcgccgcgccttcgtcgccaccaggggccacctcaagcacagcgccgacctcctcatgcgcatccagttcgccaaagaaaactcgattgagcttcaccttccaggcatcaagctcggtgagcatgaagatgtgaccgaggaagctgtgttgactacattgaaaagggcaatcagccgtttctctactctccaggcacatgatggacactggcctggggattatggtggtcctatgttccttatgccaggcttgatcataacattgtatgtgactggagcactaaacactgtcttgtcattggaacaccagaaggagatccgccggtatctttataatcaccagaatgaagatggcggctggggcttgcacattgagggtccaagcaccatgttcggctcagcactgacctatgttattttgagattgcttggagagggaccagatagtggagatggagccatggagaaaggtcggaactggatattagaccatggtggagcaacatatataacatcgtgggggaagttttggctttcggtactaggtgtatttgaatggtctggtaacaacccggtgccaccagaagtatggctactgccatatctcctcccatttcacccagggaggatgtggtgtcattgtcgaatggtgtatttgccaatgtgctacatttatgggaagaggtttgttggccgaatcacaccacttctgttggaattaaggaaggaacttttcaaagacccttacagcaagattgattgggacaaggcccgtaacctatgtgccaaggaagatctgtactacccacacccattcgttcaagatgtgttatgggccactctccataaattcgttgaaccagttatgatgcattggcctggcagcaaattgagggagaaagctctggaaacagtcatgcaacatgttcattatgaagatgagaacactcgttatatttgcattggtcctgtaaacaaggtattgaatatgcttgcttgctggattgaagatccaaactcggaggccttcaaacttcatatcccacgagtctatgattacttgtggcttgctgaagatggcatgaagatgcagggttataatggcagccaactttgggatacagctttcacagttcaagccattgtggctaccaaccttattgaagagtttggtcctacccttaaactagcacacaactatatcaagaattcacaggttcttgatgactgccctggtgatctgaatgactggtaccgccacacatctaaaggtgcatggccattctcaactgctgatcatggttggcctatatctgattgcactgctgaaggactaaaggcctcattattgttatcaaggatctctcccaaaattgttggtgaaccgatggaagctaatagattttatgatgctgtcagttgtctgatgtcttatatgaatgataatggcggcttcgcgacatatgaactcacaagatcttatccctggttggagctgatcaatcctgctgagacctttggggatattgtgattgattacccgtatgttgaatgtacatcagcagcaattcaggccctgacatcattcaaaaaactataccctgggcaccgcaggaaagaggtggataactgtatcagcaaagcttccaatttcatcgagagtattcagaaaagcgatggttcatggtatggctcttgggccgtttgtttcacatacggcacttggtttggtgtgaagggactaattgctgctggtagaacatttgagaacagtcctgcaattagaaaggcatgcgactttctgttgtcaaaagaacttccttccggtggttggggagaaagctatttgtcatctcaagaccaggtttacaccaatctcaaaggcaaccggcctcatgcagtgaacactagttgggccatgctggcgctgattgatgcaggccaggccgagagagatccaacgcctctacaccgagcagcaaaggttttgatcaacttgcaatcacatgatggagaatttcctcagcaagagatcataggagtgttcaacaagaactgcatgataagctactcccagtacaggaacatcttcccgatttgggctctgggtgagtaccggtgccgagtcttgggggctggcaagtcttggcggtgaacgggaggtgtgcgtgtgtgtgtgtcatggatcggcttttgtgagtagccatgtggaagttggaataatatagctacgttacgttcagggggttgcgctactagtggtcctagtaataatagtgatggtgatagcaatgtactcctcattattacaatctc

SEQ ID NO: 25097 - DNA, 865 bp, Zea mays
  Clone ID: LIB3689-250-E7_FLI
gcggaggaggagctgtgccaagccacaatgggtatctcgcgtgactcgatgcacaagcgccgggccaccggtggaaagcagaaggcctggaggaagaagcgaaagtatgagcttggtcgccagccagccaacaccaagttgtcaagcaataagacagtgaggagggtccgtgttcgtggaggtaatgtgaaatggagggctcttcgccttgatactggtaactactcatggggaagtgaagctgttacccgcaagacccgtatcctcgacgtggtctacaatgcatcaaacaatgagcttgtgaggacacaaacccttgtgaagagtgccattgtgcaagttgatgctgccccattcaagcagtggtacctcactcactatggagttgacattggtaggaagaagaaaacccctgctgcaaagaaggataatgctgagggacaagaggttgaggcagcagctgaggaaacgaaaaagagcaaccatgtcacgaggaagcttgagaagcgcaaggagggacgtacccttgacccacacattgaggagcaatttggcagtggacggttgctggcatgcatttcttcccgccctggacagtgtggccgagctgatgggtacatccttgagggtaaagagcttgagttctacatgaagaagctacagaggaagaagggcaagagcgctgtagcttagagcattctcatggattgtcttgcaccgaaatgtgtgtcctgatgagtacactttttttggttaatcgtctcaagttcagagcgttatgccatgttttcagacctgattagtacactgttttctaaaagcgattgagctctagtccaatgtattgataatatctgctgttgtc

SEQ ID NO: 25098 - DNA, 2162 bp, Zea mays
  Clone ID: LIB3689-250-E9_FLI
gtatgtatgtgctccctctctccctccctccctttgccatttgccgatttgggcagcagcaatgacacttccctgcgccggcggctgcgagatccaagccagcggcattaactaccgcatcgccgtctccacccgacctctcaaggtctggagcagatcagacgacgacgtccattcccaagaccaccacagcgtcgtccgccaggtgctccgggacgtctcctgccgcgcgcgccccggcgagctgctcgccatcgtcggccccagcggcgccggcaagtccaccctgctcgagatcctcgcggggcgcctctccccgtccccgccgccccacctgctacgcatcgacggcgccgccgcccacagcgccgacctccgccgcgtctccgcctacgtcacccagcaggacgtcctcttcccgctgctcaccgtgcgcgagacgctgctcttcagcgcgcgcctccgcctaggcgcgcgcctgccctccaaggacatgcacgcccgcgtcgaggcgctcctcgacgacctcaccctgcgccgcgtcgccgccaccaggatcaaggacctctccggcggagagcgcaggcgcgtctccatcggcgtcgaggccgtgcgtgacccgcccgtgctcatcctcgacgagcccacctccggcctcgacagcgcctccgcgctccacatcgtcggcgcgctccgcgccatggccgaggcgcgtggacgcaccgtgctgctcagcatccaccagccgggagcgcgcatcgtcaagatgttcgactccgtcctcctgctagccgccggctccgtcctccaccatggcaccgtcgaccagctccgcgccctgctcggggacgcgggccttcacctgcccccgcacgtcgatgacgtcgagttcgccatcgactccgtggacgcgcttcgccgccacgccagcagcagcctgcaggcgccgtcctccggagaccgagagggccggtgcacgctgcagcgtctgttccagctgcacggcaagcaggtggcggacgcccccgtggccgtgaccatgatggctagccgctacgccaactcgcgggcgcgggaggtggcggtgctgtcgcagcgcttcttcaagaacgtggcgcggacgcggcagctcttcgcgtgccgcaccgtgtgcatgctggtggcgggccttgcgctgggctccatcttctacgacctcgggcaggacaaggtggcggagcgcgtgggtctcttcgccttcctgctcaccttcctcctgtcatccacaacggaggcgctgcccatcttcctgcaggagcgcgacatcctggccagggagacggcgtcgggggcgtaccgcgtgtcgtcgtacgcggtggccaacgcggtggtgttcctgcccttccagctggcgctggccgtcgtgttcgcggcgccggtgtactggctggcgggtctccgtcgaacggcggcggcgttcggctacttcctgctggtgatatggctgatcctgtacacagcgaactcggtggtggtgtgcttcgcggcggcggcgccggacttcgtggtggggaacgcggcgatccagggggtgatgggctccttcttcctcttctcgggctacttcatcgcgcggtcggcgatgcccgggtgctgggtgttcatgcactacctgtcgttgttcaagtggccgttcgaggcgctgctggtgaacgagttcgccggcggcgggaggtgcgtggtgcgggcgctgggcgagtgcgtggcgactggggacgaggtgctgcggcgcgaggggctcggggaagagtgcaggtggcgcaacgtgggcgtcatggtggccttcatggcggcctacagggtgttgggctacgccgtgctgagggtgaggtgcagcctcgcgctcaacaagaagggggccgtggccgccggaccacctggcctcggcctcagccgccgcctgagaagacagctagccatcatcggcaccgctgcgtggccctcgccatcgtcttcttccaccccctcgctccctgttaattaaattaaattaaattaaattaaattaaatggcaaccaaatacactagtgtatgtgtgcttacttgttttgttcggtgattcgtacggagtgcttacttaatattgtattgtattatacttggagtaggaagtatggtatcc

SEQ ID NO: 25099 - DNA, 1518 bp, Zea mays
  Clone ID: LIB3689-250-F2_FLI
caagtgggctgcctgtgcgcgtgcttttctaccaacatggtgactggagtgattttccagaggatgttgtaaatctagcacaacaggacttccagttgaagaagccaattacaactgctgtgttccagaacaagcacatcctgttggacttcattcacatgatttgcatagattatgagatgaccatagacaaaccactagcatgggttgatgataatggcaaacgcttctttccagatttatctgctgggctctacacatctaaaccatctcagcatgagaatggtgaagctgatgagtgtgctgtccgcaagggcaacttcaggggctcctccaaatttatgaagccactctcgttttcagggatattaggcggcaaccaaaaatccaatcctgatttctacaactggaatagagtaaagatcagatactgtgatggttcatcatttactggtgacgttgaggctgtggacactgcgaaagatctccgttacagagggttcagagtctggcgtgccgtcatcgatgatctacttactgtgaggggaatgagcaaggcgcaaaatgctcttctttctggatgctcagccggaggtctagcagcaatactacactgtgacagattccatgatctgtttccagcgaaaacaaaggtcaagtgtttttctgatgctggatattttttcgatgggaaggatatctccgggaacttttacgctaggtcaatctataagagcgttgtgaatctacatggatcagccaaaaatttaccagcttcatgtacctcaaagccaaagcaatcacctgagctgtgtatgttcccacagtatgttgtcccgacaatgcgcacaccattgttcatacttaatgcagcctacgattcgtggcaggtcaagaacgtcctagcacctagtccagctgatccgaagaagacttgggcccaatgcaagcttgacatcaagagctgctccgccagccaactcacaaccttgcaaaatttcaggacagattttctggcagcactccctaaaacgcagtctgtaggcatgttcatcgactcatgcaatgctcactgccaatcaggatctcaagacacgtggctagccgatggttctcccacggttaacaagacgcaaattggcaaggcggtgggggactggtactacgatagggaggtccctcggcagattgattgcccgtatccctgcaacccaacttgcaagaaccgtgatgatgattgagcaattgtataagtagttcatgttatcgaaatgaaaacaataaaggatcacaacgcgcgcccgtagttgtagatgatgaattataaacacatatgactgagctcaaagttgtttaatcatcatctgttgcgaaatgaggaagacaattggtgtcttgaagctgtgttttcgactgtgtctaaagcgtaaatgtaacgtatattgtgtcttcgcctatgcttaagacattggactagttgattggtcaatttaatttattaaatgttttgattggtgt

SEQ ID NO: 25100 - DNA, 2825 bp, Zea mays
  Clone ID: LIB3689-250-G2_FLI
gatcgtcccaacagaacgacggtggaaccctggtctcctccctcttcacccgcacctgcactgcagcacacgcgccgccgaagcgctctgcccacctcgcttccctccagtggccgccggcgcggctcagcggtccatcctcctgacgccacctgcaacggcgccaggcggtgatccattccaactcgcggtcatctcaagtgggtgcggcaaccatgcccaaggttaagaatccccacattttcatggacatatcaatgagtggaggcagcgccgagaggatcacatttgagctactcgcaaatgtagttccaaagacagcggagaacttcagagcactctgtactggtgaaagtggacttggagcatctacacagaaaccactctattataagggaacacatattcatcgcatagttaaagggtttgttgctcagggtggtgatttttcaagaggagatggaaaaggtggagagagcatttatggtggaaaatttccagatgaaaacttcagattactgcacaatcagcctggtgttctgtccatggcaaattccggcccagacaccaatgggtcacagttttttattacattcaaggctctacctcatcttgatgggtattgcttcttgttcttcagtcacctagctttattggattctcagttctctaaccacaaccaaacactaatactgtcataaaatttattaatgacatgtggcaagtaatgatcgttgcattaagtataaagttttagaaatacacgtttacaacatgtcacatcacacccctatatatcgtactgcactttctttgatactatagtatagtatttaatgctgttagtttctagttatctgtgatgtcttgtcttatatttcctgcctattctccatggcccagcaaccttaaatgaatttcaagctataatatttgtagcaaacatgtggtctttgggaaggtggtcagtggaatagctttgcttaaaaagcttgaagcagttggtagtgaaactggaaatccttcttatcaagtgaaaattgtagactgtggtgaagtttccaacacaaattctccggatctgctaaagggagagaaagaaaaaaaactaagaacggcagatggtaactccactgctgaagggagagccaaattaaaaaaaacatccggtgatcataagcaaaggaagaagagaaaacactattcgtctgattcatatagctcagatacttcagactcattgtcctattcttcagatagtggctctgattcagaatcagattcatcaatggatactagctcatccagtgatcataggcgtaagagaagaaaaggatctaagaaggataagcgcaagcccacaaagagaaagggtaaacatacaaggagtaagagaaagagtagaggatccaaaaggcgatctagacggagccatgggagttcaagtgatgattcagtaagctcaaagacagataacagcagttctgacagtgaaaagggtggccatcataccaagcgttccttgccgaaagataaagagagtaccaaaatgacaatttcagaacaaggaagaacttttcaagaagcggacaaagacgaacaaacagttactaccatcaatcgatcacaatcacatgatggaagtaaaccctcaaacaaagatggcaacagggctgatgaaagatctggaaattacaattcagaagataggaatggtccaggtggaagctccaggaacaatcccattcaggttgatgtaaatttaacgaaaccagtaaatgtagatggcaacactggtggtgataatgcagaggctggcatgtctagaactggtgaaggaaggcaccttccaagcaatgattctgtgtccaccaatggtaaagatttaggtgtgggttctgcagacaatgggcaacctcaacgaatcaggaaaggacgtggttttactcagaagtatgggtatgcacgccgatacaggacgccatctcccgagcgtccccctgttcgaccccgctacgatggagggagagatgatagatggaacaatttcaataggtatgaaagaaatggtccttacagtagacgctcgccagtaaggagataccatggctcgccaagagccaatagcccatccaggtacccaagaagagaacgaatgaggagtaggtcacgcagcccagtgaggcgccatgaccgtggagggtatcaccgccccagcccaagacgtagccgcagccctgcagaaccgagacagaatgtgaatgataggcctcgatcaggtcatggcggaggcgatcctgaccacagccctcctgccaacaggtccagatcgaagagccgggaccccttgggacccagatctcctgatgctgccccagccaagagggagagctccagatacaaccgcaggcgcagcagcagctcaaggtccagcagccctgatggaaacaaaggcctggtttcgtactgagaagtaacggcacaacagtttgcaggctccatggaccatgtttcttgctagtttagcatcatgtactcttttgtaatggattctgaacttgaactgctttcgatgcaggtgtagatttatatgttctgttagatttgaatgtttcttatgccagatatttatagaactactgagtagagcaggggaaaggctcgagcctcgtgaactggcttgagcttgctaaggcttggagaggctcgcgagtttgtaagcctgaatcgagactacttttatgactcgctcaaacgccgagccctgagcgaacttgagtcgactcgggagtctgcctaataatattgtgctacgttgttatatt

SEQ ID NO: 25101 - DNA, 796 bp, Zea mays
  Clone ID: LIB3689-250-H11_FLI
ccttgacgaaggaagaggcagccttctcaccgtcgcacccggcgatgcagcggcacgtcgcctccggccggccgtcgggcacggacggctccgacttttcttaccgcatggtcgtcgaatcccggtaccagagggtcgccgagggcagatcccgcctcgcgcgcctcatcctcgtgcaggcgctgcacctagtggccggaggcttgcttctattgctgtcgttgtccaagggggcggcggtgaacaagttcgccgtgctgtccatggccgcgggattcctggctatagtggtgggggaattagggcgaatgcggaccatgtcagtgctgcttcggctctacacaagcttgtcatcaattgcggttgcattctctgtgacgtgcattatccggtcagagttgttcttaaaggttatgaagcaaaacacagaggccatcacaagctacgaaatgcttgatgcggttcgtgttgctcttggtatcctgctgcaaatggtggttatagctacaactaccagactcctgcagaatatgtctcctcccaagagagcttcatgaatgctatgaaattttagctttgtatcaagtagtaagggatacaaacttcgagttaaaaatattggccaagtgcgatagtcttgtaccgaagatgctactggtgtacaactgtcaggaaatcgtggtttacttgtttcctcttttgtttttgttttacttcttcccttttctggatctggaaaattcgtagtcgttggcgagctttgcaagctaaaggctaacggagcatatgtgttttt

SEQ ID NO: 25102 - DNA, 2875 bp, Zea mays
  Clone ID: LIB3689-250-H3_FLI
ccccgtggagtggcggcaatcatcgctagcaagacgtgaagagttctcaagcaggaggcgtgtgacgtcagcaaggacaccagtattttcagtggagtggtggcgccagcaggaggccggcgaggggtcttctcttctagtagatgatgattgatgtggacttgaatttggaagttctaggaggagtaggagtatataaactggaggaggagtggaggagaggagagccgaatgcgagcgcgatccatggctccaaatcgaatccaaagaaactagtagaagtaatgcgggcgagggatttgcacccgctgtgctgcctccccgccgccgacggaggaccccctccgcctccccttggtcatgcaccgccggccgtggctgggctgctctacaagtggaccaacatcggcaagggctggcgcccgcgctggttcgccatccgcggtgccgtcctcgcctactccaagattccacgccgctccacgtcgcccccctcctccgcctcttcctccacagccacccggatcattgggcacgcccgatacggccacgacagccccgtcggcctcgtgcacctcaagatctcctcgttccgtgaaagcaagtcagatgacaggcggttctacctaattactccagccaagacgctgcagctgagaacagactctgctaatgaacgagcggcttggattgaagcccttgtttctgctcgagctgaatcttctcctgatgggggtttattgactaaccagaatgatgcatcattttctacggagaggcttagaaatcgcatgcacgaggaaggccttggtgaggaaataattaaagactgtgaacagattgtccattcagaattctcacagtatcacacacagatgaaacaacgctgtgaagaatatgtaagctttctcagcaggcttccacagcagtttgaggtacttagcgcagatgataatgctaatatgattgagctccactcgcacttgatgaaacctgactattccagctctggacagggaaaatgtagtgagagcagcaatacagaatcttctgatgatgttgggcaacaggagttggatgaacttttggatgacgatgactatcatttttatgatacaaggcagagtttcagtgattcagcaggactttcttgcttgaacatgaaatgttcagattctggcaaggatacctttctttatggtgataaatttgtgaaaccaaaagctggtacgggtgacagtgagtgcctgccaccgtttttcaagcgtcgcacgaagttgcctgatccagttgagaaggaaaaaagtgttagtctttggtcaatgatcaaggataatgtcggaagagatcttacacaagtatgtcttccagtttactttaacgaaccattatcatctcttcaaaaatgctttgaggacttggaatattcttatttgttggatcgtgcatatgaatgtggcctaaagggggacaatttgatgagaattcttaatgttgctgcatttgcggtttctgggtatgcttcctcggttgggcgcccctgcaaacctttcaatccattgttaggggaaacctatgaagctgattaccctgaaaatggaatccgtttcttttctgaaaaggtgtattctttgttaaaaagtcacccctttttcgttcctgttaaatcataagaggtgggcttggtcccctgacaagacaaattaatgggctggcaatattaactgaattatgcagtgtgactagtttctaaatcagtattttaattcaatgaaaactaaatcagtatttcagttgaaaaaaaaataaatattgctgtttcatgacctcagtagaaactatagctggagttcatgttatgatgctgtatttgttgcgataggttagtcatcatccaatggtcatggcttgtcattgtgaaggaaaagggtggaaattttggggagacagcaatgtaaagagcaagttctgggggcaaacaatccagctggatcctgttggtgtgttatctgtagaatttgatgatggagaaattttccaatggagtaaggttacaacaacaattaataacgttatcattggtcaagtttattgtaatcactatggaacgatgagtataactgggaacaggggatattcatgcaagctgattttcaaacggcaatctttccttgagcgcaaccctcggcaggtaaaaagaaatgcagcatcccattttggaatcgatttgatggatgttactaagatgtagctgtatgcaaggttgaaggattggttaaggacggtgatggttcgacggtggcaagcctaatgggaaagtgggatgagaggatgtactgcagcgcatcagggcagaatgtgattctgttgtgggagaaaaatgaagcttcgactaatcccactcgctataacctctcatcgttcgcaataactctgaacgagttgactccagaactcaaggagagccttccaccaacggattcaagactgagaccagatcagcgacatgtagagaatggggagtatagtaaggccaatgctgagaagctgcgactggagaggaggcaacggatgtcacggaagatgcaggacaatggttggaaaccaagatggttccgaagggatgatggcacattccgctatgtgggaggttactgggaggcacgacagcagcggaaatgggacggatgtcatgatatatttggtgaattcgtgtgactcaacagtgaggctgctcggagcttatatatatgtgtctaatacaacaagtagctagatagtcgaactggacaattgggctgtacactttgtcgggctgccgtggtccgccacccgcgtcttgccggactcgttggtaacgcgcatggactgtatc

SEQ ID NO: 25103 - DNA, 1155 bp, Zea mays
  Clone ID: LIB3689-250-H5_FLI
cgccgccgcgtctagcctcctcaagtcctccttcgcgggctcccggctcccggccgccacgcggaccacaccggcgtccctcgtggtggccaccggcccgcgcggcgccggcgcggggcccatctgcgcgtccatgtccatgtcctcctccaacccgccctacgacctgacgtccttccggttcagccccatcaaggagtccatcgtgtcccgcgagatgacccgtcgctacatgacggacatgatcacctacgccgacaccgacgtcgtcatcgtgggcgccggctccgcggggctgtcctgcgcgtacgagctctccaaggaccccgccgtgagcatcgccatcgtggagcagtcggtgtcgccgggcggcggcgcgtggctgggcgggcagctgttctcggccatggtggtgcgcaagccggcgcacctgttcctggacgagctgggcgtggcgtacgacgaggccgaggactacgtggtcatcaagcacgccgcgctcttcacgtccacggtcatgagcctgctcctggcgcgccccaacgtgaagctgttcaacgccgtggccgtggaggacctcatcgtcaggggagggcgcgtcggcggcgtcgtcaccaactgggcgctcgtgtccatgaaccacgacacgcagtcctgcatggaccccaacgtcatggaggccaaggtcgtggtcagctcctgcggccacgacgggcccttcggcgccaccggcgtcaagaggctccaggacatcggcatgatcagcgccgtgccggggatgaaggcgctcgacatgaacaccgccgaggacgagatcgtgcgcctcacgcgcgaggtcgttcccggcatgatcgtcaccggaatggaggtcgccgagattgacggcgcccccaggatgggcccgacgtttggcgccatgatgatctccggccagaaggcggcgcacctggcgctcaaggccctgggcaggcccaacgccgtggacgggaccatgtcgccgccgttgcgcgaggagttgatgattgcgtacaaggacgacgaggtcgtggacgcctgagtgcggcaagcagagaggaggatcgacgccagcagcgtcttatcttaattgccttgttgttcaatgatgaatcgatcgaattcccttgggttagcttt

SEQ ID NO: 25104 - DNA, 1752 bp, Zea mays
  Clone ID: LIB3689-250-H6_FLI
gcagcgaatcctgcaacaaggatgtccccatcgtccacgtcgacatgcacaactatagccttgatgagaagatcaggatgacgctcaaggcgcacattgtcgagaagaccgacgaggtccatgaggtttcttttgtagatattctggccgaggacttttttagatccttccactttgtatattaaaagtgaggtctacaatatttatttgccccaatcaatgcagcatggtcctcagacatatggtgatacatattagttttaattccgtatgtgtgtttatttaatttgttcttcaattcaaaatgcagacttttcttcacaagctgaatccttctgcaagaccatggacagaacatttactattgatttgtattcgtcctatataaaacagaaactatcagaattttctctatcaaatagttctaaatgtcttgtagcactaattatagaaccaggtaaaaaagtttcactctttgagcttcttgggaatattttcattttttcctctttagcctttagtatgtaactatgcgcactatcatttgatgctaatagctggaaaaaaactcagtacttttccatgccatttactggttcaacctcttaacccatatttgtgtagtaatatacaaggtgcaggtggaatcctcatgatggatcctcttttccagcgagtacttgtgagtgagtgtagaagtcgaaaaatacctgtcatatttgatgagatatttttaggattctgacgtcgtggtgtggatatcatatttgacaatacctttttagaggataaataggtattttctttgtattttatgaccttaataacttctctttcagtctacttctgagttacttggttgtttacctgttatcgcttgctatgcaaaattgatgactgaggtaattgtaccattatctgcaaccttggcaacagaggaagtttttgaatccttcgaaagtgactctaagtttatggcgctcttacatgaccattcatacactgtttatggtatgggctatactgcaacactaaacgctatggattgatatcaggatcctattcaaaccttgatgccgaccacatgaaactcaaggagggtgcagggccacaccacacttatggactacttcagtttgtgtgtcaaatctgttttccacaaagaaattatttaaacaaaaggatcgcatagagaaggatgggacagtgatgagactttcaggtggtgggcataactgctttcaagatagtgatgaggcaagattaacattcaaacggaagttctggaagaaggctatggagatagatgatctatgtggaaatgatggtgcatggtggggtattaaaggttacatgcgagacaatttcaaccatagcaataaggtcacatcgcaaaaagagcatttttagaacagtaggctcgtgaaatctttgttggatatgtattgggagcttcgtcctgttaccagttcatccttaacacaccaaacaaggtatgacccaacacgtgcagttgacccaatcattgaagatggtcactacaccttgttttgaagcctagcgagattggacgccttagtgttcaattgttacacgcagatggtatttgtgcagatattaggtttaatgttgagcacaaacaatatttaaagattttctgtgttgagcttgttttgcttttggccaactgttgatagtgttttttgtacaaaagtgattcattgtactatcacatataaaagtctgcatggt

SEQ ID NO: 25105 - DNA, 945 bp, Zea mays
  Clone ID: LIB3689-251-A7_FLI
ggtttttgattttagccgccgccgctgctcatctcacatccctcgagaagacgcctgctcctcgccgatcgatacgatggccgtcttctccgacctccacaccgccgacggcctcaagtccctcgaggctcacctcgccggcaaaacctatgtgtctggtgactccattactaaggatgacattaaggtcttcgccgcggtgccgtcgaagcctggcgctgagtttcctaatgccgcccgctggtacgagaccgtctctgcggctgtagcctcaagattccctggtaaggctgttggtgtaaatctgcctgcgggatcagctcctgcggcagctgctcctgcggatgaggctgaggatgatgatgaccttgatctttttggtgatgaaactgaggaggacaagaaggcagctgatgagcgtgctgccgctgccaaggcctcttctaaaaagaaagaaagtggtaaatcctccgtccttatggatgtaaaaccatgggacgatgagactgatatgaagaagctggaggaggctgtccgcagtgtccagatggagggtctgacttggggagcatcaaagcttgtgcctgttggatacggcatcaagaagatgactatcatgttgacaattgtcgacgatcttgtgtccatcgacactctaattgaggaccaccttacgcaagagcccatcaatgagtacgtccagagttgcgacattgtggctttcaacaagatctagagttcagtttctgagtttgggcaacggcagcggctcagctcgtcaagtttgtgctgggatgccagtttatcccttctagtctattacagaaacgttgttcggagctgagtctattataaacatcttggtctgagtttattgttgagtggtgccagtttttttcaatatacatttatcttaaaaacagcggtactgatgtttttttgtct

SEQ ID NO: 25106 - DNA, 1089 bp, Zea mays
  Clone ID: LIB3689-251-G6_FLI
ccacaccccccgagctcagcttagctccactccagctccaatcacagtcgtgaccagagcgcgagagctagctagagggccgtgaaaatgccgatcaataggatcgccctggggagccaccaggaggtgtaccacccgggcgccctcaaggcggcgttcgctgagttcatctccaccctcatcttcgtcttcgccggccagggctccggcatggccttcagcaagctgaccggcggcggcccgacgaccccggcgggcctgatcgcggcggcggtggcgcacgcgttcgcgctgttcgtggcggtgtctgtgggcgcgaacatctccggcgggcacgtgaaccctgccgtgaccttcggcgccttcgtgggcggcaacatcaccctgttccgggggctcctgtactgggtggcgcagctgctggggtccaccgtggcgtgcttcctgctccgcttctcgacgggcgggcaggccacgggcaccttcgggctgacgggcgtgtcggtgtgggaggcgctggtgctggagatcgtgatgaccttcgggctggtgtacacggtgtacgccacggcggtggacccgaagaagggcagcctgggcaccatcgcccccattgccatcggcttcatcgtgggggccaacatcctggtgggcggcgccttcgacggcgcgtccatgaaccccgccgtgtccttcggccccgccctcgtcagctgggagtggggctaccagtgggtgtactgggtcgggcccctcatcggcggcggcctcgccggcgtcatctacgagctgctcttcatctcccacacccacgagcagctcccctccaccgactactaaaagccgaagccgaccgacctaggggtgcgcagcgcagctagcgcatccagctctctctccccgctcgccgccgtttagtttctctcgtgcacgtgcatgcatcgtcgactgtctcaggccgccgctgcgccggcgccgctcgcatcgtttgcttccttggaccagcagtcgtcgccgtcaggctgaactgcttgtaaccgtgaattccggacccgtttgcttctgtaagatttgtgcatttgcctgagt

SEQ ID NO: 25107 - DNA, 853 bp, Zea mays
  Clone ID: LIB3689-252-A11_FLI
taaggctaaagtcgccggataatataagaccagcaataacaagctagtttgccctcgttctccaacaaaatgtctgatgtggagccgctggttctggctcatgtcatacgagatgtgttggattcatttgcaccaagtatcgggctcagaataacctacaacagcaggttacttctatcaggtgttgagctgaaaccatccgcggttgtgaataagccaagagttgatgttgggggcaccgacctcagggtgttctacacattggtattagtggatccagatgccccaagcccaagcaatccatcactgagggagtatctgcactggatggtgatagacattcctggaacaactggagccagctttggtcaggagctcatgttttacgagaggccagagccgaggtccggcatacaccgcatggtgttcgtgctgttccggcagctcggcagggggacggtgtttgcaccagacatgcggcacaacttcaactgcaagagcttcgcccgtcagtaccacctggacgtcgtggctgccacgtatttcaactgccaaagggaggcaggatccgggggcagaaggttcaggccggagagctcgtaaggaatgaagcatgcacagaagaagactgcagcgctttcgcatgcatatgatctatcgtcgtcctgcggaatatatatatagtaaccgttgttatatggaataatgtgcatgaaattggtatcagatgcaccgacccgtacgtacgtaattaatgtttgttattacacgcagacatataatatacatactcattcacatgtatccgtatatgtatctatggcacgagaacaaggattgatatttactggtc

SEQ ID NO: 25108 - DNA, 2263 bp, Zea mays
  Clone ID: LIB3689-252-B7_FLI
gccagagcagagagggagagagagaacacacaaggggaggggtggggaagggaggcgcactcgtcccgtctggtatcgtctcccccggcagtgaaggagtagaaggaaggagagtaggagtaggaggaggaggggagaatgcgtgtcggcggcgggcgggacgacgacgacgaggtgtcccggaagctcaagagcatggacgtggacaagctggagaacggcggcggggaggagagcccgcggcccgccgtcaagtaccacggctggaaggccatgccgttcatcatcgggaacgagacgttcgagaagctggggacgctgggcacgtcggcgaacctgctggtgtacctgacgcaggtgttccacatgcggagcgtggacgcggcgacgctgctcaacgggctcaacggcaccaccagcctcgcccccatcatcggcgccttcctctccgacgcctacctcggccgctacctcgcgctcgccatcgcctccgtcgcctccctcatcggcatgttcctgctgacgatgacggccggcgcgaatagcctgcacccgccggagtgcagcgtgggcgagacctgcgagaaggcgacgtcgtaccagttcgcggtgctcttcgtggccttcgcgttcctggtgctgggctcggcggggatccgcccctgcagcatgcccttcggcgccgaccagttcgaccccaacacggagtctggcaagcgcggcatcaacagcttcttcaactggtactacttcaccttcacggccgccatgatgatctccgccaccgtcatcatctacgtgcagagcaacgtgagctggcccatcgggctgggcatccccacggcactcatgttcctggcatgcgtgctcttcttcatgggcacgcgcctatacgtgcgggtgacgcccgaggggagccccttcaccagcgtcgtgcaggtgctatcagccgcgctcaagaagcggtcgctgaagcagcccaaggacccgaagcaggacctcttcgacccgccgcacaccagcgccatcgtcaccaagttggcgcacacggaccagttccgctgcctcgacaaggcggccatcgtggcatccccggacgaggtgcgttccggcggcggcgcgcccgcggacccctggaggctctgcagcgtgcagcaggtggaggaggtcaagtgcctcatccgcatcgtgcccgtctggtccacggggatcatctactacgtcgccgtggtgcagcagtccacgtacgtggtgctctcggcgctgcagtccgaccgccacctcggccgcgccggcttccagatccccgccgcgtccttcaccgtcttcgccatgctcgcgcagacgctgtggatccccttctacgaccgcctcctgctgcccaagctccggaagataaccggcaaggaggaggggttcacgctgctccagcgccagggcatcggcatcgcgctctccactgtcgccatggtcatctcggccatcgtcgaggaccggcgccgtgccatcgcgctcagccagccgacgctcggcaccaccatcactggcggggcgatctcggccatgtccagcctgtggatggtgccacagctcatgatcctggggctgtcggaggccttcaacctcatcagccagatcgagttctactacaaggagatcccggagcacatgcgcagcgtggccggggcgctcgccttctgcaacctggcgctcggcaactacctcagcggcttcctggttaccatcgtgcaccggacgacggggtccgggcagaactggctggcgcaggacctcaacaagggccgcctcgacctattctactggaccatcgccggaatcggcgtctttaacttcatctacttcgtcatctgcgccaggtggtacaggttcaagggggccagcaactgatccgccgaggtaaccgtcgtctcacgatcacgacgagtgcgggcatgaatgggactcagctctatgcggtcctgatggcagtttgcttggtggcttgggtaattatgttatggccttggcagagcaacaggaaaaaaaaggggccttaaaataaggtcatgataattattttgtatctaccatagtagttgtttgatatcgacgcctctctctctctctctctctctctctctctctctctctctctctctctctctgttattactttatatttttgttactgtcctttcatttgaatctataggatggtcaaagtggctgatgaaagaggagaaagaaacaaaacagttggttt

SEQ ID NO: 25109 - DNA, 1679 bp, Zea mays
  Clone ID: LIB3689-252-C5_FLI
ggaagccgccgatctcggagcccagcacgccgccgccagccatgtcggtggatacggagcggagctccaccgagtcgtccgcggcctccgggctcggctacgaggacaccgcgctcgccctcaccctccgcctcccgggctccgaccccggccgttcctccccgctcgccgcgccctccgacgctgcgccgtctcccaaggcgcgggtggtggggtggccgccggtgaggtcgtaccgcaagaacgcgctcgccgactccagcaaggccagccgggcagccaatttcgtgaaggtggccgtcgacggcgcgccctacctgcggaaggtggacctccaggcgtacggcggctacgaccagctcctccgcgcgctccaggacaagttcttctcccacttcaccatcaggaagttcgccgacgacgagaggaagctggtggacgcggtgaacgggacggagtacgtgcccacgtacgaggacaaggatggcgactggatgctcgtcggcgacgtcccctggaagtgagctccttcgctctgtctgttttactttccctgatctaattagctggttatctacgcagtttggctgtgctgagtagatttgaaaaaaaaggaacatggctgtagtttacattttgggtaggcgggaaacagatcctagaaagagttacttcatcttcagcatcggtatgaagtgactaggtttgcctcatatatattttttacagcgccgcatcttttgattgagacttaaaagaggtgcggttggtgttgccggataggaggattatttgaattgcacacctaaggccatgtttctttgatcccaaaactatagggattgagaggattagaagggattggagaggattttgacttacagaggatttaatcccctcaatctctatagattagcgcaaaacaaacagggtctaacagtgaaagaaggagaagcatcttattatccacacctctttgccttttgttttctctttttgaccttggataagattccatccagaaacgccctccacgcggaccaatcacggtactttcccgtttgatacttcgctgctgctgctgctgctagctttttagcgtatccatgtacagaatcccttggtttgaaaagaattggctttggataagggctgtcttcctagctctgttccccacttatagataggttgatcattctagaaaaatattctgtctcgaccaatgagacgagccgggcctgtccgagttaattttaatttataattttcttccttggtcatactgtgtttttttttttttttttttgcaggatgttcgtggagacctgccggcgccttcgcctgatgaaagattcagaggccgttaacttggcaccaagagccgcccgatgaggcgcaagcgcaactccaccgtcaccagtatgcactggcttttagtggcttggcttgttggaggaacgagggaacgtacttcgtcgctgttttgaggatcttcacttgacatatatatagcaatgtgtacagctgtcacctgctgcttttgcctgaggaaagtttgtagttccattactttacttatctgtagtgtctatctatctatctatagatccgaagctttgatatacacatggcggctacaatgtatttttgatgaataagaccagaccagagtaccagcc

SEQ ID NO: 25110 - DNA, 3680 bp, Zea mays
  Clone ID: LIB3689-253-A3_FLI
ctcgcactctgtgttgcagacctccgccaccggaggttcctgcgggtgcgtttgccctgacagaacactggaggcccctgcgggtgcgctacccctgaccaagcaaccacggactagtctaccgccgtccgcagcatccgttcaccttcaccccgcctgcgcgctctctctctgcgacgactgggtgggctactgcagccgccgccgccctacgccgggtgccgaggccttcgccggtctcttcgctggtgacgagcactcaccaggctgcttcatcgtgaaaaattgttgcatgcagccacgcacatggtttgcactatccacctacacagtgatctatgcttctgaccccacatgccttaggtctatctgcaccagaaagaagtgaatcgtttcaaggtgtctatatactttttggatgctttaagaaagggcctggaagcattgcacgggtaacatatttgtctgacagcgattgattttgggaaccaatttggtaatcagtacaatggagtgcaacagagaagaagccttgaaagccagggaaattgctgttaagaagttggaaagcagagattttgttggtgctaaaaggattgcccttaaagcacagaggattttcccagagatagagaacataccccagctgttaactgtctgtgaagtacattgtgcagcagaagcaaaagtaaatggaatgttggatttttatggaattctccaagtagaaggaacagcagatgaggtgaccataaagaagcaatatcgtaagcttgtcctctcacttcaccctgataaaaacagttatgctggtgcagaatctgctttcaagtttgttgcagaagcatactcaacattgtctgatcgaaccaaacgatatgcatatgatgtcaaatggagggctgctcccaaagttgcaccaaagcaggctacacagccgacacaaccaaatcaggctacacaacagaaacaggatgcaaaaccaaagcatgttgctaaaccaaagcaggctgcacagccaaagcaggctacacaaccaatgtggactacagagccaatcaacaaaaatagcacaaatagtagtgcagcaggatatggaccttggacattttggaccgtatgcattcactgtaaaacaaaatataagtaccatggtgacatactcaatcgtcagatccgctgtcagaattgcaggcagaatttctttgcacaccagacaagtacagaggatgtgccttctgcattctcatcaaaaacagcaaatagtgctgcgcagcaaggctgctctacaaatatcttttctagagagaacaaagaggggcctgtgatggaaggagttaaattttcagcaaagaattctactgtaccagattttggtgacaggaaaaacctaggtggtggggtggatacatcagcagggccaggttctgcagaaatccctactccacggagatcttctaggagaaaggcttgtgctgatgccaacaacatcctgaattctccaaagaaaaagagtcggacactcaaagattggttctcaaatgctacctccagttctaataaagtagttgatgataatgttgcccatgctgatggacatgttagtgaacctcatgtgtctagcaaaacagataatcaagatagttgtgttgtcaatgaaggcaataaaagaaacactaaaacaacttgtgatccacctgctgagaagccttggaatactgggagtttcacgtaccctgacccagaattttttgacttcgacaagtgcagagatgtcaaactgtttgcagttgatcagatatgggcactttatgatgaattcgatgccatgccaagattctatgctagaataagacatgttaataccaccaacttcagagttaagtacacttggctggagcattctacagtgaatgatgatgaggaaaaatggattgataataaacttcctgtggcttgtgggaactttacgttaggaaacacagaggagtcacaagatcccctcatgttttctcacatggtttcgtgggttaaaggaagaaaaaggggttcttatgtaatatatccaaatataggtgaggtttgggctctttataagggctggagtatgcagtgggtctcagatgcagacagtcatagatcctacgagtatgaagtggtggaggtcctttcaaacttcacagtggaagctggtgtgactgttatccccttggtcaaggttaaaggttttgtgagtctgtttgcaccagcaaaggacaaaccatcatttgttataccatcaagtgaactacttcgcttttcccacagcatcccatttttcagaacagtgggaaacgagaaggttggtgtcccttgtgggtttcttgaactagataccgtatcgcttcctagtaacctggacgtagcatttccacctgttgatcttgattcatgtgtggctaccaatagaacaatgggcagcgagtctgttgatttgactgacaatactacacccagccatggaaatggacgaagtgctcataagggcaaccatagaaatgcaggcaagtggagaaaacaatccgttcaaactcagcagcataatgcccgccttgctagcatgtctggttattctgctccccaagtctgtgcatccacctctgttttcacatatccagattcattgttctacaactttgaagaagaccggtcatataataagtttgaacgaggacagatatgggctctttacagtgattttgatggccttcccaaatactatggttgggttacaaaagttgattcagatccatttggagtgcacctgacttggctggaagcttgccctcgatcagagcatgagaacacatggttagagcatgacttacccgtgagctgtgggacatttaaacttcataactggaggatgaagtacgacataaacgatgcattctctcatgtagtagaaacacaaggtggttcgaagcggaactttgaaatccacccagaagtaggggaaatttgggcgatctaccacaattggtcacctggctgggttcctagcaaagatacctgcgaatatgccattggcgagataactgagcgcaatgaagctagcacgaaagtcttatttctgactcaggtagatggctacaaaactgtattcaagccagacaatgagaggagtattctggaggtgccaacaaaggatgacttgctgttttctcaccggataccctctttccagctgacaacagagaagggtggcgagctctgtggcttctacgagctggatcctgctgctattcctgattccttcctctctgcgggtacccactgactcgcgaaggctgaattcgattacctccgtcattgaactggtgatattgcatgctcttctggacgttagtgtgtgtgtgggggcaactctggtttcggccaagccttgccaaacctacacactccactcggtaggcctcggtgccttttgtactgtactgagcatacaatttgattctaacgctgatgcctatgaaactataatcaccatttggtagtgctctctgcaaaacagctagaaatttagtttgtgttccaggaacatgttgagtctcaaatccactactgtaaatttagcactttctgtttttatttgccgttggtttgttggcctgatgatgctataaggtctagttgcaatg

SEQ ID NO: 25111 - DNA, 1692 bp, Zea mays
  Clone ID: LIB3689-253-B8_FLI
gggagtagtcgacgcgccgtcactgaatcctcagatcacggctagccgtaatcacgccactctgctgactcccggcgagcagtgtaacattttccttcagccatgggcaaggagaagactcacatcaacattgtggtcattggacatgtcgactctggcaagtcgaccaccactggccacctgatctacaagctcggcggtattgacaagcgtgtgattgagaggttcgagaaagaggccgcggagatgaacaagcggtcattcaagtatgcctgggtgcttgacaagctcaaggccgagcgtgagagaggtatcacaattgatattgctttgtggaagttcgagaccaccaagtactactgcactgtcattgatgcccctggacaccgtgacttcatcaagaatatgattactggcacttcccaagctgactgcgctgttcttatcattgactccactactggtggttttgaggctggtatctccaaggatggacagacccgcgagcatgctctccttgctttcacgcttggagtgaagcagatgatttgctgttgcaacaagatggatgccaccacacccaagtactccaaggcccgttatgatgagattgtgaaggaagtctcttcctacctgaagaaggttggatacaaccctgacaagatccactttgttcccatctctggtttcgaaggtgacaacatgattgagaggtccaccaaccttgactggtacaagggcccaaccctacttgaggctttggacttgatcaatgagccgaagaggccttcagacaagcccctgcgtctccccctacaggatgtgtacaagattggtggtattggaactgttcctgttgggcgtgttgagactggtatcatcaagcctggtatggttgttacctttggtcctagtggccttactactgaggtgaagtctgttgaaatgcaccatgaggctctccaggaggcccttcctggtgacaatgttggcttcaatgttaagaatgttgctgtgaaggatctgaagcgtgggtatgtggcctccaactccaaggatgaccctgccaaggaggctgctagcttcacgtcccaggtcatcatcatgaaccaccctgggcagattggcaacggctatgccccagtgctggactgccacacctcgcacattgctgtcaagtttgcggagctcattaccaagattgataggcggtctggcaaagagcttgagaaggagcccaaattcctcaagaatggtgatgctggtatggtgaagatggttcccactaagcccatggtagtggagaccttttctgaatatcctcctcttggtcgctttgctgtccgtgacatgaggcaaacggtggctgtcggagtcatcaagagtgtggagaagaaggatccaactggagccaaggtgaccaaggctgccgcaaagaagaaatgatgtgtctggctggttctgtgtttgcttgagggatacctagtggaaacgtaaaatatctcgtcttgttcacgtcattgtctgaactatgctcgcaacgtttgcctggtcgatttagaactgttattttcgttaaaaccagagtgttatttaagacttatccgaacatctggtgagccatatatggttactagttttgttactacccttgttggtgttgtgtgcttctttagcaaatgtgctgtttct

SEQ ID NO: 25112 - DNA, 2161 bp, Zea mays
  Clone ID: LIB3689-253-F11_FLI
catttcgtcgaatccgccgtgagatccgcccgactctcgctccgttccggcgctctcggtcgggcgaaggctccaccttcctccgacaagatggcggggaagggagccaaggccacggccgccaagtcggcggacaaggacaaggggaagaagaccggcggccccgtctcgcgctcctcccgcgccgcaccccatgagaagtcagctccgaagaaagatgtttatcaattgtttgctgagaaggtcagggataacaaacaactggaatcaagatgggcgatcatgcaagaaacccgcgtggagtatttccgtggaaaagatttcaataccttcgtcaaaaatcatccagaagtcagggaaattttggggccagataaggatttagaggtggaagacattgttaacactttgctgaccaagaaccttgtgataaggtgtgatcgagtcatgaaaactgtgaggcctggcaagaaaaagctatcgtcatggcctgctcatttggagatacataatgaacaagtgtttactgaaaatgatgggttttttgcttggatgtttctgaaaagaaggaccttgtggcagacaattctctcatttgtttggcctctttttgcactggcagtctgcttatttccagtttacccataccagtgcaagattgttgtactgtactcatgtgctggagctctacttttcattgtctccattcttttgcgtaaaatctccccccctctcctaaatgtattttcattcacgacatacattatacttaagtagacactttcaaattacattttagtcattaggcatatttgagtaacaagctacaatttattgcctgtgtagtgttgtgcgcacttccaacgtcatacggtcatacccgtcatatgcatatttgattaatgaatactatttacctgctgtttataagataacagctatcagaagttggttttgacttgctacaagttttgtagtatatattgataaccttgcagtcacatatatttctagtcactgattaaatcctaacatggcacataacaaactatttagtagtcctgtatatgcaagctgctgctttgttagttgactcactatgttgcggagtaaagtatgtttgattattcttctttcatgaatgtaacagttgcattacagagtatacagtggttcaaaaaacaatcgaacaaagattcaaacttcaatttaaaactgcacagcatgctaggtggataggtatcattcacctccagcctccaccaaactttctgagttcggttgtttttgaagtgatgtttcgacaatagtgtggaactcacacttcagtgcatcaatatgaatgtttagagaaaaggaaaaactggggggatgggttcagactcaagagttttggtgtgtgtaggaaccatgagctcaacattagagtatcattcacttgtttcattacaataagttatctgtttttaaacctttccatttcaagcacatcctaacttctcttttttgccctctatagtaatccctgcttgtctaatatttccaatgtaatttcagtaagagctgctatctttggtatcctatgggttctccttgggaaacgcgtgtggttcttccccaatataaatgcggaggagacaacttttagagaactcgttcgtttttggcctgaaaaggatgaaggagagcggccaaagtggacatcaagacttttctatgcccttgttgctctattggtgatattactgcttaggcatcatgctcctgacgaagcagctagagccaggtaccaaaagaaggtttctaacataatcgatgacgttcttgaatggtctccgaagttagctatttctggaatgattgaaaagcacactggggctaacattacagaagaaagcaattacatgcctccatccaccgaaggcaaagcttcagaagatatggacgttgatggggataccgaggctagcttagatgaaacccaagataatgaatatgctgatgatacaagatcaagcggagcttaaaatcagagtttttttttttttggtttgagcaatctttgttgttgtgaatctgcagaattatatagatagcttactgctggcaacaaaagaaatcagggtgtcatgttttgatgttacatccatatattccctgc

SEQ ID NO: 25113 - DNA, 770 bp, Zea mays
  Clone ID: LIB3689-253-F6_FLI
tttctccatccccgtcccctcccgacccgctctgccgttcgctgtttccatcccgccgacccgctgcgccaccgccacgctccccaatctccatcccaacgcgacgccgcctctaatctccctcgcttccgctccactccgcacccccggtcgcctgccctaacctcgtgctgctcgtgatcccgccccgtgcccagatctggtggcgccttcgccgcttgagcgcccccgctcagcggtgaagtgcaggcgtacgttcggcctgcgggccggccgatggtttcggccgcggcgcaggcgggcgtggtcgcgtcgtgcgtcgtgcgtgctcttcgtccccatggggctggccggccggcacctcagccgcaacaaggtgctcttcttctccggcgcgctcttcatctcgcttgctgtcgggatccacctatccccgtacctcccttccctttccctgccccaccttgcctcctttttactcctcccccaccctgtctctgcgtccgcctcctctgggtcttcctgcgtccagttcctgcaccgcgtctcgtggtctaacgccgccggagccgctgacaatggctcgggaggcggaaaagcgcgggcgtggtcgtggccgccctcgctggcgtccgcctgcgggttcgctcgactgtcgcgcgacgacgcgtcactgctgctcaatggctcgtgggtgatggtggccggggactcgcaggcgcggctgctcgtgctcgcgcttctccgcctcctgctcgacccggccgcgg

SEQ ID NO: 25114 - DNA, 1229 bp, Zea mays
  Clone ID: LIB3689-253-G5_FLI
tacacatcttttccactgaaaagaaaagtttcattaaggctgaaacaaattgaaaactaaaggaaaagaacactatcagcaggttaaaaaaaccagggcctaatagaaaaagttgaacagatatcctttttcttgtgttatgatggacctgtccaagatttttgctctgttttgatggaccaataaatttgttatatatatgatgaagatgtatcttgtttctccggttcaaaaaagatatatcttgtttgtgctctaggtgctagcaagaatgctcatctcaaggagctggagcgggctggggaaagattgcagcttctccaggctgatttgttggactacagcagtgttgcatcagcaattgctggctgtgagggtgtcttccatgtagcttgccctgtcccttctggtcggtcctccaaccccgaggtggaggtcataggtcctgctgtagtaggaacaaccaatgtgttaaaggcttgctatgaggcaaaagttaagcgagttgtggtggtgtcttctgtttcagctgtattcagtaaccctaattggcctaaggacaaggtctttgatgaagattcttggtcagacgaggattattgcaggaagaatgaggattggtattatctttctaaaactctatccgaacgtgaagcttttgcttttgcagcaaaatcggggctggatgttgtaactatttgcccgtccttggtatttggacccttgatgcagtctatagtaaatacgagcagtaaagtactccttaattatttcaaaggagatcgtgagactgttgaaaacagactcagaaatatggtggatgttcgtgatgttgctgatgctcttgttctggcttacgaaaatccagaagcatctggacgatacatctgcagctcgcatccattaaaagtttctgatatgataaacatattgaagaccttatatccatcttacccttatcctaaacactttgtggaaacggatggcaacatcacctgcagttctgagaaacttcagaagctagggtggaccttcagggctatagaggaaaccctgcgtgatagtgttgaatcctacaaagcatttggcatccttaactgagcatccgactgggacagtgagacagcagttccaacagtccaatccctatctcgttcatataaaccgtgaaacagaacatgctgttcatgtacatttgcaataaaaaattgggaaatttgtagccctct

SEQ ID NO: 25115 - DNA, 1537 bp, Zea mays
  Clone ID: LIB3689-254-A11_FLI
gcttccatctcctagccgccgccgccgccgccgcccaaaaccctacctaccctcttctccccctcactctcctttcatctccattctaatggcggcccaacccgtccggcgaagctgctagtgcttgtatctactatcttcatcaggtacttcgcgatcctactgaagtattccccgccgccgctgccatggccaccctcaaccctttcgaactcctcggcgccgacgacaacgacgacccgtcgctgttgattgcggcggcggcggctgctgctcagaaagccgaggcgaagaagtccgccgtggcgcctgctgggaaggctgcccagcctgcggcgaccaccaagttcccgaccaagcccgctcctccctcgcagacggttcgggatgcacgcggcggtggctcatcagctcgtggaggctttggccgtggtgaacgtggccgtggcagaggtggacggggatatggccagaaccgtggcttcagtggtgacaatggcaatgagttccagggaggttatggtggcggaggctatggggatggtgctgtaactggtggatctgaaggagaaagggagagagacactcgtcccccgtaccgtggcggaggcagacgtggtggttacaggaatgttgagtttggtgatgactctgagaggccaccacggagaaactatgagcgccacagcgggactggccatggctatgagatgaagcgtgatggcgcagggcgtgggaactggggcactgccactgatgagcttattgcccaggatgcagaggactctccgaagatggaggatgctgctcctgttgctgagaaacaaggtgagcagatcgatgccccagcagcagatgagaacaaagataacaaggatgctactgcaaatgaggaggaagaaaaggaagaggacaaggagatgactctggaggaatttgagaaaataagagaggagaagaggaaagcactacttgcgttgaaggctgaggagaggaaagttgaagttgacaaggatctgcgttctctgcagccactttcaaacaagaaagaaaatgatgaagttttcattaagctgggttctgacaaggataagaagaaggaaaatgctgagcgtgatgagcgtgccaagaagtcggtgagcatcaacgagttcctgaaacctgctgaaggagaaaggtactacggcggccgtggccgtggaagggggggccgtggggatcgtggtggttttagaggcggatacggagggggatacagtcgtggcccagctgctgctgctccatccattgaagatcaagctcagttcccaagccttggtgggaagtgaagggcgcccagctgctgctgtcaccgagcgttgtgttgtctgctgttgtcatatttaaattttgtccgacgttacatttctgtgccacggtttaaacggaacaaataatggtgttgcatgtggctatctttggttatgtggtacttgacgttgaataccggagttgttgtttatcagaattagactccaatttttgtaggccagctttt

SEQ ID NO: 25116 - DNA, 698 bp, Zea mays
  Clone ID: LIB3689-254-B2_FLI
cacacttcgcatttgcatccatccctcgctcggttatgaaattttttaaaccccttccgatcctaaataaaacggaaatcaaccccacaaaacccctgcgtaaagagacccaattgctatctcctccagcatccacccaacggatccgcggcaaccgaccacccatgggatcgctccggggcgcggcagcctcctccgcggcgccgcgcgcgggcgacctggtgaccacgcaggttagccttggtggatttgatgccaccgtcaaggcgctcgatctcgccgacttcctcgagttgaatgcgggctcggtctggcgctgccgcctcaagacctcctggactccgccggacgcctatcccgacttccttctccccaccgtcacctccgccgccgcgccgccgccacagtacgatcgcgtgcctccgcacgccttcgtccactttgcgcgcccggagggcgcgcgcgccgccactctccgctctggcgtcgtcactggttccttgacccctgtgcgggtcggtcggtggtgctagggtcagcagttgtctggtgtctgtagcctctctggctatccgttctttggtgtgaaatggaattccaatcgtgtgggaatggatctctgttcgattgttcaattggcccatattccatctttggatcttagttttgcactaatggcgcaagccttttcgaaaacc

SEQ ID NO: 25117 - DNA, 1641 bp, Zea mays
  Clone ID: LIB3689-254-C12_FLI
ggcgtcttcgtactcgcctatctccgcgactcaaagctttccccaattcccccccttctcccatttctcaccaccgccgccgctccccccgttcaacaacaccatgagggagtgcatctcgatccacatcggccaggctggtatccaggtcggaaacgcgtgctgggagctgtactgcctcgagcatggcattcaggctgatggccagatgcccggtgacaagaccattgggggaggtgatgatgctttcaacaccttcttcagtgagactggcgctgggaagcacgtcccccgtgctgtttttgttgaccttgagcccactgtcatcgatgaggtgaggactggcacctaccgccagctcttccatcctgagcagctcatcagtggcaaggaggatgcagccaacaacttcgctcgtggtcactacaccattggcaaggagattgttgacctgtgccttgaccgcatcaggaagcttgcagataattgcactggtctccagggcttcctcgtcttcaacgctgttggtggaggaacgggctctgggcttggttctctcctcctggagcgcctgtctgttgactatggcaagaagtccaagctcggtttcaccgtgtacccatccccccaggtgtccacatccgtggttgagccatacaacagtgtcctgtccacccactctctcctcgagcacactgatgttgctgtcctgctcgacaatgaggccatctatgacatctgccgccgctcccttgacattgagcgcccaacctacaccaacctcaacaggcttgtctcccaggtcatctcatccctgacggcttccctgaggttcgatggtgctctgaacgttgatgtgaacgagttccagaccaacctggtgccctacccgaggatccacttcatgctttcgtcctacgctccagtcatttctgctgagaaggcctaccacgagcagctgtccgtggccgaaatcaccaacagcgccttcgagccatcctccatgatggccaagtgcgacccccgccatggcaagtacatggcatgctgcctcatgtaccgtggtgatgtggttcccaaggacgtgaacgctgctgtggccacaatcaagaccaagcgcaccatccagttcgtggactggtgcccgactggcttcaagtgcggaatcaactaccagcctcccagcgtcgtccccggcggtgacctggccaaggtgcagcgtgccgtgtgcatgatctccaactccaccagtgttgtggaggtcttctcccgcattgaccacaagttcgacctcatgtacgccaagcgcgccttcgtgcactggtacgtcggtgagggtatggaggagggcgagttctccgaggctcgtgaggatctggctgcgctcgagaaggactacgaggaggtcggtgctgagtttgacgagggtgaggacggcgacgagggtgacgagtactagacgctctactggcgcggcgtcgtcgggcttgtgtgccactgctatcctgtgatctgccctgagtggctcctatcgtgttatgtttctgtcggttcttatctatctgtcgttgtgtggtttacaacttacgttgtaagactttattcccccgctttgctactgggttattaagtttggcgttg

SEQ ID NO: 25118 - DNA, 1837 bp, Zea mays
  Clone ID: LIB3689-254-D9_FLI
gttgccaaggcctccgatttcgctaatgcgacgataatggcgaccacgacgtcagcgaccaccgccgccgcagcagccgccaccaccgccaagccgcgggggtcgtcgtcggccctctgccagagggtggccggcggcggcaggcggcgctccggggtggtgcggtgcgacgccgccggcgtggaggcccaggcgcaggccgtggcaaaggctgccagcgtcgccgccctcgagcagttcaagatatccgccgaccggtacatgaaggaaaggagtaccatagctgtgataggcctcagtgtacacacagcaccagtggagatgcgtgaaaaacttgctgttgcagaggaactgtggccccgtgctattcaagaactcactagcctgaaccatattgaagaggctgctgttcttagtacctgtaatagaatggaaatttatgtggtggcgctatcatggaaccgtggtatcagagaagtagtggactggatgtcgaagaaaagtggtattcccgcttccgagcttagggagcacctgttcatcttgcgaagcagtgatgccacacgccatctgtttgaggtgtcagctggccttgactctttggttctcggtgaaggacaaatccttgctcaggttaaacaagttgtgaggagtggacagaacagtggaggcttgggaaagaacatcgataggatgttcaaggatgcaatcactgctggaaagcgtgtccgcagcgagaccaacatatcatctggtgctgtttctgtcagttcagcggcggttgaactggccctgatgaagcttccgaagtctgaagcactgtcagctaggatgcttctgattggtgctggtaaaatgggaaagctagtgatcaaacatctggttgccaaaggatgcaagaaggttgttgtggtgaaccgctccgtggaaagggtggatgctattcgtgaggagatgaaagatatagagatcgtgtacaggcctctctcagacatgtatcaagctgctgctgaagctgatgtcgtgttcaccagcaccgcatctgaaacttcattgttcgcaaaagaacacgcagaggcactcccccctgtctctgatactatgggaggtgttcgcctgtttgtcgacatatctgtccccaggaatgtcagcgcatgtgtgtctgaagttggcgctgcacgagtgtacaatgtcgacgacttgaaagaggtggtggaagccaacaaggaggaccggctcaggaaagcaatggaggcgcagacaatcatcaccgaagaactgagacggttcgaggcatggagggactcgctggagaccgttccgaccatcaagaagctgaggtcgtacgcggacaggatcagggcctcggagctcgagaagtgcctgcagaaagtaggtgaggacgccctcaccaagaagatgaggagagccatcgaggagctgagcaccggcatcgttaacaagctcctccatggcccgctgcagcacctgaggtgcgacggcagcgacagccgcacccttgacgagacgctcgagaacatgcacgccctcaaccggatgttcagcctcgacatggagaaggcgatcatcgagcagaagatcaaggccaaggtggagaagacacaaaactgaggccaggaagcaatttttctaccaccattatctatatatatagcgtctccaatctcattccatttttttatcctttcactcagtgagcccttcccctgctcactgtgatcgttaactgtgtctgtgaattagagccatggcagcgtgttgtcaataacagcaatgtgtcccaattccccacagaagaaagactatatttatatgc

SEQ ID NO: 25119 - DNA, 3419 bp, Zea mays
  Clone ID: LIB3689-254-F9_FLI
ctcatccaacctcaagcttttactggagttcgcagtgctgctgcagcagcagcacacgcagcttcgtagcatcaggccagggcgtgggactcggaagagacgccaccatcggaggagctctctcctcgctgaacatcatttgagatggcagaggcagcactccttgctctctcgaagattgggtcctatttgggaggagaagcggctaccttcattgcaaccaaattttctaatttgatcgagctaccaaatactgtgaggcgtattcggagggaacttctgatgatgaacatctttatacgtaagacaggtgcatcctatctcagtgacgagctcctcaaggcttggatcacagaagtgagaatactggcctaccgtgtcgagaacataatggacaacttttcataccactctcttcaattcaagcaagaccctaaagggaaaaggttggcgaatggattaagctacggtctagtgtttagtgggattgctgctgatctagctcagatagagaaggaaatagagcatgtttcgaagttgaagaatctctggttgaactcagtccatgagcttcttcatactcaagttagcagtgctgaacagcaattccctcaatacagtttgccccaaattctaaaagatgaaaacctggtggggttaaaggaagaaagagagcagttaaaggaatggttgattcccaatgcacctgtcaacatgacaaatataccagctctcaaggtggtaactttgtcgggtatgggtgggatgggaaagaccaccctgctcactagtgtgtatgataagctgaaagacatcttcgaaatccatgcttggctcactgtctcacagacatacagaagtgtcgatactttgctgaaggagctactaaagattgttagtgcctctgagcacacaactcttgttaacaatgactatcagaaggaagtgattgtaccagttgatattgatataagagacaagaaacagctgaaaccagatgtcatcgacaagatgggcatcttagacttgaagagtactttaaaagcagtcctgaaacataagagatatattgttgtgttagatgatgtatggaatcgtcgtgttcacgatggaataagcgatgtgtttgaagattgtgggaaggaaagtcgcattgtcatcacaacaaggaaacaagatgtagctgcacttgccacaccaggttaccagctcaacctaaacccattagatatcaaagatgctctccagcttttctgtacaaaagcttttcccaacaaaaaccactttgattggacatcagtacttcttgaacatgctaaagatatgatgaagagatatgaaggtcttccattggaaaagtgcccactcgagcttcaagagcttgctactcatattgtaaggaaatgtgaggacttctcagtgtcaaagtgtccatctgagcttcaggatcttgcaacttataccgtaaacaaatttaagggattctcactatcagcatgcccatcagagcttcagaatcttgctactgatattgtaaaccattgtgaggatttacctctggtgaagtgtccatcagaacttcaggagattgctattgacattgtaaagaaatgtaggggtttgccgctggctattgtatcagtaggcagtaggttgtcttcaagaaagcaaatagtgccagtttggaggcagatgtgcaatgaacttccttgtgagctggaaaaagatgaccaggttcgaggaattctaaatcttagctactatgacttgccaagtgatcttcgaaactgcttcctgtactgcagcctgtttccggaagattaccacttctcaaaggacgatcttgtgcgactgtgggttgctgaaggatttgttgaaaagaatggggacagcactcctgaggaggtagcagagggctatcttactgagctgatccaccgtaatatgctgcaacttgtggaaaatgatgagcttggcagggtgaacacatgcaaaatgcatgacattttaagagagttggcccttcgcatctctaaagccgaaatgtttggtacagtaaatgattttggtgcaatggtgcagatggacacagatgttcgtcgcatatcttcatatggatggaagaagatgaaaaaaaataaatccaagttgaaatttccgcacctccgaaccctgatggcaagtgataccattgtggactatgtaccatcaatactatctgaatccaagtaccttactgtccttgagctccagaattctgatttccaggcactgcctacatctataggaaatctctttaatctgaaatacattggcctaagaaatacaagaataacgtcactgccagactccattaagaatctctccaatcttcaaactcttgatgtcaaatcaactagtataaaagctctgccacctggtatagtgaacctcactaagctaaggcaccttcttgctgacaaatttgctgataagaaccagtcagagtttcggtactttgtcggagtggacgctccagaagggctttcgaaccttgaagagttacagactcttgagactgtgcaagcaagcatggacttaccggaacaacttgataaccttttgcaactaaggagcctgtgggtagataacatcacttctgcccactgtgcagggctttttgctaccttatcaactatgccacttctttccagtttgcttctatctgcagctgatgaaaaggagacacttctcttgaaccatttcaatccgacttgcacgaagctccacaagctaattgtgagaggattgtggtctctaacaggttgtccgatacttcagaaccatggcaggtatctcaagtatcttgccctaagcagatgccattttgtaggagacccgctggtggttctagcatctactgtaccgaacatcacatatctgagacttaacaatatacctagtccacctactttggaccttctggaaggatccttcccacaactgaagacgctagttttgaagaacatgaatgatgtcagccttctgaaaattagtagcggtgcacttccagtcatagaatgtctatatatcacatcactgcccaaattgcagacagtccctcgaggcatcaaatccttgagctccttgaaaaagctctggctgctgggtctccacagtaacttcaaggctcgatgggacatggagggactgcagaaggatctacagcatgttctggagatacgtacctaacagcagaagctttgtttttgtgtttgtcaaacgtgattgctctttctgtagtaaaagtgtcctagaatgcaactgtatccacttcaaaatccatcaagtttgcagttagacattagggattggtgcatttgtggatcatttgtcagatgattgtttccgaaataataattccgaaaacatggtttact

SEQ ID NO: 25120 - DNA, 1204 bp, Zea mays
  Clone ID: LIB3689-255-B3_FLI
gtcgatgcttctctcgcgaaggttctcctgcgccctcgcccgcgccccgtcgctcgtacggggccggccccttcctccctgcgccgcccgcaccacccctccggctcccagctctccgccccgccgcctcatgtcgtcctcctctgccgggtggcagcactcctcgcaccgtcccccgccgccgccgccgcctcctcctcatcccggtgctgacaaggaccagctgttcagggggctggaggcggcgctgggcaccgcgttcagctccgagccgctggcgccgccaccgcagcctatgatcctcgtcatcagcgggcccagcggtgtcggcaaggacgccgtcatcaagaggctgcaggaggagagggaagggatccatttcgttgtcaccgcgacaagcagggcgatgaggccaggtgaagttgaagggaaagactattactttgtcagtaaggaggaatttctgacgatgattgagagggaggagttgctcgagtatgctcttgtttatggggagtacaaggggatccccaaacagcagattcgtgactacatggctaaaggctgtgacattgttctgagagtggacattcaaggagcagcgacgttaagacagatacttggtgaatctgcggttttcatatttttagttgctgagagtgaagaggcacttgttaaaaggctaatccaccgtaaaacagaaacatcagatatgcttcttgtcagagttgcaacagccagggaggaggtgaaacacatgaagaatttcgactatgtggttgtaaacgctcaagggaaacttgaggaggctgttaaacaagtggaatctatcattgatgctgagaagtctaaaattcacaagcggcatgtcaatatctaagctaaggatcatgtgatttatgcctagtgtcttcatctctataaaggaaaattatctgtccaagtctactgaagcgtgatgaaatgactcaggtttcagtagccagaaagttcaatggattgctgagttacaagaatatggcatgttctgtttaagaaatttccctcaccacaaccggggcagcacaatctctgggatatatacacgactctcttgttatttgtctctttttttccctttgattttttagctctgcctggaggaatctggaaggctgtaccaaactagttctgggtgaatcttaagtgatgttctatccttctc

SEQ ID NO: 25121 - DNA, 1251 bp, Zea mays
  Clone ID: LIB3689-255-C5_FLI
accggaaaccagaggtctatgcctttctgaggagcaagttgttagaacggtgagttctttgttgcgtttctctgctgatttgactactaccacaggtaaagtataagggatgcatgtactgagtgatataattcgtccagatcttaaaaagaccacagattggaccaggaaacagaatcttagatatgattataggaccatacaagctgtctcggcggtgtgaagtgactgcaatccttatattatatggtctgccaaggtaaactagcccttacatttaatttttttctcgattgttttattgaggtcatcattcaaggtttctgccacttccattgtgaatgaacctttaatggatcctgaagtcgtgatgttcttatgtttgaagcataactaggtagatctacttcttgtttatatgatggttacgcagattacaaactggttccattcttgcccatgagatgatgcatgcatatcttcgtctcaaaggtaatttatttatgctaatacttttttgtgattcacatgtatcactatcactttctgcactaattttcttccaaaaaagatagacagttgctactgttgttgctgacatgattttctctttttaggattccgaaaccttagtattgaggttgaagaaggcatctgccaagttttatcccacctgtggttagagtcggaaatcatcgctggttctagtagcaacgttgcatccagttcagaagcatcatcatcttcatcatcctcagctcctacctcttcaaagaagggtgcgaagaccgaattcgagaagaagcttggggcattcatcaagcaccagatcgaaacggattcttccgaggcatacggaggtggttttagagctggctatccggctgttgagcgctatggcttgaaaagaacccttgatcatatgaagttgacagggtctttcccatattaaagcaacagaagtaaaggagggggctttcttccagttgtgaggatacactccacattggaggttttggtttgggttatacatatactgatatgcataccaaacgaggggaattgtctgtaaatcaggagaaccctctgctgcgcggaaacttattgcaaactgtctttttataggaaaacgatacatgcaagttttcagacagggaacttgagaggatcatatgtaatttttgggcacttgtttttgactcctttggttatcaaaaacaaggcaacataataagattgaaatttatcttc

SEQ ID NO: 25122 - DNA, 1369 bp, Zea mays
  Clone ID: LIB3689-255-E1_FLI
gctaccgcttcgccgaattccctgtcctccgcccgcttcgccgaattccctgtcctccgcccgcttcgccgaatttcctctcctccccgcccgccgcccgtcaccgcggcttcgtctgcgcttgtccctcccgttccaaggagcacgtgcttctcgccgcgccgttcgcccgccgccgccgccaccggttcatcgccagctatgtcttctcaggtcgacagccgcagccagtccgccgggaagcgcgcgcgcaccgacggcagccggcgtgaggacgactgggtttgccccagctgcaagaacgttaacttcgcctttcgcaccacttgcaacatgcgcaactgcaaccagtccaggccagcagatcacacggccatgcagaccccgcctcgctatcccacatcaggaggttacatgagcccagggacgccaccgtcgatgtaccttggtggtggtgctcccccatatggctcttcaatgtttaacgggcctgcaatgacgcgctatggtatcacacagttccctgggggttctgcgtatccatatggatatggtggccgcatatcaatggggagcccctacgggccaatgcaaatggctgggccaaccgcatactctggtggatctatgatgggagcaggtggaatgtatggaatgcccatggacaggtatgggctaatacctgctggttctggtccaatgggcacgagagctggctcatattctgatgaagattctcagaagaagtctgcaggagctggccgtgataatgattgggagtgtccaaattgccacaacatcaactttggcttccgcacagtctgtaatatgagaaagtgcaacacacctagacctgaaaaccagggatctaagcctgatggtttaagagggtcaaaaccaaagacaccagagggcagttggaagtgtgagcagtgcaataacataaactatcctttccgaacgaaatgcaatcgtccccaatgtggagcagaaaagccatcacagacgaacaatgcaaatgaatcagcggaagatcaggacaatcagtgagtcctagaacagtaatgagggtcaagaaggtccagcgtcgtcgtcaaggttcagtctgaatgtggggtacatctgtgtcagtagtcgccgttacaagtttcttccccttgagaacttagttgagtcggggccttggagttggcaatggagtcttgccttccttaatcactgcggataatggtcaagaacatcaatttgttatgtggtttgtcaagaacatccatcttgcctttcctggctgaacttggttacttgtctttgttactggtactctggataaattaccatatgttatatgaatgtcttttatatgtgtcat

SEQ ID NO: 25123 - DNA, 789 bp, Zea mays
  Clone ID: LIB3689-255-G2_FLI
caggatggcacatgattattggtgggcttcctttgctagtgatatctgttcttaatcatgatcctgctctgagtggccatattcaagatcttacatggagcgacatattagcacttggttatacatctatatttggcagtgctgtcagctacggtgtatacttctacaatgctactaggggtagcttaaccacacttagttctctcactttcttgacccccatgtttgcatccgttttcgggtacctgtacctgggtgagaccttctcaccagtacagattggtggtgcgcttctcacactggttgccatctacatggttaactacaaaagcattataggtgagaaataagaggctatcacgtacttgtgcgacgtctatcacataagggtggttgggtgctgcatgcagcacctatagccacttgttgggttcaggaatctgaagattaagtacagtcgtgtagactcgggcaaattatcagattggagagagatgtgctctgtttctggtctagactgtaaatgcagtataaagtggcacaaaaccaaataggtttcatcagctccttcgacaatcctattagattgcctggttatgtctgcttctaggttacccagccacctgtatctctgttatgcgtagctgagagaattataatttataggatgtttccgaattgtagttgctacgcattatcttctagggaggtaggggatggaccccccaacccgtgttgcaatggtcagaaacatggtatcagttgcaaggaagaaggctcgtttgtgtc

SEQ ID NO: 25124 - DNA, 2217 bp, Zea mays
  Clone ID: LIB3689-256-D8_FLI
cacgcagtcaccgcagcgggatataaagataaaagaggtgtgtggagcgggagaaggccggactgaaggaggaagacgagcagggagagggaggtagggcaaaaggaagagaatccgagaataaattcagagagggagggagggagggccatgatgatggcaggcgtggcgtcgtaggtggttaaagcgaagggcgcccctcgtcgtccggtctatgagctggtaccagaactgctcataatattcagggggaaaaaaaggcaacatggcggaatcgaaggtcgcaagtctggatgcccgaacgacgaagatcagaaacgtccccatcgcagtgaccccagaagggttctggtgctgcccgtcgcaagccgtgctccagaagacggcgaagagccaaaacccgcaggcgaagacgaagcccagagggggtgcctcgcctctcgcaccaaaggcggcaccaccaatccagagggcgcccacaatctcgtccgagagaaggacgcactcgactccgaccagggcgaaaaccaactcagaggagcagaggtgcttgccgccggcagaggacgctgcggctaataataacgccactaatccgcccaaggcagtgaacgagaggccacagaagcagcacaaggtatctgttgggttcggccagctcgagacgagtgacttgaaggtggtgctgtatggcaaggacggcgttgcggtgaagatgagcgtccacaagaacacccttgctggaaacagcaccttctttgctgacaagctctccgggcagtctccggtgtcgagtatagaagtgcctgactgtgaggatgtggagatttatgtcgagactgttgggttgatgtactgcagtgatgtcaagcagaggcttatcaagcaaaccgttcctcgtgttcttcgagtcttgaaggttgcagagctgctgggtttcccagcatgtgtcatgtcatgcttagactacttggaagcggtcccttgggtcggggaagaagaggagaatgtggtctcgtctgtccggaacctgcagagcgagaactatggcgtcagtcctgtgctgaagagggtagcaccatctgatcgaacaaccccaccaaacgatacgttttcacatatcatcgaactggtcttgagaagcagcgaggacagggggcggcgcgagatgaaatctctggtgcagaagcttctgaaggagagtagcactggctgcatgagtgggtcttccgacctgtgttctgcggtcctctacagatcatgccggaactgcctggattccttactaatcctgtttcagcaagcaaccgacagtgatttcgctgagcaggctcttaataccaaagaaccagttttccgacaagttgctctagaagcagataacctgctctggttagctgagatcttggctgacaggaatgccgctgacgagttcgcggtcatatgggctagccaacgtgagctggctgggctgcactctaggttgccagtcaagtcgcgccaccttgtcagctgtgtcacggcgaggctgttcgtgggcatcgggaaaggggagatgcttccttcgaaggacacgaggcggcttctcttggacgtctggttgcagcctctcatggatgactacaactggttgcagcacggctgcaggtcgttcgaccggaaagtggtggaggaaggtgttgggcggaccatcctgacgctccctttggaggatcagcagacgatcctgctctcgtggcttgggagcttcctgaaggttggggacagctgccccaatctccagaaggcctttgaggtttggtggaggagaactttcgtaaggccctatgctgagcagcaaggtaatcgatcgcaatcaggtcggagttgagatgtcaattggttgcagaagaagatagtcttgtttcctagtgtagtatatttgatgagaagttagggtggcggtttcttcttgcgtggtagcccgcgtgggagatccccagtatgtggaggaaatgcggttagtactcttgacctgcgtgaggcttgaggaagttcgcgttgtgcttgtgatgcttcgtatgtatgtcaagatctctgaattctgggtgcagaatttgtatcgtcaggcatctgttttgatgctctgttctgcttctcacaacgttgcacgatgttaattaaggatctgttatgtaaaagaactcgacgccttcaatgcaactgtaaagattttgc

SEQ ID NO: 25125 - DNA, 1266 bp, Zea mays
  Clone ID: LIB3689-256-E1_FLI
gcgacacgcacgtctccctcccctagtcccctcttcgccgtccgggtcgggtgtttgcgaagcgagacaagccaccggtcgccgcgcgactagggtttggttgcgatggagccggcctcctcgtccgcgcttccttctcctcctccggccgaggcgaggcggacgccgccggaggagctgaagctgcggcggaggacgcttgagacggtgctggagcagtgccagcgcgcgctcgagatgatgcatgaggacggtctggggacggctgcggagggggcaagcttcaaggaggtggaggtggaggaggaggaggaggaggaggagggcagcggcgacagcggcggggtcgagagggcgccgcccccaccgccctcggaggccgactacgaggcggacgagctatgcaatcttctgaaatcaagggttcaatcgcctgaatttctcgagaagctagatactcttcagaagtcagtatatcaacatggtgcagtggatgaaacagtatcatgggatattataagtgcggcagatatatgggatgataagagtatgaacgttagtgatgattcagaggacggatatgttcttgttaagcaagaggacatagtcgatggtattgcatgcttcatggctgcatacttgctgtcgctgaaacaaactaaggacctgacacccaaccaacttcaacaagctcttagcaagacattttcagctaaaaagaggaaaagcaaactgcagaaggcatgggatggaacgaaagttgtttataatatagcatcatggagcgcgacggctattggtatctaccagaatcctgcgattgtgcaagcagcaactgcagccttctggacatcctgtcgtgtaatatccaagtttctgtgactagtcatggctggacctggacggtgcaaatatgcaaacattgtgtggctgtggcctctccgtttctaaagatcaaccgaagatgaaaaaagttgccaaactccgtggcgtgcttagattatgatgtaaataggctgcaagttcgttgattgatttaacagcgacatcagttactggtgatgagcaatatggggctgttcgacagtatctcacccatataatctaaaggtatgaatggacacaccaccatctatttgccaataccagctgtatccgacaatcaagaaccgatgtacataagccctcccgcgcaacattggtatatcagtgtgattgtaaatatttcgattcatttgaataaattcgctcgcatgtgtttcaccc

SEQ ID NO: 25126 - DNA, 2322 bp, Zea mays
  Clone ID: LIB3689-256-E6_FLI
gcgtgcgctccttcgccgactgggcgaccgccgccgccggcctcgcccaggtctccgtccggccctacgacaggttccatcgggcccttagccggcgacaagcaccaccagagactgattaggagttcgaggagcaaatcaattcgtaccaaatataaccaagcttacatggctaagccatgtgattcatcacatcatggagttgtggacaatagctccaatggatcccaggctaggcgtgaggaagctgggaaacttggtccatcgtggtatttcagtagaagggaaatagaggaaaactctccatccaggagggatggcatcgatttgaagaaagagtctagcattcggaagttatattgcaagtttctacaagagttgggcatggcgcttaaaatgccccaagtgacgattgccacagcaatggtattctgtcatcgtttttaccttcgtcaatcccttgcaaaaaatgatagacgaataatcgcaactgtttgtatattcttggctggaaaagttgaagaaacacctaaacctttgaaggatgtcatcgtggtttcttacgggattattaataagaatgatcctaaggctagtcagagaatcaagcaacagaaggaaatctatgataaacaaaaagaacttattttacttggagagcgagttgtacttgtaacacttgggtttgaccttaatattaaccatgcctataagcccttggttgaagcaataaggagattcaatattgataaaagaagtccacttcctcaggttgcctggaattttgtaaatgatgggctgcgtacttcgctttgcctgcagtttgagcctcatcatattgcagctggtgctatctatttggctgctaaatttctcaaagtgaatctcccatctgatggtgataagatttggtggcaggattttgatgtcacgccacgacaacttgaagaggttagcagtcaattgctggagttgtatgagcaaaaccgtacaacgcaggcacaatcatcacagggaagtgaagcggaggggagctctgctggtgtgtgtaatcaacgttcaactgtaaagtctgaagcgaactccaaggaaccatctgctcatggtcatcttcaggcatccagaccgccaaatttgcagcactcgtcctcaacaggtgcttcaggtcaccatgacgatgggcagtcaaattcagacaagcatatttctggccacaaaatgcttcaaaatgacaattttaaccatggtggtagcagagaaaagaacaaaagtggaaccaaaactggtactgttatggacaaattgcacaatgacaaaaagttctcgcctggacatcattattccaaggccagccatgagtctcataatccagtggaagaacatcaaccacatggatcagatgataattccaatgaaacaagagatggtgttggtggcaatgaagctcctgttgtgtcaacatccagaatggatgcgatgaataaaattgacaaggataaggtaaaagcagctttggagaagcgaaggaaatcgaaaggtggttttgccacgaaggtaaatgtgattgatgatgatgatctacttgagagagagctagaacaaggtgttgagttggctgttgagtttgagaagattaatcaagataagaagcagaactcgtccgatggtagcatgcatccaccagaccttgaaaacgctgacgaattaatggagaatggccaccatgtcaagcagagtctaccaacgacagctgaagacatgggctgtccgatggacagtaaagaacgacatcctccagcacttcataagcaaaatgatgtttctgagcacaagtcacagcagcttgatgacacattgaaacaccaaaagagctgtgatcatcctcaacctgtaggaagccctgagcaggatggaaaagactacaagaggcctaagcttgacggataggtttatatatatgattttggatgggttttctggaagctgacaagcaatttggtgccggattcattgtatgatgacgtatacatgttgatgagcacgtgtcttcttcgctggtgcctgaagaagtgaagatgccgcgccacaaaattgctgtgctgcggagagcaccaagatgatgcgccccacaactgattgcagcttacagtttgaggaaagtcgggcagcaattattgttaggttccaacaaacattggaatataatatatatatgaacgaaacatgctgtcgcgcttctggtatcagctgcattcgtttcttgtatgtaatgttctggttaaagcgatggaaaggttttatcaaggtcgcaaatattaatgc

SEQ ID NO: 25127 - DNA, 1074 bp, Zea mays
  Clone ID: LIB3689-256-E7_FLI
cagaaagacacggcagagtcgtctttcccgacgcaaaagtcgacgacgcgtgcgccttgctcgctcgctcgccgtctgccgtcgttctaggtttagagccaggtcaccagcgctaggagggcgcgaagtcgagtagacggccgggcctctcccgttctccacggacggctagcgctactggaggcgacgcctggacggcgaccccgcacactcacagccacaccctccacctgtgtgactattcaagggcttaggccgagccgcccggccaatcgccgtccgccggaccgctgaggaatttttctttctcgtcaaaagttactgcattcattttacagtaatggctatggggttgattaatgctaatcctataatccatgagaaaaaagagaggcgtgccagacaggcaccagagaccacagatgaaaatgcagcagagcccatagatcagctggaaatatttgatcacattagagatataaaggatccagagcacccgtactcactggaacagctgaatgtggtgactgaagattcaattgaactcaatgatgaaagtaattatgtcagggttacattcaccccaacagtggagcactgcagtatggcaactattattggcctttgcatacgcgtgaaacttgtacggagtctccctcctcgttacaaggtggacataagggttgcccctggatcacatgcaactgaagctgctgtgaataagcaactgaacgacaaagaacgtgttgcggctgcattggagaacccaaacctactggacatggtcgaagagtgcttatcaccaacatttgattgaggcctgaatatcaatatatcggtgtgacatggtgttgatgttcaggagccacacatgctcattgccaatggagttcactcctgtctttcgagaaccaaaatgccttgggtgttaagtgacgtgttgcatgatttttttcctccgccccgttcagttattatatatgctactatggcgctaccctttttggacgtttttggtgcttgtgacctcactgatcaatgcgagatgtaatcagctcttgtgctgtagctttc

SEQ ID NO: 25128 - DNA, 1002 bp, Zea mays
  Clone ID: LIB3689-256-F4_FLI
gaggaattccatatttgtgtggcgaggcaagccgtgcgacaagtgccagatgtacgatgaaatgattgaatcggagagcgtcaccgtttgtgtggattatcaagtcaggcaaataacggtcacttggtcgtggaagggcttcttattgcagtcatagtgttccagctctccaggaagagttacaaaccaccaaagaagccactcactgaaaagtgccgctggaccacatacgattgttgatggtaaagaagttgtgaactttgcatcagcaaactacctcagtttaattggcaacgaaaagattattgattcttgcatcagttcattggagaaatatggtgttggttcttgtggtccatgtggcttttatggaacaactgatgtccatcttgactgtgagtcaaagatagctaaatttttggggactccagactccattctttattcatatgggatttctacaatattcaatgtgatacctgccttctgtaagaaaggagatatcatagtcgctgatgagggtgttcactgggcagtgaaaatggtctccatctatcaagaagcactgtggtgtacttcaagcacaatgatatggcttcacttgcaagcactttggaaaaacttactcgtggaaataaacgtgctgaaaagattagacgctacattgttgtagaatccatttaccagaattctggccaaattgcccccttggatgagattgtcaggttgaaggagaaatatcgattccgtgttattctggaggagagtcattcttttggggtgcttggcaagtctgggcgtggccttgctgaacattatggagttcctgtgagtgtttggcctcagcttttcttaatgtttcaccataatgccccacctgtggtgtctgaccggggtgcgttgttacctagctcccaaacgaggcctaactgtttggtgaaatgcttgggacaaagtggccatcaagaatggagtcatggaacatcagcaggacactacaag

SEQ ID NO: 25129 - DNA, 2698 bp, Zea mays
  Clone ID: LIB3689-256-H1_FLI
ccagaacccagatcaagaaccccgaaatcccagcgagcgagtcttttttgctcctcagcgttgaggaactcgtcgacgtttcggcgcgctggttcgagcatcttgtttgggatcccaggaagttcgttacttggaacttctgtcccgaggaagggcgcgcggttcgatgctggggcggagcagcggcttgcgacactcagatctggtgtgaggaggagatgccggtggtgacacggtcgcggctctccgccgcccgcggcgacggcgcgggcgcgctgccgtggggctcggcgtcggcggcgccggctctgaggcacgacgccggggcgccgcgggaaggcgtcgcgagcaagaaccaccaccaccaccacgggctcaaggagaagctgcgcgcactcacccaggactacgagcagcagaagcagaagctcgccgcgtcgcagctccgccgcagcatccggtgcctcaacgcgtgggaggcgatcaacgacgagaacgccgaggaggaggaggacggcggcagggtggccaagttccgctacgacgccttcgctcaggtccccgagtccgcggtgctgagggagaacgtggcgccaccgcaggcgcgagcaccgtccaacgacggcgccgtgctcgcgcggacgactgaaccgcaggcgaaggagaacgcggtgggccgcggcgccaacgccatgtcctgccccaccaagaaggcggtaccggcgctcccggtgcttccggtgccaccggcgaggaaactctctttgggaggggctgtgggcggcaagctgaaggccgccggggaggtcggggccggcactgccgaggcggcggagagccggatcctcgtgttcgtgaggctgcgccccatgtcgaggaaggagaaggaggccgggtcgaggagttgcgtcaagatcgtcaacaggaaggaggtgttcctcacggagtccgcctcagagaacgactacctccggctgaagcgtggccgcgattcccatttctgcttcgactcggttttccctgattctacgacacaggcagaagtctacagcacctcaacagcagaccttgtggagggtgttctgcaaggtaggaatgggacagtgttctgctatggagctacaggggctggcaagacctacaccatgcttgggacaatggaaaaccccggggtaatggtgcttgcaataaatgatttgttctccaaggtgacgcagaagaaccactcaattaagctgtcatacctcgagatatacaatgagacggtgagggatttgctgtctcctggtagcccccttaacctgagagaagataagcagggaattgttgctgctggtcttacccaaagaagtgtatactccacggacgaggtcatggagttacttcagaaaggcaacaagaatcgaacaactgaaccgactcgagtaaacgagacctcatcgcgttctcatgcagtactgcaggttgtcgtagaatacagatccttggatggagttaacgtaaaacgagctgggaaactatctctcatcgatcttgctggatccgaaagagctctggcaacagatcaacgcacgcagaggtcaatcgaaggagcaaacattaaccgctctcttcttgcactcagcagctgcattaacgcccttgtggagggcaagaagcacataccgtatcgcaattccaagctgacccaactcctcaaggactcgcttggaggagcatgcaacaccgtcatgatcgccaacattagcccctctaacctttccttcggcgagacacagaacacgcttcactgggctgatcgtgccaaggagataaaaacaaagacgcaacaaaccactgtgaatgaggaggttctggaccaaccagactctgaaactatgcttgtactggagctccagaaggaaaaccgcgtgctgagggagcagttggcgaagcaacaacagaaattactgactgccgaggctcagctactcacttcaaaaacctcgccacaacgatctcctgctcccccgtctcacgtctcaactccaggatcaactcaaaggaagaccagacgatctatcttggctgctggtggtgggaactacttcagcaaactggactcaaagaggcatgcagccgacaacgcgcaggtcagggagctgcagaggaaagtgagcacgttggagtccgagatcgagaagatgaaaaaggagcacctactgcagctgaagcggaaggacgagttcatccgtgacttgatcaacaggaaggatcctaataacaacagtgaagagacagcaacaggtgatagaagagttgtcacgagggcgagcgtgcgaaaggcacagagagatgcatcagccgcaggcgagctgaaaagccccagccgggtgttcacatcaccagcgccaaccgcaaagaagcgtactttctgggacatcggaggcaacagcccttcagttcttgctgccaacggaagaaagactcgaagccatgtggcaacagagacaccaaagaaagcatcatccaaactgcttcagccaggatttgcacggcaaacatcgccccatcaaagattcacatgaaagactgcctacagctcattaattactaattggagtttagtcgaaatacatcgtaatgctttttagtttttttatccatattgagttattgaaactgttttttttaaattaacttgaggcagggttttcct

SEQ ID NO: 25130 - DNA, 2581 bp, Zea mays
  Clone ID: LIB3689-257-A11_FLI
gaaatgcgaaaggcagccgaggccgcgagccgacgcacgcggctcgttgcttcctccatcccctttcctcacgccgacgccaaagtataccaacgaattcctcctcgggctcccacctaatcgtgttcgccgcctgcctctcccaaaccctagcaacccacgatcgaacccaaatccgctcctcccacccgaggaattatgcgaaattccccgagatcctagcccagcactagcagatcgatccatcgcttgcccacctgccggccaccaacccttgtagtctcagtcaatctgtagattgagactacgatgagcctgtcaccgctcgactcctcctccccgccggccgcggctgcggctgctgctacggaggtgcccctcgccccgggcttccgcttccaccccaccgacgaggagctcgtctcctactacctccgccgccgcgtcctcggccgccgcctccgcgtcgacgccatcgccgagatcgacctctaccgcctcgagccctgggacctcccctccctctcccgcatccgcagccgcgacgcccagtggtacttcttcgcccgtctcgaccgcaaggtcgccggcgctggcgccgggggccggggcggtcccggcaacaggaccaaccgcgctacgccgagggggtactggaagaccacgggcaaggaccgcgaggtgcaccaccgcggcaagcccgtcgggatgaagaagacgctcgtcttccacgccgggagggcgcctaagggcgagaggaccaactgggtcatgcacgagtaccgcctcctcgatgcagacggacctcaggatctgcatgtggtttgtagaatcttccagaagcatgggtctggaccacagaacggtgcgcagtatggtgcaccatacatggaagaggaatgggaagaggatgatgatgctattgagaatggttctacccacgatgcatctggtcaaattgctgcaaccacctgtgctgtagatgaggagtcaaatgaggacgatgagaatgcatattgtgaaacaaacagacctgctcgagtagaaccatctcatctgccttcggtccatgaaatgctcaatccaccagagatggctcctctccaaggtcaagattctaaagagacaagcgatggaagttgttctgatgttgctatttctctggaagagattttgcaggaacctttgtcaaatattagtgtggagaatatgcatagacttgaagggcagaatgccactgatgataacatcagtgttgataacttgttatcagcatatcccacgaaagataatggctacgtaggccagtataacactatgaatgggagtgctccagcagatgaagctcacgcacgctggcctttgagaacatatagtaatcagaattatgtcaatggccctcttgctgatgagttctttgacacagggaatgataccaatggggttgcatattccaggcagcagcaagctgatggcttcccagcacctcgccaagttgatgaaagtatggtattttatgatgccccatctgattacaacttggtggatggaaaagatgacttcgtatatctgaacgacattctgaatgagccacttggaaatgaatcgctctttgatggagatgatatgatggcttactttgatgccacagagaatgatttcaagtatgacattttgggctctggtcagggtttggattatccacttgcagacatgccgttgaactttgcccaaaagagtgacaaggaagacaagtttacattcgaagggatctctgaggttccggaagcaaatcctcagtacggtgcatcctcatctggttcacatgaagatctgtatactgatactgaatttctaggtgtgccaacagatgacactgctgataaaacttacggaaatcgcctggccagcatgttaggctctatcccagctccacctgcaatggcctcagaattcccgccgtcaacagggaaatctgctgggatgctttcggctgtcagctcgagctcaattcgttttactgctggtatcatccaacttgatggcctcactttcagcagcggctccggtcagtggcccttgcagaagaatggagacttgagtttgcttgtctcttttgctgtggagggcgacgtggcatccaagctccctgttggtcttgggcgtgctactcggattagcaccgttcccatggtgctgcgcagtggtttttaccttttctttatgtcggccatgattctcttgtttagctacaaagtagggtcgtgtatctacagcaggtaagttgaagttgatggcgcctcttgtccggccagacctgtgggctgtttattttagttcaacacgtggatcattccctcagtgatgggggtatagcagtcgttcgacaccttttttacacatttaccattttgacctgtcaaaacatacagcaataaactttcgaactggtggtggtgatcatgccgggaccatgttctcgtcagggaaagcagtgcactgtgaatttggtgctctgctcttattattgtaaccaaaattaactgcaatatgttatattctgtcctgtagaggaaaagct

SEQ ID NO: 25131 - DNA, 1530 bp, Zea mays
  Clone ID: LIB3689-257-B6_FLI
cgacgcgcctctgaaagttcggagccgccggcccgtccgcctccctctccgcctcccgtccccaaggccaatagttttcaagtggcaatggcggaccaggctaaccaacccactgtccttcataagctcggtggccagttccacctgcgctcgatcatctctgaaggtgtacgggcccgtaacatatgcccatctgtctcatcttatgaaaggagatttgccacaaggaactacatgacccagagcctttggggcccttcaatgtctgttagcggtggcatcaatgtcccagtgatgcagaccccgctctgtgctaatgctcctgctgagaaaggaggcaagaacttcatgattgatttcatgatgggcggtgtttcagctgctgtttcaaagactgctgctgctcccatcgagcgtgtgaagctgcttattcagaaccaagatgagatgattaagtctggtaggctatcagagccgtacaagggtattgttgactgcttcaaacgtaccattaaggatgaaggtttctcttccttgtggaggggtaacactgctaatgttattcgttacttccctactcaggctttgaactttgcatttaaggactacttcaagaggttgttcaacttcaagaaggatagggatggctattggaagtggtttgctggcaacctggcctctggtggtgctgctggtgcttcctctttgttttttgtgtactccctggactacgcgagaacaaggttggctaatgacgcgaaggctgccaagggaggaggtgaaaggcagttcaatgggcttgtcgatgtctaccgcaagacactcaagtctgatggtattgctgggctttaccgtggatttaacatctcctgtgttggaatcattgtttatcgtggtctgtactttgggctctatgattccatcaagccagttgtccttactggcaacctccaggacaatttctttgccagtttcgctctgggttggctgatcactaatggtgctggtcttgcatcttaccccatcgataccgtccgcagaaggatgatgatgacatctggtgaggctgtcaagtacaagagctccttggacgcgttccagcagattcttaagaaggaagggcccaagtccctgttcaagggtgctggtgctaacattcttcgtgccattgctggtgctggtgtgctttctggctatgaccagctccagatcctcttcttcggaaagaagtacggctccggcggtgcttaaatggagaaatatgatgacgaacaagagcagtgtgtgttcccggtcctttccaatcaggatctggtgaagtttttgcctttcatatcgaagaaattaataattcatgtagagggaggattcttccaacaatttgttttggatggagacttagatctccaaacactcgtaactatcctactaggtggtgacatcggtccccaaaaacatttatggtcatagagtctgcccttcgtttgtcagtcgggcaatttttcttgcatacaatgccttcgtttaagt

SEQ ID NO: 25132 - DNA, 1736 bp, Zea mays
  Clone ID: LIB3689-257-B9_FLI
cgctctcaagcttcaaaatcccactagcgaaaggaaaacgggagaagctaggaagcagcagccgcggcatttcttccttgagcgttcgccttcggctgctcaacgcgtgcttggtttcaggagagccttggtggcatctctgtttcatggccgagatctgctgtgaggcggcggcggcggggtcggaccagaagggggagtgcgccggcagccgcgcggcgcggcggcggaggatggagattcggcggctcagggtggtggccgaggaggcgtccgccaagaggcggaggctggaggcggatgaggaagacgcggttgggaggcgagcgccgaggtacggcgtgacgtcggtctgcgggcggcggagagacatggaggacgcggtgaccgcccgtccggagttcatcaacggccaccacttcttcggggtgttcgacggtcacggctgctcacatgtggcgacgtcgtgcggggagcggatgcaccagattgtggccgaggaggcgacagctgccgcaggctcgtcggtttcggacgagaccgcgcggtggaggggtgtcatggagaagagctacgcgaggatggacgccgaggccgtcgtctccagggagaccgccggcccggcgcccacctgccgttgcgagatgcagcttcccaagtgcgaccacgtgggctccactgccgtcgtggccgtggtggggcctcgccacctcgtcgtcgccaactgcggcgactcccgcgcggtcctctccagcggaggcgccacgatccctctctcagctgaccacaagcctgaccgccccgacgagctcgaacggatccacgcagcgggagggcgcgtcatcttctgggacggcgcccgcgtcttcggcatgctcgccatgtcccgagccatcggtgacagctacctgaaaccgttcgtgatctccgacccggaggtgcgggtggtggagaggaaggacggcgaggacgagttcctgatcctggccagcgacgggctgtgggacgtggtgagcaacgaggtggcgtgcaaggtcgtgcgcacctgcctccggaacagggcgccacgcggtggccgggagcagtcgagcccgacctccaacctgagccctaggcagagcagcgccagcggcggcagcagcagcagcagcggggacgaggaggctggtgcgcccagcggcgacggcgcggggtccgagagcgacggcgagagcggcgaggacagggcgtgcgccgaggcggcgatcctgctgaccaagctagcgctggcgcggcagagcgccgacaacgtcagcgtcgtcgtcgtcaacctcaggcggcgcccgcgatcgtgatcggtggtggctctgtgatggactagccgttcttggttggtttggtttcctggccccgtccgtaagttcaaatgggagcccagttcaccttcgcttcggccgagcaaatcattggacaagatgtcaaagcgaagatcgaacaaaatagtgagatctgagatccttagcaaaattgcatgctacttccttttacagtagtacagcaggactattgtttcgttagcgttttttttatgggtgggtggagggtgcgtttctgatctggtcggacagatcatcccgcctttcttcccccggtaaattatccaaatagaaaagcgcatgcgtctccgatgtttgaagaaactttaccgtgcgtccgagagatttaattgtaatatatagtccagtgcccctttcact

SEQ ID NO: 25133 - DNA, 1838 bp, Zea mays
  Clone ID: LIB3689-257-D4_FLI
cgattgagtcggacgcactctgccatgacgaaacgggagaggaaggatccaggtcgcatgacaagcttgggatccctgaccaagcagccgaatctatcatgggttccgcccggaggattctgcaaagcaaagaagtgcaattggaggatccatgcatcacaattgcctgatggtaaaacttggcaggtaaagaagatgtcaaagaggcactactgcaggagcagaagcaagatggagaagaattgcatggccaatcagtattgggttagagacaaggtagtgccgatgcttagggaaaatcctaacctaggtgctggagctctggtgaaaaagctacaagagaaatatctcatccaggtttcatattgtgttgcatggaaaggaaaggagctagcacttgatgagctgatgggcaaatgggaagacagctttgaccatatctatgctttcaaggctgcaatagagaaggagtctcctggtagtgtagtggagatacaaacagagaaggttggggaaaagatcagattctgcaaaatgtttgttgcattcaaggcttgtattgatggttttttgcaagggtgcaggccctatttaggcattgactcaactgtgctcacaggtaggtggaaaggccaacttgcttctgcagttgcaatagatggccacaattggatgtttcctgtggcacttgggctgtttgaatctgaaagtaaggatagttggaaatggttcatggagaagttgcagacagctataggatcaccccatggtctagtaatatccacagatgcaggaaaaggcatagacagtgcattaaccaatgccttcaacaatggtgttgagcaccgagaatgtgtgagacatctatttaagaattttcagaaaaggtttcatggtgaagtgtttgaaagaaacctttggccagcagcaagagcatataggaggacagtccatgataagcactataatatcatgaaaatagcatcacctgcagccattaagtggttggaagacactcacaaacatttgtgggccagatgttatttttctacagcaagcaagtgtgactatgtaaccaataatattgctgaaacgtttaactgttggattaaagatgagaagtctttaccaccagtggagctaattgatagaatcaggcaaaagattttggagaagttttttgtgaggaagaaccttgcagataagttgactggcacaattttaccatctgtcatgaaacaacttcatgatgctggcagaggtttggttggttatgtggttcacaagggtcctgatcatacagctgaagtgtctggtgttcataaggatttgactccatggagacacactattgatctggtaaatagggagtgcagctgcaagaaatggcagctaactggtttgccttgcactcatgcattgagcgttataggttgtttcaggaacctgaaattggaagattatgttgactcctactactctgtggaaaaattcaagactgcttatgttgggaagatacctactttgacagataagactgagtgggagcaaccagaggtaggttacaaggtatggcctcccatactaaagagagctgctggtagccaaggacaagaaggttcattggagtagaatgagggtcggggaaaaagaggcacaaatgcaagagatgtggtcagtttggtcaccaaatgaggacatgtaatgaaccagtatatgactcagatgcaccaccaccaactgctccaaagcctaagagggtgagacagaagaaaaagaaggtggtggtggtagaagatgatcctctgtcattgcctgcaccatcaagtccagtgtag

SEQ ID NO: 25134 - DNA, 1078 bp, Zea mays
  Clone ID: LIB3689-257-F6_FLI
gcgagcagggcgagctgttggactcagccttatctagtcaacgcatccactcacttcctttcgtcctcctgctctctgtgtgtgccacgcaagcgccctatccaccattagagtcgctcgttctacaacgacgtgctagctagccgatggctacgaccacgaaaccactcagatcgtccgctgctctgccgcacggggatgctggatcggatcgatccagtttaggagcattggaataacatatcttgtattcaagtgcaagtattgtaaggaacaatggaaggagggcggtgctactcgttttagacaataccttacatcacgtggacgaaatgtgcaaggttgtcgcaacgttccgtcggacgtttgcaattactttcgacgggagcttgacaagggacaatatagaagggaaagcaagaatactggaggaggtatgaaagttagcattggcgggttcacctcaatgatgacgatgttgagttgcaggtcgcattacatgctttaagagatgaggaggaacttaggaggcatgcttgcgcgagtagtggcacgtatgagagggtgatggctcctcccatgggggtgttcatggcatgtttggaagaacaccttttaggaaggagaaaccacgcatggtccgaccaaggattgataaggcctcgttttcgaaggcagtaaggaatgacgtccatttcattggtaagcctattggacccccgagtctggtagtgatagacaaggttcatcttcaccccttcttccctatatcaattatccaattggtgaagtgactcagtaacccatgaggtgggtgtatcaatgggaggagcctgagtactaaatattaatggactcatggagtacgacttctgcgtggaccagacagacttggacggagtacaagggaatgttgatgtgtgagcaaggtattatattattctcatcggaagggtataatgtgacatatgatcaatggaatgcttacccgtgggcatgatgttcaccggagggtgtattgtatctttgatgctattcatgaactatgaaattgtggcattaatgtatttgcacttct

SEQ ID NO: 25135 - DNA, 357 bp, Zea mays
  Clone ID: LIB3689-257-G3_FLI
cttttccccgccgattcgttccaccaccgcaaacatctatcccagtagccctacacggagagagctgcaaaggcaatccagtgatcggcactatgaacgacctcatgaccaagtccttcatgagctacgtcgacctgaagaaggcggcgatgaaggacctggaggcggcgggcgacgggatcgagctcccggaggcgggcgccggcggcgtcacggacgagcgcctgcgcgggttcttccaggaggcggaggcggtgaaggcggagatggcggccatccgcgacgcgctcgaccgcctgcacgccgccaacgaggagggcaagtcgctgcgccaggtggacgccctccgcgcgcacc

SEQ ID NO: 25136 - DNA, 2276 bp, Zea mays
  Clone ID: LIB3689-257-G5_FLI
ccaactcgcagcgtcccacgccggtgaccccgctgggcggcagaaggagacgtcgggtgccgcggagcgccgcggagcgccgccgccgtccaagctgcctccctcggctggtggactgtatcactgctcctcagacacccgctgttctgtccggcaacgtgcctccgccgcaaacccgctcgatcagcctgaggcatcgcacgatttctgactcatactttatcgccaattggctggggtggagcacatctctacccggacttgatagattccaatccttcccaactcaacgttgggcagatggcgcagatccccaatcttgacaacgcgccgctcaaccttgcggccctcagggagcagtcgcagaaggacttgttcggcatcctaaaaaatataaggggaaagaagtgcttggttatagatcccaagctcgctgggactctctcattggtcgtgcagacatcgctgctaaaggagtatggcgcggaagtgcggattctctctcccgaacccctgcagacggaatgccccaaaattgtatatcttgtgcgctctcagctgaggttcatgaagttcatcgcaagtcaaatcaagaacgatgaacctaaagggctccagagggaatacttcctttactttgtacctcgccgcactgttgcttgtgagaagatcctggaggaagagaaagttcatcagaaactgacattcggagaatatcccttatatctagttccattggatgatgatgtcttgtctcttgaacttgaccattctttgcaggaatgccttattgaaggagatacaagttctatctggcatgttgctaaagcgatccataaattagagtttgcctttggagttatcccgaatgttagggccaagggtgtggcgtcaaccaaagctgcagagttgttgaatagtatgcaactagaggatccagtcaacatggatgatatggggattccagagataaacactgttattctgttagacagagaggtggacatggtaacaccaatgtgctctcagttgacgtatgaaggcttgttggatgagatgctacaaattaataatggttcagtggaagttgatgcaagcatcattggagctcaacaagatgggaaaaaggttaaggttccactgaattcaagcgataagttgtacaaggagattcgagacctcaattttgaagttgtagttcaggttttacgtcaaaaagcaacatctattcagcaagattatgcagaagtgaaatccaccaacactcagtctgtttcggagctcaaggattttgtgaggaggttgcactcgctaccggagatagctaggcatgttcatttggcacaacacttgcaatcgttcacggggaaaccctcctttcatgcccgactagacatagaacaaacaatactggaggttcagaactttgaaatatgctttgagtacattgaggagatgatacataagcaggaagttattgaaaacgtccttcgccttttggtgttactttctcttacaaatgccgggcttccaaagaagaattttgattacatgaggcgggagatacttcatagttatggctttgagcacatgcacttattatacaatctggagaaggctggccttcttaagaggcaggaatcaagaagcaattgggttggtattacaagagcactgcagcttatagttgacgtaaatgatacagcaaaccctactgatatatcctacatcttttctggatacgcacctcttagtattcgccttgttcagcatgcagtgagatctggatggcggtctattgaagaactgttgaaactattgccaggcccacatctggatttgaaaagaggtggtttgacaattaattcatcaccggaggtacatccaggtttaggggctcaacagagtattgacagggttggtcatcgctctctggttttggttgtattcattggtggtgtcacatttgctgagattgctgcccttcgcttccttagtgcacaggaaggaatgggctacgactttcttgttgcaacaacaaaggttgtcaatggaaacacaatactcagacccattatagcaaatagcaaagaggggatgatgtaattttattccttttctgtgcatgtgttttttgtaattgcaattgcagacaaacccaagcttgtgggttttcttgtttggctgtgagttcgtgtttggtcagcaactggacgataaggctaaccacgcttgttgatagatggaatccaacagtcccattttttgttctgttc

SEQ ID NO: 25137 - DNA, 762 bp, Zea mays
  Clone ID: LIB3689-257-H3_FLI
caacaggcaacagcccagccgctgtcgccctcgttccgtagtacggcgccgccagatcgtcagtcaccatgatcatctccaagaagaaccgccgcgagatctgcaaatacctcttccatgagggggtcttgtacgccaagaaggactacaacctggccaagcaccccaagcttgatgtgcccaacttggaggtgattaagctcatgcagagcttcaagtcgaaggagtatgtgagggaaaccttctcatggcagtactactactggtacctcaccaacgatggcattgagcacctccgcagcttcctcaacctgccatcagaggttgtgcctaataccctcaagaagtcttccaagcccccgtctcgccccttcggctctggcccacctggtgaccgccccaggggccctcctcgttatgaaggtgacaggcctaggtttggtgatagggatggttacagaggaggtccacgtggcgctccaggtgactttggtggtgataagggtggtgctcctgcagatttccaaccatcttttaggggtagcagacctggctttggccgcggtggcggcggtgctttcggtgctggtggatcttccatggagtgatgtgtcaacatgagctagcataacattcgtctttgaactatgagaacaatgagattttgttttgttttaccgagctgttgccgtgggttgacatggttttgtgatcgtttttgtttagatgaaattattgaaatcaagcagcgagttatcagtc

SEQ ID NO: 25138 - DNA, 1497 bp, Zea mays
  Clone ID: LIB3689-258-A10_FLI
gttggcttctcctccccctccggttcgggttcgggttcgtgaggttctccggggttcggtttcgtgggtgggcggatcgagatggcggcgtcggatgttgagtaccgctgcttcgtcggcggcctcgcctgggccacggacgaccactccctccacaacgccttcagcacctacggcgaggtcctcgagtccaagatcatcctctcaactctaaggtcgtctcccagtactccacccttctctcgcccctcgccgtcgacgccgccctctccgtggtggatcccgctcaccctgaccttctcgacctccgtgacatccgcatcatcaagaagcttggtggcaccgtggacgatactgagcttgtcactggcctcatttttgacaagaaggctagccatgctgctggggggccaactcgggtagagaatgccaagatcgctgtcatacagttccaaatctcaccacctaagactgacattgagcagagtgtcattgtatcggactatgcacagatggaccgcatactacgtgaggagcgcaattatatcctcgggatggtcaagaagatcaaagctgctggatgcaatgttttgctcattcagaagagcatcttgcgcgacgcggtcactgacttgtctctgcactatcttgctaaggcaaagattctggtggtgaaggacgtggagagggatgagatggagttcatcaccaagaccctaaactgtcttcccattgccaacattgagcacttccgcacggataagcttgggtatgcagacgttgttgaggaaatctctgttggggagggcaaggttgtgaagatcactggtatcagggacatgggtaggaccgccactgtagttgtcaggggctcgaaccagttggttattgatgaagctgaacgtagtctccatgatgccctctgtgtcataaggtgcttggtcaacaagaggtttttgattgctggtggtggtgctccagaaatagagatgtcaatgcagctggctgcttgggcaaaggagcttcgagggatggagagttactgcattaaggagtttgctgacgcacttgaggtcatcccttacacactggctgagaatgctgggctcaacccaatctccattgtcaccgaactcaggaatcgtcacgccagaggtgagaagaacgctggcatcaacgtcaggaaagggcagatcacaaacatcttggaggagaatgtcgtgcagcctttgctggtgagcacaagtgccattacgctggcctgcgagtgtgtcaggatgatcttgaagattgatgacattgtcactgttaggtgagagcatgaagtcggtggtttggtcagattgctctgttctgtctggattgatagtagttaggttactacttagtgtagaacttctattcacgggcgtgtttcaatgttttaaacacaatgttagtacggagaggacagtaatgtacccatccttgcatgacactaccagggttgcatctgct

SEQ ID NO: 25139 - DNA, 1985 bp, Zea mays
  Clone ID: LIB3689-258-D1_FLI
gtcggttaaaccggccaatcctcctctcaagcctcgacgcagcacggcgcgccggcgcgggacgacggcatgacgccgccgtccatcttccaccaccatcgctgcctcgtctccctcccctccgcttccccgacctggacctcgtcccgtcgcctgtccgctggacgaggtcctcgtgcagtacgtgctagaccacttcgtcacgctgaggttcgtcagccccacgttcaccgtgctccctggccttatccctgcaagatcctaagcggaggtgacacacactgccccccgtaattctaaatcaagcattctcttgacgaagtctatgcggcgtagagcccgcccatgctctttgcttgctctagagctctcgtaccctgcattgattctgctcatcagtctgcatctttcgtcattttcatcatggatcatcatattgcaggtatatattaatttacctgcgaggatgtggtgtctgcaatcacctctctttctttctttgtgctgaccataataagctactcccaggatggagtcactttgcgcaatttacaatagctctaattaataaagaccctaagaaatctaagtattcagatacactgcatcggttttggaagaaagagcatgattaggggtgttaaaagtttatggagctgtcagaattacatgatggctttattgttcaggattctcttaccatcaaagcccaagttcaagtcattagggagaagatagaccgtccatttcgttgccttgatggtcagtaccgaagggaactaattagggtgtatctatcaaatgtggaacaaatttatcggtgttttattgatgaaaaagaaggacgttcagcaggctgattgaggataaactcgggtggtccagtttcagtggattctggctagccatttttcatctttgattttatctgaacagagacttgaactcgctatcaactttcagtagacctgctaaggagcgatctccgtccaattatcagccagtgaatttatgccctgtaccatgaatagagatagtcaagaaattagaccatttcaagttcagcgagagggactatatggcactggaggcgtctttcttagagtgattgaaaatacaatctacctcaaaactaataacatcgtcagagggaggaagatcagcttgcgtattggtgaagagaggatccttggttgaaagtgatgtttctccatatctttataaggttaaggaagagcagttggggttcttgtgaaacgtagattgtatgaggtctataaatttttatgctctatcattacttgaatgaatcatgtatcactggcaagcaacttcagctcatactctgtaggaattctaattcacattgcattctatttaattgtttgttttatgttccgttcacacgaccatgatttttgtttgcacaaatcactatatatatcctcgttgaattaaaagtccagctttgtgtcataagcatattgtctatttccccttttggctattgcaaatagcaagtatagtttgttgtttaaatgttagtctattctgtttcaagaaaaaaagaatgcgccatcgctggggatgggtacgatgatcaagatcgtcgaacgacgaagggcaccgaggtgttcgtcagcgggctgccaatgtcgaccacggaaagcatgctcctctctcatctccacaccgtgcagtagctgctgcccgtagcatgtaatgcaatggaataagttatcaagggctcttccaacagctacgccatcaagaagaaggacgagattgagcgtgttgccaaggccaaccgttgagtggagcttgtatcctggtgcacttgcactagtactacgtttctggcagtcgtattttttcttgtgtttttacccatgtttagactttgagacctatatctaaggttttggttctcagtgaacaatgaaaattactgtgaaatgcagttgttttggtgcagaaatgcgcac

SEQ ID NO: 25140 - DNA, 2243 bp, Zea mays
  Clone ID: LIB3689-258-D4_FLI
cattaatttaccaggcacaaagagaaagtatgatgttatggcctcacctgcaaaatcaatatcaagcccaaatccaatgtctcctccacgcttttgtctatctcctaaaggaaacggcttttgcaactcaaagatggctcctagcactccagtgagcacagccatgacaactgccaagtggcttcggaatacagtatctccccttccatcaagaccttctggggaactgttgcgcttcttctcggcctgtgacaaggatctaacagatgacattgcacacagagctgggattatacttggagccatattcacgagcagttcttttggtgaacgaatctgtactagtatgcgaagcgcaagtaggatggatgctatctggacagagcaaagaaaaatggaagctcttaagctatattatagggtcctcgaatctatgtgtagggcagagtcacagatcttgagtgggaacaatcttacatcacttttgtctaatgaacgtttccatcggtgtatgattgcatgttctgcggagttagttcttgcaactcacaagactgtcactatgatgttcccagctgtgttggagaagactggcattacagcatttgacttgagtaaagtcatagagggttttgttcggcatgaagatacactcccaagagagttaaagcgccatctgaattctcttgaggaacggcttctggaaagcatggcatgggagaaagggtcatcaatgtacaattccttaatcgttgcgaggccggcactgtctgtagaaataagccggttaggtttactggctgaaccaatgccatcgcttgatgcaattgcagcacatcataacatctcattgggtggcctgccgcctcttcccttccagaaacaggagcgtttgcaagacaaagatgaagtcaggtctcccaaaagggcatgcactgagaggagaaacgtgctggtggacagcaattcattgcggtcaccagtgaaggatattattaaaccaaagttaccacctctccaatcagcttttgcaagtccaacaaggccgaatcctgcagcgggaggcgaaacgtgtgcagagacaggtataggcgtgttctttagcaagatatcgaagctcgcagccattagaatcagaagtctctgtgaaagactgcagcttccccagcaagttctggaacgggtgtattcccttgtgcagcaaatccttagccaacagactggccttttcttcaacaggcacattgaccagatcatactatgcagcatatatggagttgccaagatctctcaactggaactttcattcaaggagattattttcggctacaggaaacaacctcagtgcaagccacaagttttccgaagcgtgtatgttcattggcccccaagaagccgtaacgggaaaacaggagaagaccacgttgacatcatcactttctacaacgaagtattcattcctgccgtcaagtccttgttggtggaggtagggcctggcgccagcccaaagaagaaagaagaggaaaaaggtcctgctgatgtaggtccattcccagaatctccccggttggctcggttcccgaacctccccgacatgtctccaaagaaggtttctgctacccataacgtgtacgtctcaccgctacggtcatcgaagatggacactctgctgtccccgagctccaagagctactacgcgtgcgtcggcgagagcacctacgcgttccagagcccctccaaggacctgaaggctatcaacaaccgcctaaacagtgtgtccggcgggaagaaagtcagcggccggctgaacttcgacgtcgtcagcgatctggtcgtggccagtagcctcggcagtgaccgtgacgccaagcctgcggccgatcctgccaagacgacgccggtgaagtgcgagccatctgactcgtgatcgtcgtcgactctgacgaggcccttgttagattgttatgtttcagatactcgtgagttagtagatggtaactagacgaggcccttgtttctgtttgcgtcttttctttttttttgacgtgggaaacatctctgcgagcagctctacgttgtgtaaaatatatataaagaaagctgccccgatggctccccttaacccaactcgcgttgtagggagatgacaagcaccatggccatgtaacttcatagaggttttgagagagttgtgtaaaaatgcaagatggtcgttgaggtaacacaacagcggatcttttgtt

SEQ ID NO: 25141 - DNA, 1043 bp, Zea mays
  Clone ID: LIB3689-258-H2_FLI
caccgttgcacgcccacatcctctcttcttttctccccctcccgcttcctttttttcccctcgttctatttggtttggattggaagcttctcgagttgtccccgcggccaaggtcacgcacacccacccacctggacctggtgcccgccgtgtaggcctctcggccttcgtcgtcctccagccccaggcggagcacgaggcggcggacgtacgggctcgacggaggcgagctgcaggccgagcgacagccccggtcgaccaggaagacgcattcagaagagaacatcgatcgatcgcggagaattccccgggtatagctgacgacgatccatgcttgtggcggccggatcagttcgcccgtccaaccgggattgctagtccaggtagaagcgcaggacgaggcagcggcagcgtgagcgacgccacgacccaagcggacggcaataatggacgctaaccactcgccgccggcgcagccggagaggcatcatggcagcttcaactacgacatcgagagcacggacggcacgtggcgcggcgcgggggcgtggcaggagcaggacccatcgtcggaggccctgctgcggtacgacgacgacggcccccgggagccgctgctgcgaaggcgcaccatgaacaccacctcccagattgccatcgtcggcgccaacatctgccccatcgagagcctcgactacgaaattgtggaaaatgaccttttcaagcaggattggcgatcaagaaagaagcagcagatattccagtatattgttctgaaatggtcattagttcttcttattggcctgtgtactggacttgttggcttcttcaataaccttgcagttgaaaacattgctgggttcaagttgttgcttacaagtgatctgatgctcaagcaaaggtacttcacagcatttctggcatatggaggttgcaatctagtcttggcagctgctgctgcagcgatctgcgcttacatagcacctgctgctgctgggtctggtatccctgaagttaaagcataccttaatggagttgagtgc

SEQ ID NO: 25142 - DNA, 931 bp, Zea mays
  Clone ID: LIB3689-259-E9_FLI
ctctgctggtctccctcttccacctctggtcttggccatggcctccagcgcctcccggttcatcaagtgcgtcacagtgggggacggcgccgtgggaaagacctgcatgctcatctgctacaccagcaacaagttccccactgattacatacccactgtcttcgataacttcagtgcaaacgtggtagtcgacggtaccacggtgaacttgggcctttgggatactgcagggcaggaagattacaacagactgaggccactgagctaccgcggagcagatgtgttcgtgctcgccttctcgcttgtcagccgagctagctacgagaatgttatgaagaagtggctaccggagcttcagcattatgcaccgggggtccccatagtgttggccggaactaaattggatcttcgtgaagacaggcactacttagttgaccatcctggtgcggtacctgttactacagcacagggggaggaactgcgcaagcacattggcgcaacttgctacatcgaatgcagctcaaaaactcagcagaatgtgaaagctgtgtttgatgctgccatcaaggtagtaatcaggcctccgacgaagcagcgagaaaggaagaaaaagaaagaacggcgaggatgctcaatattctgcagccgtatcatgcacgcaagaagactaggatgcttcaagtgatagaaggccttcttcgacgataacgtaggcttctaagatgaatcgagatcgtgtatagtttgtctccatgttccaaagtgctcgttgcgcttgtgcacttgggctggtaatgtgtatatttagtctttgccaattgatatttaggagaaatattaagcacttcgtttatgtaccattggctcataatgagctgggaagtccaatacatactaagaagtaacaatattttcttccgatgattttatt

SEQ ID NO: 25143 - DNA, 1568 bp, Zea mays
  Clone ID: LIB3689-259-H10_FLI
ggcctatgttcccatcgagtcgagacgagaccgtcctccgcccgagtctcgctcgctagctagggtttccaccaatggcggcgcccaccacctcccgccgcggccccggcggcgcgcgcaacatggacgacgagaacctaaccttcgagacctccccgggggtcgaggtcgtcagcagcttcgaccagatgggcatcaaggacgacctcctccgcggcatctacggctacggtttcgagaagccctccgccatccagcagcgcgccgtgctccccatcatcaacggccgcgacgtcatcgcgcaggcccagtccggtaccggcaagacgtccatgatctccctcaccgtctgccagatcgtcgacaccgccgtgcgcgaggtgcaggctttgattctctcgcctactagggagcttgcttcccaaacagagagagttatgctggctattggggaccacctcaacgtccaagtgcacgcttgcattggtggaaagagtattggtgaggacatcaggaggctcgagaatggggtgcatgtcgtctctggaactccaggcagagtctgtgatatgatcaagaggaggacactgcggaccagagccatcaagcttctagttctggatgaagctgatgagatgttgagtagaggctttaaggatcagatttacgatgtctacagatatctccctccagaacttcaggtggttttgatctctgcaactcttcctcatgagatcttggagatgactagtaagttcatgaccgaaccggttaggatccttgtgaagcgtgatgagctgaccctggagggcatcaaacaattctttgttgctgttgagaaagaggagtggaagtttgatacactttgtgatctttatgatacactcaccatcacccaagctgttattttctgcaatactaagagaaaggtggattggctcactgaaaaaatgcgtacaaataacttcaccgtatcagctatgcatggtgacatgccccaacaagaaagggatgccattatgggtgagttcaggtctggcgcaactcgtgtgctaataactacagatgtttgggctcgaggactggacgttcagcaggtttcacttgtcataaattatgatctcccaaataatcgtgagctttacatccatcgcattggtcgttctggtcgttttgggcgcaagggtgtggcgatcaatttcgtgcgcaaggatgacatccgtatactgagagatatagagcagtactacagcacacaaattgacgagatgccaatgaatgttgctgatcttatttgagcagcaagaggatcgggaggggagcttcttgtgttggcttgaggcccttggcgctagtgtggctgtggactggagcagatgggctttgtagttgggggtggagcagagattatttccgtttttgccatggcatgaactgtatatattttagctcgctccagctcatgtaacactttgttgctgcgtttgtgcttgggacacgaagacctgtgttgatggcttcgttagtgtgacactgatttggcgtcggatttttgtttgtcatctgtc
